United States Patent Application Publication US 2007/0083945 A1 - sequence listing, part 29

SEQ ID NO: 196207 - DNA, 463 bp, Glycine max
  unsure (1)..(463): unsure at all n locations
tggatacgtgttccactcagaaatggtagtttgttgtattggctngaaccaccttgtgaggctcttggtatatgcttttcacatattggcacaagtcctcacccaccacatcgatcccattgtgactgctaaaataatgcttgtaacccatccgaactatgagctttatatctcctcatctcgcgagaatggtctgttggatttccatcgactttaactacttaccaatcgccaataactcatgagcctcatgtctggggaaagaggcagtgaaacaaaacgaggtatattgaccatcatcagtgaataacttcttgaagaaggcactaatataagcttcaagatcatctacactggatatccattcttcttgctcgctttgatatacatccaccctatttttctctatgtgaataacagtcatactgttacacatggcattacatataattctcataataaa

SEQ ID NO: 196208 - DNA, 453 bp, Glycine max
agcttgcttctacaataagagcattggcttcactcttgtcaacccagaagaacaaaaaataatatataagggaaaagtcaataattctgaagtcacgttgcacacactcaattaaaagttgttgtcccttgtgatgggcgcgtggggtgctaataccttctgatgcaatcctaccccataatggtattggatagaagactccaagtatattgtgccagagatgcaagataaggccctaggattctcatgagccttatgggagatttcgggcccatggactaaatatgatcccacttatctttgtacatatttgattaggatttcattattttcggtgcttatatctaaggctccataatagatgtccgtaccctcgaaatgtaagatgtttcaacccttgcatttatggcacttatactaattcttgattatgggtagtctgaatttacatca

SEQ ID NO: 196209 - DNA, 308 bp, Glycine max
gtatgctgcaaacatatataatagacagcgtgttcttctttactgagaacaaccgaattattattaccgtgtacgctacatatacaatacaggctggaggaatcatctatatctaagatgagacaagtcctccacaatacaatagcttgtccctcctttacaaatgctgctggttcaagcaatccatatgttactcctgcaatacatcatctgcatctgcatctgtcacatcaaagacaacaagcatattatgctcctactcaaccgttcttagaagagtactgaggatatgaccattcagaatatgc

SEQ ID NO: 196210 - DNA, 452 bp, Glycine max
  unsure (1)..(452): unsure at all n locations
agctntaatccatggctagatggaggatttaagatggtgatttgagggcgattcatttcttanaaatcatcagaaataatttaaaaatgttagctttattaattgctttcagtggacatattcccgaacctccaacatttatattggagaagactttttcccacactattgtgaccatttgttccccaaccaaacaaaattgtttatacaatgatctagatctttcattagtgcagagggtcattcataaaagaaaaatctatgaattaacataccttgaacaactgaatttaccaattgaggaaattccctttaattcatgagccttctcaagaggataacttccctgtaattctatccataataacttgggagtgcatctggataaagcatttcaaatgaggaaaatcattgtttggatgttgttttcatgaagaatntaaatntttgga

SEQ ID NO: 196211 - DNA, 426 bp, Glycine max
ttctataagtcctaaatgacatttcagactaggattatctcattgttacctctatttaccactgaatccagatttagccttgcaactctcaaagcctcactctttttccactcataacaccacattctcactttctaatgctaagttaactctacccttcatctgtaacagttttccataagcaatttcagcacacaaacatcacaagcatcatcataaaaaccctataacagaatgggcaagcttgactcacaccaaacatggcaagttcaacatgctttcaacaaatctgttcacagataactatcacaaagcataaaccaagtgaaactacccatcatatctgccaaagctccatacccacgaaaatgtatgtgagaagaagtctacccaaacctgatatttcgaagtgccacacgtagagat

SEQ ID NO: 196212 - DNA, 341 bp, Glycine max
  unsure (1)..(341): unsure at all n locations
gcttgaccaggaattattagtatgggtatgatgntttattctggnngctcctggcgccgagatgatggtgcanacggtgaaccacgagctgaaatctctttcggtgaggtagccattgaaaagcagatcgtctgaaatgatttcgtaaatctctgagagctgtttatgaatgctgaaaacaagattaccacgaatatataaatttgaatgaagaatgtttagggacgtgtgaagcaacggncgaatttgctttggctcactaacgaacgtgctattattgttaagggattcgtttgggcacgttcaaatattaatagttgcttcaattcctctatcagaca

SEQ ID NO: 196213 - DNA, 358 bp, Glycine max
gatctgacataatcctcatgcagtcaaggcatgaaggctgatattctgtaaccacaatcagaaaacatagattatgacccaatcacctaaaaacctatcaaatacattacataatacatatttacatgtttactccatccacaaacctgcatctgcgtagtggcaatcttaaatgctcgagtcatgacagtaatagtagaattaaacccagagttatgaggtggcatatggccaccagaatcagcccctgtgcccgacgaatgcaccgcgtttccatcggtacccgattcggacttgtacacaaccacaaacgactcctccatgtgcttacctggctgtgcagaatcatcatccgctt

SEQ ID NO: 196214 - DNA, 83 bp, Glycine max
tagcttgctcctacttctcacacttctgatattaatgttgacttggcccgtctcatatacggcttggcgacgaagatagacct

SEQ ID NO: 196215 - DNA, 516 bp, Glycine max
  unsure (1)..(516): unsure at all n locations
aagtcaccagaggcatgcaagcttcacaatgagataagtcagtgaattttattntttgtgttatatgggcattcacattattataattgagccaagtcttcacagcatagaccactagaattagaacaaagaatcgttgtagactaacttgcagtttccactacaatgcaggcgtataaaacaagctcccttgacaaaattaaacttgtaactgggccccacaaaggcttgtttgataagttattttaaagtttacgaaccattcaacattgagggattaatgtaagcaatatacgtctccatgatctagaacatatatattttttaatacagatgaattacatgtggacttctttcaggtattgtcaggccatctttagggatgactactgagtaattaattaaagttgagaaaagtaacgtgaaatacacattatacaacaaaataacactatattgtgagaatgtagagcataccatgttaccagtatatagctaaacaacacatgtatatta

SEQ ID NO: 196216 - DNA, 467 bp, Glycine max
  unsure (1)..(467): unsure at all n locations
agctnntctagctttcattggagtatntttatctccttttggtgctctaaattgngggaatgtgctcaaatatatggggcaattttggtttgttttcttgcttgattaggttgaattangggtttgtatgggatggccctaagcctataatgcattttggaacaatgggacattgtccccgttctcttgctattgacgcctaaacgcgcgcccactaagtgttcggtgaaatgcctcaatgacattagcgcgtgacttttgtaaagaaacaacccatggggcattttggtttgtacatatnttctatttttggaatatgtattcattcccgacaaaggctagagtaattgccccacatatattctacgcctatgaattaaaatttatgcanaaaaacacaagtggagggcatattgtgtaagtaccctttttgccgcaatcactgtggccacctcaatatttcctac

SEQ ID NO: 196217 - DNA, 475 bp, Glycine max
tgacactaatatactaagcttcttacatattccgcctttgctagaccttctttatgctttaaaacttaaacattaggcataggcaaaagatcaagaggagttagtggattaaaaccataaacaacttcaaaaggagaacaatttgtggtgctatgaacagctctattgtaagcaaattcaacatggggtaaacaagacttccaagtttttaagttcttcctcaaaactgtcctaagcaaagttcccaaagtcctattaacaacttccgtttgcccatcggtttgtgggtgacaagtggttgaaaataacaatttattgcccaacttgctccacatagtcctccaaaatttgtttatgaacttatagtccctatcactaacaatgctccttggcagaccatggagtctcacaatctccttgaaaacatattatccacatgggatgcatcatcaaactttgttacatgaataaaatg

SEQ ID NO: 196218 - DNA, 323 bp, Glycine max
  unsure (1)..(323): unsure at all n locations
gcagcatgcaaccgaaggaaaagagagatatcctcttntntacagagagacccttggcacaagcttcagacaaaagaaggacacacacgcccaaattatacaggtacacgagacacctgatgccaatgccaccacagatatggcgaacgtgaaaagaccctagcctacgaagagatcctctagctccaaaaagggtgaagctaggtacaaaagaaccaagctcttttatacccaaacgctcattacgtgacagagaaataaggtgaaaggcctctctattgaggcacctgcggcacagacccataactctaacaaactgaagc

SEQ ID NO: 196219 - DNA, 456 bp, Glycine max
  unsure (1)..(456): unsure at all n locations
agctnntgtcactccacccatatcttgctttcaaattcaccaaagctaacacccctgacaaccgtgtatacttagtgcatccgacatacaacggtgtctttgaatcattatctaactcttcataatatggtgcatgtgtttgcctaaaaccctcttgtccaagatcgcgtagcatgtcttctatacgatcaccaacttcttcatgaaatccaacatttccaggggttgatgacatttctgataactcaccatgccatatccatcttgtataagtaggacagataccatcacatatcagatgtgttctaatgtcatccaaagattttcgtcgaccattcaaacatttcacacatggacagaagtataccccacgaaagtctnggagcatttgtttggcaaattgcaagaaatcttcaaccccattctcgtactcttcanngtatgcgtggtctttca

SEQ ID NO: 196220 - DNA, 444 bp, Glycine max
  unsure (1)..(444): unsure at all n locations
tataagttggcggtaaaatgtgccaaaaaagtttaattgntttgggtaaaattcaccaaaaaaatttgggtgccaaaatttggcaaaaaaataaaaaaagttgtggggtaaaaagtgcaattatgttaggggtaaaatgacagagggtaaaattcacaagttttttaaaagttgggggtaaaacgtgcaattaagcataaaaaaaaactagatttagaatttccgtattatatgataccaatccctgatccagcttacaagattcatctcacattgaataatagcaaggccaatattaaattttttatgtattgtggcatcatgaaattcagaaaatgtgtgaattctatcaattattttctcctattcatgtctaaatatttgttaacaacaattttaacatggatattgttcatgcgtaacatgagtataataggttgacat

SEQ ID NO: 196221 - DNA, 466 bp, Glycine max
agcttgagggtcaagggatatttattattttttggtttacaatgttcaactttctcactgacttgttgacttcattggacttgggagtttatgtgttatggaaggtgcttttctgcctctcgttaatgttatactcatgctgatttcttttatcattggagtcaatggcatggtatgttttgtacataagagtactactacttggtggttttatatgttcacatgaacaattttgtttgaatggaacattattgtttgagattcttaaggtgtgtttgaatggcggatttggagatcgaagcatagggtttggttttggttttcatttctgaattgagagaattatatgatgatgtgtataatagtgaataaggagtgactgggaggttatgagatagtttctatgaacaaagtatgacaaaattatttcatcattggatttggtggggatctttgaccctatgtc

SEQ ID NO: 196222 - DNA, 362 bp, Glycine max
tgcttgtgggacttctatggaggctggatcttttttcttattgaagtcctttaatggtgattttccaccatggagatgcagcggaagacaaaggagaagaggtgataggatgcaccatccactatggaataagccatggaagaaggagcttcaccaccaatatgagccttggataagatgcttggagaggatgattcaatggaggaaaagaaagagggagagaaagagagaggggggagcacgaaattgaaggaagataaagggagagaagttgaactttgagttgtatctcacaagactctcattcatcaaagttacaacaagtgttacacatgcttctatttatagactacgtagctttc

SEQ ID NO: 196223 - DNA, 491 bp, Glycine max
  unsure (1)..(491): unsure at all n locations
tgcatgaagcttaatcaattactgctattattttttttctttcaannatctaataacctctgcacatataaatttcatgatgagaagtcacctacacgtcagagaatataaagcttgtgaaataaaagtgtcaatatgtgtagtgtatacactggggcgtcgaatatttaaagataagaatcaacaagattgaaaggctaatatatcctctataacaaaatcacaaccacacaatttgtatgctccttataaagaatcctaacgcctaaggtacacactcaacacaagaacacatcatatttacaacaaattcgcatcgaaacaccaattggtccatctaacacactatattcgtgatttaaacataacaacacatagtttgagcttcataaaacatttcaaaataacccaanaattgatcctcgatgtagtcctcaagcgtatttgttacatgacattttgaggttttatagctctcttcatagctctgt

SEQ ID NO: 196224 - DNA, 486 bp, Glycine max
  unsure (1)..(486): unsure at all n locations
agcttgtgaaacaagaaccttttggacttctatgtataatacttctaagcagccaacaactccttcacttcaattcaaatatataacactcgaattcagcaaaaccctttattagcttttcgcaattaggaaaccaaataaattcacccaattcctatgaatgggaataaaaatgtggcaagttaatcggaacgctaaaggacgtccacacaaaaattaaattatttagcaggctttattcgtcaataatcactcactgtataaaagacttgattnttacatattgcatttcaaatattttgtgtttccttattgtaaaatttcaagcaatatgtagcacgcatttttacatccacatgcatgtaacaatcttggtttacanttttttgttcatttgtctctgagcaaaaaaatactgtctccccaagcaaacagcttcaaatgctaatatcaacagaatcaagaaacacagagatgaacatgcat

SEQ ID NO: 196225 - DNA, 360 bp, Glycine max
tgcagcgtcagttgcataaaatatgaccatattttctttgtttggagctcattttccttcaatgtgtagatgttaaaaagcaatttataagagaactctgttgattatctcctatataagaaaaagtagtacaattgtgattcaaacttctgtcactttaaacagaatagatactcttttgatgtaggattagatagtgataatagggaaaataaattgcggctttgctctatggcctttctatatatttctcttttattgcaacttcaaagttatttgagcctgaaagagggtgttggtatggtggattgaaatgaaagtgaatatgtattttccatatgggtctttatcggtatttat

SEQ ID NO: 196226 - DNA, 390 bp, Glycine max
  unsure (1)..(390): unsure at all n locations
agcttctaaggaagttgtctcattanatcttctcaaggaagctacctagtctataaatagaagcatgtgtaacacttgttgtaactctgatgaatgagagtcttgtgagacatacttcaaagttccacttctctccctcttttattccttcaatttcgtgatcccccctctctctttctctccctctttcttttcctccattgaagcattcttccaagcttcttatccaaggctcatcttggtggtgaaactccttcttccatggcttattccctagtggatggcgcctcctctcacctcttctcctttgtcttccgctgcatctggaaaatcaccattaaaggacctcattgaagctcacatatccagcctccatagaagccccacaag

SEQ ID NO: 196227 - DNA, 440 bp, Glycine max
acacttatatactaagcttctagtttagatgatgcagatgggtttgtagtttcttcatgcactcctctaatgactatggcatcatttctggcgctaaactgctgggagttggaagccatcttctcaattaaatttctggctttagcaggagtcatgtctccaatggctccaccactggcagcatctatcatacttctctccatattactgagtccttcataaaaatattggagaagaagctgttctgaaatctgatggtgggggcaactggcacatagtttcttaaatctctcccaatactcatacaggctctctccactgagttgtctaatacctgaaatattcttcctgatggctgtggtcccgtaagcacaggaaaatttctctattaatactcctttaaggtcatcccagctcgtgatggaccttggacaaagtaa

SEQ ID NO: 196228 - DNA, 211 bp, Glycine max
aatttccttctacgataaatatttggaagaatctcttgaaatgcgtaatcttctggaagagaattaagaggatcatggagcgcgccccaccaccatattaggtgttcgagagcattatttcactggaagggtatgaatatttatctacttagagctaacactatgttgtgaatagaaccctgtattacttaaaatattattgtgtgttaca

SEQ ID NO: 196229 - DNA, 432 bp, Glycine max
  unsure (1)..(432): unsure at all n locations
agcttcttatccaggcaattcttggtggtgaagctccttcttccttggcttattccgtagtggatggtgcctgtaacatcctggaaatttctnacccgaaattttggaaacgatgtattttgaatgattatatatataagtattattcagtgtatatgcatatatgttcttggtaagggtaggaatagtggggacaagatacgcgggttagactaattaaggaagagaaatccataactgggaggttatgggttaattcctaattaattagttaaaaatcatcgttttgcgtgcgacttataatttaacgaaaccaacctctgaaccacgctcggngttttattcntgagcgtttgatatatatattgcttactttcgaaaactggccccgacggacgcagagaaacgcgaggaactggaaccagagaaatg

SEQ ID NO: 196230 - DNA, 484 bp, Glycine max
agcttaagcattggcggcgaaagagggatttctgtgttagttgtgttcggaggagccttggccattgcgggtttcatggcacacgcttcttttgcgagcaacaaaaataaggcaaaggacactcatgatgatcaccaaccacctaagcctaaacctaaaccccaacaattgttattggaggaacacatttgtaagagtgaagaagatcatgacacaacccaaagtctcacctctcttattcaacacggggattccacatggtatgctacgtaaacttattataacatactctatttgttcaagaatttttatttctatttacctatcctttatcacattagttatatttgtatttttataattagattaaatacacatacattatgaaataacttataagagaaagatattaaccatacaagaggttatctacgactgtttatacaatattattctatataagtaaatagatataatcctttat

SEQ ID NO: 196231 - DNA, 380 bp, Glycine max
caccaatggctccttcgtgattttacgtaaaaatcttctcttctctcgtcgcatactgattctccaacgctctcaccatgtaccctaattgtttcctccacactttgaattatttttttgatcttatgtcatgaattatgattctttcttaagtcaccatattactcgtcgtttttggtcttatgtcatgaatttgtatttgtgtaaaaaacttgatcatgaggttgttattttttcatatataagactcacatatgagactttagaataagaatgcagtttcatttgaattaacatgatttaatatatggtgtttaaacagacgcgggtacgctgttgcatcacaaagtgcaacatatggaggagtggcctcaatgatc

SEQ ID NO: 196232 - DNA, 328 bp, Glycine max
gaagaacccaaaccgaataaggagaactacgtgaagactccattgcgtcctacgcaaattcccaacaccagtttgcaaatctacgcgttcttgaacagcatgtgttcctctgattcatgttcatcaacaaacacaaacgcaactgttgctggttagataaacgtgaagcgtaacgggtctaagtctgtaagagttgtgccatatgccgccagtttatctaccaatctgcagcgtctaagagagtgaatggacactcctattcaggtatccggcctatactcagaaaccttatattatcccaatatatgcattccgagcttgttgtacc

SEQ ID NO: 196233 - DNA, 468 bp, Glycine max
  unsure (1)..(468): unsure at all n locations
atctctaagtcacctgaggcatgcaagcttgtcaatctcatcacttaagtacttttagtnttttctgcccaaacttcgttaaagagaagggttngttaaagagaatcaaatttgtaacaaattataaagataaaaataacaataggatcaaaaatctccctaaactaatctatctatccaaataaatgagtgtttacgctgaaatgtggtaaacaatcgctagtctaatcgagttgcttgcgagatcgactagtgaatctcaggagcatgccaatggtgtgttcgttttagatgtaaagcttntaatgttcatcattgcaacatacattcacttggtttgaaggtngcagaaagtataattctctgacagaatcgaaatgctggaagtacttaacaagggataagtatatggcagaatctaaaagatcaacgagttcattcgatcgaatgaaccattaaagacaggat

SEQ ID NO: 196234 - DNA, 467 bp, Glycine max
taatattgttaggcttcttccttgtgtcaacttgtctttgtgtgccctcttacgaacaaagaggataggcttacatgcataattgtccctcacctgagaagtgcttcacaggcaaatgctcttccaatcattggagtcaatcttgtagaaagcataatactcctcctttgtgatctcctaatgctctgtcatccaaatggccttatgcttgttcaccaacgagcattcatgtgacacttccttgctgaggaaaaaaaaatgtgacacttccctaatcttctttaaaatactttcttccttctcgttctcttcgtcaacatcctccacctaagtcattaaaaaattagatattgaagtccaatggtagtcaaaaaataccaaaataaataataaacgctttgaagacttattaaatggattccttatggtcaagtacaataacatgaaattgttgctgtttgttgata

SEQ ID NO: 196235 - DNA, 488 bp, Glycine max
  unsure (1)..(488): unsure at all n locations
agcttacaaataggagatagtaatagtgttggttatattctgtgtgagtggcaacgaatcgtgatgggtttggctgttttgtcaagattggccttgttttctgttgtggaaaaggattaatgaaagaaacaagtcttataatttgatctaaaaatggatgatgatttcgaacagggccatgaagtactacgaagtgcaacaagtaaatttgcagtcagagaagcttggaaaggtgattgtaattagtgctgtgtataaaggttttctgaaagatttaaactcctatatatgttgctatcaagagagtctcagcacggggttaaggaatatgcaactcaagttaagatcattatgcaattgaagcacaagaatttggtcaactccttgtttggtccatagaaatatgatctccttcttgtatccaaatagaacttagatttccattatatgtggtaaggcttcttgactggcagtanggatacatactc

SEQ ID NO: 196236 - DNA, 369 bp, Glycine max
tctcagctaattctctattatgctatccaatatctatgttttttctgttgactttgattgaatgaaacaaaaatgttggttcagaagactacaagtgaatgcatttgcttctatttctgtctcagtcaagatcaatgttgttttccgcatttaacaatttgctggtgaatgtaccgctggatctatactgtgaaaaaaattcacagttgtagcaacttatttgctaacctaaaaagaactttgctgttgtcattatgtcagatgtgataacccagtgttttgcttatttctattgtaaaaaaactgaatataaatatattaattttgtctgtcttcataattcttaaaaatagaaataaattaataata

SEQ ID NO: 196237 - DNA, 463 bp, Glycine max
  unsure (1)..(463): unsure at all n locations
agctagcgtagcagatgcgcttctagatttccttgacttgctaagcactcttgtgctgggcttagtcgctgatacgcgctaagcgcacggagttcgcttagcgcaacatccactttgacacttcttcatatatgctcattnttgcctgatattgaagagaatctaacattaattccatataaagaggcttctaatgaacagagatcaaagcatagcaaaatntatgtacaatcctagaaaagaactataaattgcggaaaatatacatatcttgtaaaagttctctatacaaaagttagttgtataagatgactaacaaacttcttatccacgtaaatttgttgatcaataattgtatatattttatttatttatatgcatggccgggcagagggtgtcacacactaaggggttacatattacttgtcatggcaggaattgaacccacgttcttgagagatat

SEQ ID NO: 196238 - DNA, 279 bp, Glycine max
gaagcaccaagacccgcactattgaacataggctcacaccctcatatacctcacatgccacagatccctacctatgtttattaccatgaccccctgtcataaactgaaactcacataaatgcttagagcatcacctgaaatcagagctctcgatcttctctacaacatcatgcacaccactgtaagtagatgtcggcactcatactatcgtactgagagacctcaaactatcaaaggtctcctctcgctcatatcttatggcactctcctactcactat

SEQ ID NO: 196239 - DNA, 129 bp, Glycine max
aaagaaaaaaaaaaaaaggatgtctctgcacgcaaaaaaaaccgccgaggggacgaaattttcgaacaaaagagcaccgcaggaaagggaacccgaccaacacacgagaacgcgaaagcaacgacaaaa

SEQ ID NO: 196240 - DNA, 418 bp, Glycine max
catataacacacaaacatgatctattatagaaatatcttcatatgcttcaacacggtttgtataaagacccgtcgctttttacctattgttgtctacttctttttacttacatttattactttttaacataaaatctagtttactcttgtttctatccacaattattaatgttttgtctgtcaatgcctaattctataataaaactatgtcttattaaccagttccctgagttcgatactctgattactccgttctattttaaatacttgacaacccggtgcgcttttcggtgtttattttcctagatatactggttgtaaatctatgatatatgacttcgtgtggaatcaacaatgtgtatccaattctctcatgtctcactgtacttcttgcctttgttagatacctatcttgtat

SEQ ID NO: 196241 - DNA, 498 bp, Glycine max
  unsure (1)..(498): unsure at all n locations
agcttattatggaagctatgatgtgcctctttttctatnagtttttctactgacttttgaatccgataggctagaaaatatttacactgctgacaggattcacaaaactgaagatccagactaaaggttcctctactaaaaaacaagtcgttaccactataacttatcttcattcatggagcaagatacaggatgagattaaagctcgtcgtatatgtatgggtgttgaatcttcaatatcaagttgtttatttcatttatagactattgttgaattctagttaaccaatagattggctntgtttgtaaagaggctcctatcatacaatattagaaattctaaaatgcatttctatccttatagaaactttctcttctcttttctatagttagttaaaatgcttaaccaaatgtcttataacatgtgttcttaattgaaatcagataccatatattagttnttcctattcaatcatggatgaaatgctnggaatcttt

SEQ ID NO: 196242 - DNA, 522 bp, Glycine max
aaaaaattgatcttgcatacggaccttaaaactaagctatatgcaatgtggtaccatgtcagtgaataaccaccattctgcgcttatgagtacataataagacacaccacacaatgggtatgtcaggtcactctcactaagtaaaattataaggtgatcagttagggtcactttgttttgcgagaatgctccaaccatatgagatcaacataggcttaaatgaacactcaaaccgagagtgtctttaccccatgacctatactccaaagaattcgttagggcctcaccttcctgatttatgtccaactcctaaaataatttttttgcacgcagacattgctcatgaattatacaatatccacgacctcacactcctgtttcaaacacgttcaaaacattgcactacaatttaacaccggttccttactatgaatcctacactgtccttttaacactgcgcataaacatttgttctcaaggtaaacactggtcgggttattgataattcacagctcacaacat

SEQ ID NO: 196243 - DNA, 460 bp, Glycine max
  unsure (1)..(460): unsure at all n locations
agcttagccctagaggggatggacctttttatgtttgtagaggatcaataacaatgcctataggttggacctcccagaagagtatggagtcagctcttcttttaacatttctgatttaactccttttgcaggtggagctgatattgaggaggaggaactaacagatttgaggtcaaatcctcttcaaggggaaggggatgatgcaatcctccctaggaagggaccaatcactagaaccatgagcaagaggctccaagaagattgngctatagctgctgaagaaggccctacggttctcatgaaccttanggtagatttctgagcccatgggccaaggttggatccaattatctntgtacatattagactangatgctcattatattggtccttgtatatanggctccatattgtaggtanggtaccctagaaatataagatntttcagccctcgtatttt

SEQ ID NO: 196244 - DNA, 370 bp, Glycine max
  unsure (1)..(370): unsure at all n locations
gacactatataatactatagctgtgtgtacaagcagtaaaaactaaaataattggaattttttgtctgtttattaaataactgatacataaagcatatactaaataaactgatcaaaataaattgttcaaaatgcaagacaagaagataatgatcctgtcaatcctactgcgggtgatcctctgcatgctcattataatccaacactggagcatctattggatcctatacagtaagctgctctggctctgatgctggtgcacatggctgggaatcctcaaggataggtgctggagaggtataaactggagaagtangctcctgagctgctgcttcctcctgagtgactagatcaatctcatagataaatg

SEQ ID NO: 196245 - DNA, 260 bp, Glycine max
ccacttagactcaaagggctcccctaaaccctccctcgttactctcagcatcttcatcaactccatcacccacttgggccaaaagggccgcgccttctccgtcatggcgaaaaacatcataaggggctttgggggtgacccttttaccctcaccaccctcatgaatggcgtgtgccacaaaggtcgaacctttgaggcactcaacctgtatgaccatgctgtctccacaaggttcttctctgacgaggcttgctatggca

SEQ ID NO: 196246 - DNA, 277 bp, Glycine max
gtctttctgtacaacagttttgagtacactccctctgtttttttcaataacatgttgctgcaaaattctttaattgtttatgaacagagatttacactgcttcactggatcatcagggcttgtaactgatatagagacacagtttattagaactacacactatgaatacataattaatatcccatacatatgtttttaccctacttcgagtcataatattgctggctatttaagaaaagttattttaaatgatagtaaaagctatactataatttga

SEQ ID NO: 196247 - DNA, 408 bp, Glycine max
  unsure (1)..(408): unsure at all n locations
aagaggaggaagaagaagatttgcctatgatattcccatgattcaaatttgtcttctgaatcaagttctgcgattttaatttngcaggttcatttataataccatggtagagctgcgttcaacacacatgacgagaactgatttagacacacctatcattgatgacctgtgtgttgatggatggggagttggtggaatataagtagaagctgcaacgcttggctaaggacaaaatcatgctctcatttattatctcaataatacttcaggtgtttcatattatcatagaagatgtcgtcgtcgttgtagttgttgtaatcactcaagtcaatggaccatgactatactattggggagcctaccaaattccatgattcaaagtgtttctgataagtattcaagttaatt

SEQ ID NO: 196248 - DNA, 320 bp, Glycine max
  unsure (1)..(320): unsure at all n locations
caccacccctcaatgagctactgaacattaatgttgcatncacctgaggtgaaaaacaagagcatgccttcgctatgctcagtgaaaatcttactaaggcacctgttctaactctacctgactcttctaaatctgtcgagctacaatgtgatgcttaaggactgggagttggaactgttcatgaaccattgatgcaccctattgcttattataatgaaacacttgttggcgcgacccttatctactcaacctattatatagagctaaggccctattaacacactcaaaattgaaacactccttgttccaagaaactgtct

SEQ ID NO: 196249 - DNA, 200 bp, Glycine max
cattctcgcggaataactaatttgactatgggcttttgacttgagaaaaaggatcatatctttaaaggatttttctttttttgttaccccgtcctgtcaaagctgaacaaacataatcctggatcatctgttatatgaaaatatgcttgatgatgaacctactggcaacagctaattgagaatgtggtggtcagaaatgg

SEQ ID NO: 196250 - DNA, 481 bp, Glycine max
taagctcgtgcaattcaccatgattgacagatggaggatttttttgcttctcttcatcaaagaaattgacacttgcattacacctctgcacatcaccctgaccaatgatgacctgcattaatgatcatccttatcccctaccacaacaacaacttgaatgccacaatgcaattaacacagaaatcttattcttacattaataagaaaaatgttactatcaatccactctctaacaccatgttgaacgtactttttttattggttcaaaccgaataaattttataaatctcgcatcatgattctctctcttaataagtaggttgtaaaaaactttatataatcatgttactaacagtcctgcagtaattactataaaggttaaccatcaatctagctcattagcgctgcatacatcaacaaatagaattggaactacctaggtgtttatttgttgtaccaatctctacgaatatcaactata

SEQ ID NO: 196251 - DNA, 306 bp, Glycine max
tccccacagtacagcaccatgaatgggctcatcatggtgttattgatttccatggcaacacaatcaccatcatgaacaaagggtagtgaacaatcctcacatatttcactgtgccacgcatgtgagagatggtaaggcatggccaaaccacgagctccagactgctgccgaaagatccttttgctccgcaaactctcaatcacaaggacctgattcaattagagacgatcaaatctgctccatgcagacggaagatgaccacgcaatgaacgcactgtgctcaactcatgatcactggataacaca

SEQ ID NO: 196252 - DNA, 423 bp, Glycine max
  unsure (1)..(423): unsure at all n locations
tatcaagataagctctntgtagcttattctaattttgtgtgntgtttcaaaancatggcataagctctagtgaataaccacttatttaagcttttgacctgaattcacccttaatctaaccatgttcatcttttcataactgtttgtgctcttttaacatgtggttttaatatgtgaacatgtatttgtcagattatgttaaattatggagaaattgaattatacataatcaacagagttgtcaaacccatatgcatgcaacataagttattatgaatattattatgtacataatagaattgtaagaagtgactatgctgatccatctttgtcattaattgagtctcttttcttacatgaaactggaatatgtatcagatattaaagctattaactgctttttgcaagctgatttttgttgga

SEQ ID NO: 196253 - DNA, 503 bp, Glycine max
  unsure (1)..(503): unsure at all n locations
gtcacctgcggcatgcaagcttcgatgaaacagccactttgtatcttcnattttttctagagaagaaggcattcaacaagctactatgtccaccttcacaatcacgatttatatgatatcttgtttgtctcgactgaatgctattctcctcttgttgttgcatctcacataagtacctcatgatttcttcttagtgtgttgtcttcaagtatttcatcaataatttgtttccaaagtctatcaagtcatagtttagatccattttacaagtgaatggagctagaaaaaagaaagaagaatataacagtgtttgtagaaaatgtgcatgactgacagaaaattatctattaaatagcatcattttcaagagctagtttcacaacgactactttgtaactactactgtaattacagataagttgtgtaatgactactctgcaccccaccctcgcctcctgctgccctttcttctcctttctgtcacttttctcttagtcacctct

SEQ ID NO: 196254 - DNA, 319 bp, Glycine max
tgaacttccatcttagactttgtcttgcaatgtctaattattatagttagtgactagaactatgagaaaatacccacaagtttataagatgctccgaggtaatatcaattctaacaatctatggaagttacaatctccttttgaacataattccccaatttcaaaaagatatcgtggtagtgtgaaagcccatcaccaccatttaatgcagggaagagacatgcaattataccagtatttataaaattccaacaagtgtgacgaaaaacccaatagttatggaaaaggcctaatgaatgaactgattgaaataatacct

SEQ ID NO: 196255 - DNA, 454 bp, Glycine max
  unsure (1)..(454): unsure at all n locations
agcttatctagaaggactattattagagtattttgttaagnaaaaaaaatgaaatgaatntttccgtaagctcaaattaactaatgcataaattaatttgtagaaattttctcatcctttggagaaattatacaagagtttctacaaattaacattttcataagctaataaaaagtttatctcattctttatatattttttagatgtctttctgaatgagtttacccaaatagatccttagacaaatggggttcgaacatgtaatctctttcatacttagcaacatatgcatttctcatataagcaagacaaatgtaatacaaatataatattatgatagcagctatagcttaagaataataaaatatataacatatatatacgatataaatactcttgaaacaattataaaacagtccctccctcctgagctcgtgacttgatgtgagatgga

SEQ ID NO: 196256 - DNA, 432 bp, Glycine max
atgtgatcctcacttgctgcataagaaaaggttggttcctttgtttttaagacgattgatctcatataacaacttgagaagtttgggaaagagttctctcaagatttgattctacaatcactctctaattcattttcacaatttagtgtgaatttcaacatgaataagaagagttgtgacttgcatgatatgctaaattcgctaattgattatgataatcaaattgcttctgaggataagaaagaaactatcatggtagttggcatgagctccaagaagaatggataaagtaccaaaaaggaagcatcatggacctaacggtggtatgaccattcccaataacattatgaacatgattgaccatactgatgttgattgtttcttctcttaggagaaatggcactggaagagaaattcaagcatcttgattct

SEQ ID NO: 196257 - DNA, 379 bp, Glycine max
ccggatcttaatcacctgagctgcagctgaatatttttaaatatgcttattctctataaagaaataaatatgtccttgtgtattactaaaattaataaaagcttaacttgttttcgctgaactattttttacaaaatatcgcattgattggcgtcatactttgaccattacattaccagttatttggaacgggacattttactaaaatgagacatatgatatgacatgtacgtagaaaatgatatggtttttaaagttaagataggaaagaaaaaaaatattttttatgctttgttgtatagaaagtaaaaacaaataaaactgtttatgtaaaatgatataaatattcttaacgagaaaaaaatgagaattgataatg

SEQ ID NO: 196258 - DNA, 412 bp, Glycine max
  unsure (1)..(412): unsure at all n locations
actaagcttttctatgtagatctttcactctctctttctcttcttatgaagggangctccaatcttgctgaatcatattcactgcaggcaccaccaccattcatgcctccaatcttcaacacattatactactctctataccaacatcatttgtatgcaccaaatcaacaccaactacacctgatgaagttccaaggttccggtgatgaaaacaacaatggatcaatggtggattacatgcctcaaacaacacccccacatggcttttatggtgctactagtgccgccacaacatcctatgacaaactgagttttgcagatgtgatgcagtttgcaaattttggaccataggtaactttgaaccatgcaaataactgtgaagagtctgcaatagacccggtgtatttctcaa

SEQ ID NO: 196259 - DNA, 491 bp, Glycine max
  unsure (1)..(491): unsure at all n locations
ttagagtcacctgcggcattgcaagcttgcagatatagtgtntactgtgtgatgatntcgaagngcgnnnngagaagaggcaaatattgattatgcctactttgatgaaataggaagcttatggaaaatggagagaataagaaggaggaagaaacccatgttgtgactgtcattcctacatggccaaatatcccacttgctgaacaatatcaacattcaaccaatatcattccttctcattaccccccaccctaccagccaagaacacccaatcattcacaaaggccacccctaaattggccacaaaactcgcctgctgcatatttgaggccaaacaccacccttaatacaaaccaaaacatcaaccagagaaggatattttcagataagaagcatgtagaactcaccccaattccggtgtcgatgctaacttactccatatctactcataatgcatagtatccttatcccgcaagattcctacctcattt

SEQ ID NO: 196260 - DNA, 328 bp, Glycine max
aacgaatgaagaacgtcgaagaacggtcgaataccttcgcgaaatcactcatggaaatattacggaagcgcctcggcttggattttcttcacggaaacaattttcctatacaaatgcgcaagatagagaagtgcctaaggggctgaacccttttctacttcacttctccccctatttatagaaaattgtgggagaagcttgccacccagctcgcccatgcgagcaatgatgcttcctccaaatacaacaaccttctggatgaatcttctggagggcccaattgggcctgtttgtttttgcacccacatttttctaaatacaccccttg

SEQ ID NO: 196261 - DNA, 324 bp, Glycine max
  unsure (1)..(324): unsure at all n locations
gcatgcacttggggcccacgccagacaattatacttatttattgaacaagaaaaatgcatcaggggtgaaaaacacaataaacgcgcaaaaaaggattctaaaaactgatgaaagaaagctacgctggcttagatgctaaaacaaatggcgtgtcattgctagtacagttatctgacctgacatcctcttgtataactaggcgaagaagncatgaggtaaaaatgactgtggaccagtcaaggatgttctattctatgtggtgaaaagaaagcgggcagggatttactatattgtgtagttcatatctgccaattctcaagagc

SEQ ID NO: 196262 - DNA, 280 bp, Glycine max
caacgacccagccatggacacaagtgagagaaagccaaaaccacgcaggaaatggctcccatggaagactggggagccatgaccacgccgaaaagaccggaaaaaaataactcgaaagtgcgcgaactcggataaaaaagacgcagtagaggagccgactcgagaaccacacactccaacaggtcaaggaagacatcatggatggcaacacatagacgacgcaaatgaggaagaaaatagtgaggcaaccaacatgcgtactggaaaccggcagtggaca

SEQ ID NO: 196263 - DNA, 465 bp, Glycine max
  unsure (1)..(465): unsure at all n locations
agcttgtcaagctatctctctcctattgttatatatatgnnangagaatgaaataaagccaagctagtgagtgaacagttttcttcctcacaaaatcaaagcttcaagtgtatcatcaataacctcaataagaaataagcaaataaattcccaaattgagtagaaaaaaaaaaaagaagaatgaaaaattgatacatgttacaacaaataaaccaaatataagtcattcatataagcaaccagcaggaattttacaagaanttacttataatacagtgcattaagacttatagagaaattttgggaaatgctatataaacactctgagacattcttttaaggataaatactcatactgatcctcgaaagtgtgaagcagtgacaaattaatcctgaagaatgaaaaattcatatttagtccctaatgtacaacaagtgtgacatattggtcttgtcgtaaatttg

SEQ ID NO: 196264 - DNA, 422 bp, Glycine max
  unsure (1)..(422): unsure at all n locations
gacttatgtactcaagatgctagatcaaagaactgttttatttattattctactcnaactactanngtnggtggcccatgatgttagctaatgataacccctacacaaaccatgtcttattatttgggcttgactgactttatataaatatgttagtagttgctgatattttatttttattaactaagcacgtgacaacatataaccattatgtgtattaactaatcactgttagatgttttcatttttctgctctttacaatgttattatgagcaagatatgcaactgtacactattatattatgtactttataattaatacaatgtatcctatataactttgaattggtaacctaatttgttgtagctaaacaaaaattgctatggtgcatgtatttgatggatggaaacacgggttgat

SEQ ID NO: 196265 - DNA, 444 bp, Glycine max
  unsure (1)..(444): unsure at all n locations
acctgcngcatgcagcttcttaagaagattcctaaagaagctatagcttagctctcattcctcnctaatagctaagctcacctccttgagatgagaagctagagcttagctacacaccccctataatagctaagctcacccccatgacaaaaaaaacatgaaaatacaaaaaaaagtccttactacaaagactactcaaaatgccccgaaatacaaggctaaaaccctatactattagaatggccaaaatacaaggcccaaacgaagaataaacctattctaatatttacaaagataagcgggtcatgcttagcccatgggctcgaaatctaccctaaggctcatgagaacactatggccgttcgttgatctctacccaatctactggagcttctaccaatcccttgaagatggaatgatcacatgtcatgatagttgaagctc

SEQ ID NO: 196266 - DNA, 458 bp, Glycine max
  unsure (1)..(458): unsure at all n locations
tctcttggaccttatgcaaaccttcagctcatccttctttatttatctgtctactcgngattggtccctttcctctctccggagcttaagctcgctgttattgccccacatatcccctcagaatttgttctggctgtgtttatcacttttggtctcttgttccaatgcctcggtgtgagctttatttacgtctctcagttcgacattctctttttggatcttatgagatgctgatttgaacctttctttgactgttggggcttgctcgagttctgcccttaaggcccgcacctcttcatcttccttctgtgcattaacttccacccattttgtgtgtctcaaactcaggagccaattctaaccttgcatgtgggctttcaaccacctacggtatcttgctatgtgcccatatgtacctgcttctgattccttgtacttctttgcacattttccatgcc

SEQ ID NO: 196267 - DNA, 397 bp, Glycine max
cttcaaagaggtccttcaatggtgatctctcaccatggagatgcatcggaatgcaatagagataaggagatgtgaggcaccatccactatggaataagccaacgaagaaagagcttcaccacctagaattgccttggataacaagcttgaagatgatgctctaatggaggaaaagacagagataatggtggagcacgacattgaaggaataaaatatggaaagaagtggaactttgaactgtatctcaatagactcttattcatcgaagttacaactagtgttacacattgctctatttatagactaagtagcttccttgagaaaactatcttgagaagcctctttgagaaaactctcatgagaagctagagcttatctacacacaccactctcata

SEQ ID NO: 196268 - DNA, 446 bp, Glycine max
gcttcagcataggatgtgggttcagtagataagaaatagttcctcttttggcgacaagatggagaaagccgagatttagaaagaactggatgaagtggataccgaactgatgtcgtagtggcatcagttgttgaagtgagatatcggtggtaatcttgatgataggtatgatgatgtttgtcttttgtcgatcgacgcaaggtcatgggtggtatggatggtctatcatcaatgtggttagtgggtaatggcgatgaaaaaaccgaggtatgcaatggttcaaaaatggtgtgatcatgggtgaatggtgtatgatagatagaatatggtgagtttgtgtttcgtgtaatgaaagaaaatgatcctcctttaatacaacatgacgtgttgccgtgtacatttgggcatttttatttttacttagaactcttgttttggatttgatc

SEQ ID NO: 196269 - DNA, 414 bp, Glycine max
  unsure (1)..(414): unsure at all n locations
caagctttagaatgaatggttcaagccattttctttttatctcactatcttttngggcggtcctttctaataaattctgttacataggatatcttgtctgacatgtgtaaggttcattggatgcctttgaaaagaagagcacgtgcttggagcttgagcttgtgaatgctcggaaagaccatgataaaaccattcataaaatgagggagtttgaacataagtgttctgaacttgggcaaaatgtcaaaaggtgcctcttcttctgctttcctttatcctgttttacaaattcatttagttttattaccaaaagtgctgtatcttcccattccatagttgtgtttgcttgcctttattatagtttgagctttgtttaaagtctttgtggttcatgtgcagcgtggttacttaaat

SEQ ID NO: 196270 - DNA, 395 bp, Glycine max
tatatgtcaagtcaaacttttatgtaattcaaactcatttggtgttttaaggatccgacaagggaacgaaacatactgagacaataaatatatttttaattaaggtcagatgcaagcctaacaaaacctacttgaacacaacttattttcatcatgtgagagtgagagaaattaatttcaatagacctaagcctattataacctagttctatgcaacctattttcagctctcccgtataagagaattcaccttgaattcccagatagaaattggattataagtgtgatgagcacttctgctagagtgtgttcaatctgtcttctcttcacccttaaatgcgaagaagtttggcaaatatcactaatcctgtatttaagattcacacatcacaaca

SEQ ID NO: 196271 - DNA, 424 bp, Glycine max
  unsure (1)..(424): unsure at all n locations
cggatcttaatcactgagctgcaaccnatgaaaacatgtctttttctttttatggnnctaacacacggtcgacatattattaagtgtagcttgatctttatgcagagatattcccttcaatgtgaattaatgtgttttcaacttcatcttcaggtgaaaagatgaagaattataaagttgctgtggtaggtgtcttgcttatcgaggcactcagcccgcttagcgaattgggagaatctggatgagaatctgctcaagcaaatacgcgctcatcgcgcatcagcttgctcaaaagttgttgtcttctctccgctaacgttctagtgtgctaatgaaaatacttgctcccttatgcaaatgggctactaccttaagataaagcctttagcaagtggcaaatcgattctgaatctgaaccatcatt

SEQ ID NO: 196272 - DNA, 458 bp, Glycine max
  unsure (1)..(458): unsure at all n locations
ttctatgaacttcaaaatttttttcatcaattngcaattgcatcaacaagaatatgcaacaatgatcaatttacatgagaaacaaaatcaattccactgcccgacaaatgattcagaaaagtaaaactaaaaagtgcattaacctaagaataaaaacaatcaacatatattgattcagaagagtgagtgggagccattctcaacagattaactcgtagtaactataaggctataacaactactatcactgctaatggcaaaccttcatcggcaaagattacaacctttgtggcatgatatatatatatatatatatttaaagggaggagacaatgaaattgactattatcttgaaaggatgtatacataaccatgattctctctttaccaaaaccaaatataataatgcatgaattgaaagtctgatgtgcatctaatattttaagacttcacatata

SEQ ID NO: 196273 - DNA, 492 bp, Glycine max
  unsure (1)..(492): unsure at all n locations
agcttatcccatgcttctatggtcgncgttgtcgttggatatacaaaagggatcttcatccaccgattgataaatgagaaaaagagctttcttgtctctctttcttgactccttcaacgtctcctttacaccttggcttagcgaggcttcatcttgctcctcgaagccattctctacgatatcccacacatcttgagctcctagtagcgccttcatcttgatactccaattatcatagttgttctttgtgagcatcagcatttggaaaggaaaacctccattctccatcttttgaggatcttgaagctctgataccactttgctggaaataaggctctttatgtttatgaaaagtgtctacgaatattggagactttgaatagaaacttgataggaaggagaattctctatggaggagaagaacttgtattttcgcttgatacaaatgtgtaagaatacatctctatttatactactctaaggagaactcta

SEQ ID NO: 196274 - DNA, 477 bp, Glycine max
tctgtatatatatatatatatatatatatatattttttttgtgtatatatatatatatatatatatatatattcctttggcggatcaaaataaataaaaaatattttgagccttgtggacgagattctagagggttatttgaagaaaaagatcattgtaaacagttgtagcatttgttgctagagaaatgattatttggactcaccaggttcactatagcagacttggctgtaactttgtcagacagcttcaaattaattccatttttcattatcaaattgatatgaagcacatgatcaaatctttcacagtttttattatagtacagagattagcttcacatgaatggatgttctttgtaatataaccaatgaattttattagatatatgtgtcagagttgtaattaaaaaaatcaacatgtcattatttattataagattctgatgacaaaattgtgagatactatctgtttttc

SEQ ID NO: 196275 - DNA, 359 bp, Glycine max
accttgacccaggggagaagccaatccttaccctcggaagcgaaaggaaaaaatgaagacttccaaccaaagagaaagccacaagaaaagaacgagccgaaggaaaattccccactcaaagagcgggagaaagcaaaaagaacagaaagaaaattcccaatcatagaatgggagaaagtcaaaaaggaagaagaagaacgaaagacagctcctgatcagggagtgaacgacaacagaacaaatgcgcagagaggtctttggaccggacaatatccgcacaatacagaattgtctccaaaagaacaacaataaaaggaatggacaccacgacctataatgggcgtcttcctctgactacc

SEQ ID NO: 196276 - DNA, 369 bp, Glycine max
  unsure (1)..(369): unsure at all n locations
ctaagctttacaccactacacactgatgttgcgtttttgtgcttttacactccatngttggaagctttcattacacaaagtgtataagctgtacttcagttactacatttggacgaaggtgaagctaatgttatctgctgaatgatgactgaacatggagagttctatcttgatacaaataaaataatgtaagactagtagaaacacatangcaggatatgaaaaagcatgtctaatatataagtaaatacaaaccatatgtggttgtattgatctgttatctaatgataatgttccctctattatgaaaggacattgatggccttatctattttaattggatgtgctttcttcattatgcacattcta

SEQ ID NO: 196277 - DNA, 439 bp, Glycine max
agcttgaagtcttgtgttcctgaatgtattatatataacaactcctaatcccatgcatcgcactctcccagagtgctctaaccctaacactctaccaacaacatcaagaggagaaacttcagattcatcaactatgctttgagtcaatcctacttcaatttgttcctccaaacatgtaataaaatgaaatataaaagttttaagattaagcacaatccttgaaaacaatgttactaaagaaaaacataccgctatagtctttgctgcttcatttacaaatgatccatctttccttttatgagtttcaatatataattgtccatgacttggtagcttcccagtttctaacaactaagataaataaagagtaagtatacatcgaacttcttaattagtaaaagttaacatatagtgtcattaccaactcatttcttcttct

SEQ ID NO: 196278 - DNA, 419 bp, Glycine max
  unsure (1)..(419): unsure at all n locations
ccccggatcttaatcacctgcagctgcaactatagttancatgtcccttctcttatcaangggcagaggcacttaccaagccactatctctcgccagatttgtttttctaagggccaaacttaatataattgagacttcttcaaagtctcaaccaccttgagtttaaggggtgatattaaagcaatgtacagaggagttgcagtattcaactgcactcttagttaaagggaattagttagaagttaantaattgtataactaacttttcgggtctataaataccagactgtactatactattaaatggctcaatatcgtttttcattctctctgcttaattctttctttctctcaaaatatctttcttatgatactattagaattataataatgggtgataggactcaaggcttcattg

SEQ ID NO: 196279 - DNA, 400 bp, Glycine max
  unsure (1)..(400): unsure at all n locations
aacttaaaactcagctggattatgctttctgcggaagatttttttctgcttatggnacaatcttaccattttataccattttaaaatttcccattttcattttgttcttttttattcggaagcacagtcttactgtcttgacatcgcattctttaaggacttccattgtggagactggagacataaaattgtctatgcttaaagttacaaattacaatgaatatatatcaatgaactgctttatatcagataatacttatttcatgcttgattggaaaatgtaagaattgacggcatgtctacagatcagcaaaatattcaattctatatgaataccgacatactattgcatatgttatgcttactcgtcctgatcacctatatatggccacctaatatg

SEQ ID NO: 196280 - DNA, 417 bp, Glycine max
  unsure (1)..(417): unsure at all n locations
ccaacncaaacaaagcaagaaggcgagtggtggaagtctcgaccttacacaatacatcacaatctcacaccctgagaagctcaattggactcgacacaaaatctcataaacatcacggaaacataacctctctctattcatacagatcaaatattggacacctataaaaaagacacccttgataaaaacgaaaagaacacatatccgttcaagaccaatgtggcccgacccctgtgcccacatatacgctctcaaacttgacgaacgagggtaagcactcatcacaagcctcacaccagaacaaaggcagagacaaataaaaaactgcacatcacctctctggacacccacacgaggcttaaaccgacggcccccaatcttccgaataagactgaaaacccaaaaccaagctcccaa

SEQ ID NO: 196281 - DNA, 346 bp, Glycine max
gacgaaacggtgaatgcatgagctttattaggtcaaggtgtgtgtgaatgttgtcgggtactctgattacaattgcttcactggcagtgtgatgctatgttgatgtacatcgtgaaatcctgttttaatgcgaatatggaggaatgaaggtggagatagacaaatttttaccattattatgctgagatgttttaaatagcgattgtggttttgtcgcaatccttgcggtttataaagttttatgcaaatgtgactgatgccaatcttgatgcggtcaaagagaaccatataactttgtgcacaaatgtgttgagaatgttttaaaacttgcctacagacttaatct

SEQ ID NO: 196282 - DNA, 382 bp, Glycine max
  unsure (1)..(382): unsure at all n locations
tgaggcatgcaagctcgactacatataagattaagaatatttaatatgtttactcgagancgaggcctgcaataactcaatagcaatagtgatgctcatgctcaactgcattacgagagtgatcatatgaaagctctcgactttgaagcaaactttgagcttaataaagtagctgaatagtttaaaggattatgcataaggttgaagattccttagtattaaatagtggttaaatgagtgagacaagtatatctgagtgattgattatctactggtcaatcaaagagacatattcatatattgtgtttgaaacatgttagagagcaagataatgagagagtgtgtcaagctacataacttaatataatccgaacactatact

SEQ ID NO: 196283 - DNA, 450 bp, Glycine max
  unsure (1)..(450): unsure at all n locations
agctntnataccaaaatcttaatacatttttntgtttacattttagtgtaatatgctttatgaatgtaaagaaatgtaatggccaccattaagccccaattgaatgaacagatttgcatttttctcttaatttcctccacacccactccaacaaccttcatttcatgttttacttgcaggactggtgctacaagtatctttaacacaacatacagagttcagtttttccatcctctttccaatagtttcccttattaaagttaagttcatatcactcgttgttttagtaagctttttatgtagcctcacaatatggaattgaccttgagatcttctccatagtgcagcctcatgcatgtgttgaagatcagcctgctgtcttctgaagatattaagaatttcaatcactactattatagctacacaaataagttcaaggtacctgaaact

SEQ ID NO: 196284 - DNA, 449 bp, Glycine max
taagctttatacatagaggaagttagttacaagtttaactaacttcttcttctatatccaactaccaactaccaactactttctaaccatagttgactctttaatgattgtcttctaacatggctaatactttattttcatcggtcatacattacaaaaactagcttatgtaatataattatgtgttaatgcattctaaaaactattttttgtaatgtattcaaacataactttattatgaaaaatatttttagtagtgttgaagcattgcccatgctttttataaatacaatatgaaattttttgttcataaaggctaacatgcttctctttctcataaatataaaaatgtttaaaaatcggttctggaaaattttaatatgtttttcgtctcaataattaaatgtgtacatttttgtagacgtaatcggataattaattatatgaag

SEQ ID NO: 196285 - DNA, 438 bp, Glycine max
  unsure (1)..(438): unsure at all n locations
agctcgagctcattgttgttgccacacatatctcctctttattngtcccggccatgctcttccttgcgagccttcttggtttctcgttctagggctcttgcgatagctgcattttcttctcgtaacccggcacactctttccggacgtctgtaacgactaacttgaatttttctttggcaagtctagcttttcctagttctatttttagagctcggacttattcatcctcttccggagcttcgaagttctcctcgttgataattttcaacatggagagccaatctaaccctcgtgtacaaactgtaagccattcatgataaccaccgatgatgcaattacggatgcacctaagttctttatctttccttaacgggctntcccacgccttatggacatcttgtataatcttgagactatgcgcgccgaaatctctcaca

SEQ ID NO: 196286 - DNA, 446 bp, Glycine max
ctaagctgaatttggttaggcatgattgatacatgatttgggtcttttggttttgattcgggcaagattggatgagaggaagtgtgattttcgaaatctgcacttatgcagaattttggctgtgaaattgtgcagcagaattttgcacaagtgcagagaaaatgcttgtgtgtggttggctgtggaaagtctattgcataatgagttctggatgtttgccagtagatcccaacggtccatatgtatgcttatgcactatatactcccagtataaatttggagtcgatccaacggttaatgaattggatcgaaagaattgtactgtggtctttatgtgagaaaagctgtgattttgggtgatgtgttgagcatagttttctgctttgttctgttttgcttggctgtgaatactagtgctggttgaatgttgtttgcttggatgttgt

SEQ ID NO: 196287 - DNA, 506 bp, Glycine max
  unsure (1)..(506): unsure at all n locations
ttaagtcaccgcagctgcagctaagctgggctgttattatctcgttaatgaccaagtcttcagagatattttacattatccttaagatgaaaaaagatgaagtttaagctttggcttcactccaataataaaatatgcttcaaatacttaccattgactgcattaggtattgtgtaatccacaacaatcaaatttggatactgatcaagcacagatgcaagagcactctccctgtcagaaggaccatgcacaagaaactccttttcaccaatctgaaaagtctgtcctgactcctcttcacacccaaacgacacaggaacaacattcattccagcagcttccgccgcattaatcacggcctttcccacnttttcagtacatgcattaacctaaacaaaacaaaactatgtaaactaatttcactgtngtttgaaacaaagacactgcgaccaacaagtgnacatacatgtcagatatatcaataattatgactcagattcattaaa

SEQ ID NO: 196288 - DNA, 347 bp, Glycine max
aaatatattgtttattatcaagaaattatattatttttataatatataactctcacttcccattaaataaattcttagtgaattttattaataataaacacattgtaaaataatttacaaattatgttactgctacgtaataagaaagtaccatggttgaatatatcatgcccttttcataacaaatgttaaaaaacttagtaaacattttacaattatttcggagtattagactttgatgaaagagatatgggcttatcattgtttacctatcatttggtttaagcttcacacatctaacgctttttgataagttccttatctatgtttgaaaaaaaatggcattt

SEQ ID NO: 196289 - DNA, 405 bp, Glycine max
  unsure (1)..(405): unsure at all n locations
agcttgttaattaggactgctctgctgatcttgttgagaataggtgttgaaaatgaagagttagcttcctgtttactctatgaaggaatggcacgctacatgcatgatcacaaaactgaatgtaagtatgctccagaaatgcaatcaagagctcaggcttattacaaatcagaatgaatcaaaactgcaacagctcttgaaccaaatacattgaaaacaaaaagccaactagagattaagtccaaacaacttgaagatgtacaaaggcacagggatcaagcttacctcgaacccaaacaatgacaatggcagtgagatctaaaataatggcgcggagactngaagctntcctcctatctcgatcaagtcaccacgaaatgtacctanggttaaccgaaacaacgc

SEQ ID NO: 196290 - DNA, 387 bp, Glycine max
  unsure (1)..(387): unsure at all n locations
tactcactgaaatttactctacacacaggggngtttctttttttcttatttttctcatcttaatttatgatcttggttaaggttatcaaaaaaagtgttatgttgtaggttcaaatcatggattttctcttgtanggttcaaaggattaacggtagttttaaaaatttgtttgtgcataatggttggttagtgattgttctaanggttcttagatcaaattgagtgtattttctcttaagaattgaatcagtataaacccttgtcttgattctctctatcctttatcttgttattgagttggtcttgatattgtattgtgttggcatttgatcctgtaattggacgtgccattaaaattcttgttttgaataaaactgatttttttc

SEQ ID NO: 196291 - DNA, 487 bp, Glycine max
  unsure (1)..(487): unsure at all n locations
agctnggaatgtatgtgttacaatgttcttaaatttctataaagnnnntaagaacaacctgtctaggtaatttttttcagaaagacttttaacaaaataagaaaagaaaagtttttcataattaccttatacacaacctaatgatagaagctctttcatattagtttttttcaaaagatatttttaaattatgtataaactaacattaacttatagataagtttatttaattctttttctttgtattttcctttgttactagtacttctaaatacatttatccaaatagacccttaatattaatatatatcaacaatacttacattcaaatgatcacttaatcaagacttgatattattgtatataaaataaccagattaattaaccaattacgtgcttgggtttcatttctaaaatcaatattagtaattatgtagagatttaaaaaattattcagcataatcataattattatgataataagcta

SEQ ID NO: 196292 - DNA, 413 bp, Glycine max
agtctcacgattgtcacatgcttctgcttattttgttagcacgggctatacgagacatcttgccaaacatagtcatgttcacgataactcgcctgtgcattttcttccatgctatatgtagcaaagtgattgatccagtaatgtttgatgagttggaaaatgaggccgcaattatactgtgccagttggagatgtattttccccctgctttctttgacatcatgattcacttgattgtgcatctggtcagagaaatcaaatgttgtggtcctgtttatctacggtggatgtacccggttgagcgatacatgaagatctttaaaggggttacaaagaatctatatcgtccggaagcatctattgttgagaggtacactgcataagacgccattgaattgtgttcataatactta

SEQ ID NO: 196293 - DNA, 433 bp, Glycine max
  unsure (1)..(433): unsure at all n locations
agcttgagatgaggaagagtttattggtgtaacttcctgcttntattggggaccacagagtggtacctggagatatgtctcgggggtcaggagaccttggggacgtcaggtggggtgctattgcccaaaaccaagcttgaccaatcccgacccaacccgggcatattctgtcagtgagaacctgtgatgtacctaaacaggcgagctcctggcagtcaacagattaaaggaacaaagaccacaaagcaaggaggcttgtggtagctggccagctgtgaaacttgattgatatgtgagatatggtctctggtaatcgattaccaagggtgggtaatccattacaaggcttataaatgaagacagggggcttatatggtctctggtaatcgattaccacgggatgtaatcgattaccacgcttgaatacggagtc

SEQ ID NO: 196294 - DNA, 380 bp, Glycine max
  unsure (1)..(380): unsure at all n locations
ngagcgtagtggaagaaaagttcttgaatagattgttttcttcttctagatatatcagcgcaaagtcagatgtttccactttcaagttagaaccatatgaacccatttgtgaagtctggaagtgattcaaatcattgttgagaaaatgtcccaatcatggttttgatgatgttacccacctaagcatattttgcaatggtctaaggcctaatactaagatgattctggatgcagtcgctagtggaacaattatgtttgtagatgttgaacaagccacaaggataattgatgcctttgcttcaactgatcaccaatctcatcatatacagacaatcgatacagaaaagaggagtgttggatctcattctcaatggtttttc

SEQ ID NO: 196295 - DNA, 249 bp, Glycine max
  unsure (1)..(249): unsure at all n locations
agcttanaagctacacatgctatgtgcatttgttattgctgtatgtaagcatatcaatataaaatacttgcaatatgttaattcggtgtacacattagattacatgtctataaagtcctgctaacaaacatgtgtcattatgattattgaccaccatatgaaggatcataattatgtgtcaatccagctatgagaagaaatgagtgaatagacaatttaatccctgagattgtatccattttgcatatt

SEQ ID NO: 196296 - DNA, 348 bp, Glycine max
tgctgtcatgtagcacaggaatatgtcaaatatttgctgtctttacacaaatgtagggtattggtgttgtttattttaagttatcctttttttcaagaacacccaactagatattgattttcatgatcataaattttcgtagcttgaaagataggaataatttccggtagttgtttattaattttggattatttagcaatccacttttcatttcaattaactccttgcactatgtattttgagctttccctaccctgtagaaagttgtatatagcctgataaccattccatttattactatatttcctacttctgtattgcaatgattgaattgttgattgtaacaca

SEQ ID NO: 196297 - DNA, 464 bp, Glycine max
  unsure (1)..(464): unsure at all n locations
accggatcttaatcactgagctgcagctgtacccattttaatttcttcaatagagctnggcatagcaccactaattgctctccttttgaagttgtttatggttctaacccactaactcctcttgatcttttgtctatgcctaatgtttctgtttttaagcataaagaacgtcaagcaaaggtggactatgtgaagaagcttcatgagagagtcaaagatcaaattgagaggaaaaataaaaactatgctaaacaagccaacaaagggagaaagaaggatgtcttctaacccggagatagcgtgtgggtgcacatgataaaagaaaggtttccggaacataggaaatcaaagcttcaaccaatgggagatggaccatttcaagtgctcgaaagaatcaatgacaatgcttacaaatgtgagctgcccggtgagtataatgatagttccaccttcaatgtctctga

SEQ ID NO: 196298 - DNA, 191 bp, Glycine max
tcggacatccgtgtgataagtttgaccatttgaatactcaagagctttcgttgttcaaattcgagcgtgtggatatattatgcacctgaatgggacatcaccaccaaagctgtgacacaaggaatttctcgagagcgtgtaatgatctaattgtagagagtgaatatatgatgcgcctgaatcggacaccc

SEQ ID NO: 196299 - DNA, 433 bp, Glycine max
  unsure (1)..(433): unsure at all n locations
agcttgagccanaatcctgactcaccattaattcttgacccaaggtgagaatgccaatccttatcctcggaagcaaaaaaagaggagaagaaaatttccaatcaaaggaaaaaggagaagaaaatttccaatcaaagaacaagagaaagaaaatttccaatcaaaggaaaaaaaggaagcaaagaaattcccaatcaaagagtgggagaaagaaaaaaagaaaagaaaggaaattcccaaccaaagaatgggagaaagtaaaaaagaagatagctcctgatcgaaagataacagaagatatgtgcagagaggtctttggaccggacaatatctgaacaatacagaattgtcaccaaatgaacgaaaaaggaaggagaggaaaccacgacctataatggtcttctccctttaattaccaaccaaaatcccgtgc

SEQ ID NO: 196300 - DNA, 425 bp, Glycine max
  unsure (1)..(425): unsure at all n locations
tcctcggtgccattcctgcgaaggcaaacatntggaatttttgtntagngggacattactcttaaagcaaaaatggcatgtaacctcctcccatacaaacatcaatgtaaatttagaacaagcttatgcgcatatttccttacaaacgttctcttgcacaagacatttaaccgaaaaaatgcacccatatacaatcaaggcagcttcgtcatctagattatttacacgtacctccaaggtgtatttgttacttatatcacacacatctccttggctaaattcacatacatgcatactcaaagcattttggggtaccaaaaattgcacatgtgcacctcttggcatttctaatacctatacatacgcaaactgtatgatgaatcttgactatccacacaataaaggtgctacattcatgctctttt

SEQ ID NO: 196301 - DNA, 442 bp, Glycine max
  unsure (1)..(442): unsure at all n locations
agcttcaaaataanaactaaccggttgttgaacgatgaacgatgaagaacgaatgaagaatggtcatggaatcgatcacggaaacgttacggaagcgactcggtcttgattttccttcttctttctccttcttctcactaatttcactcaaatcttgttgatttcatatgctggccccttccttcagccccctcacgcctatttataggaaatgaggggtggaggttgcacagcaggtcacttgcttgcttcctcctgaagtaacttgctcgcctaagcgagctggttacttcatccctaagctttctagtgggcccaggggctgaaaaatgtcccaaaagtgaaccattttgcccttcttttgaatatttgcacatttccttccgaaacatcacaaaaccctacaaatggcatgccaattagtgttatgcagcttaattca

SEQ ID NO: 196302 - DNA, 374 bp, Glycine max
gttgatgatgtcgaaaagaaatcacatgtttgtcatcttcttaagggggagaatgtgaatgtatgtatacatgattttgatgatgccaaagaagaatcaaacaaggctgcttcaaatgataagcatttgcttcaagaataattcaagattgcttcaacaaacaaagccttgtttcaagattcactaaagaccaagccttgccttaaaacaaagtgctgtcaagacatgcaaggctctagtaatcgattaccaggaagtgtaatcgattaccagaagacagggtcgagaaataactgttgaaaaaggttttgatattgaattctcaacatgtaatcgattaccatatgtctgtaatcgattaccagcaacaaaac

SEQ ID NO: 196303 - DNA, 399 bp, Glycine max
cataaataacaaataagtcattagtcatcaaaacataaatcatttgtctaagactatgtggttttgtgaagatgtctacaagttggtttttagtatctacaaattttaaaacacactgtggtaaatatgatttctttgttctaaatcttgatatgtggtgatctcagattcagctaaatagctaatctaatttgagttattgcaaatttgatttctttgttctaaatcttgatatgtggtgtttatgaaaatgccttatgcttttgattcacatttaatcaattggtaggaataacactgttactaatgggtggctggaaacatatagatgggtgttttcataaatgccttatgcttttgagtcacattaatgcactctgatacaatttcctccatcat

SEQ ID NO: 196304 - DNA, 303 bp, Glycine max
atacacacatttatcactatcattaatttgaaaattcatacaaagaatgacttaatcaaactattgcgccaacgctttggagcctggttcaaaccatacaaagacttaacaatctatttttcaagaaaaaatattttcaaagaagtcacatttctagactcactataggccattagaaatatatatacctttgaatacaaaccaagaatctattagtagtcttatcgtcaaaatatccacacaatacaataatactttcttcctttctataatacggaattaaccttactaacaccctccact

SEQ ID NO: 196305 - DNA, 327 bp, Glycine max
  unsure (1)..(327): unsure at all n locations
tctatatttcaatgtgtttgtcttaagactgcatccatagagaatatttattctccattaagcaaggggaaagtagaattattaggaaggattaaaatattaatagattttgtatgatttcaaatattaataggttatttatagatgtaatttactacaaaatattatacttttcttttattcaagtaatacaattcgctaacaaganaaatttagttattattgtataaagaaagaatatttggttagggtgaatggtgaactaaatcccaactcccattgactaccagtcatgaatacacgaggacctactgctagagacactgc

SEQ ID NO: 196306 - DNA, 373 bp, Glycine max
  unsure (1)..(373): unsure at all n locations
aaaatctatggattctcttttaatcatgtataattaaaatttatggttatattaaaataagaaaaatattttattttaaatgggaaaattatatattgagtctttttattaacctatatgacgttnttttcgaataaatataagctttttattggtgaatctaaaactttggtttaattgttntacccttacatgatgttgttgatagtagtctgggattagataaacgttttgaagtttgtgagcaaattaaggcgcaaaacctgtacatatatattntaaatcaaacacccttaaatttgtttgcaacaagtcatagttgaaaagtttattcagaatgaataacnatcgtatatttctttgtcgcatgcta

SEQ ID NO: 196307 - DNA, 420 bp, Glycine max
taatacccaaaatcacatctacacaaccaaggtctttcatatcaaaatttctagacaagaaaaacttcacatcatttatgaaattcatttactaccaaatatcaatatgtcatccagatacataaaatgacgcatccattatcatcaaattgtttcacatacacacatttatcactatcattaatttgaaaatcatacaaaagaatgacttaatcaaacttttgtgtcaatgctttggagcttgtttcaaaccatacaaagatttaacaatttatttttcaagaaaaaatattttcaaagaaagtcacatctctagactccataatagtaccattagaaattttagatacttctgaattaataaccaagaatctataagtagtattatgtaaaaaatatccaacaaaatacaattaatat

SEQ ID NO: 196308 - DNA, 287 bp, Glycine max
  unsure (1)..(287): unsure at all n locations
accacgctcttactgcattacttgtttacgtgaatgatttgatccttgcaggaaacaaccaacaggaaactaatgacactaagcaatttcttaacaaataattcaaaattcacgacctcagcaatcttaaatactttcttggatttgagattgttctgtttcatcaaggaatccatattngtcaaagaaaatatgcattggaaatattttctaacatgggtcttctggctttcaaatctaccaacactcctatgataaaaaaaatactatgctacacacagatgatg

SEQ ID NO: 196309 - DNA, 469 bp, Glycine max
  unsure (1)..(469): unsure at all n locations
ttgcagattnggtcttcgccagtgaaaggatcaatgtaggtccgaatttaggcactattgagcatcctactaggacgactgagaaaactggggcaaatgaacagggtgagaaagagggagaaacccatgctgtgactgccattcctatacggccaagtttcccaccaaacccaacaatgtcattactcagtcaataacaaacatcctccttatacaccacccagttatccacaaaggccatccctaaatcaaccacaaagcctgtctaccgcacttccaatgacgaagaccacctttagcacaaaccataaaacaccaacaaaaaggaattntgcagcaaaaagcatgtatggttcaccccaaattccgttgtcatatgctaaacttgatcccatatccactcgataatcaatggtagccataaccccaccaaggtcctaacctcattttctgggatcgacttgacaca

SEQ ID NO: 196310 - DNA, 266 bp, Glycine max
  unsure (1)..(266): unsure at all n locations
ccgctttgatgaatgcgatacccggggcgaacggagagagcatgaatgagggaggaccccatgntgcgactgtcattcctacatggacacattctccaccagctgcaacaatatcaatacctcgccaatatcagtccttntcattacccaccaccctaccaagcaagaatgcccacatatccgcagaggccacccctaaatcagccataaagtctgcctggcgcacatccgagacctaacaccacgcgtaacacaaaccaaaacac

SEQ ID NO: 196311 - DNA, 485 bp, Glycine max
  unsure (1)..(485): unsure at all n locations
actaagctttaatcctgcggtgcttgggtttctggggatttttctttttanaagtatggatgaaagaattggttcctcccagaggtttgtgggtgttcatgacagtgctgggttcaatgagtggatagcagatatggaccttcacgaaattaaaagctttggcagtatatacacctggtgtagaccaaatggttctgcaaggagcagacttgatagatgtttggtatctgctcagtggataaataaatggcctgattcatctcaacatgtgcttaatagagattattctgaccattgtccaatcctcttgaaaactgacatgatggattgnggccccaggccttttcgagtcatggattgctggttgaaaaataatcaatataaagctttgcgtaagcaagtgtggtgtggcgaagtgcaatctggctgggggagtatcgtgttgaaaacaaactgaagactctaaatcagtttaaaagatggag

SEQ ID NO: 196312 - DNA, 362 bp, Glycine max
  unsure (1)..(362): unsure at all n locations
gttgaaggagctntacaagatgttttggctttacgngcccaactcctttgagcggtgtttgtattggctgttaacttcattgcttcatcttagtacatttaatatctgttttgcattggtcattgtcgcaacctacccttttgcgggcgagcgagacgaggctcacgggtgcctcttgtagacaaaggatcaagctgaaagttttgatgatgccaaaggattacatgaatcatatgcttctcaaagatttactcaagacaaagccattagagatattcaagatggataatacagacagtctatagagtcttacaaaggatattaaatatgaagggaattcctatcgaaatcgcaaaagggtt

SEQ ID NO: 196313 - DNA, 358 bp, Glycine max
  unsure (1)..(358): unsure at all n locations
taatgcttgtgatattgacttataattactgcatatatgtgtttatgttatatagaatggctgatattgaagttcaaactcaatcacaagtgatacaagctgatactgagggtgatgctgatcctacttattcaccttcatatttaagtggggatgactatatatacttggatgatgagactataacatcgtttatgtctaaaaaaaagcataggcaagtgtgcaacctccaagtgatgaagataatgagcagtcagacacagattcttggcacttagaggagttgaagagcccaactagtacagatgatgaggatgatgagaaggttggtttcccaattnttaatccaaattcaacc

SEQ ID NO: 196314 - DNA, 458 bp, Glycine max
tgcttgtggagcttctatggaggctggatctttgttcttcaatgagggccttcaatggtgacttttcaccatggagatgcagcggaagacaaaggagaagaggtgagaggaggcgccatccattaaggaataagccatggaaaataagagcttcaccaccaagatgagccttggataagaagcttggaagaatgcttcaatggaggaaaagaaagagggagagaaagagagaggggggagcacgaaattgaaggaagaaaaagggagagaagttgaactttgagttgtgtctcacaagactctcattcatcaaagttacaacaagtgttacacatgcttctatttatagactaagtagcttccttgagaagctctcttgagaacaccttcttgagaagcttctttgagaaaaccttcttgagaagctagaggctagctacacacacccctctcataac

SEQ ID NO: 196315 - DNA, 439 bp, Glycine max
  unsure (1)..(439): unsure at all n locations
tactcaagccttttagtttcagatgatgcagatgggtttgagctacctcatgcacttctctaangactatggcatcatttctggcgctaaactgctgggagttggaagccatcttctcaattaaatttctggcttcagcaggagtcatgtctccaagggctccaccactggcagcatctatcatacttctcttcatattactgagtccttcataaaaatattggagaagaagctgttctgaaatctgatggtgggggcaactggcacatagtttcttaaatctctcccagtactcatacaggctctctccactgagttgtctaatacttgagatatccttcctgatggctgtggtcctggaagcacggaaaattttctctaagaatactctcttaaggtcatcccagctcgcgatggaccttggagcaaggtaatacag

SEQ ID NO: 196316 - DNA, 389 bp, Glycine max
aatattgaatgactatatgaaattattgtgagacaacttagggctcgtttagataattcttttcataaatactcatacgaaaaaataataagaagataaaataatttaagtttctgacatttgtgtttattttttataataaacataatttcatttcataggtacatttgaggaagacaataattctttttttggaggccttttatcctcttggtaggcccttcaccatggatttgtgttttaaacttttatcaatatcaaagattagtcattaaaacaaattgtcaacacaagagtgatgaatttcgataatattgactccaataataatcctaatagtattttgataatagttataataataatcttgataataatttcgataataa

SEQ ID NO: 196317 - DNA, 242 bp, Glycine max
  unsure (1)..(242): unsure at all n locations
tctgagccgattaaacgacaataacttttttctccgatgtctgatcgagtcccgaatatatcgagacgctcgaaactatatgttgaacctctgagctcattctaatgacaataactcttttctcggatgtctgattgagcccccgaacatatcgagacgctcgaaatngaatgttgaacctcttagctaatacacacgactataactttttactccgatgtctgattgagtcccgtaacata

SEQ ID NO: 196318 - DNA, 490 bp, Glycine max
  unsure (1)..(490): unsure at all n locations
ctaagcttgccaacaaatgaacattaacctaaggataacacaccacttatatttttctctaaaacaaaatatgcattcaatgctctaacacaatntgagaaaagaggaaataaaagaaaaacatcccatcaagccaaatccaaatcgctgataggagaagaatcactatttaataccttttaccctctcacatagaactacattgattggaactaggcagatatttcacaatcactaaaaacaacagtttcaacacaattggctagtcaaatcagaatcacttgtgcataattgctatggttgctatgtcactggcaatagattgaacacttgaaaatcaattggacaaatataatactagaaattaataccaactactatagttgaggcacanactcatggcatcactctaaatccaacccacgaaacaagtggaaaataaataaatagttcatctttccattattgtgcctctccctccatgtgtgct

SEQ ID NO: 196319 - DNA, 442 bp, Glycine max
  unsure (1)..(442): unsure at all n locations
tgctgctaagtaaaggcctaaaaagcatctgctcctgctttatctctctttaccagctgcaaaggactcaccttctgattctgatgacaccaaagacacacccacttccacctccactaaccctaaaacttcaacctccaccaccccttcaactgaaacctccaccactaccacatcttcttatacatcatctgcaactgctgctggctccccaattgttgctatgttttttgcttctttgatcccatactatgtgttgcgcttgatgtgaatttgaggggagatgttatggagtcaggacagaggcagtgctttcggggcttccttgcctttcaatctgattactctgttttcttcttctgatccaatcgaccaattcagaatntgctatgactatgagcgatatttattctaatatatgtttattgtatcgtctttacat

SEQ ID NO: 196320 - DNA, 333 bp, Glycine max
gctgtcagaggggccctatggggtggaccatttaatttgttttgatgaccgcaatggatttctgactattggatattcaaattgcaagttgtgcattaaggtgtgattatgatgcttacaggtgcagctggatctcacattgctgtagtcagaacctggtggagtctaaaaacttagtgtttctctaccaaaaaattcccaatatcttattagacttttccataagtgcaataaagtatcaaatggacacctcaacatgagagtaattcaagaaggcctcagcctctctcatgctagctatagaatatgacttacaggcactggtacacatga

SEQ ID NO: 196321 - DNA, 276 bp, Glycine max
cctacacatgccgacaagagaagggttgccttataaaggaaggaaagaagcctatcccatttacaatggcggggaccacagatggagagggtccctatctgccacattaactaaagttttgtcagcacggcgtggatgcatgaaaatcacgatgttgtgctagatggagaaatcgacaaagagtacgaaagttgggtgcagccgtgctcctcgagtttcaaattgaacaattagcggattgtggagcgaccccagatttcggtgtcaaatccaatg

SEQ ID NO: 196322 - DNA, 434 bp, Glycine max
  unsure (1)..(434): unsure at all n locations
ctaagcttaagaattatttgatgatgccaggaattnaaggaatttcatagatcattcaagaagcatttcaaggatgaagaaagcaagatgtcaagcaaaagcaaagagatcaagataagaatttagatagactattagaaaagattttgaagagcacaaatgtttggccaagaggattttctttcaaaacctttttattctaaagatttctctctggtaatcgattaccagaggttgtaagcgattaccagtggccacaaagctttctggaaatggtttcaaagttattttcaaagttttcaaagctgtaatcgattaccaaaactatgtaatcgattaccaatgctttaaaacgattaataatgacttttgtagtgtgtaatcgattacacatcatatgtaatcgattaccagagcttttgaacgttggacat

SEQ ID NO: 196323 - DNA, 324 bp, Glycine max
acaaaaaataggtatctatttcagcaaaataagctaaagcaaacacacaccaatcaggtgaaggtctgcacttatttctatatctctaaaacaccctatagacaacaaccctttgggcttgaagcatggataatgctcaagcaaactctacctcgcgctgaaagtaatctttatttataatgaaagggtgtcaaaaattgaatacctgattacttacttgcgcataaaggatcccgatagcatcatgtcaaatactatcttaacagctcaagctattagataaaattatttttatatctctacacatgtgcacaatgggcttac

SEQ ID NO: 196324 - DNA, 335 bp, Glycine max
  unsure (1)..(335): unsure at all n locations
tactaagcttctcattgggcttcctagccaatgaccggagcctatatggttgtctcttgtgacacangcaatcgccaacatttaatggtattgaatgcctacatcggtcagcatacttctttatttgattatgtgccttggccaaatctcctttgagatcatgtaacattcggtccctgtcattaatcatcacgtttacctctttcacagttgatggaatagtggctcctttcataagatggggtgggctacaaccatacaaggctctgaaaggagtcaatgtcagagagttgttgtagttggtgttaaaccaaaacttagcccaacttaaccac

SEQ ID NO: 196325 - DNA, 489 bp, Glycine max
  unsure (1)..(489): unsure at all n locations
cagaccaaggcaactcanaatctaggtatctaatacccctattttaatggattttcaagggttgagaagtgaaaatgagaatggggtaaatttggagtaaactctcacctcacacaagtctataacatcagtctaaactttctcaaactggatttacgcctaaaattccaccgaatcaaaatttgacttctcaacacccaatttcactctagaaatggctcttgccttcactttggtcatttgtttttctctcttgcacagcccaagcttcctcataagtcctaaatgacatttcaaactaggattaactcattttaacctccatttaccactgaatcatggtttagccttccaactctcaaagcctcactctttttctactcataacactacattctcactttctaacnctaggttagctctacccttcatctctaacacgtntttcataggcnnatttaacacataacatcacagcatattataaaa

SEQ ID NO: 196326 - DNA, 369 bp, Glycine max
  unsure (1)..(369): unsure at all n locations
tgcacatntacatctgagcggaaactctatncttgtacattttcctaccgaagnacggaagcttacagccttacgatatctacatctaaggtataatgtggctattcatggagagatcccttatcactttaaaaacctctcacaactgcaatatctttgtcttggagaacataatctttccggaccaatacctttccgggttgggaatcttcctatctttcatactcttagacttgaacgcaattatgatcttaaaattaacgatgcaaagaggctatcttctctctcttttttaacaactctagacctgacatcattgcataatcctggctcctgtcgttactggcaacaagtgatcggtgagcttat

SEQ ID NO: 196327 - DNA, 398 bp, Glycine max
  unsure (1)..(398): unsure at all n locations
tagaacactcaagcttgctngtgtggctggtatggacgcaggatcgtagagcacctatgaggtcnctattatggcgagcncacaccatggagatgcagcggaagacaaaggagaagaggtgataggaggcgccatccactatggaataagccatggaataaggagcttcaccaccaaaatgagccttggataagaagcttggagagggtgcttccatggaggaaaagaaagagggagagaaagagagaggggggagcacgaaattgaagaaagagggagagaatatgaactttgagttgtgtctcacaagactcttatttatcaaagttactacaagtgtaacacatgcttctatctatagactatgtagcttccttaatacactntctcgagacaac

SEQ ID NO: 196328 - DNA, 484 bp, Glycine max
  unsure (1)..(484): unsure at all n locations
tcatctcatatattgttaggcacattagaacttacaaacatttctttttctatatcaaacaaggcattattctttgtttccgcaataccattagattaaggagcataaggaggtgtcacttcatgaataataccatgcatttcacaaaaattactcatatctaaagatgtgtattctccacctctattagaacgtagaattttaatttttctttctaattgattatctacttctattttatatactttgaacttatcaaacaactcacttttgtgattaattagatacacacaacaatatttggagaaatcatcaaagaaagtaataaagtatctcttaccaccacgtgttaacacatcattactatcacatacatcactatgaaccaattcaagcaagttagtttctctttcaatacatgtagtaaaagtttgctttgcttgaattcatgtntcacattntttgttcaaatcaatacaaactt

SEQ ID NO: 196329 - DNA, 348 bp, Glycine max
  unsure (1)..(348): unsure at all n locations
ttctcttcattatgagtgcgcacattgtctttccaaacacattatatgaactagttctggcttactatcgtactcctcttggatacctccgatactcctatatttataatgaagcattctttcgccatgcgaaaaaagcgtctttataatctagtcattatgcaaagtcgggcctttcattgtgactaatactagagtagaatttgccactatatatcgcacaaattctgcccataggataactaaacattctataattatcacatgaatgaatattgcacaattganataatagatgaaccgacttcacaaaatgataataataaacaaaatgcaatattgttgaac

SEQ ID NO: 196330 - DNA, 464 bp, Glycine max
  unsure (1)..(464): unsure at all n locations
tggntcctaactatnggttatggagctctaaacgttgtgttaatgcaaactctgtgggatgatctgctctacattagtaatggcttaactaaaaaatgggatgttattggtgacttcaacagtactctgtcaactacggagagtatatggagttgtaattttcatggccaccatgttatgcacttattttgagatttccttctctatgggaatttttttgatatgggatatcaacgagatatgatgacttggacgaatggttgaataggattatgtggtggatgaagtctaatcatcgccctcttctcttgaggttagataatctggctaataaaaacaaccacaggagggccttccactttgaggcaacatggaccctccatgatggttttcaagggttgatagcgagaaataagagcatgcgcatacgctgctcttagtcccaaatattgtacgttattgat

SEQ ID NO: 196331 - DNA, 412 bp, Glycine max
  unsure (1)..(412): unsure at all n locations
aactcaagcttgaccaatcccgagccaacccgggcatagncagtcagagatatcctgttatttacctaagcaggcgagctcctggcagtcaacagataaaaggaacaaagaccacaaagcaaggaggcttgtggcgtctggccaactgtgaaacttgattgatatgtgagatatggactctggtaatcgattaccaaaggtgggtaatcgattacaaggcttaaaaatgaatacaggaggctaacatggtctctggtaatcgattaccaaggggtgtgatcgattaccaggcttgaaaaccaagtcaggaaacttagggagcctctggtaatcgattaccacgctgtgtaatctattacacagacggatgggttactggtaatcgattaccaagtatgtgtaatcgattaca

SEQ ID NO: 196332 - DNA, 464 bp, Glycine max
  unsure (1)..(464): unsure at all n locations
ctataaatctcagctttagggattgactatattgactcgcttattgtttttttgntacttgcccaattaggtttttgggttatttgaaaaaatagggttgcttgactaattgggtttaggggtattttacaaataacggtttagtgttacttggccaattaggatttagggttatttgacaaattaaggttacttgactaattagggtttatgggtatttgaaaaattaaggtttagtgatacttgcccaattagggtttagggttatttgacaattaagagttacttgattaatcacaggttagggatatttgaaaatttaggattcatgagttacttgacaaattataagctgtttattccatgtcagttttgctggtgagacatctaatattttagagaggtgtgcacactgcagagtattatcaatttggactgtgattaatgtctggacatgatttata

SEQ ID NO: 196333 - DNA, 486 bp, Glycine max
  unsure (1)..(486): unsure at all n locations
ctaagcttgtctccacaactagccatcacaatgagaggatatttcttgtctgacgttgttgccacagcgggancatgtcacattctacatggtctcaccatgaccaaaagaagaaagaacttttccttctcctttcatactcacaaacaagtgtgatactataagcataaaactcaactcatgaaaacaagtgcatcatgcaccacaacaacacatcataatccacaacaatgccttatagcattctaacccattccatgaattaaattaagaactccaaagctaagcgtgcttgacttggagtagttaatggatgtgtgacctgttgggaagtttcccagacagcatgtgagcatcgacaaagcacactgaaaaatcttgtgttggtctttaggtcagtcattaatcatgacagcacacaaaactgattttcaggttntggaaatggctaccaacagatgattctaatcgatggaacgttctgac

SEQ ID NO: 196334 - DNA, 453 bp, Glycine max
  unsure (1)..(453): unsure at all n locations
gtttggatgagttagacattctcatttattntagggtttttgtaatgatgtttgtgatgtttatatgctgaaattgcctatggaaaactgttagagatgaagggtagagttaacctacggttagaaagtgagaatatggtgttgtgagtggaaaaaaaggtgaggctttgagagttggaaggttaagtctgaattctgtggtaaatggaggttaaaatgagttaatcctagcttgaaatgtcatttaggacatgtgagaaaggttaggctgagctagagagaaaaacaaatgaccaaagtgaaccaagagccatttctagggcaaaattgcgtgttgaagagttcaaatttgattcggtggaaattangtgtacatcagtttgagcaagttagatgatgtatagactggtgagtgagagttgtccaattacctattctaattactttcaacta

SEQ ID NO: 196335 - DNA, 362 bp, Glycine max
  unsure (1)..(362): unsure at all n locations
tagcccaccatcttttcataggtgtaaactttatatgngnctactatcangggtatcatttntttctctgtcattgaggtgccacttgatctgccaggtctctccacctttgggcgtattttttgaaagatctgtgtcccttttttcacatgttctgtagttgcatcctattcggaaccatatcaaaattttactgatactgcctaatgaaggaaaccattaggtccttccaagaatggactcgggaaggttccaagttagcgtaccaagtaacagctaccccagtaagactttcttggaagaaatgtatcaacaagttctcatcttttgcgtatgcccccatctttcgacaacacgtcttt

SEQ ID NO: 196336 - DNA, 243 bp, Glycine max
taagagtagtgtcccactggtaaaattaactttccaaatgtttgccttcgcaggaatggccccgaggaagcttgcctcaaagaggtccaggaaggacaaggcggccgaaggaactagttccgctccggagtacgacagtcaccgctttaggagcgctgtacaccagcagcgcttcgaagccatcaagggatggtcgtttctccgggagcgacgcgtccagctcatggacgacgagtatactga

SEQ ID NO: 196337 - DNA, 489 bp, Glycine max
cgtagaggaagcttgcagaggaagatagagagaaagataatgagaatcatattttttaggaatcgaatagcatgaaaagtgaattagctcgcaaagttagttattacaactaattatatagttagttgtaagagtaactaactcataactaactaggctaactctagttacatagagactaaccaactaagctaactctagttatataatgattcattctaagaacaagcatccctaatttgtgttactttatctcatacctgatatacacatgcggaattttcaaatgctttcttgatttgcagcagtcatacataagtgaaaaaataagtcaataaaaagtatagaaataaaagtattccatgagaagaaacatatcataccttttcttttctaagtcgtgtctacactcaatgcacagttttttatagaggagtaatgtacgtaccagcaataaaaatatgttttcaaacattagattaacaatgg

SEQ ID NO: 196338 - DNA, 362 bp, Glycine max
  unsure (1)..(362): unsure at all n locations
aaagattcaactaatctctgaaaataagaggaaatcgcagaagatcgaacgtcaaagtcaagaaaagagcagaagaaatcacccggcactccacgatgatgagaatgcaaccaacctggacatctgacggtggatagtccaaagttcaagagaagagaaaagaaatctgaaaagaaagcctctcatgaaaagaaggctaagaacgcccacattatatgggatgacaatgatacggactcatctgaggaactacagaacgaagtntgaaacctgaatctaatggctaacaactatgaaagcgatgaagaggaacatctttcgacaagcacgtatcccttcacttgaggaactacaagacgcac

SEQ ID NO: 196339 - DNA, 496 bp, Glycine max
  unsure (1)..(496): unsure at all n locations
gaccttagaaactaagcttcatntaagctgaaccattntatcaataaagacaagttgatgtttattcataaaattagagttcatctctcttatcttagtgagagtgattctcctaaattcttgagtgattcaagaacaccctggctgtatcaaaggactttcacaacctttgtgtgttgccctcgctggaaagagtgattctttccttcctttcatcttcacccttgttctttcaaaccacaattccataaaatccacctctgcccagaattatctcgtggccataactcccgttttacgcactcaaattaagtgattcttgagcctaaattaaatttcaaaacgagaactttcacctcgttttggaatcacctcatttggagccctgtagcttcagctattgccatttctatatttctgtccagccaccacttaacctacatgttaccatcccattcatccattgtatgccaagaaccacctaattaagacccac

SEQ ID NO: 196340 - DNA, 426 bp, Glycine max
cagcaactttaatgaaggggcgttatcctagtttgtgagttcctgtcgggtttgacaatacaattttatggctttcatgaattcccaatattctaaaactcgtacccaatacatcaatattcaaacactatccatctaaaatacttagaatgtcgaccatctcaaattctttataagaaaattatcttcaaagaatatatcatgacagttttaaaggaaaataaagtgttttactcacctcttgattgaagatttctctaagcatctagacattctcgcaacgtatcttatagtcatgacacattccctccttatgctttttcactgtcttgatctcacttttggttccttggttctctctctgatgaccctcaattcttctaatcgttggttatactaattcttagacaataactatctattatt

SEQ ID NO: 196341 - DNA, 469 bp, Glycine max
  unsure (1)..(469): unsure at all n locations
gaagcatagtggcagctaatgaacatttttcttatctattngccgcncagatttgactgtatcttttggtaatatgcaaatataaataggataaggctatggcttatggacatggtcttcttgatacagaattaaattgcaaggcattcactaaagaaagcagtgaagacagagttccaacagtcatatataaatctcaaatgatggaagaaggtcttcactacatcatattctttctagctatataaagctgagatcatcatcgcaagacaggaatatataattaagaaatggctccaaaaaaacaattagtgcaaattttgaaatggacatgttccaatatgatctggtttcgattggacaaaatattcgcctagcattcggatggaatctctatgccctcgccctgtttcatttgacatgtacttagaatttgctttcctttattgaatccgatatcacacatcat

SEQ ID NO: 196342 - DNA, 301 bp, Glycine max
tcgcccaatataagatcagccgctgaggtgcgcgaccattggggaccttcagctattacctatggtagaagaatctgaagagatcctacgacgccctctagagggaaggaaaccatacctcttctcagggctctatcctttattagctagaatctccaagacagtccaaatctcggcgcatgaattaaaccataggaagcaagtcgaaaatggggtggttggaataccgacaaaatatttggaggcaaaagcaagaatcttggcacgtaaaggcaaatgggccccgttcataaacattctc

SEQ ID NO: 196343 - DNA, 336 bp, Glycine max
  unsure (1)..(336): unsure at all n locations
ctcaagctttgagtcacganatggcacatgagcactaggctctacaagttcgttaatatactnccncaacgcactcaaggacagattgatagatttggattcctctaatgtatgtccttcacttcctattaagacacaaataatgttatgatctcattaagcagcatatatgttgtaccaagcaaaacaagcctggtcacttaactaatagggtgctggcaactggtcattttaccaggctaagctcataagtatgccattcaagttttactttgacaagatttcatatttgctttccaaattccaagcattcaaccccaataaccttttgtcatt

SEQ ID NO: 196344 - DNA, 417 bp, Glycine max
gaaactaagctctcagacctcatatcccaaatgggcgcctttaatttttttttcttacatctaaatctaatgcagatattgaaagaagagatgtccttgtactactaggtctgaaaccagcttgaaaatcttctacacaagcaccagacccttcagacaacactagattctggcatgcctgataatatgatcgaaatgatcgcttataaatttcttctctcatggattcacgagtagaagaatcttttacatcaacctcaacattattaaaagaaatttttctttcttgagaagaactaacagtgtcagttgatttggaaccttgcttcgccttccatataaattcatctagaaagttcaaccgtgcagctaactcagcagtctccttcttcagcagctgatggtgtcatcaagcca

SEQ ID NO: 196345 - DNA, 287 bp, Glycine max
gtcagatcatgcagcgtattggcaaagtcgcctatgagcttcgccttcctctggagtcacggatccataacgatcttcatgtctccctcctttgtaacaccttacattctttgtccaaaattttgctacaaaaactatttaaacaataaatattgccgaacacacgtcaataactttgaatttttatttctaaagtggcaaaatatctcactcaatttcttctttctataaacaggatacaataaacatatatgtcattaaatgggtcgctagaaacaataagtttt

SEQ ID NO: 196346 - DNA, 429 bp, Glycine max
  unsure (1)..(429): unsure at all n locations
gcttgaacaagccctacaagnnggagagcatcgctgagagtagttactgctaacttcttttgccacccgagacacaaaattacgaanactttgaggagcactacgatttcccgctaccccaaattcatcatgagaacctccaacatctaccggagcattaccagaaccacttccattaaagaaatgacttgccttcgcgattaaaaagcatctcgcattctgccgtctcaattcaataaaaaaagatcatctctatatacaacgcacagaagaatccaacgtgacggctggtactacattacaaactaacctgatgatgacacccttccatgaggaggacatgaactcattgggctccaatcccgtgtcaaagtgccagacgcttgagctgcagatcgaccacgctacaagaatggtcaactggtagac

SEQ ID NO: 196347 - DNA, 468 bp, Glycine max
  unsure (1)..(468): unsure at all n locations
tctcaaggaagntntcttaagaaagcttctgcaggaagctactctatttataaataaaagcatgtgtaacacttgttgtaactttaatgaatgaaagtcttatgagacacacttcaaaggtccacttctctccctcttttattccttcaatttcgcgatccccccttctctctttcttttcctccattaaagcatcctcttcaagcttcttatccaagacaattcttggtggtgaagctccttcttccttggcttaatccctagcggatggagcctcccctctcttcttctcctttgccttccgctgcatctccattgtgtaaaatcaccattgaaggacctcattgaagctcaaagatccagcctccatagaagctccacaagctagtatccatcaccctcctctctaaaatttaattggattgggcttctccaatnaattaaattatttccaacaacacatatata

SEQ ID NO: 196348 - DNA, 320 bp, Glycine max
actcaagcttctatcattctacacagcaaggaaacatagggcacatgggatctcatcttgtctccccattgaaagatggcgatggattgtcacactctggtatgtgaccaactgaaactttcttgaattaaagccctagagcgatatcaagggtctggcgatcccgctgaaacttaatgacatgggccgatcccgaaagaatttatacaacaaaggccacccttggattcaaaaggaatcctaacgagtttgcatgagcggctaacatcacatgtaccctactataacaatcatctttggacgattcccctgagcccttt

SEQ ID NO: 196349 - DNA, 338 bp, Glycine max
  unsure (1)..(338): unsure at all n locations
aactaagcttatagcaatgtnggaactgctggatcgagagggctcggattattttatattgggganngcattaattattaatgtgtcttgactaattaaaaatttatccttcttaatattactatattcaattaggctttactactaagttatgaggaagtaaataacagaaacaataacttaaccaaaagtaaagcggccattaaaagtacacaacagaaattaaagagtgtatggaagaagaagacaaacacaagatttatactggttcgaccacaacttatgcctacatccagtccccaagcaaccaacgattcttgagaattctttcaccttgt

SEQ ID NO: 196350 - DNA, 413 bp, Glycine max
attggcatctgaagtctgagagctctacgctgattattctgtttaagctggacgcggggctaaagtagaagatgcaaggatgccaactattggtgtaaaggaagagggaatatcagctgctctgagcttggtcttccttgtctctggaaaattaactatttggtcattcgcattccaacagttccttatgatataagctaagtcaatggccggtcttaggttttcataggaggtaagggcatcagatcccactcccctcgatctacacaaggctgttattaatgctgggaagcctaatccagaagagttggactgagcgatcatggtcatttgtccagagatcaaaccgccaatgttcatgtccatccttgtgataagccatagaccaacctactctgtctgtgtcaaatctg

SEQ ID NO: 196351 - DNA, 383 bp, Glycine max
agcttgaatggatgtcgatgtctcaccccaacatggaagatcctatatctgactccaatcgcttttcctttgtgtaaccacaataagatttaaatccttctaattctttcgttatcctaatgtcataccttaatttcgtccggggactatcattcattgatcttttgatccttgctagtcaacttacggtgttaaatgccagttatagtgcaaaatagatgatcattcagcgttttgatcaagaatgcaaaaaataccaaaaaggaggggcaaaagggtcttttattgagtttcttggaccctagctcgcccaggctagcctctggctctccaggtccaccaaaagactttcatgttaagtaatcagctctcatgggcgagct

SEQ ID NO: 196352 - DNA, 414 bp, Glycine max
  unsure (1)..(414): unsure at all n locations
tctcanagtgtgaatgccactgttgcacaacaagaactatcttgtatgtttntgtcataagggngttcactagttgtcttatgagactgggaaatatctaaatttcttagcgatgtcacagtatctgattgcttcacatggtgctctagcatggttttccacatagtggccatcctgcagtccataaaaagaccatcaatattatatgtgtcatgtgtgaggttctgacataatgtatntatttgattaaatacatacattatatttaatcatattagtttgctgtatgcggactaatataaattcaatccatttcataaaaaaagtgtgaccaattattcaaccaactaaactacttattaaaaatagatatttatcgttgcattgaaacaaataaatatttactaattggat

SEQ ID NO: 196353 - DNA, 449 bp, Glycine max
  unsure (1)..(449): unsure at all n locations
cgaaagccgcctccatcattaggattattaccttacatctcanacaaacaaatcanacgtgacaagacaattatagttgctgtttgaatacctcacccactcaagtgtatcacacaattatggcttttctctaatgaaacactcttgccttttaccactctaattccccttgagttcttaggcaattcaagagattatggccacaacaaagaacaattcaccaatatgtgtaaggtaaggctagacaacgaaaaggttaaccaagaaaaaggctaacaatgtttttatgcacaaatgaaggacataaaattcagaattatgaattcaagaacaatccttcatgaaccaatatataccttaaagagtttttttttaagtccttaagcatgaccactcagccaaattttntttttaatttgctatacaaatctgttctttttttttttttt

SEQ ID NO: 196354 - DNA, 319 bp, Glycine max
  unsure (1)..(319): unsure at all n locations
ctcggatgtttganttgacgcccgaacatatcgagacgctcgaaattgaatggtgaagctctgagccaaatcaaacgacaataactgttttctccgatgtccgattgagtcccggaacatatcgagacgctcgaaattaaatggtgaacctctgagccaattcaaacgacaataactcttttctcggatgtctgaatgaggcccggaacatatcgagacgctcgaaatagaatgtcgaagctctgagccaaatcaaacgacaataactttatacacggatgcctgactgagtcccgaatatatcgagacgctccaaact

SEQ ID NO: 196355 - DNA, 376 bp, Glycine max
tcattaaagagaaaaacaacctatcttgcctatcttaaaaggaaggattaatgcgaggttgcataataaggactcatttactctacagcttgtcctggatccaagtcttgtgacaactcaaatggtaaacattaataacctaccctaactggcaacacctggataaccttgataattaattagctatatgaaataaactacttggttgttcaagtctatgattgaaaatatgaaggccacgaatatttttataagcatagcttcatgagtttctttattctgtgagacttagtctttgtacaatacatgacaatgagaataaactcaccctcgatacttatccaaagtctgtttactattttggagactaatgaac

SEQ ID NO: 196356 - DNA, 397 bp, Glycine max
  unsure (1)..(397): unsure at all n locations
gttctggangaagatattgctaccaggttcaaattctgtgtatgctaacncnccaatcagacttaacttcttactgtttaagcttttgtacttattttttctgtaccactgtatgctatataaaccatggacactgcagcccagagggcaatggagaactgaatgatagtgacagaaagaggatgacgtgccctaatagatccaaggcatttaaagtggaacttagctatgcttcacagatttcattgcacgccattagcaatgctctacgttgacaggaatctgacaattatcaagaagcaataagagtgcttgatatcatcttgaggcaacatgctgctcaccagggcgcggactatgaacatttctcttttcttctattattattattattgat

SEQ ID NO: 196357 - DNA, 463 bp, Glycine max
  unsure (1)..(463): unsure at all n locations
tgatctaacannattgnctagccattacaatgtctataagtgaaatattcgatgactcacaatcttaaggaccattttaccatcttagttaatttaagtaccaatttaaccgtctattacaattttagggactaataaataggcaaagcaccatttgaccacttactcaaatggtccaaattgccttatgcaatagaacgtgttatactaggttgtgcaagtagccattttttatttattctcttttaatgaatattctatttaagtgtgaaatgtctcttttacccattgttggaaaattcttaacagtttgtgaacgagtgaaagaaaaggggtgttcatgcttgagatcttgtttcgtcctgcatttaagccaaagtattgaagtttcacttgtgattgtgtctgcaacactaaacttagatctacatatttgcggagcaatttgttggtgttactacaa

SEQ ID NO: 196358 - DNA, 235 bp, Glycine max
tgtcgcgggggtcaggagaccttggggacgtcatgtggcgtgctattgcccaaaaccaagcttgatcaatcctgacccaacccgggcatagtcagtcagtgagaacctgagacatacctaaacatgcgagctcctggcagtctaccgattaaagaacagagaccattaagcatataggcttgtgtggtggctggccagctatggatcttgagtgatatctggaatatggcctctg

SEQ ID NO: 196359 - DNA, 419 bp, Glycine max
  unsure (1)..(419): unsure at all n locations
tcgtatgctcagctacagaatgctcagtctccttatgaccttgatggaattcaagntgctgatcaattgatagtctcagagttcaagaccttgtctgagctaaagcaatgttacttcaaaaaacaatttgatcctttaccagatagagcaattcttgcagctaaattaaaggagctgcaaagtgtcaacaaaacctttgagattacagggaagaagttagaatcgcaggcagggctcaaggactctgagattatatttctccaagaaaagctagaggaagctaatgtgcacaataagtcaattgagaagaggtaaatcaaagtggatcattatcagttcttgataatctccatatgtcaggactaagtcctagccattttgtcaccgttcttcgccacacagttaggtccattcggagc

SEQ ID NO: 196360 - DNA, 410 bp, Glycine max
  unsure (1)..(410): unsure at all n locations
ntccctttaagnggnctntctgagcatcacctatgantctttttaccagatcacctgctatgaacttcctttntcgcaacttggattctaatttcccgggtactcttctttttcatacttcctcttggattcttgcctcatgttttacttcttccaccaagtccaaatctaccattcgacattgtctactgcattatatatcattcttcaaagtgagggttcacgatctctattggaatcatggcatcggtaccataggtcaacctgaaaggtgtttctttcgtagttgattgtgcagtacaatgatagccccagggtatgcttggaagttcttctacacatagtcttcttggggcttttataatctttttcttaactcagtacgaataactttattagtcgcttcagct

SEQ ID NO: 196361 - DNA, 484 bp, Glycine max
  unsure (1)..(484): unsure at all n locations
nttatgtganaagatgtgactcttcacattggaatttgaatttcatcgttcaaaggtactggtaatcgattaccaaaacattgtaatcgattacagctttttgaaaataattggaacgttgtaaatacaatttgaaaactttttcaaaacaattttgctactggtaatcgattacaacaatttggtaatcgattaccagagagtaaaaactctctggtaagaggttttgtcaaaaactcatgtgttattcaaagttttgaaaaacttcttaatacttatcttgattgagtcttctcttcattcttgaatcttgagtcttgaatcttgatcttgattcttgagatcttgaaccttgaatcttgattcttgactttagactttcttcttgagtcttgaattcttcttgattcttctcttgaactctcgaattgtgcttgattcactagagtcgttctctgatggatctttgattcagttgagttgt

SEQ ID NO: 196362 - DNA, 339 bp, Glycine max
  unsure (1)..(339): unsure at all n locations
gggggggatcaacactgagctaacacattatgtttataatatgnnggcggaggtcctcaagagacacaaggaggcaatagggtggcacatatcaaatctaaaaggaatcaaccctgcttactgtatgcacaagataatcatggaagaagactatagaccagtcagacaaccccagagaaggatcaacccatcaatgaaggaagaggtgcggaaagaggtgctcaagcttctataggctgggcttatctaccccatatccaacagagttagggtaagcctagtccaggtggtaccaaagaaaggaggcatggcagtcattcggattgaaaagaatgacct

SEQ ID NO: 196363 - DNA, 186 bp, Glycine max
  unsure (1)..(186): unsure at all n locations
aaaagagagaaataacaagctggtagatttacactatactgagagccgaaaagagatcccatctttttaatactacacttctangacattgcggcgctccaacatatgtattataaagtgacgcgttactctaaagagacaagatatcactagatatacatcacaactatattttatgtgctattc

SEQ ID NO: 196364 - DNA, 416 bp, Glycine max
tcagaattcaatttcgatcgtctcgatatattacaggtctcaatcagacatctgatgaaaaaagttattgtcgtttgaatttgctgagagcttcaacattcaattttgagcgtctcgatgtattacaggacttaatcagacatccgagttaaaagttattgttgtttgaatttgctgagagcttcaacattcaatttcgagcgtctcgatattttacgggactcaatcagacatccgagtaaaaagttattggtgtttgaatttgctgagagcttcaacattcaatttcgagcgtctcgatatattacgggactcaatcagacatccgagtaaaaagttattgtcgtttgaatttgctgagagcttcaacattcaatttcgagcgtctcgatgtattacgggactcaatcagacat

SEQ ID NO: 196365 - DNA, 472 bp, Glycine max
  unsure (1)..(472): unsure at all n locations
tgaaatataatatcttgatttctaagatacccattgttctctcctctcttggcaacgtcaaaaaggccaatgtgcgtaaaacatgaataatttcatcatacacaaagcataatttgtaaaacaaacataaaagattctaaaacatacataaagaaaaacatgaataaaaccaaattgaaatgcaaaccacttagtcatataacacanatcataaatatcatgttcagtcatactaagcaaatattaaatgaaatactaagtgttcaaatgtcataataatatagtcaaatacacagctagaaatcaaaatactaataataatagtagtgtctaaactgatggtggtggtggaggtaaatcaaggtagtcaagaatgatggtgacatcttcttcacctttgtgatccttgagttcatttcgtcgaatcgcgtgtccacttgtcattccaaagcatcaaaactttcaccaacat

SEQ ID NO: 196366 - DNA, 497 bp, Glycine max
  unsure (1)..(497): unsure at all n locations
ngactaggcgagttgattntagccttaatttcactttagttattagtcaattcaattaagaatgagaaatcccaaagagaaaacgtccgattgatttttcgctttattttactaaaagggcattttttgattattattttacctcttttttgatttccaacgtggttacggcacgaccgaacggtcggaattcatttaaaccgaaattaacggatgatacgattcaaacgatcagtggaaatttattttatttttagattaggcgagaaatgacttaaataaatggcttaagcacgtcaaaagggggtataaaaagcgaatganaacaagaataaaaatacatgaaacaaaatgtggaccaccacgggtacatagaatgaattgaaaagctcggtttgaggtacttacccgttgaagactgaagaaaacgaagaacgaacgatgaatgttgaagaacggtcgagaatcttcgcgtaattactcacgaaaacgttacg

SEQ ID NO: 196367 - DNA, 475 bp, Glycine max
tctacttatgtggcagggcgggcttccttcactttcttgtctcatctgctagcttgaccactggtcttccttcccgcgatgcttcttttcatgtccgcctgagtgggcttatagcctaaaccatacttcccacgatttccttgggtatttatcacgctagttatgccgccgttgtttttgcctaaacccatcccgggttcataaccgttcccgaacataactcgggccatcattaccgctgcatcggacagacaaggctgcccaaagagggagtccacggaggaaatgctgaccacctcataagactggaaagcagtttctaacgattcttctgcggcttccacataaggcatggaggatgggcagcttaccaagatatctttctcgcctgacacgatgaccaagtgcccctccactacgaatttcagctcttggtgaagtgtagaaggcacaacttccactgagtggatccacg

SEQ ID NO: 196368 - DNA, 410 bp, Glycine max
  unsure (1)..(410): unsure at all n locations
ttatgagacatnggatgaacagctgaagcatgactgtgtgatgagtgttgaacaaacgaaacatgtggcaaggacaccatctagcataagagcacccaagttccctgaacagagaatgaaaattgcagaagccattgctgccaaatgggctgatcctgtaagtctatatgttatatacattcaacacttgaaatttggtgatttatggctttactgctactaagtgtttcctatatttttctacataatctttttactattaatgctcaactttcgcccttccatgtattaactagaaaacatggtatttctggtatcaattttttagacttgtatgctcaatgaatttgtcatgtattctattgttcgataccactacaccaatcttttcgtataactccttacgtctt

SEQ ID NO: 196369 - DNA, 415 bp, Glycine max
  unsure (1)..(415): unsure at all n locations
ntagtcaaacagaataatccgaagatgtcaagaattcggtgttgaatttgcataacaagactttctgtgattggtttaaagatacaatctttgaagatgagaatgcttcaaaaacattaagaaagctagcagatgggcctaacagaaatgttataacctggcaaggatatgacataaacaggtattcattttacacaaaagcacaagatgacaaaagtgcaatgcagaacctcggggtcaccctaagggctgaatctcaacactttgcaagtgtcaatgacgccatccctgtgtagcttccatcccttactttgggttcattgatgaaatatgggagcttaactatgtgaaatttacggtatgtgttatcaaatgtaaatgggttgacaacaacaccggtgtgagcaccatgata

SEQ ID NO: 196370 - DNA, 433 bp, Glycine max
  unsure (1)..(433): unsure at all n locations
ttaggtgtngggaagcatctggagattgtgtcattctgttcttcaatgnaancatgctatgctgcacgattggatgagaaactttgaaatgaggattcctcttcttgaggatggaatcaagttgcttgtgtatgtacgggaaaaagatctcatatgcaattggcttggtgaatctactaatttatttatttgaaacaaaatggttttagtgttggaaaagctatatgtgattataaattatgaggaatgctagtaattctcttttgacactctctntctttctattactgcttactatcgaccagaatttactgaagataaataattttgattactatcacttctaaattggacagagacgtcattaaatggaaaatgaaattcattaaaattaatacttttccactaattttaactaatcatcaatatacta

SEQ ID NO: 196371 - DNA, 464 bp, Glycine max
  unsure (1)..(464): unsure at all n locations
tactctactagtaacttcaaaagataatgaagaatacgcttttctttttatctatcnnnnnnttctatgcaacttcttttttacttttccacgcatacatacatccataaagtaccaattaggggtaaaaaaaatctcaacttttcaatacggcgtatattgtaaaaaattatctaaaagaggataagtcgtaacacctattatgacttattatttttgtaatttttttaattaaagtcgtaaaacgacttcaatgtaaatctaatattttttatgactttaaagtcgtatttctttttttaaagaaaaacataatattttacatgactctaaagtcgtaaagcctatcttattgcatttttaattttaaaagattactattcttgaagtcgaaacctatttttttaaaatgtatttgctattgagaccattttgtttgtcactattttttcgaattgttttat

SEQ ID NO: 196372 - DNA, 480 bp, Glycine max
ggacctatgaatctcagcttgacttgagtcatcaagagatatatatatttaccattgcatgaatttaaagatatgacaaaaatctaagaatctatctttcaatcttctctctcaacatcattcaatatctttcaactccttctacaaaattttctaattcatttctcttcatctttctaaaagtttttggtcaaacaatttttttccaagaaaagttctttgtttaaaaacttgtgctattcatctgtttcattctcttcttcctttgccaaaagaacgaaggactaaccacctgaattcttttgtgtttctcttctcccttacaaaaaattcaaaggacttaccgcctgagatttcatttgattctttcctttcccttaagcaaaatatctcagaggactaaccgcctaagatatcttttgtttcccttctacaaagaatcaaaggactaacccgctgagaatttctttgcccaacaca

SEQ ID NO: 196373 - DNA, 387 bp, Glycine max
  unsure (1)..(387): unsure at all n locations
cccatntacttattttcatgttattttcgttcttaattatgagggcataagatcatgtcttttttcttagaagtggatggtccaatatgatatatttggacaatcgaaaatacccattgtttttatgataaaaaagatataaattattgatgaactaatggtttaccttaagtgaaacaatggtataagcacctatggtaacatatatatactcttatgcttttactatgtccattgttgtactggattcatgttaattgtcatgaaaatgaatatttttatatcgctgattctcatgttngcctcttatanattgaattgctaacattngaatntcaagtgtcaaaggtaaagacaaattggaaggatatcacatagaccatatca

SEQ ID NO: 196374 - DNA, 280 bp, Glycine max
tcctagccaggaaattttattgtttgagaaccctggtcagcttaccaaggaggggaaaaatttccttttttatgaaaaaatttctccccaaacgggttctctaggaaaatttttataaattcatgaaggagggggacttttctccccttaaataaaaaaaaacctggggttggtttcacaaatttttaaacatttaaaattagaaaatttcccaggccccctggagggagggtttttccttccaaaaatctaggagaaaaaaaattctttctcctgggac

SEQ ID NO: 196375 - DNA, 333 bp, Glycine max
ccatttttttgggttttacattcaagccccacaaaaaatggaacctggaagtatcacatttgttaattttcaacaaattttttataacagggaactgggcccttttattaattaaatcccttgccaggactatatgaaattaaatattccaggagatatcatatgcttgtccaaatatgacaatgagtggtaaggttgaagggacctttgcaaaataattttgcctaaaatgctcggaattatttttcaagttctattttccatatacagctcttcaagtctttcaaactacttgaactgcatctgacacttcaagtttattttctcacactt

SEQ ID NO: 196376 - DNA, 309 bp, Glycine max
caaaccggacgatgttgactggaacccttatattacctaccataaagctgtggttacaattattggacacagcttccctcatcatacctgacaagccttcatcaaccatatcaaacaaaagcggggccaatgtgtcttcttgtctcaagcctctatgaggcttaaattctttagttgggctttcattcactagaatagatatggatgctgatgagaggcacgccttaatccagccaatccacctttcatgaaaccccattcgtctcatcatataaaagaggaggtgccgagacacagagtcatatgcta

SEQ ID NO: 196377 - DNA, 450 bp, Glycine max
agctctggagtttccaagtgccaattcgtcttcttctttagtcctgtcttcttctggcttcaattcatcagggggctttccttctgtgtccagcatcttgggatgatcccagcctttgatgacagctttccaggttctgctatccagtgatttgaggaaggccaccatccttgctttccagtattcatagttggttccatctaggattggaggtctgttcactggtcctccttctttctccatgttcatcagaatttatctccctagatctcactcagtgatttcgagtgcccgctctgataccaattgaaattctgatactgtggacagatgtcgtacaggatgtcacgacatcacgttgcagatttgtgttgactgtatgaacagattaaacaagtaaataacacatgagaattgtaacccagttcggtgcaactctacctacatctg

SEQ ID NO: 196378 - DNA, 335 bp, Glycine max
  unsure (1)..(335): unsure at all n locations
tgtagcaatcactagtaattaagattgtactttataaatatataacatttaaagttttgtgggttatggaagtgtcngtgctgcatgattgaaaatctgtcaactttatatggactattatggtactgatttcaagcttcgattcangggagttaatttgttcttggtgtatttgatgattganaactntctacatcttactgtaagggtatgtgaccaaactcttcatttcaagtgcttataacatgtatctgtggctctntttgcaaattatccagagcaaatagctgctatatgtattgttacaagttatagtgcataatgatgctgaaatg

SEQ ID NO: 196379 - DNA, 218 bp, Glycine max
tccacatattgattctttgtgcgtaggctgtgacagattacggcatctttctgaaagagccacttctataaagcaacacgtccaaacaaagagtgagaatagcattctctgccatgcgcggatctgttaatgtaatactgagcgatttccatgacgcacaatcatcgcgctatgaatagcaagtgctgcgccgataccctccatctgaaggtcatcct

SEQ ID NO: 196380 - DNA, 330 bp, Glycine max
  unsure (1)..(330): unsure at all n locations
acacttctttttgaattggtgaagaaggaagtttgtttattatgtaaacactagaaataattgcgtgatcctaatagtcaagtgtcattgaggcttgagacaacatnagttaaagttttccactatgtgtctatgtatcctctctacaataccattctcatggtatgaggacatatcagtcaatgcataatacaaggtctgtaagatacttagagaaagacctatatccacttccccgatcaagctgaacaactttgataggtaggttaaaaataaatgtttaaaaatagttaaagtgtctgatttactttntaacaagcacaagcaagt

SEQ ID NO: 196381 - DNA, 372 bp, Glycine max
  unsure (1)..(372): unsure at all n locations
gatcttaagcacctgggctgcagcttatgagacattatgtgtttgatgttgacaaggcccanaagaatgatgtcaagattgagtcaacatgttcaagatcaagattaaagaaaagacatcttgatgaatcangattctagagaagatgaattctagattcaagagaagtaaccaagaagcaacaagtcaagacttcacaagggaagtattgaaaaagatnttttaaaaaccaaacatagcacaattttgttttacaagagaaggtttctcaaatgtttctaagttaccagagtatttactctctagtaatcaattaccagtttcctgttatcgattacctgtnataggatttgatttcagaaaggtttaact

SEQ ID NO: 196382 - DNA, 373 bp, Glycine max
  unsure (1)..(373): unsure at all n locations
aacacatccctcttattaatagctattatgaattctttagttcctgaatgtacaaccctcaaattgtcgctcgttcccctctttctttgttgcaaaaaagaaaatcaatatcaaagaaaacatggatgaaatcctaagaaaatcaatatcaaagaaaacatggatgaaatcacaattaanaagcacaactaccaatctttcagaggcttttggttaagttgtcttgtctccttatgtggtggggtttcgtttataatatatacttttgccttccaaaaaaactttgactgatcccttttcataatcctattttgatgttattgataaaagatcatgggtctccattgcctaactactcctctccatctctctt

SEQ ID NO: 196383 - DNA, 468 bp, Glycine max
  unsure (1)..(468): unsure at all n locations
actaagctttagaatataaaactaaattgttattataaaaacatgatcttatagtagtcagtcacaatatagagttagaaaaaaagaaatattgagaaatntatcaatttttcacacgtgataattacttctttgtttgaccaagaaaacaactgtaatgactttgnttggctaaataataatttttttttataaaaaaatgcattctaagatggttctctgaaaaaccgttttaaaatgtagaatcatctttaaaaccttctttanaagtgtcatagaaccgatgtagaatcatctttttgatgtagtgcatactttcttttttgtgttttctattgtttttgttccctttctttttaagaaagaacttggcactcattcttctttaccaaaaagaccctgtttattaattgtagtggaaatgccgaatttattaagttcaatgaaaatgtgggatcaatgttcatt

SEQ ID NO: 196384 - DNA, 408 bp, Glycine max
agctcttcctcattctctggaggaagtggtgaaagattggctgtactaccttgctcccaggtccattaccggctgggatgaccttaagagggtgttcttagagaaattcttccctgcatctaggaccactgccatcagaaaatacatttcaggcatcaggcaacttagtggagagagcttgtatgagtactgggaaagattcaagaaattgtgtgcaaactgttctcaccactagatttctaagcaactttttctgcaatatttctatgagggacttactaacatggagaggagtatgattgatgctgccagtggtggagctcttggtgatatgactcctgttgaggctaggaatttgattgagaagatggcttccaactcccaacaattaagtgcaagaaatgatgc

SEQ ID NO: 196385 - DNA, 414 bp, Glycine max
  unsure (1)..(414): unsure at all n locations
nttatgtgaaaggatgtgactcttcacatttgaatttgaatttcaacgttcaaaggcactggtaatcgattaccaaaacattgtaatcaattacagctttntgaaattaattggaacgttgtaaattcaatttgaaaaactttttcaaaacaattttgctactggtaatcgattacaacaatctggtaatcgattaccagagagtaaaaactctatggtaaacaagttttgagaaaaatcatgtgctattncaattttgggaaaaactttcatacttatcttgattgagccttctcttgattcttgaatcttgagtcttgaatcttgatcttgattcttgagatcttgaaccttgaaccttgattcttgagatcttgaaccttgaatcttgaatcttgattcttgactctaaaa

SEQ ID NO: 196386 - DNA, 231 bp, Glycine max
tcatcaagtccacgtagcctctggtctcaactctctcacctgcaaagccgaggagtgaacctgtgtgggggtggacggtattgggtgaaaactcaagtctctggaaggttttctagtataggatatcaacgggaattccctggatgaagaggaccctggacaccatgaaattcactatgatgatggaaacaaccatggggtcatcttggttgacgggattgatgcccttgg

SEQ ID NO: 196387 - DNA, 462 bp, Glycine max
  unsure (1)..(462): unsure at all n locations
tgcatgattacatctcctatttctaagcaattcttctttatatcatcaaaatcttcatgatttacagttctctcccttttgatgatgacaaccacctgtatgttatgagcaacaacaaagaaaatatctatttgcatatagtttactcccccttggttntacaatgattgcttatatgagacaattgaagaattcatatttttcatatattaaaaagtgtctcataaaacaatagataatntntcttactattttatcttttatctttctctcccnctttgtcaacatcaaanacaaatcatgaatagaaaggagaaagatgttaccacttgtttgcatgtatgagaatcaagtgataccaaaaggcattaaaacaatcattcaatattaatcaagcaaaaccagttcaatacacatcantcaacacaatcaatcatcaatatttaaatcaaataataaata

SEQ ID NO: 196388 - DNA, 335 bp, Glycine max
catcccttagcacttctctcttttcaattgcttaaaaaaatcgttccgagagaaaaccaagccgaggcgcttcaaaactttttctaacgttcccggaggaatttcgcgaaggttcgaccgttcttcgacgtcttattcgtcttcatcgtcttcaacttcaacgggtagtacctcaaccaagctttcgatcattctatgaccttgggggccacatgagttcgtgattttatctcgttagtactcttatacccctttgagtgctaagcattctcgttaccaaaataaaaaattccccgacgttaatgtttatcgtaactcgtaaatgaatcgccgtc

SEQ ID NO: 196389 - DNA, 361 bp, Glycine max
agcttagggatggaacgcttactttggggtgtttatcaaaagcgctaaacggtattcaaaaatgcgacaaaggatgaccctagggctgcaaattcgtcaatctcgtgggtatcgcttttgaaaggggggaaataaagtttttgaatgtaaaaacgccccccctttcgtcattcttataatatggtgcaggggtggctcgcccaggcgagctaacctgcactttttttttttttttttttgaggggaacattaaccatgtgccctcccttcttatggactatgatcttgcctaacttgaacttacttaggtgaaaatttagatgttgagtacctatcttactcttttttttaaacaaacaaa

SEQ ID NO: 196390 - DNA, 340 bp, Glycine max
  unsure (1)..(340): unsure at all n locations
aatacaactcaaattcacagcttttcacatgcaaataccccagtaacatttccttcgttccgattcgtaaccgtggatcactcgaaatttaccggaagtctctagtacataagtctacattntgaccgttgggatctgctagcaaatgtccagaaccccatatgtactacccttttcacaaccagccatacacaagcatttttttgcacttatacaaaattctactgcacatttcaacagcaaaattctgcataaagtgcagatatcgaaaaccactctttccctcatnncaatttgcccaaattgaatcctacaagtnccaaatcatgtaccaatcatg

SEQ ID NO: 196391 - DNA, 364 bp, Glycine max
  unsure (1)..(364): unsure at all n locations
tcacctganggcatgcaagcttttagnttcagatgatgcagctgagttttgttttacctcatgcactcctctaatgactatagcatcatttctggcactaaactgctgggagttggaagccatcttcttaattaaatttttggcttcagcaggagtcatgtctccaagggctccaccactggcagcatctatcatacttctctccatattactgagtccttcataaaaatattggagaagcagctgctctgaaatctgatggtgagggcaactggcacatagntctttaaatctctcctagtattcatacaagctctctccattgagttgnctaaaacctgagatatcctttctgatggatgtg

SEQ ID NO: 196392 - DNA, 299 bp, Glycine max
  unsure (1)..(299): unsure at all n locations
agggcataacttttaactcggatgtccaattcatgcgcatcacatatagagacgcttaanaatgaacaacagaagctctccagaagttaaaatggtcataagttttcacactgatgtccgattcaggcttatattatatcgagacgctcaaaattaaacactcaaagctctcgaaaaattcaaatggtcataacttttcactcggatgtccgattcaggcgcatcacatatacagacgctcgaaattaaacatcggaagctctcgagaaatcaaatggtcataacttttcacaccgatg

SEQ ID NO: 196393 - DNA, 278 bp, Glycine max
gagacagattgggcatctctctacatactatgtgccccagtcggacctactctttaggcattctcaccagtgaaagaaacggagagcaactttcgtctattcaataccacctcgatattttacacggcagacaccagattcgcagagctagacggtgatgatcctactatcttctatattcgaacactggcagagaggccaccatcatggtgatcatctctatctcaaccatgggaggagctacttgagccgtcaaattcttccataactgtgcatat

SEQ ID NO: 196394 - DNA, 448 bp, Glycine max
  unsure (1)..(448): unsure at all n locations
tcacctgcggcatgcaagcttgtaanaagggtatggaaaataaatgttatgataagtatttacacaaaacangtaaggaccactaagggtgcatagaatgaattgaaagattcgatttcgggaacttatcagttgaagaccgaagaacaacanaaaacgaatgaagaacggtgaagaatctccacgaaatcgcttacggaaacatctcgaaagcgttacgaaaacatctccatgaaaagagggaggtggttgtcgcccacctcgcccaggcgagttaggtttcttccactagaaggcaccgacttcttttggaacccttaggaaggcccaagtgggcctggtttctatttgcactccctttttcactgaatacacacccctttgtgtttntttaattgatttctttctgaaacgttgcganactctacggattatgcaatgacacctg

SEQ ID NO: 196395 - DNA, 353 bp, Glycine max
  unsure (1)..(353): unsure at all n locations
tcaaatcaaatggtcaaactatatgctcaaatcaggatgttcaaaatacccacccacaaaatgcctccgaaaatgctcanngattgctcanaaagggtacaaaaatgatgcctaactaatctatgaattgtcatatctatctcangatcaaagggttgtaagtcagatggattgcccctagtcatacactacattcagcatgcacaacttgttgccttcttatgcaagtaacaatgtanggttgaactacagctaccctcanatgatatccaaatgactngaaattttgtgagcaacaccnctaaatcatgaaaagatgcacanaaattcaaagtctaactattgaaactacc

SEQ ID NO: 196396 - DNA, 308 bp, Glycine max
taaaatgaagagttagcttcctgtttactctatgaaggaatggctcgcttcatgcttgatcacaaaactgaatgtaagtatgctccaaaaatgcaatcaatagctcacgcttattacaaatcacaatgaatcaaaactgcgacagctcttgaaccaaatacattgaaaacaaaaagccaactagagattaagttcaaacaacttgaatatgttcaaaggcacagggattaagcttacctcgaacccaaacattgacaatggcagtgagatctaatataatggcgcggagacttgaagctttcctccta

SEQ ID NO: 196397 - DNA, 410 bp, Glycine max
  unsure (1)..(410): unsure at all n locations
tgtcataagtgatttgaatgctaatatcactaatgttttatgaacataagtgtttagcatagtgtaaccgattacatnagttttgtaatcaattacaacatgttttatccttgactaagacttggattctattgaaacaagattgttcccattgggataatcgattacaagaaattgcattgattaccaacatcgttttcaagagaacgaagtcattgtgagtcatataatcgattaccatgggtttgtaattaattacaagtgttcttaaaaacttaacttgctctttgtgttcaaattaatcgattaccactttattgtaattgattatagcaacatactanaggccaatatgatagattgcaagaaggatatttgattactagaatatttgtaatcgattatatcta

SEQ ID NO: 196398 - DNA, 388 bp, Glycine max
atactatggaaaggtctatgcctatagtcaaactaatctttagggacaacatcaatgtggaatatggtaaaatattcaatggcagtttcctgatacaaaaaaaaatggagtggagtctttataggcagttaatgttcattcatacaccaataatttcataaggcatggccccccatttgtgacagagtgagttcaatgacatgtaggcaagtcaaacattagcagggattaatggtacttattaacaaaaccgtgattgtttggacaatgacttaatatcttaaatatgactaggagggcatcccggtataacgaaacagggtgcatcttctactgattgagacactgcatataacagccatgtcaacataaatacatacgtatcggc

SEQ ID NO: 196399 - DNA, 446 bp, Glycine max
  unsure (1)..(446): unsure at all n locations
cgtgacactattaaactaagcttaganggtaaattgacatgtttgctctccatatnggtgtattttctgcataanatatgtaaataaccaatctatctntcttattcttaaatagataaatagaataagatagcccctctgaatcatcattaatttaagcgctggtataatattataggctgcttcagatgaaagtattcatgattgctataagtcgtgaatatgtgaaggaagtagataaacaacacctacatatataggctntcgtttgaagtattgcgattgtcaccccctaaagacatatgcatcaatacatacattgtaatatattccanaatcatacttaattttcaatggagattanaattcacaaactgctcccacaattgtctatacattctgtggtcagatccacacgcacacttataatattcgtaatacatgtg

SEQ ID NO: 196400 - DNA, 301 bp, Glycine max
  unsure (1)..(301): unsure at all n locations
atgatatgctcaacaattggttttgcatgaatttctaattgtcataacatatgattcatagatatgatttaggctctctttctttacattttaagccattggccaaaaaactatcccaatgtatattatttttgccatttgcaagccctttgagccaaacactngatatttttggaatagtaacctaggataaaagtttcctaccttaccctaggttaggagagcaaaggtgtcttgttggggatttctatcattcggtggctaatgtgatgtacatactctatttttaatatgggtatta

SEQ ID NO: 196401 - DNA, 419 bp, Glycine max
  unsure (1)..(419): unsure at all n locations
ntgtttgtcctagcaatctggcttttgattctttgtcacaatttatctatatgacacagnttttgtgtagcagtntaggttgagtgactccattatcaataatctaattgatcgaatacatgtttttagttcattaaactgcttgattatcttgagtttcacgtgaatcttagattggttacaactatatatgttgattgttaacacttttccacttcgtgcatgttacaaattttcatgtatagcattggctaggatgtctactgagtatcttatatatggagtttttcttaaaggagggctatatgacataagacagggttatgcaactttntacttactttcttagtgacaacaatctggaaagctcacactgcattggccctattattattattattattattattagtcatata

SEQ ID NO: 196402 - DNA, 445 bp, Glycine max
  unsure (1)..(445): unsure at all n locations
agcttgcaaagctttggcattctttgggacgttggcatatgatcccaattggaaaaggctatttcaattcttctttctccttagttcaagatttacgtaaggtattggtggtagggatttggaacctaaactctagcactttgaggcttttcaactgaaccccaaactttaaccctaatgtggtgaaacaaaccaatacccagagttgtattcgaattctagggttagcacaaaagtatggagacaagccatcctattctccatcgcaataggtgttgggatcccctctgcacagatgatgcaatgaatagtcgtgcatttggacactatgcttggatnnttttagatgtggaccttgatagaaaactacagaacaagtcttagtggaaaggaaaggatattcgctctttgtgcgtatcaagtatgaaagactcacttcatattt

SEQ ID NO: 196403 - DNA, 395 bp, Glycine max
  unsure (1)..(395): unsure at all n locations
ttaagatttcaaactccacaaatttttgatgctgtattaattttaagtgaaattaatgatgatctanaaataaaaaagcgaagctaattgtttggtaacttatgagcttcaaaattttgagtttttgttaagtatgacattatttgttgtaaactccattagtaaaaagttgcaaataaaaaagatatgggaatgtatgttgctatagaataattgaaaggtctagtcttggagggataagcaaggcatggatctagtcttggaggcgttgatggagaggttctcttggtccctctcgcaatggcttgngaaccatagagggggaattaaagagtgagaatatagagactgcgagagagtagagggagacatcanatattataaaaacaaaaatc

SEQ ID NO: 196404 - DNA, 332 bp, Glycine max
  unsure (1)..(332): unsure at all n locations
tagataaatataacattctntgacttataacaatttanaacttgttattgatacatacagcttttccatcgctgcaattcatttttattactctactatgattagagcatttttttttcaatgaatttttttctacttttacgaatttatctattttccatccaagaataaagaagtacaaaatctaccggtctattctcatattctagctatgccagtagctatgattggagcttgctaaaaagcccaacccgcacattgctctatgaactgcacctgccttncgtcttatgtcgtaactacaaaacttcttctttgaggaacgcaatttc

SEQ ID NO: 196405 - DNA, 353 bp, Glycine max
  unsure (1)..(353): unsure at all n locations
tgctgcttgtgctttccctttggagaaacttcatggattcacttgcaagactatccaaggaaaagggcattcatgctttctctcaacaatttctcttcatttttatagcctcaatagtaaaatgaatatttcatccctaattatagtctgcagaaaacatttattgaatacataatgcttgatggtgcgaacgacgaagagcaccatgcttaccaattgagaaaacttgcaagagacatntcaagtggtaaatactcaacagcntcttcctttctctattcaatattcaatgtctcttccaagcatttatgctctgcccccatatctccatgccactcttntactctaataaa

SEQ ID NO: 196406 - DNA, 289 bp, Glycine max
  unsure (1)..(289): unsure at all n locations
atcctggttaacaatgtgtaacagccagctctggaaatcctatagnttgatagctgctacaacaaaataaatggtatgagatataaaaaatgtattttatatatacagatcgtcgaaactttatagatacccaggatagaaattaatagagaaatggtagaacttagaagagaacatgcagcagaataaaatgaaacttgaaagacctgtttcaaaaagtggattctactgcaacaatggactgaagaaaacagagagaacaaatggatgcaacatctattgaggcctg

SEQ ID NO: 196407 - DNA, 247 bp, Glycine max
ccctactaatcgagctttcatcaagaagtactgcgtccccaggcaggcgcagggcgaaacaccacatccgcctggggatggccagcagcgggcaacagacgcaccgccatcacctctagagttcaactcagctcatccacaaaaagggtagagcgttgcttacgacccatgtccgaccaataggcgaccaagtccaaagccaaagggtagcaaagtactaggtccgtgaccgacaagccatcatgcg

SEQ ID NO: 196408 - DNA, 307 bp, Glycine max
  unsure (1)..(307): unsure at all n locations
taaagaagctagaagctagctacacacacctctctaatagctaatctcacccccatgaacaaaaanaacatgaaaatacaaaaaaaaagtccttactacaaagactactcaaaatgccccgaaatacaaggctaaaaccatatactactagaatggccaaaatacaaggcccagaagaaggaaaaacctattctaatatttacaaagataagcgggcttgtcgcaacctacccttcggcgggagggcgatgcgtgacttgcgggatgcgtgttccacgaaaggaatacgcgcggagtcgcaccaacg

SEQ ID NO: 196409 - DNA, 219 bp, Glycine max
  unsure (1)..(219): unsure at all n locations
tctccattatcttccgctgccactacatggctgaaaatcanctatgtaagaccacattgatgctcatcaattcagcctctaatagaactctttcatgctaacttctatctattggttttaatacccaagaacttcaaggacgtgccccttaacccgcattaatatcagcttcacctctcctcattgatattctctatttttctacatgtatttcttaca

SEQ ID NO: 196410 - DNA, 353 bp, Glycine max
ggatgttacattgagtcactggggcagggttttactgttatactgttcatcattagccgttgttgtataaatgctgacaggtatgcttctggactggtctcgcgcggttaaaattggaactcactgaataagatcatatgcactatattcgtctacttaattcaagatgtaagtgaggacttaatcgattcacaagggaattataaattattgtttactacaattgaaatttctctgtccataaatggtgttgaaggtacatgaaacacaggtaataatgaccgaacgaggaaggaaaaatggcacggaaacttacattatttgttttttgacaggaaaatagaatcagatat

SEQ ID NO: 196411 - DNA, 443 bp, Glycine max
  unsure (1)..(443): unsure at all n locations
agtctgngaacaagtgtctagacatcatttctgttgatattggaaagntcttcttccactggcaatgatccaatcatcatctgtgagtgctttatctatcgtcttaggtttcatttatgatatgagagcacaagactcaaggtctttgaatgatgacttggctctaactccttcagtctgatgtctaatgatttgatcttaagggtggtaatgaaaaaacttatagtccttcgtttgaggttattgattagatgatccttcagtctaaggaagaatttcatcacactgtttgatttcatctcctttaggtgtaacagacagaccaatctacatatcttcaaaatcatctttgagatctaatagcttcctatcacacgttagtctatcattgaattaacatggatggattcttctacaactaaaggccttgtgttgaatacttt

SEQ ID NO: 196412 - DNA, 229 bp, Glycine max
  unsure (1)..(229): unsure at all n locations
catataacaatcattacaaacaatggccaaacaacacttctcatggcacgagtgtcaacatgcactctataaaataatcatattgnggtcgtgctattttatgacacatacgtatttgcacacagtaagaaatttttgtatgaaagcaattgtgacgacacnctattccattgctacatcattttttttgacaaaccttttcatgctacatcctatatatatacacaca

SEQ ID NO: 196413 - DNA, 468 bp, Glycine max
agctggacatcttcttccgattgaaacaactcctggcaaattaagtgagatagatgagtaaaaaaaaccagaaccactcaaactagaacaagaacatttcactaatcattaactgtagacaactttcagccacaactataacagtacacgtcaaattacgatatgcaagtccaggtgaacacataaaatacttaaaagaaactttgcattataaagtactgataaattaccaatatttttttaccttctctactgatttcacatttttacgaaatttccttcccttcgaaccacttctttcttcctgatgaagagactcagctgctttcttcagttcttttgcttatttacccagttcggttgcttcctacaaccataaccaaccaaccacaccatagatatagtactgcatattcaatcaacatttagtacgtcttcgctattaaagcatatagcacctcgatatac

SEQ ID NO: 196414 - DNA, 412 bp, Glycine max
  unsure (1)..(412): unsure at all n locations
atcagctntaacactatgaataataatgatactacaatggcacagatagattcatgagcatgaagcaaacaacacaaattctataggaagaacaacacaccgcacatatgtatgatatatcaacataaatacaataggaagacanatgcactgcacatatgtatgatatatcaaaacttataggaatccctcttacgggtaaacatcatttagtaatgagaaacgaaacattacaagcaaattcacaaaattaattagacactttgatgcaccactgacatctatcaacattacagagccagagcacacatcatggacaaaantttgtcccataaatcatnttgggtatcaattttcctcatttacataatatttgagagacggtaatgagattgttataacggactgtaca

SEQ ID NO: 196415 - DNA, 297 bp, Glycine max
gaatattatgtgataggtttatatgcacgagcttgtggcattgcctcaagtcctcaggaatctcatcagagagcgtgttctgagatatatcaagatgtgtgagttcagtgagctgcgagagattcttaaatatctccccactgatgtcactatctgaaaggtgtatgccaaccaccctttctgtagcactggatgaaattcctttcctttcacaaggattggagctattggtgttcaaaatatgtaccctcctctgcctgcagaattttgctgtccaggaccatttcagcttcagca

SEQ ID NO: 196416 - DNA, 345 bp, Glycine max
  unsure (1)..(345): unsure at all n locations
cgcgaatcacgatcatcataatcatgggctatatgaaggtagacttttatatgcaacagtggaatctgtaactgctttacttttcagcattgtcccataacaatgatcagaattctgactgaaattattaaactgagcattaagagggaagtcactatgaagaagccaggaagaatctggaaatggctcacaaaagagatcaaccatatccgctccagtgtcaaccagtagaacacggttagtgatgagagcatagagaaaagcataagctanggtcaaaattctatttcctaagccactaaacgaaatcatacaacatattacactctgagactcagtaaatga

SEQ ID NO: 196417 - DNA, 359 bp, Glycine max
  unsure (1)..(359): unsure at all n locations
aaccctcttctgcatcaacagaaaacaaacttagccgatgtcagcataaaaataacaatgactgagaacctttcctatttaaacaaaaaaatatccataaaatggctttggcaaaaactctaacttgatgtcgcccaaaaaacctagcatatgtcagccataaaatggccttggcatcgaccaanaatagcctcgaccattgtcgaccgaaaaacatcatcaactgatgaagtctatcctattntattgtgtacttctttactctcaatgttttgtggccaacccaaccatctgaatgatgtgagaataaactgtgattggaaagtcatgattttatatggaattgaaattgatggttg

SEQ ID NO: 196418 - DNA, 452 bp, Glycine max
  unsure (1)..(452): unsure at all n locations
tcttcatctgtgcattccaacattgatacgattgnngtggttcatgcattccagctttaatagatgtacatgtgtgatattataaagttggaaagcctacactacccctctaaatctaccccaaagtaactttntaataaaaatatttatttnttattttaatattatntgttaattaatagtattacaaatagttgcattggttcattgaacttgatttacatcatggaggaggataaaagcaatgcatatataaatttaacctacacttctttttaagttgtcaattaattaaaaatccatttttatatagtttttaaaatatttcttatgtcctattaaaaatatctattattaaaattaaaaaattaatatttatcataatctattatttaataataataatataatatactcccaatatatatacatattaatttctatacttttta

SEQ ID NO: 196419 - DNA, 471 bp, Glycine max
  unsure (1)..(471): unsure at all n locations
agcttctttgagaaaactttcttgagaagcttgagcttanctacacacacccctctaataactaagctcacctccttgagaagcttccttgaaaagattcctaaagaagctagagcttagctacacacacctctctaatagctaagctcacctccttgagatgagaagctagaacttagctacacaccccctataatagctaagctcaaccccgtgacaaaatacatgaaaatacaaaaaaagtccatactacaaagactactcataatgccttgaaatacaaggctaaaaccctatactactagaatggccaaaatacaaggcctaaacgaaggagaaaaacctattctaatatttacaaagataagcgggctcatacttagcccatgggctcaaaatctaccctaaggctcatgagaaccctagggccttcccttggatctctggcccaatctacttgaagtcttcgtt

SEQ ID NO: 196420 - DNA, 445 bp, Glycine max
  unsure (1)..(445): unsure at all n locations
ctattacgtgacctatgaaactcagcttgccttggttagacatgattgttcatgattngngacttgtatgatttgatttgggcaagattggatgaggggaagtgtggttttcgaaatctgcattttgtgcagattttttgctgtgaaatgtgcagcaggattttgcacaagtgcagaaaaatactangcatttgctggttgtggaaagagcagtgcagaatgagttctggatgtttgctagtagatcccaacggtcaaaatgtaggcttatgtactagagacttccagtaaaaatttggagtcgatccaacggttaacgaattggaacgaaggaattgtactgnggtctttaagtgagaaaagctgtgattttggttggtgttntggcagagttnntctgcctttgctctgtttcttggctgtgatagtttgtgctatttgaatg

SEQ ID NO: 196421 - DNA, 458 bp, Glycine max
  unsure (1)..(458): unsure at all n locations
agcttggagtggtgaaccacctgattactcaaaattaaaggtgtttggatcactggcctttgctcatgttaaacaaggaaagttggatgcaagggctgtaaagngtgtgttcattggctatcctgaaagagataaagggtacaagttgtggaaattggaacctagtgagacaagatgcattatcagcagggatgtaacctttgatgagagcaaaatggcaatgctaagcaaggagcagaaggataacaacttaagtggtgagagtaccaattttgaggtggagcattctgagatttcagatcatggcagtggagatactattgatcacactgataaaggagaagctggagataatgaagagttggctactcagcatgacttgtccaattatcaattagctagagatagagaaaaaaagatgacanagcctncaaagagggatggtcatgctgacatta

SEQ ID NO: 196422 - DNA, 293 bp, Glycine max
cttgatcttgattgtcatgacttttctctcttctagaaaagggagagcttgatgataaaattgtgactcataagtagtggaaacttgagcaatgaagtccttataaagagggttgagatggactagagagcaatggtcctggataggatgagatctttgtctatgttgcggtctaatatagtcagaaagataaagttgagggtttgatgttctaattgatcttcttaagggaggagaagacaatgtagatgatgcaccaatggtagtatcaactatagaatcagataactgaa

SEQ ID NO: 196423 - DNA, 461 bp, Glycine max
  unsure (1)..(461): unsure at all n locations
agcttgagaattacgccaagttatgttatctttgagtacttatgcaccgcaaaaacataatttaaaagggttattggactgcttanctctatgcttttagtnaatgattaaccacaaataacccaccactattgagatattggaagattaatgtagactatcttctgttattcttttgtattatgcttgcgtatgtattatacgattgttgtatctaagaaggcatgttgtattttagaatatctgattgatatctcctagatttaggatattctttcctcttttcatgttccttgctaggagagatcctacacacactgattacttaataaatacaaaagataagatatggagaataagatcaaatcagatttgaataatttgatcttgatcttaattacctataatcttataatccttatttgagttntgaaataaaaacacataatgatacagctgtc

SEQ ID NO: 196424 - DNA, 346 bp, Glycine max
  unsure (1)..(346): unsure at all n locations
taacttgcccaggcgaactggtggcttactccagaagcaacttgctcgcccaagcgagctagttgcttctcccctaagtcatctagtgggcccaacggatgaggaatgtcaanaaatggaccatttggcctatatcttgagtttcttggccatttccttcttgaaacgtccgaaaccctatggattgcaccatgattgatgttaagcaactcaactcggctggagaaaaatccccatgttaaaaaaatngcccccattctaagtatcttgctcatttctttccgtaacatcgcaaaacaatatggattgcgtagcgattgatgttaaatagctcaacttgattgga

SEQ ID NO: 196425 - DNA, 541 bp, Glycine max
  unsure (1)..(541): unsure at all n locations
tccccccccctactctcattcattactttatctctcaacacacagccaaacatgagctgtgacggatttaagcactgagctgcaactttcttgacttaagcgttaccttgttgtgttaccatgttgctcatngtgctccccctatctctaacagactgggataacagatttgaatgataacgacaaaaatataccagggataaaaaatgaaatgtaaacatatatcatgaaacactaacatattttaccctatatattatatattaaaaaaccaagattgtgtcatctaaaactatcactatgttaaaatgattttaaattatatcggtttgattatttaataatttaataatataacattaacatggtcatgatttttaactgtctataaagtagccttgtaaaaattatatttttagaacttacgtgngcaattgggatttacgattggggatggacgccgtaagagcttataatttttaaatctacatacaataaaaatatatttctaacacctcttttgttaattatttaatattac

SEQ ID NO: 196426 - DNA, 133 bp, Glycine max
aataaatgtgcttcctcccggccctcctaaattgttatcagcttcaatggaagccatgaggaattggcactatcattgcttatccctggggatgctcaaatgtctaactccacctgttttgaaaacccttttt

SEQ ID NO: 196427 - DNA, 356 bp, Glycine max
gaccggatcttaagtcacctgcggcatgcaagcttatgggcaggtacgaacaggtgctaagcccatgattgatcgatcaccactccgcgtctgactaaagactttaaagaagcgctcctatgaggcagcctagtatctctaacttttctctttaatttcatacttattaattttcttgaattatttcatgcattcgcctaaccataggaagctctacatgccacatttggctaaccagtaggcggccaaccatatgggccaggtgcatgtgaacacaacttgttaacttctaccaagtacaccctgcacctgcagtgctaagaccccagtccttacccctggcctacccccgagca

SEQ ID NO: 196428 - DNA, 341 bp, Glycine max
  unsure (1)..(341): unsure at all n locations
tacggacctatgatactcagcttaagctctagtcttcatgttgttcatgttgctccccttatctctaacactntaaactgcttctaataactagcgtttctgattgtggagctctcaaacttcacctgcttaatgacatcctcaaccttgcccaaatcttcattagatttaaaaggaaacatagagagttttccaaaagcgacatcttaactcaaaatgatctttctttcatatggagaaccaaactcaaaatctttgaatccatctctatagcctatgaaaaatcccttcttaacttanggttctaacttactcttacttacatgatagtatatcgaaca

SEQ ID NO: 196429 - DNA, 359 bp, Glycine max
  unsure (1)..(359): unsure at all n locations
attgaaaccggaaaagatgaaccttacgaaaactnggagcacgaagacatggagataatatgcaagttggtcatctccaaaccaaattcccttggagtttatttgaataactgtgctgcggcatatgaaagaccaacgtgtctgccttggtaatttcagcatgcatgacattgtgaatgaggctgccgtcctggcttaccttcatcgatattgaagatgcatgaagagctaatagacattgaagggaattaaaaaagtttgaaaaacacatgaatgtgatgatgagagaacccatttgggagagaattgtgatcatggatggacaatatatagagagagagaatcaatgtatgagctaa

SEQ ID NO: 196430 - DNA, 356 bp, Glycine max
  unsure (1)..(356): unsure at all n locations
aaaactaacttacagcagcttcacaattttgtttaatgntgttatgtgaaaggaattgcattacaacaacacttcattgtgggcctatgtcaagagttattgtgccatctcctaaattacaggggctataattttggtactgtggcgattcattgataaattaaagagcgagacaacttcttcatgcatgtaaaaattgttattgcactacgggtactgctagacatgtttgtggaaaatgactgaatcggtatttgggtgtatttgactgatacctcattatgcttgggcatatatgcttgtatagactttcgacatgcctgggttactctccccaatattattatcccaataaa

SEQ ID NO: 196431 - DNA, 384 bp, Glycine max
agcttgctgctcctgtgctgtgtgtgtgatggaatgtgtaaagggttcaatggaaccttgttttatagtagttgagcgtgactgttggtccttgtttgtatgagctggtgtagcctttgtagataattcccaacttgtagataatagccagaagcttatagataatgctagagataaatatttgtttatagataaaaagtagaagataattataccttggagataatgtctgaccttatagataattaatcaccttccaataaataaaatattcaaatacatgtgaatattaataagttaaagataatctgtttgttggggagcccggctgctgagggttgagcgtccaccctcatgtagtatggctaatatggaggattgaca

SEQ ID NO: 196432 - DNA, 369 bp, Glycine max
  unsure (1)..(369): unsure at all n locations
tgagaaaagatttggtgtaacaatctataatctagatcggtgtatcnttggaagacaattttgttacgctatttccaaaggtggttgacaatgattccaaagaaggaactccaggtatccactggggcttccatgttgttattccccaagttaaaatctagccaaccatgaagaccaaggctgaagaanttggcctagtgattttgatcaattaatttggagcaaaactccctaacctctttgcaatctctgagggaatgcatggtgtcttctacgtagtttccatatctgggacagatatcaaaatttgacatcttcctgtgcttcctcatggcattangaagaagcctgtcatgggtgagtttccaa

SEQ ID NO: 196433 - DNA, 417 bp, Glycine max
aagcaacaatgaccaatttcttgcactgagaattaggctcgagtttctctcttttggaaagcttcaacttgacttcatggtgctccatgatgacctcttaaagctccagagaagatcgttgaagtggatctcactcttctagaggaagcagaaaaaggtgacaactgtcaattgatggcaacttgctaagtcattttaaggaacttttcttatgagcattctgaaggtacatcataatggagattcttatgttagctgagaaaggatccagactcaagtagatccttgtgatgaagttcagctaatatatatatatatatcagtgaagactgcatagtatctttagcttctattccaatgtcctccatcaatcttctagggacaatttcactattaattggttcatcttccatgcag

SEQ ID NO: 196434 - DNA, 356 bp, Glycine max
  unsure (1)..(356): unsure at all n locations
tctaaactttatacaagaatgatgctctgataccactggttattcagtggcctcagatatcttaagaagaggggttaaattaagatattccaaactacttccccaattaaaaatctatttcactttntattcaagttatgaattcccttaatgacaatcttcttaaatattgattcanataaaacaatntgaatatgaatatgaagcaataataaataaaggagattaagggaagagaaagtgcacactcagatntatactggttcggccacacccttgtgcctgcgtccagtccccaagcaacccgcttgagagttccactatctggtaaattccntttacaagttcttaacaca

SEQ ID NO: 196435 - DNA, 384 bp, Glycine max
  unsure (1)..(384): unsure at all n locations
gctattacgtgacactatgaaactaagctataagttgatgctgagaccttaacaccttcctgaagaccccgataaacttggagcctgtggagcactacatcacttactccaaattctgtcattcacatctagatccctaagagctggcttctagactttgcattccaaggtgaggatttgtgcttaatgctaagagcgcgccttggaagcttcttatgaaggacatgaccaccctagcccagacctggagtgttttatcatactccaacctcacccncacctctcacacgtccgatcttaatatggacagggtgaggttagtctacngactggtcatgaagatggatatggacttgggctcgctcatntcaggccaaatctcac

SEQ ID NO: 196436 - DNA, 205 bp, Glycine max
atctttcatgttaattagtccttagcatgttcatgcataattcttagagagtctttgattgtgaaccttttcttgaacctttaggtttccttatgattgtgctattggaatttgagttttggtgattgaattgctggctgaaatattgatcctaagtgaaatttgaactcctaaagctgtggacaaaatgcctactgagtttaca

SEQ ID NO: 196437 - DNA, 359 bp, Glycine max
  unsure (1)..(359): unsure at all n locations
tacacccattccaaaaatacatgttaatacaaaaaanaagttcttactacaaagactactcaaaatgccctgaaatacaaggcctataagaaggaaaaacctattctaatatttacaaagaagagtggatccaaccttgacccatgggctaaaaaatctaccctaaggttcatgagaaccagtagctctagcctaatcctcttggattcttctatccaatacccttggggggtaggattgcatcaagggtactactggctcactatggaaaatgattgttgtatccatgtgagaaagtgccacaaagttcaagccttcaccgataatatcaatgctcngcccatacctttgaatgtctt

SEQ ID NO: 196438 - DNA, 303 bp, Glycine max
atgcaacttaattaatatcaagaacaaagtcttactattattcatatcttgcgctcttcatacaactcttgggctgctcatgggcccactgaaacccactcagaagctcccactctctgtgcacgaagtctccaaccataactccttctgctgctttaactgaagacctagcaccaaatggcgtccacgtggcgaaagtcttccaccaaaaagcaacatggcaaaagacaatgctgctccaaatggggtcatcattgtggaagacgaaaaacaccaaacgatgccgttgctggacccaaaata

SEQ ID NO: 196439 - DNA, 378 bp, Glycine max
  unsure (1)..(378): unsure at all n locations
ttccattcttttggaaaagtcataattgatctggcttcttctatatgatcttcattgcttcctttcccttttcctttagnaatcttgccatgaatatgcattngttctanagattatgcaacatcatctatttttccaactccaagaagtctacctttgttgttatcaccataagtaacatgcccactcttcttgggagagacatgtgtgaactttgatgaatctcccgtcatatgctcttgcccattagacatagattaaccatttctttttcagaatcatcaaacgattctaagtcgttataatcccatgtgatacacgccttctttgccttcttatctccaatagtcttctttttagacttctctatctttctct

SEQ ID NO: 196440 - DNA, 358 bp, Glycine max
  unsure (1)..(358): unsure at all n locations
cctgtggcatgcaagcttccattgttcaatatcgagcgnctcgaagtgttatgcgcctgtatcngacctccgggagaaaagttatgaccatttgaatttctcgagagcttccgttgttcaatttcgagcgtctagatatattatgcgcctgaatcagaccttcgagagaaacattatgaccatttaaatttctcgagagcttccgtngttcaatttcgagcgtctctatatgtgatgcgcctaaatctgacctccgtgagaaaagttatgacctattgaatttctcgagagctcccggtgttcaatctcgagcgtctcgatatcttatgcccctgaatcagacctccgggtgaaaagt

SEQ ID NO: 196441 - DNA, 362 bp, Glycine max
  unsure (1)..(362): unsure at all n locations
gcataatatatcgagttgtctatattgaacaatggaagctcttgagcaattcatatggtcataacntattactaggatgtccgattcaggcacataatatatcgagacgttcgaaattaaacaatggaagctcttgagcaattccaatgatcataacttttctctaggatgtccgattcaggcgcataatatatcgagacgttcgaaattgaacaatgaaagatcttgagcaatctaaatggtcataacttttcactcggatgtccgattcaggcgcataatatatcgagacgctcgatattcaacactggaagctgtcgagagattcaaatgagcataacttttcactaggatgtccgatc

SEQ ID NO: 196442 - DNA, 462 bp, Glycine max
  unsure (1)..(462): unsure at all n locations
tcacctgcggcatgcaagcttgtagacaacattgtggctgcaacattctatgntttactttttccaacctctatcacccttgntgcccaaattcctttggtctctcattacatcaactaatacatgttccatctccaaattccatgtaaaataacttcttgtttcctcattattttttcctaaaaattttcttttgctcgccattttttcattagatgactccattgaagttaatgtcacttatttaacctacacataacaaatattagatacaacctactttagtcatttgattagtccactgcacaatcatagaaaatatttcaagcaaagtttttatgcaatagcaaagtacgtaaaagtctatcttcaatagcaaagtacaatagtaacaatagtacaattgtaagtgacatccttggtcaaagtgggtttgattgggatggcactaaccacatgatc

SEQ ID NO: 196443 - DNA, 204 bp, Glycine max
  unsure (1)..(204): unsure at all n locations
gaacatagatactaagcttgagctcttaggaagtcntctcanagaagcttctcaaggtagtcttcttaagaaagcttctcaaggaagctacctagtctataaatagaagcatgtgntacactatgaaagtcttatgagatacacttcaaagttccacttctctccctcttttattccttcaatttcgggctccccccccccccc

SEQ ID NO: 196444 - DNA, 376 bp, Glycine max
ttatccacatccctcttttaactaaattaacctccttaaaaataattacggatgaaaataacgcaacaagtaatcaaacatcaaacataattactaataatatatagatatatatatcagggtgttacacatacattttacatccaagacaaagtttagatttctatgtgtaactgaagctcttggcatttcaatctaacaccctaagttgttcacaccttccaaatcatggttatacatgcacaaactcatttcacaataacacatgtaatggtcaatgatgcatttcaccgaacagatggtgggcgcatgtttaaacatgtaaaaaatgagggatggagaataatatgacatgcacatccatagtacgatcaaa

SEQ ID NO: 196445 - DNA, 306 bp, Glycine max
  unsure (1)..(306): unsure at all n locations
agcctttgtcactccacccatatttggccttgatattnaccaatctttactccacagacaatagcgtcaaggaattcttgcagcccagatacaaagggctttttaagtcactctgcaatccttcatacacaagggcatgggcttgctgaaaagactcctgtccaaggtcacgaatcatatccttcaagcgatctcccattttgcatcaaatgattccgattggggcctaatctgcatgtctgtcatttcaccatgccatatccacgtcgtataattcctcttaattccatcacacaacagattctg

SEQ ID NO: 196446 - DNA, 287 bp, Glycine max
  unsure (1)..(287): unsure at all n locations
agtagttggtaataatctaagtttcaaaagggtcatttctctnttagggatttctatcttatatttaaactcaagataaccacataaaaaaataaaaagaaactcatgattagttccatgtgaatcacacccactaacatgcctctgtttcaagatgcgatgttcgaaagttccaaaatcaaattgacaatgcaagcctttaattgaggcttatgtgtggtccttcaaataacgtaggtactttagaaagtgacttcaacataactaagttaacattacaaaagagt

SEQ ID NO: 196447 - DNA, 399 bp, Glycine max
  unsure (1)..(399): unsure at all n locations
cttgccacccagctctcttattctagcaatgttgcttcctccaaaagcaacatccttctggggggatcatttggagggcccaagtgagcctggttgctatttgcacccctatatttactaaatacacccnctgcctttatatggagattcttcttttcgtaaagttacggaaacttacgaatttcgtaacgatacttggtttctttccgtaatgtacggaaccttgtggattacataatcatccccttctttgacttacggaatgttacggaacctcactatttgtgcaacgatgctttcttttgatctccggtgtggcatggaaccttacggattgtgcaccaatattttcttttgattctcggcacgtcacggaatttcacaattgcctaatgatgg

SEQ ID NO: 196448 - DNA, 120 bp, Glycine max
gtgttgaccatatgaatatatcgagagcgtccagtgttcaatctcgagcgtgtctatatgagacgcgcctaaatcagacatccgtggtaaaagttatgaccatttgaatttctcgagagc

SEQ ID NO: 196449 - DNA, 377 bp, Glycine max
  unsure (1)..(377): unsure at all n locations
aaaaccctacgagcacaagaaaataaccaaggatcatgcttgaaagggtatataaataaaatcataactaaacaaagctttattaaaaaatcaactaatataaacataaataaagctcacaatcctaaaaggtatcacataattacccttaaactactacaaaatgtatgaaaaaaagcaatnatcaacaccccaaacttaaaactctgcttgttctcgagcaacataacaagaagtagaacctattcctaaaacaactacaaacagaaaacataattgtacttaaatcctaatggaaatcaatgacaagacatgactcacaaatcaccaacttatcaccacttagcatccttttcttttcacaatgtcagtctcat

SEQ ID NO: 196450 - DNA, 363 bp, Glycine max
  unsure (1)..(363): unsure at all n locations
gtaagaacttagaaaatctgtaacagctgttccttctcgttcgcgtgtatttttccacccacaagggttgaagtagaggagaccttctatcctataacacaacgtggcggacaaaagtggacagtatacttgaatggtcattattgtcaatgcagacagtattntgtgcttcactatccatgttcacacattattgcagcttgtggttacgtgagcatgaactactaccaatatatagatgttgtgtacacatatgagcacatcttaaaagcttactcagcacaatggtggcctcttgggaatgaagcgggtatttctcttctaatgacacctggacactaatccttgacccactacaatcgt

SEQ ID NO: 196451 - DNA, 360 bp, Glycine max
  unsure (1)..(360): unsure at all n locations
ntctgaagttgtctggttctccataccttgagaactngtgctattcatccttntcattctcttctccctttgccaaaaagaattcgccaaggactaatcgcctgaattctttctgtgtttctcttctctcttttccaaaagaaggaaggactaaccgcctgaattcttttgtgtctcccttctcccttgtcaaagaattcaaaacgacacagtctgagaattctttgatcttcccattccctatacaaaacttttaaggttgactgcctacaatctttatatcccattccaagtatcaaggaacacctgaatcttgcttactattgagggacatcttgtgtcaataaggtctttactggt

SEQ ID NO: 196452 - DNA, 361 bp, Glycine max
  unsure (1)..(361): unsure at all n locations
gacctataaatactcactataattggtattcactcgatcataatatcgtctctcttttgttactataatggtgcttcctaactcagcgttatgccgatttgtagggaagattgcttttattcttggctatcaatttgtgtatgttcttacccaatccatgacaaagagcattggggatcgatgctgctctttgcaattcgcattgtgtgttacttgaaaaggaaccatgaagaacatatattagttgttgcttattgtgtaacgttttccatcctcaactangcgaactcttgctagctactttggtttgtcaacttgacaatttgacaatctcttgaataactaggaaataacatatatg

SEQ ID NO: 196453 - DNA, 219 bp, Glycine max
cccaatattttcgaaaaaaattcaatttgcgggaaaaactaactttttatatcagtgaactactgtcctagagaatgaatgcttaaggcatttgcagtactggtgccaaatgattgcctgctttgcagaaatttggattttttacaactactgccagacagcgataatccctggatcaaacagttgttgagactgaattgtgactgaaaatagaatttg

SEQ ID NO: 196454 - DNA, 375 bp, Glycine max
atcttaatcactcatttttgactcatgaatgactcttggaagcccatggaaaccgtgtacatcaagcccacaattagtatggtttccttttgaatttactactaaaaatggttgtcataccctaatttcgtccggggacacttgcgatcggctttcgaaccttgtttgttcccttcaggaccctcaagaagagcattgatgcgtaatctataaagttccacaacattccggaagtcaaaaagagcattgttgcgtaatccttaaagttccgtagcattccggaagtcaagaagagcatcgttgcataatccgtaaagttccacagcatttcagaagtaaagagtatcgatgcgtattccgaaagttctgcaacgt

SEQ ID NO: 196455 - DNA, 361 bp, Glycine max
  unsure (1)..(361): unsure at all n locations
acactatattacaacaaagtaaatatggtatcctaaagtatttttactttttctaatcattatagtcaatctcgatgtctaattgtcccacaataatctttgaaagcatatactattaattatctangggttcgggatacatagacggtagtgttggaaatcttaatctttaatgtttattgattaaaatataatttttccttataaatataaaaatgtttgaagtttttttttttgtaaaattttagtacantttttgtcctgataaaattgaaatgtatcacttttttgctcgaacataagtttggataaatctaaatctacgatgatgacgctttacattgttatacatataaatgat

SEQ ID NO: 196456 - DNA, 488 bp, Glycine max
  unsure (1)..(488): unsure at all n locations
gcaagcttcaaaccacagcaacacanaatctaggttttcttacccttctattaatggatnttcaaggtttgagaagtgaaattgagaatggggtaaatttggagtaaaacctcacctcacacaagtctataacatcaatttaaacttgctcaactggatttacacctaaaatttcaccgaatcaaaatttgactcctcaacacccaattttaccctagaaatggctctttgttcactttggccatntgtttttctctcttgcacagcccaaactttctcataagtcctaaatgacatnttaaactaggattaactctgtttaacctccaaataccactaaatccagatttggccttccaactttcaaagtctcactcttttttcactcacaacaccatactctcaccttctaaccctaggttaactctacccttcatctctaacacgtttccataagcaagttcagcatatagacatcacaagcatca

SEQ ID NO: 196457 - DNA, 391 bp, Glycine max
  unsure (1)..(391): unsure at all n locations
cacctgttgcatgcaagcttgtcctcctttcatggtctactaaagatgtttgactgttcctccaattcatccttcaatctctccaagtccccctcccgatcattctttggctactaatccagcgcttcaactataatcgaccccattatgatgcaatacttgcatttgtaaactaccaaaaaattatggtcttttcgaacctttatctttgacaacaactttagcatttggtcctattccttctttatataaataggaaatggagcataaatattggtaggatgctatagaaactgaactttttgcactagaggaaaatcagacatgggacattgttccatgtcctccatccgataaacctcttggtagtaaatntgtattcactataaag

SEQ ID NO: 196458 - DNA, 374 bp, Glycine max
  unsure (1)..(374): unsure at all n locations
ngaatctaatacacgcaatgatatttcttattnctctatatatgtctcacaagcatcactatcccaagagtcttaatggtaactactatgattcatgtggagtgaaattcttgtcaatgcgctatacagacatagaccttggtccgatgatctatacattaaggacttgaaaaatagacactaacaactttaacttatatatattgattgattaatatctttcatatggaatagaatgaataaattacgactttttcttgtagattcgatatgaaaaatacacacttaccttgttttctatcaaatcaatcacaatcgcctttcttcccacattccaccacattgaacatggatcccaatcatttgcatctcac

SEQ ID NO: 196459 - DNA, 357 bp, Glycine max
  unsure (1)..(357): unsure at all n locations
gagaatgtgaatgtatgtattcatgattttgatgatgtcaaaagaagaatcaaacacggctcatttngcttcaagattaatacaagattgtttcaacaaacaaagccttgattcaagatttcttcagatcaagccttgcctcacaatgaaaggtttcaagtcattcaaggcacatgtaatctgataccaatacatgtaatcgattaccaatggtttgaaagtgtgtaatcgattacacatcatatgtaatcgattaccagagactctgaacgttgagaattcatcatttatatgacaggctacaactgtgtcagaaaaaccactgtgtaatcgattacactaattctgtcatcgata

SEQ ID NO: 196460 - DNA, 324 bp, Glycine max
atatatctaacaactcgtttggcagcttagacatgtacttcactagcacaagtgcatgaaccctcgaaagattacttactgcaaacagaatgtcaggtctggttgcaattagatacattaagcaaccaattcagcttttgcatgcattttgcaactttatcagcttcatatccttgtaaaatctccttttggtcattggaaatgatgcttttgcagcctccatatgaaacttcttgagtatttcccttgcatatttcttttggcgaatgaagattccatcatgaacttgtttcacctccatatctataaagaaactcatcaagt

SEQ ID NO: 196461 - DNA, 434 bp, Glycine max
  unsure (1)..(434): unsure at all n locations
gatgtgggtggtagtggtggacattgtcttcttatgatcttgcaaaaacaccccaccatcaaagaagggatcaactttgacctacctgaagttgtggccgaagcccctcaaatcccatgtgagcctctgctatgtnttggtttatatgatccttggtgagaattggttgtgggggtcacatgtgatgaattattatgtgatatgtaggtgtaacccatgttggcggtgacatgttcaagtctattccccacggagatgctatctttatgaaggtcagtcattactccaaaatactctcttctttacgacatattataagatatatagttctgaatcactttgcatatattatctctagtcaacttctatgtatattgatagctgctgttctacctcttcaagttatttcaaaacacatgagctcttgttttatt

SEQ ID NO: 196462 - DNA, 272 bp, Glycine max
  unsure (1)..(272): unsure at all n locations
tgaagacaagactatacgaggtatctttcttgggtatagcattatctctaagggctaccgtgtctacaacttgcaaactaagaaactcgtcatcagtcgagatgttgaagttgatgaatatgcttcatggaatngggatgaagaacaagtggagaagaacgttcttatacccgctcaactacctccagaagaagatgaggaagaagacccaggtgaaccaccttacctctatcacatcaacaagatcaagaactatcatcaccagagtctac

SEQ ID NO: 196463 - DNA, 325 bp, Glycine max
  unsure (1)..(325): unsure at all n locations
aatgacccttangcttagcgcacagggcgtgcttagcctaactataaaaacctaaaaacagtaagagagttgagcttaacacagcagggcacgcttaactcaacctcctcgaaacacaactatggcttagcgtggcaggctgcgcttatccttattcaaagagttaaaacacaaaacctagatggcgcttagtgcaacaagttgggcttagcacctaaactactctaagtgtctaaaacactangcccgcttagcgcacagatgcacttagtggngttcatcatattntcatcagcaacgatgaacgcacttagcgtgatcatat

SEQ ID NO: 196464 - DNA, 352 bp, Glycine max
tgatgtgccataaaccaacgaaacaaactatgtgatgtgggtgtgaatagttgaatatgctttggacataggagcgatggcaagaaatcaccacaagataggtcaatgtgttgacttactgttgactaactgtggatgtttccaaatcatcaagccatcttcatcatcaatctcactgagctccagtaagcattctgcagtggatgatagttgttgcttcttaagtgttgcccttcttaatatataggccattgcacctattgccttgggagcaaccaaaatgggaagtggaccgtgtggtgcacgggccgccttggatgatgatgtgtccatcaacttattacttctcttc

SEQ ID NO: 196465 - DNA, 382 bp, Glycine max
  unsure (1)..(382): unsure at all n locations
gcatgcaagcttgtaatctcttgcttctcgcgaaatcatctattataattgattacacacccaaaaattgatgcacttaatttcaacttataaacactacaataattttgaattatccaaagagggaggttaaaaaaatactttttattattaatttgaactcattaatattcacaaaattgcatctaagaattattgaaaaaagtgaaattcaatagatttcataaattntaataacttctaattaataataaaaatgtattatttaaaaaagaattcaatttaaaatagtgacagtataaatgttnttgagtaaatagtacatgcaagttaaaaaaaaattccactcttatgtaattacatgttgatataattgattgac

SEQ ID NO: 196466 - DNA, 396 bp, Glycine max
  unsure (1)..(396): unsure at all n locations
gcgatctaatttatattataaagagatnctatatattcgaaaacaaatattatataattatcacagctcaaatattatttcttacattttattttatgtctcacttatcgtttgaatcggctggagtgagagctaacttatatgagtatcaccaagattttaataagttatagtccaaaacttaaattgcaatttacaatcataacatcaaaattttggggattttatagtcacatagcgtttgcaaaaaatggtttgcgattctatataatgtaaaaacaatattatgaaagtttgcagagttgtcagtttacaattagaaaccatgagtntcacataatattaatacttctgggcgacttttaattctattttggtgtgttgtaacaatctaat

SEQ ID NO: 196467 - DNA, 361 bp, Glycine max
cattttggaagacaaaatgatgactgcttgacctttataaacatcaggaattccgattttcttactctggaagcaagttcttgtgaactttataacattagttttatgcctgtgaggaacgttgttatcactatcttttgtatgaatatctgactatttaagtatttatcccttataacaaactggacaattggtggttaagaaccattcattgatgacataaactttcaaagcagtatcttgatgtgtgtcatttaatttctctcgccattcctttgaatgaacattctttcatgagtaggagtccctgagtatcccttcaccaacatctttgctgtgtgttatcattctttcatcatgc

SEQ ID NO: 196468 - DNA, 241 bp, Glycine max
  unsure (1)..(241): unsure at all n locations
gaagagaattcttaaaggtggtttattttttatctctttcaacctatcgttttcctttgtatttctaaactgaatttccaaaatatttctaaaaaaactatccatagtttaaaataaacatatatcttaatatatnaacaggtccatataaagtttaaaatataatttacacgcttaaatttttctgggagtacaacatttaatcatcaagaaattatttatagaaatgttatttattata

SEQ ID NO: 196469 - DNA, 343 bp, Glycine max
  unsure (1)..(343): unsure at all n locations
tgaattcagaaatggatgatcctccttcttcaatagctctcttatctaaatgcgaaagcattnttgttctgttcctcatttcaatggcttcttcccctgtcattatcctcttcacagccttctccactgcatcccatgaaatattatgtccctagactccaatacatgttttagcaccaacaggtaccccaatattaaggactttaaacaccaacttcaatttgagaaattggtctgcaaaataggccaagtgacaatgtgaacccctgcagtcactgctttcaacgttgaatttcatcatgagtcacaaacgcgcccatcgcttcgtgttcagaatcaacac

SEQ ID NO: 196470 - DNA, 187 bp, Glycine max
  unsure (1)..(187): unsure at all n locations
tactcaagccgccatgaagtggttctggtcttgagtatgganaacttatttataatctcgtcgctactaaaaagggattataatgcatagactaattcttgaagtttcgggctgttggagtacattattgatgtcacaatagatgaattgcgagcgatggcacgacatataatgaaagtttcattct

SEQ ID NO: 196471 - DNA, 314 bp, Glycine max
  unsure (1)..(314): unsure at all n locations
tcagccccttaagcacttctctctctctcgaaattgctgaggaaaattatttccgtgaacaaaatccaagccgaggcgctttcgtaacatttccgtaacgtttccgtgagttattacgcgaagattctcaaccgttcttcaagattcatcggtcgttcttcgttttcttcagtcttcaacgggtaagtacctcacaccaagcttttcaattcattctatgtaccccgggtgggccacattttgnttcatgtatttttattccccgtttcatttgctttttataccccctcttgacgtgcttaagccatttattt

SEQ ID NO: 196472 - DNA, 355 bp, Glycine max
  unsure (1)..(355): unsure at all n locations
tgcagccattagaagagaaagaacatgtgattagtagtatgtctganaatgttagtcagtttgtcagattgattgtgaaggaatgcattaactgtatcccggtgagagtgtgatccttaaattttgagagaaacgactatcatttagtactgatttttgcatgaatctctgaagtatggactgaatgcatgaaattgaggatgatgaaggccatgtttgattgtgatagcctcgtagccaacaagctgatggcgtgcttgaatgatttatcccttgcacccagttttgagttgaatgattgattgattgattggaccttgagcctatacaattttatctcttgctaccttgtcat

SEQ ID NO: 196473 - DNA, 342 bp, Glycine max
  unsure (1)..(342): unsure at all n locations
cttcctcaattntgctataaaatggcgattggggctgtagggaaagggttcatcaccttgggtattcaaaattcacttaaaattattgatgagaataggaaagaagggaaaaattcaagccgacgtgcttccctactcttcgtatcgcttcgcgacatttcgtgatcaattccggaatgttcttcgacgctcttcgatacgtcttcgacgtaggcgatcttcaaccggttagttttccattgcgaagctttgaattcattcaatgcacacttaggggtccactcttactttgcatgtattcatcttcatcttgtctacttctggatattttctcttcgttta

SEQ ID NO: 196474 - DNA, 353 bp, Glycine max
  unsure (1)..(353): unsure at all n locations
gggtcattcacaccattntatttttatttttattactctctgattaattcanaagaaaaatgtccaaattatttatgaaattattcttcacttatgcagctcanatcattatatatatatatatatatatatatatatatatatataatgcattttctaggagaattttagctagttaagtataaaaaagggaaagacatatattttgtctgacatatagactntggaaccataaagatattaaggcatgtatctaatatgctnggctcttatcaacattntgatcccagttttgcatcccaacaactcgaaacagtatcaaagcttttaaccagtagttttggatgctagta

SEQ ID NO: 196475 - DNA, 120 bp, Glycine max
ctttgtatacccttttaagatctttatgtatcgctcaactggttacatccaccatagataaacacgaccacaacatttgatttttctgaccagatgcaccatcaagtgaatcatgatgtc

SEQ ID NO: 196476 - DNA, 347 bp, Glycine max
  unsure (1)..(347): unsure at all n locations
ctggaacatacaatctgagatttatgtcctcttaaggactttgtcaanatatctgctgtctgatcattagaaccaatgaactcagtgacaatctccttggacagaagcttctctcgaatgaaatgacaatcaatctctatgtgcttagtcctttcatgaaaaactggatttgaggcaatatgaagagcaacctgattatcacaatacaacttcattggtagctcttcacaaaacctcaattcctgcagaaactgtttaatccacatgagctcacaagtaaccatagccatagatcgatattcagcttctgcattggatcgagcgataactgtctgttcttgcttttc

SEQ ID NO: 196477 - DNA, 388 bp, Glycine max
  unsure (1)..(388): unsure at all n locations
aataccttcatctggcttagcaataaatttttctaagttatcttttccattattcaataccaaacagtttcaacccaagatatgaagatgtgagatggttggttttctgccattgaacaattcatatggagttttcttttaaatgggtcttattaaagccctattttaaatgtaacatgcagtggtaacggctttcgcccaaatgtattttggaagaggagtatcatttaataaagttctagcaatctcttccaaaaactatntttcctttaacaacaccattntgntgagggggtcttggtgcagaanagttatgttcaatcccatgcttatacaaaataattaaattcttattttcaactcaccccatgacactctaataaataac

SEQ ID NO: 196478 - DNA, 301 bp, Glycine max
  unsure (1)..(301): unsure at all n locations
tgttgatttttctttttctctgttatacaacanttatggntgtgtanttgagaaacacagttttagttctccattggaggtagatgtgggtttttagttgttgattntcacacttaaatttgaaaacaaaaaatgtttgaataaaatgaggttgagatggtttttaaataaattttataaccaacttatctcacttttgaaaacaagaaataaaagagttttgtagtttaaagcttttggaggttgtgtggttttgatacttttcttcacttttctccaccttncatcatatcttttgttc

SEQ ID NO: 196479 - DNA, 226 bp, Glycine max
gatcagaatcagactcagaatagaatccaatcatgaagaccatcagataatattaaaagttttttcaaaactgagtagcacatgaattttttctcaaaaccttttaccaaagaagttttactctctgttaatcgatcacccaattattgtaatcgattgccagtagcaaaatggttttcaaaaagctttcaactgaatttaccacgttccaattgatttcacaatg

SEQ ID NO: 196480 - DNA, 399 bp, Glycine max
  unsure (1)..(399): unsure at all n locations
tctctcccaatttctataaatatggggagaagtgaagtattatagggttcagccccttaggcacttctctctctttcgaatntgctgaggaaaattatntccgtgaagaaaatccaagctgaggcgcttctgtaacgtttccgtgagtaattacgcgaagattctcgaccgttcttcaagattcacccgttcgttcttcgttttctttagtcttcaatgggtaagtacctcaaaccaagcttttcaattcattctatgtacccgtggtggtccacatnttgtttcgggtatttttattctcattttcatttactttttatacccccttttgacgtgcttaagccatttatttaagtcatttctcgcttaatctaaaaataaaataaatatcaccgatcg

SEQ ID NO: 196481 - DNA, 239 bp, Glycine max
gtggagggagagagagatatagagagagggaaaccaaatctttagagaagagggagaaataaggctatactttgaactctaatttctcaaatgatcaaagatgctaactgcacacataatgtttctatatatagcctaagggtcacacaaaattggagggaaatttgagattctattcaaatttcacttgaatttgaatttgaatctgtggagcacaaatttcactcattatgattagt

SEQ ID NO: 196482 - DNA, 402 bp, Glycine max
  unsure (1)..(402): unsure at all n locations
tgtttatttcttttgcttgacaattccaaacatagaagatgtttatctgcaacccatgcgtgagacaaattgtttgcaaggatagctacactatcaacaactcagtataaattggaatatnttattgggagattntgttctactcctattcacaaaataaaggtgggcttgcagaatatatagctcangtgaacattactttaaaattagatacctttatatacattattagactaaatatggtgctttgcattccttgtatgaattagtccttccttctacttctgactgggtgagttgcataatagataagttatgaaatgatgtcattntttatgatttcatccttagaaattgtaaattttctgtcactggacaataacagaaactactcttctaaaa

SEQ ID NO: 196483 - DNA, 402 bp, Glycine max
  unsure (1)..(402): unsure at all n locations
cacctgcngcatgcaagctcttgtgagaaaaagtcaagagctcactcttataaagaggatatgatatgatctcctttgctctctaaaccttcttcaatataaaggttaatagtaattaatcaaaaataatttctaattaatacaattaaatagataataattccaattaaaacatgacattaattcacattaaaacaggtaataaatttgactaaagtgatgccttaaacttttgaaatattttaacaaactatacaacaaactaaacatgagatagaaatcttcaatccccaattctttgtcttcatctctctcacccatgaaaaagtgtcacgtctgttaagtttggatggtccactaaactgtacgacctattatgccttataatttgatatttataaa

SEQ ID NO: 196484 - DNA, 304 bp, Glycine max
attctactgtctagggtgatgaacaattattctcttcatagatataacttcacaaatcccaacgatgaagatgtgatgagaataatcctggaatcacatatctcaatctcatgataattcaataactaacgagtccgaaatcatatatttggtgatatagttcaatagcttgtgattgctggaaatactctattatttgaacactaaaattagcttggcttgtcttcttcggttgttaaagtatgatttaaaccaccctattttaatttcatttgggatattaattcgccacgcctttgggcct

SEQ ID NO: 196485 - DNA, 458 bp, Glycine max
  unsure (1)..(458): unsure at all n locations
gagctggcttgtacaatctcccncttttttgtgatgacaactcttaaatcaagaaacgcatacacacattttttcctagtcgatcacttacttaattttccattctccccctttgtttttgaggttatgcttcacttgaaattaagttaatttcttatgtgagttcttgatttaatccttatttttctccccctttggcatcaacaaaaagccaaagtgcgtaacaagtagaaatcatacatacactactaatcattcacaagtcattcattgaagaataaataaccactcatgaagcaagaaacatgaatagatcatatatatataaaccacatagtcatataacattattcatagttgttcaaacataccatgcacataanagagatactanatcggtcaaatgtcataataatatagatcattttgataggtcactagcatctagcattcctaat

SEQ ID NO: 196486 - DNA, 404 bp, Glycine max
  unsure (1)..(404): unsure at all n locations
tgtcttctgtttagatatgatntatacttgatttaggacttgtatgatccaacttgggcaactttggatgagggcaaggttgattcgaaaatctgcacttatatgcagaattttgctattaaagtgtgcagcaaaattatgtgtttgtgcagaaaatgcttatgcatggctggttgtggaaaagggtgtacatatagtgttctggacgtntcctacagatctcaacggtcaaaatgtagacttgtgtactaggtgacctcagtacaattttccagtcgatccaactgtgaacgaattgaacgaagagaatgtactggggtattgagtaaacaagctgtggattgtttgtgttttggcagagtttctgctttgcctgtcttgcttggtttgatagtcatgatgtt

SEQ ID NO: 196487 - DNA, 397 bp, Glycine max
  unsure (1)..(397): unsure at all n locations
gtaaagttttgcgttgatttgctccagcttcattttgaatttcgagcgtcttgatatattacgggacacaatccggcatccgggtaaagagttattggtcgtagaatttgctcagagcttctattctgaatttcgagcgtctcgatatactactggacacaatcggacatccgagtaaaaagttattgtcgtntgaaattgctcagagctttcgttcttatatacgagcgtctcgatattatacgggaatcattcggatatccgagaaaaaagttattgtcgtttgattttgctcacaacttcaattctgaatttcgagcgtctcgatatcctacaggacacaatccggcattccgagtaagagtattgtcgtatgatttgccaagcttctttctta

SEQ ID NO: 196488 - DNA, 344 bp, Glycine max
  unsure (1)..(344): unsure at all n locations
gcttctatataagctngaaccatttatcttaaacacaagttgatttntattcagaanattagagtttatctcttttatcttactgagagtgattctcctaaattcttgagtgattcaagaacaccctggctgtatcaaaggactttcacaacctttgtgtgttgccctcgctggaaagagtgaatctttccttcctatcaatcttcacccttgttctttcaaaccacaattccagataatccacctctgcccagaattatctcgtggccataactcccattttacgcactcagattaagtgattctttagcctaaattgactttcaaaccgataccttcacctc

SEQ ID NO: 196489 - DNA, 381 bp, Glycine max
cttaccaacacaagaaaataacccaggatcatgcttgaaagggtattaaattaaaatcattacttaaccaagcttttatttaaaaatcaactaaaattaacataaattaagctcaaaattctaaaaggatcacataattacccttaaactactacaaaatgtaggaaaaaaagccattatcaacaccccaaacttaaatacttgcttgttctcgacaacaaaacaagaagtagaacctaatccttaaacaactaatacaagaaaacatatatgtacttaaatcctaatggaaatcaatgaccagacatgactcacaaatcaccaacttatcaccacttagcatccttgtctttttacaagttcagtttcatcaattccaat

SEQ ID NO: 196490 - DNA, 344 bp, Glycine max
  unsure (1)..(344): unsure at all n locations
acaagctngtcactcattgttcgcgtgtatgatatccacccaacacgggttgaagtagaggagaccttcaatcctataacacaacgtggcggacaaaagtggacagataacttgaatggtcattattgtcaatgcagaaagtattttgtgcttcactatccatgttcacacattattgcagcttgtggttacgtgagcatgaactactaccaatatatagatgttgtttacacaaatgagcacatcttataagcttactcagcacaatggtggcctcttgggaatgaagcggctatttctctttctaatgacgcatggacacttatccntgacccaactacaat

SEQ ID NO: 196491 - DNA, 330 bp, Glycine max
ttgatagttcaatatactaaagaaccaaagaagagcaagttatattgagacatgaactctggttatgcgaaaaactttttggatgagaaaacatatatctggatatggcttataattctatacttaagacatttaaaatagaactgagggaatcaaacttaggtcaatttaattctagtttacgatatgtactcatggttaatatttatcttagtgattctaatttaatctttataaattatttagatatgttatgtgatatgtcacttaaatagttattaaagtaacatatatgatttgttatatattacatcatttcatgaataaatc

SEQ ID NO: 196492 - DNA, 311 bp, Glycine max
acttataacaaaaatcaaatgttttatggggtgaaaacatacagattttggatggttaagaacaattgcaatgaaagcttaaaacattaaagctgcgagggcctaaaaatgttaactgcaggatctcattacagtttttttttcaaagccagagaaaatgcaatgcaaaagggggcacctaggtgaattatacttcaagggatgaccaacctggtagtccatcttcttggatctgagaattgggtaactatgtaaaacgttggtttaatgaatggtacgcacaccggggcccagaatagatcctgtaccaa

SEQ ID NO: 196493 - DNA, 331 bp, Glycine max
  unsure (1)..(331): unsure at all n locations
tctatatctttgttttctacaagtggaaattctgcagatttcaatagtgtgatatctttnttttccttactcctcttgccagaagattcaaaggactaaccacttgagaattcttttgattcttccttctccctcttgccaaaagattcaaaggactaaccgcctgagaattcttttgattcttccttctccctttaaacaaaagatttcaaaggactaaccgnctgagatatctcttgttccccttacaagattcagggactaaccgctaagaatctttgcttacacattgagggacatctttgggacaagtgatgacattacttggtgt

SEQ ID NO: 196494 - DNA, 332 bp, Glycine max
  unsure (1)..(332): unsure at all n locations
tatgcctaacaggcagcaggacccaaaggattaatacttgaatcatttaaattgggcttatagaagggcctaacttattccataaaaccgacttgttgggtgaggatagctcaaactttataagctctatttaagttatatctctagactatgtgggactaaatactctctctcgatgctgcaattaaagctacccaccaagaaaccatagtaaggctcgctanggcaatcactataaggtggctcttgtgtaaagggtatgaatgattaaaatacaaattttcaggatctcccactgagcttaattttaagcaattgtcttacattatttt

SEQ ID NO: 196495 - DNA, 415 bp, Glycine max
  unsure (1)..(415): unsure at all n locations
acactataaatactcactttgctttgtatcaagttattttcaaccatatgttaatttttaaacatgttcctggaacattataatctttgtgttctcttgcggcaggagtatattctcattgattctgctactcgattaaaggtattctctcttttgctataaattccattggcattacattcatgagcattanttgaagtcttttacttgttcacatgcagcacaagtcactggacatatttgtggtcaattctttcggatctgggtttcaagtacgccttgcaacattaattgcaatgaatatagtgtaccttccaaaatctgtaaatggcatctataaccagcatctttctaagtatattttttcttcattgctgatatcttaatagtcgcttcatcttgtatgaattcaaat

SEQ ID NO: 196496 - DNA, 359 bp, Glycine max
  unsure (1)..(359): unsure at all n locations
tatattaaacaacattatcatcatagcctattaagaagactaatacttaatccgtagatcccttttgtggaccagcggtctctataacttatgagggatagacttttaatgcagaagaagcagcaatcaattcaataatgttctttaaacatgcaagacaaaatngattgccacacaatatatgagataacggaagagagaatgcaaacacagttttatactggttcggcanagtccgtacctacgtctagtactcaagcaacccacgtgagatgttcctttctctttggaaattcctttactacttctgaaccacacagggacaacccatcccttgtgttcaagaagttctacaactt

SEQ ID NO: 196497 - DNA, 373 bp, Glycine max
  unsure (1)..(373): unsure at all n locations
tccttgagaagctggagcttaactatcacacnccctctaatagctaagctcacctncttgagaaacttccttaagaggctttcttcataagcttccttgagaagcttccttgagaagctagaacttagctacacaccccctctaatagctaagctcaccccaggccaaaatacatgaaaatacaaaaaagtccctactacaaagactactcanaatgccctggaatacaaggctaanaccctatactactaaaatgaccaaaataaaaggcccaaagaaggataacctatttaatattacaaagaaaagtggaccaaccttgcacatgggctataaattaccctgggtcatgagaccctacggctttttaccg

SEQ ID NO: 196498 - DNA, 416 bp, Glycine max
  unsure (1)..(416): unsure at all n locations
tcaacaacgtgtcctacattaacaaggcaaccatagaaaagaaaaggagtttcacacatttgcaatagtaacaatatgaaggaacacaaacttagaaattaatccttgagttccaagtcaaaatcctaattcctttggagactcatacctacaaactcataataagattgatgaatctctgcaaatgcaagtatttgatccattcatcgcatcaaagccttgcacaatttcaattcaaatctaggatttgaacttgtttccacatagtccagatccataaaagctagatcgatcactcctaacatgcttctaagcatagaactaaaataagatcacattaactacgagatttgatagaaaaatagagctacatacttgagttctactcatcactnggcactatgaagttagctcat

SEQ ID NO: 196499 - DNA, 369 bp, Glycine max
tttttggttggtatttttatatttttttattgtcttgcgccatatactacatagccgtcgggaacaggcaggtcctttgtatagagtccaacctggattgacacatgcctctgattcactcgaattgcgatggagaagctcgctttaccacatcttagtaacctacggttaaaactcttaggggccaggcttaaaaacctttggaagctaggatttgttttgatatataaaggacttcttaaaggcggtcatacctttatgattgcagtactatttcgaacgggtccataaaaccccaagtctatctggacgctatatctgcataaaatctcgaataagaagagtgggatcccaaactaaatgtgcctg

SEQ ID NO: 196500 - DNA, 374 bp, Glycine max
  unsure (1)..(374): unsure at all n locations
ancttattcataaacgatcaatatgataaaactcgtttttgttttaccaatacaactatgacggtctttgtcaacccgtcgttgtatgcattcatgagaactaccacaatgctacaagcgtatcctttaacgaagattccttgttaatcgtctgaactatggcatcagagataagctttattggagcagtgaatttatcatggcagatgagaaatatgactcttcctaatcatgctcatcttcatgttatatcacaactctttaacaacataagggattcatggaatccctattgccacctcacacagtggtcttattattaagaaccatgcgatacaacagtttacactcacatttcctttttcattatatca

SEQ ID NO: 196501 - DNA, 414 bp, Glycine max
gcttgatggtgttgagaaaaaatcacatgttcgttttcatctaaaagggggagaatgtgaatgcttgtatacatgaatatgatgatgtcaaaagaagaatcaaacaaggctcatcttgcttcaagattaatacaagattgtttcaacaaacaaatcctcgattcaatatttctgtaagatcaagccttgcctcagtatgcagagatttcaagtcatccaaggcacatgtaatcgattaccaatggtaatcgattaccaaggcacatgagagtgggtaatcgattacacatcatatgtaatcgattaccagagactctgaacgttgggatatcaaattataactgtgtaatctgataccaaacattggaatcgattaccatgtggaagttttcagacaatctgctcacagtcaca

SEQ ID NO: 196502 - DNA, 340 bp, Glycine max
  unsure (1)..(340): unsure at all n locations
taagctctatcttctcaaggaacgtttctcataaaagcttctcaaggaagttttctcaagacagcttctcaaggaagctacatactctataaatagaagcatgtgttacacttgttgtactttgatgaatgagagtcttgtgagacacaactcanaggtcaacttctctccctttttttccttcaattccggctcccgcctctctctttctctccctctatcttttcctccattgaagcatcctctccaagcttcttataccaaactcatctgggtggagaagctcattcttccatggcttatatcctagtggatggcgcctcctctcacctcttctcct

SEQ ID NO: 196503 - DNA, 270 bp, Glycine max
gctctaaatttacattgaggtttgtattgatgggatgatgtttcatgtccattttgctttaagagtaacgtcccactggttaaactaactttccaaatgtttgccttcgcatgaatggccccgatgaatcttgcctcaaatatgtccaagaatgacaatgcggtcgaatgaactatttccgccccggattacgacagtcaccgctttatgatcgttgtacaccatcatcgcttcgaagccatcaagggatgtgtcgttctccgggagcga

SEQ ID NO: 196504 - DNA, 398 bp, Glycine max
  unsure (1)..(398): unsure at all n locations
cggaccttaagcacgctgctgcactaaatatatactggcacttttttttgtcnngggcttgccaaccttgatcaacaatatactttcgacacctactatatgttgattaggccaacgttgttatcggtatgttgcgacaatccttcaaaaccttatttatacattctgacaggttggttgtcatgtggtcatatcgacgtccttctctgtcataagccatcatccatttgtcctttgaaatgcgatcaatccatgttgctatggctggactcagttgacagatattttctaaattctgataaaatatgtgcttgtcaggagtgtaccctgcatgaaattagttgcaacaacaattgtaactatatatgagacttaatataatgtgaccatgataaatg

SEQ ID NO: 196505 - DNA, 408 bp, Glycine max
  unsure (1)..(408): unsure at all n locations
gaaaagatgaattcaagattcaagagaagaaatcaagaagacttcacaagtattgaaaagatctttcaaaaaacaaatatagcacagttgtgtttttaaaagatttttctaaatttctaagtaccagagttttactctctggtaatcgattaccagtttcctgttatcaattaccagtggcaaagtgtgatttcaaaaagtttttaactgaatgtgcaacgttccaattgatttcaaatggtgtaattgattacaagatattggtaatcgattactagtgtatctgaacgttgaaattcaaaatcaattgtgaagagcatattctttcataanaagcttgtgtaatcgattacataattttgtaatcgatatcagtgcaaatttgaataaaacaaaaatgtaactctt

SEQ ID NO: 196506 - DNA, 433 bp, Glycine max
  unsure (1)..(433): unsure at all n locations
agcctccgcaagaacatatctctttaatcatctgaatccgntnctcgaggaataggactgcctagaggaataagagtctttcgacgccttcatctagtgagctctgttgtcgaagtaatctctaatgagaaaccacttgttagcttccttcttagcataagttttgtcttccaaagctcgagcacgagcttctctcattcttagaagcttagtctcgatgagtctggcatactctttgagggggatcatagacttctacagcaagagcttgctaatcaattgcatcctcaacatcaagatccaccttcttaatgataggttacacatgatgagtaaagataaatctggagtgagttagaccacaccaaattagatgttgtggccaagctcaatgtcatattcctcttcacccgccacactttgcatgcataac

SEQ ID NO: 196507 - DNA, 358 bp, Glycine max
actccaccatttcatgttgtttatcactggacagttggtgacataattagtggcgcattacccctaatatttttgttttggaataatatatatggatttgtaggttgaatcaaagttgatggaggcaactatgacgcttgaggaacaattggcagaagagcaagctgcaagacttattgcggaggagaatgcaatgttagctcatatgagatcagatgatgaaatacgaaaactcagtaaacatcttgagaatgcacatgaagaactttgcaagcgaggtggaggtgtgtgtgccattctttgatagtagctactgcaaacttcagaagaagttatttatgttatttttctcttggag

SEQ ID NO: 196508 - DNA, 393 bp, Glycine max
  unsure (1)..(393): unsure at all n locations
attaggaagcatcaacaagaatcaagccaaggctattgtgcaagcaatcaatggggcaaaacacaccataagattatgatgatggatggctcaaattctcacaaaggtaaacttatcactttcaaaactatcatgacatgtagaggaaaaacaaggatttcaaatcacataatgtcaagagacttttattttaagaacaattacccattttttgaacatatcctataattcatagaaaaatatgcaaagttgttcatgcaaacaaaattgacctaaaatattaaactagaaacccaacaaagctaacaaaactaacaaatttaacacaaacaaaactaacaaaactagcataaccaaaaccaaagaacacttccccnctacagaaacaacaca

SEQ ID NO: 196509 - DNA, 257 bp, Glycine max
tacacacacccctctgataactaagctcacctccttgcaaagctggcgtaagaagattctgatgatgactgagcttatctacacaaacctctctaatatctaaggtcacctacttgagatgagaaacttgaacttagctacacactccctatattagctaatctcaaccgcatgacgaaatacatgaaaatacataaaagtccctactacacagactactcaatatgccctaatatacatagcttataccctttact

SEQ ID NO: 196510 - DNA, 233 bp, Glycine max
tctttaaattgcttataacaatacaaaactggaatcgattaattgtgactttaccaatttcaaataaagtgagtatggtgctattctaccacttgaactgaaacataccttgcgttgattacatgtgtaaaccactgctttaaaaaattgagacacagctcatgaaccggttgatttccttatatgacaagataacttgactaatcttccatcagcagactaaaattgcatac

SEQ ID NO: 196511 - DNA, 376 bp, Glycine max
  unsure (1)..(376): unsure at all n locations
tcttctcaaggaagcttctcaagaaggtgagcttatttattataggtgtgtgtgtaactaaactctaacttctctaggaagttttctcacagatgcttctcaaggaagttttctcacgaaagcttctcaaggaagctacctagtatataaataanagcatgtgtcacacttgttataactttgatgaatgagagtcttgtgagacacaactcanagttcaacttctgtcccttgttcttccatcaatttcatgctcccccctctctctttctctcccatcttcttttcctccattgaagcatcctctccaagcttcttatccaaagctcatctnggtggtgaagctccttcttccatggcttattccctagtggat

SEQ ID NO: 196512 - DNA, 326 bp, Glycine max
acaattctctaattcttccaatacaatcaaatctttctgttgtctctttcaaatcaatggcagacactcgatttatacaaaaaaatccactgcatttcatgtccaaccagttcactggtcaaacaagcttttatacaaacaatcgactcaaagtactgaaattcaaataactgaaatttaaagaactgaaacagaaaacactgaaatttaaatgactgaacatatatcataaaataactcacaatactaaaatgttcataatgcactaatttaaatgtcctgctcttgtggttgctcctatgcatgctcaatgagatccaacaccg

SEQ ID NO: 196513 - DNA, 407 bp, Glycine max
  unsure (1)..(407): unsure at all n locations
aacttacatgatgaagctatattgggacttcttcttttctctactcaatgggaaaacctttgtcatgcccgcttcatcatacttaacatatataaatatatcaagtcatccatatggcataaaataaaaagcaaattgcgtatgtcaagctacactcactctaggttattggagatgggaaatctattaacttttggtgcaacacatggctacctcatatggtaggggatagctttaatctgccacggagaatcanctcttctcctaagaataccgcgagtgattgtttacataatggttcttggaacctacaccttttctcctatttgtgctctaacttatttgctggctagtcanatggacatcttatagcatcggctaatgactattatggagaaatgattcta

SEQ ID NO: 196514 - DNA, 417 bp, Glycine max
  unsure (1)..(417): unsure at all n locations
taagcttgtaattgtggttagtatcttcggattgaataatatgaatgttgttttttcttatcntgngactcgaaaaaaccaattactatgcgtttatgtctgataaagatttggacttttgatatgattgttttcacgaaaactataagatatgtctgggtcgtccaatgatggattaagtagtgtctaacaaaaataactttcataagtcaatgagaaacacacacctttaatattaaacattaataattaaccacaaattaaaaatcaaaactttaacataacaaattaacgatactcgcatattgtacttatacatgttaaaggtggagtccacaactatgcatataaaacactctatgtgtcccataatcaatttctgacttgtataatttctctttcaaaaaaaaatgcact

SEQ ID NO: 196515 - DNA, 333 bp, Glycine max
taactaactaacttatatgaatatatacagctactactcaaaaggaaggaatgtgccttgattaggcctatctaatctacctaattaaactaattacacaaagctaagcccaaattcacagcacttccaagttcaatttgaccctcaaaatgacagaaatagaccatgcttatttctaaaacaaaattgaagattgttttcttagctttccagaactactcacgtactccattaggagtactgtagtggcctataggccttgcacaaggcagataagtcaagtaatctcaaaaatccaaaaataagccgcaattatcaattaagctcaatcat

SEQ ID NO: 196516 - DNA, 313 bp, Glycine max
tgtaatcgattacacatatactgtaatcgaagaccagaagtagttttctattccattcacaacagtcacatcttgctgtgcggatcttgaaaggctatcataaacctatatatatgtgacttgagacacagacgagctaagagattttcagaacaaaatggtcgtatcctcccaaaaagcaaatcggtgtatcctcttacaaaatccctgggcaaaatactcgtgattcaataaagaatgatatgagagctcaaatagctcaatctatctctttcaagagagaatactccttgcttctcttcattctgaaaag

SEQ ID NO: 196517 - DNA, 420 bp, Glycine max
  unsure (1)..(420): unsure at all n locations
gatcttaacatttagacttgaaaaaactttgttttttcgacctangactacaacataggagacatggatagcatanatatctatacttgagtcgggtgttggaatcatgagttccaaacttgatgaaccaaaccatacccatttgttatactatctatgcgtcctatgttgtagtcctatattgtacccatacattatatttccttagagtctataactgtccaagactcaagcttgtcgttgttcatgctcatcatcattcttcaccctatagaacaccatccaccccaccactggtatgatcacaccaccctttttctttatttcattccacttatattctcaatattaattcccttgcataaagtatttaaagaatatcatgttgtgtctccacttttaaaatttctcacaagactt

SEQ ID NO: 196518 - DNA, 259 bp, Glycine max
aggggaaaaaaaaaaaaaaaaagaccggactccacaaaaacaaaggaagacgccaagggaaagtttttaggaaaaacaccaaccgaagccggagaaaacacgcgagcaggaaacagacacggggaaccgaccaacaaggaaagggcaacaccgagaaaaacgcgaaaacgagaacacaagaaagcaaaaaaaaacgcacgggaagagcaacaacgacagaaacggaaacagcaggagaaaccaacggcaaaaggacaaa

SEQ ID NO: 196519 - DNA, 330 bp, Glycine max
  unsure (1)..(330): unsure at all n locations
agctngtgctgtgtgagtataanactgtttctattatgacctantagtttgctctttggctgtcatacccaaaccctggtaaatcatgagagccttcttatctgggcaactgtgctattctggaaattcctactggacttatttcggattatctttgatgtaggcatgtctccatctcattctgaagtacaaaggcggctgcttctttatgacaaagtcatgcaaccagaggtaacattcntgtttatatactatgtttttgttaccaatagaactatctctttgctcttctgattgattgctatagcaatactctcttcatgaatgttg

SEQ ID NO: 196520 - DNA, 474 bp, Glycine max
tgtgtcttctactaactacaagttaatattttcatcttgttttttgtttttacaggataccaataccaaggcgaggattggacagctgaagtgagtcgcggtctctatcatttcacacccgaaacaacaaaaccacataccatatgttccactattactcacccaaaatgtaaagtcattcccataaacctatggcactttcgtatgggccatccttccctcgaaagattacaagctatgcagtcttattatccgttttttaacaataataaaaacttcatgtgtaatacatgtcattatgcaaagcataaaagattacctttctcttccagcatctctcatgcatccaacaaatttgagcttgacatatcgatatttgggggccatgttcaaagacatccatgcatgggcatcgctattttgtaactattatagatgactactctcgtatacatggactcatctcatgcacac

SEQ ID NO: 196521 - DNA, 508 bp, Glycine max
  unsure (1)..(508): unsure at all n locations
cgtacccngatccttaagtcacctgcggcatgcaagcttggaggcaagctcctgaggatctgtgctctacctgcanaatatagagtacgaggggtactgctcccctgactgaatgactgtgggtgtctccaagaaagcattcaacgatgtagcgctcaaatttattagcttccttctgactcaaacctatgttggtgatttatcttctggatcatacaggttcgagtaaaattctttaactagggccacatcgatgtgcctgtccatatgctgtgtcagcgccttatgccagttgtgctggatgagctctcgcctgaactcatcgtactcagtcacgaagaggttaacgttcctctttggaaggatgttccgggagtgaacgttatgagaataacgctcccaagcaaccttggaaacgaactgggtggatcatagggtaccgaggtgggaggcgtggatttctcttctggaaccatccgatcaaagacaaaataagttaacggttttt

SEQ ID NO: 196522 - DNA, 382 bp, Glycine max
  unsure (1)..(382): unsure at all n locations
tctatccacggcccacgagcatatgatcacggacgagtatgctcatgtatacgcggaaaaaaaggctagaggaatggtgatcgaacttttacaccaagaggcaatcatgtggatggctcttaccttgaatgggagtcaagaacttccccgcttgttagccaaggccaaggcgatggcggacacctactccgcccccgaagagattcatgggcttctcggctattgtcagcatatgatagacttaatggcccacatagttagaaatcgttaggaaacttgtatggtctctcagaccttgactagatacgactttctttgtgaaataaaatgagttggtcccatgtgtctactccaaaaagcttgtgcanatcatatcactcct

SEQ ID NO: 196523 - DNA, 357 bp, Glycine max
  unsure (1)..(357): unsure at all n locations
agcacaaaccacatacccttgtgacaggtacagatttatgattcatagccagctgggttaccatagtaaccaatgcatccagtttgccttcaagcttcttattttcatatgatgtaggtgggtttgtatctacctcatgcacttcttctaatgactatggcatcatttctggcgctaaactgttgagagttggaggccatcttctcaattaaatttctggcttcagcaagagtcatgtctccaacggctccaccactggcagcatctatcatacttctctccatattactgagtncttcataaaaatattggagaagaagctgttctgaaatctgatggtgatggcaactggcacat

SEQ ID NO: 196524 - DNA, 150 bp, Glycine max
aacaagagatgcggcgccctagcacataacacattacaaatgcctggctagcacccactgaccacgctgcacctcaggaacaggtaagtcccgagcgtcaacgactctccttactgttgaaagactcatgagtttcacttaccgatcacc

SEQ ID NO: 196525 - DNA, 408 bp, Glycine max
agctttgagccaattcaaacgactatatctttttactcggatgtctgatggagtcccgtaatatatcgagaccgtcgaaattgaatggtgaagctctaagccaattcaaacgacaataacgttttactcggatgtctgattgagtcccgtcatatatcgagacgctcgaaattgaatgttgaagctctgagccaattcaaacgacagataacttttactcggatgtctgattgagtcccatcatatatcgagacgctcgaaattgaatgttgaagctctgagccaattcaaacgacaatacacttttactcggatgtctgattgagtcccgtaatataacgagacgctcgaaattgaatgttgaacctctgagccaattcaaacgacaataactttatactcagatgt

SEQ ID NO: 196526 - DNA, 130 bp, Glycine max
acatccgagaaacaagttattgtctcttgaatgtgctcacaagtacaacattcaatttcgagcgcccttgatatattactggactgaatcagatatccgcgaaaaactttatcgtcgtttgaattggctc

SEQ ID NO: 196527 - DNA, 454 bp, Glycine max
  unsure (1)..(454): unsure at all n locations
ctgcagctaagataatattatatatatacttattttttattaaaatatactgggaaatatattaattacattgtaaatttatgataaaaaaattatattatgatataagggttattttaactattgataacttgtttaaaagataaaataagttatatttagaaataaagattaaaagaatagattgatagagataaaatattaagataaatctctaaaactattatcgttgaaaagcaatacacatttaaaaatattntcattcaacaattactatataatctaatacaatcacatatcaattaataatcagtatatacaagttacttataaattagtttcttagtttaatttataaaaatataaatgatcatgatgccattaaaatatatgccgataaaatatgttcttattaatccaattaatacaattaataagtcacaacgtttacaat

SEQ ID NO: 196528 - DNA, 220 bp, Glycine max
acagaaggacaacagaatcacaaaaccagaccgaaagcaaggcaagcggacaaacccagacaacggacatggcaaaaagaatgcggaggaaaaacgtaaagaaagaaaaaaagaaaaaataaaaacgccaatgagcaaacaagcacaaaaaaacagccaaaggaacagaagaaaatgatgcaaaaaggaaggacgaggaaaaggaaaaaaaaacgaaaaa

SEQ ID NO: 196529 - DNA, 382 bp, Glycine max
  unsure (1)..(382): unsure at all n locations
cttcatcaatggatntctttgcttcttgaagatcaatggaagcgcaatggagaaggaggaaaggtgattggagatgccacttcaaggagaagatgagtctagaacaagctcatcaccataagaagccatggataagagctcgaaggtannaaaatatgactggagggagagggagagagggggcatggaatatatgcctcaaatgaggtctgaactctaaagtgtaatttctcaaatgattaaagttgaaaaaatgcacacacaaggcttatcttttgttggatcaagtggcctcggaataattaagaagggggggttgaattaattattaatgtgtcgtgactaattaaaaattatccttcttaatattacaagaaatcaa

SEQ ID NO: 196530 - DNA, 436 bp, Glycine max
  unsure (1)..(436): unsure at all n locations
agcttgcaaagntatgtctcatatcgatatattcttattcaaccttatcataancgattacatagttgttttagagataataactgatttattcaagtgtctatgctttaatcaattaccatgggatataattgatgacttctctttctataagtgtctcagaagtaaacaagaccactttaatcgattactttgagtatctaatttgatacattgttcttaagttggttctagtctttaggaagaacactttaattgattaaaaggataatctaatggattacttcattgaattaatcgattaccttgtagtaatcgattacaagcggttataactgttttctctataaataatcagctagtgtcttctttaattaacaatgaaataagcttctgattaactaggatccaggctatattaatgtggagcaatgtc

SEQ ID NO: 196531 - DNA, 394 bp, Glycine max
accacggagatgcagcggaaggctaagaagaagaagagaggggaggcatcatccactatggaataatccaatgaagatagagctttcccaccaagaattgccttggataagaagcttgaagatgatgctctaatggatgaaaagatagagagaatggggagcatgaaattgaacgaataaaagagggagagaagtggaactttgaagtgtgtctcataagactttcattcatcaaaggtacaacaagtgttacacatgcttctatttatagactacgtagcttccttgagaagctctcttgagaaaacttccttgagaagcttctctgagaaaaactccttgagaagctagagcctatctacacacacccctctcataactaaactcgctgctt

SEQ ID NO: 196532 - DNA, 362 bp, Glycine max
  unsure (1)..(362): unsure at all n locations
tgcttaagtatgtatggcaaaactttatttttgttgtcaagacatacaagagagcctgtaacatatcttctatatttggagtgatcacatgcagtcctcttgaacccttaccacccactttgtcttcatgccaagactcaagaaggccaacaggttttgccttctcaatgtatnatgaacaaaattcaatggcttcttctgcaatgttcctctcaacaataaatgcttctggatgatatagattctctgtataccctcttaagagtttcattaatcggtcaaccgggtacatccaccgcaaattaacaggaccacaacatttgatttttcttccagatgcacaatcatgtaattatgatgct

SEQ ID NO: 196533 - DNA, 345 bp, Glycine max
caatgtcgtataagactagattaatacaaaataagtggctcaaaatacagcaactaccatgagtacttgacctatgataaccttccatgtttatctgtggtcaagtgaaggatattaacggtaagtatataacaatctttggaaacaactcaattactttgatctaatgctctaagatatgacaacattctgtacattagccatatgtaaatatatataactctgaatccaccaagtatgaattacgaatgaatataatagcattccatgtctactgttgtatgtggaaaactttttgttttcaataattctgaaatgtataactgcggaaagtttcttgttttg

SEQ ID NO: 196534 - DNA, 397 bp, Glycine max
  unsure (1)..(397): unsure at all n locations
gcaagcttgctcgggcgagctggagctcgcctaattgattctgttcttanccctgatgtaatgagctcacctaggtaagctggttgcttanccaggaggtgattccatggcctaggcgagccaaatgctatcttgggcaagttggggtctataaaaataaagaagaagacccttttgcccccttccttggtatctatntgtattcttgatcaaaacactaagtgatcctttgctttgtgcggtaactggtgccgaacactgcaattcggctatcgagaatcaaagcatcagtgaatgatagtccccgaatgaaattagggtctgacatcattaataaaatcaagccttgcattccgtatgatgataatctcactttactctcctctttcacaataaa

SEQ ID NO: 196535 - DNA, 311 bp, Glycine max
  unsure (1)..(311): unsure at all n locations
ctacccattcttttatatcctactacgtgtgtacggaaacttangctttatatgtcttctgtaaataaagatctgagggtagagaccccaaccagtgggtgtgtgctaactcttaatgtgtgtttgaaatgtcctgcggtaattcctagcttaacatttgtgattgatccgttctgtctgccgttgagccatacagatgggatgtagggtatggactggctatctaccaaccatgtcttgttgaactggtttgataaaactatggaggttgatggttctggagcgaatatagatatgatgtttatctctgc

SEQ ID NO: 196536 - DNA, 444 bp, Glycine max
  unsure (1)..(444): unsure at all n locations
gagctagcactganaaaagcacgcattataaatactctgatacagcacatgtanacagtgtggataatggaactgtcataccctaatttcgtccggcgacctttgggtgatgacatgccactattgttnggtcctagtaaggggcttggcacccatcattaggccaattgtgaaatttcgggacatgccacatatacaaagaaaatattgatgcacaatccgtaaggttccgtgacacaccacaaatcacatggaagcatcgttgcccaattagtgaggttccgtaacattcctgaagtcacaaaagggatgattatgttatccacaaggttccgtacattacggacagaaaaaaagatcgtactacattcataagttcccgaacttacgacaaagaatacataaaaacatgggtgtgctattaaaatgtggtgcaaatacacc

SEQ ID NO: 196537 - DNA, 381 bp, Glycine max
  unsure (1)..(381): unsure at all n locations
ttaattcaccgcggctgcagcnggatcattggagcattagacttttttttgtcatatcannttgcgtgctgaacaatctctttgggtggttttcgtatcgagcactacattaagatatcacttcctttgagtcaaagtatatgtgttatagcaatgcatggtctttgatgttgtttgacaactacacaaaacttacatttgtccttcattggattcaaaaagatcctaggataatgtcttatgatacaattcttgcgtaatgattctcagacataaagtattaaattaaatcttaaatattgtgtgtaggccatgttgctcacggcttctatcaaatggtgatgaatattatagtttatcaaatnttctattattaattaa

SEQ ID NO: 196538 - DNA, 322 bp, Glycine max
cagaaatcaatcaaaaacgacatatatgcaacagcctcctaaactgatccaactaatttaattgaggcacattgtgacaaaatcacagcccaagacaattttcctctagggaaaaatgaatgtggtccctgaatgacttctgtctgaaatattcaagaagactctaagaagtctctgttagcatgcatgacaacaaacacacacatgtgaaggagatagaccttgataatttcaacttccaactattgaatgcaattgtcgtgattatgaactcatcctcctacccaaggaggtgaagatactcccacagaatgatatgctt

SEQ ID NO: 196539 - DNA, 442 bp, Glycine max
  unsure (1)..(442): unsure at all n locations
agcttatngaactgtctctaactntntttttttgtccaatttaagttntagttataccatttctttcttgtatttatgaaaggagtgaaatttccatgtgttttccacatgtcaaaacatagctaacaggactttgatttaaaagtttgacccttttctcacaacaaacaggttcgattgtaggagtttcttgttagtagacgatgtgtattctttattttaagtttttcatagaggttgatggtttatcctaaatttaaaatagagattcatctatgcctaaacttttgtatatcaataataatatcttgttcacagtcttgttattataatctggattttcatatcatctcaattataatttcaattgggaagaaagtaggagtattcatggatcggttctgattggtatggatgaaagtcaatctaaacaatattttat

SEQ ID NO: 196540 - DNA, 268 bp, Glycine max
tgacacttatatactcagcttccattatgccacttatgctcacaaatgcattttttcttaagctcacctaacctgctattggtgtgtgttagctcatcgagaaaacatgtgccatgtaggtgaccacaagagtgatgacgactgtagagaatatgtgatcctattgaggaaaaaaagggaaggtacctgttcagttatgaggaaaagggcggcaaaggtcgaaaataacggaggtaaaaaagaaagtgactgtttaaaaaaaaaggaa

SEQ ID NO: 196541 - DNA, 417 bp, Glycine max
  unsure (1)..(417): unsure at all n locations
ggatccttaagtcacctgcggcatcaagcttatactagcagaacacagtttgttgtatctngccttgcccggttcttcaagagtctctcaatatttacaatgaagagagcttaatctgcctccaggcttcctgcagcttgatcaataaaatgaactcacaccgtaggacttgctaatgcatctctgctagcaagtgcctatacagtgtcatcagaagcttcaatattaagatccaataccccgacactggtcccctgcaactggtagcagccacctttttctgtcagatgtgccaaatggaatggacaaaaaggctgatgtaacttgtttctctaaatcatactgatcaaaacatgacctaactactgataacaatggactcgagacctgtgaagaatgtcgtttaccgacttagtg

SEQ ID NO: 196542 - DNA, 468 bp, Glycine max
  unsure (1)..(468): unsure at all n locations
tactctgtgctctgcaaattcagcggagtcngtttttttttttatattccagggcacactcacagatcccaatgtcagtgaaggttaactctaaaagatccctccttagtgttactaatctggtggcatagacgtggcttgtaagcaatactatggagaatctatgcacacatatttgtttatgcttattaatgtgctttgtttcttgcgcaagtggttatttttaaaaaccagtctagtctgcgactaatccttaatgtgactgtgtgtaattaactggttgacaattcttaacaaaacactaattgactattgtgagtatttatatggaatatcaattgtgcatgcacgattaatcaaaactttaaaaactgattgattgagacacttgatatttgttgacgaatagcatctactacttgttagtacatataattctgtaatgattaatgcagcgggcttttgtac

SEQ ID NO: 196543 - DNA, 236 bp, Glycine max
  unsure (1)..(236): unsure at all n locations
nacttatcatatcatcacagctatagttatcttctgaaagaccattgtgagagagattctatgtttcctaagcctatctagattcttccacacgcttgaagggtattgttcctctcaaagatattctcactatagatcaangacgtcgtacagaacatctcagtctgccaagctatgaagaatattgcctgattctatattggctccaatcttgtccctatataaaccatttccag

SEQ ID NO: 196544 - DNA, 394 bp, Glycine max
tttgatgggggaaaaattaatttctttgctactaatgaagtaatcaacttatgcattcaaccactaaaaacatatcttattccatatcatgcaagttaatgtgaataaaataaatagcatattggaaggaaggttcaaaataacgaaagaatcagaagactctatattgttacaaagtataacagatgatattggtgataataaaaactgcaggcgaacaaagtttcagaaaactgcttcacctgcgactcgacatatcagtccttttacaattaagaagagaaagaatgtaataccaaatttgacaaagatctttatgggcaagaaaacactatggatagatagtgaattcgaaatagaaacagtgaatattatggctctctatcactgctaa

SEQ ID NO: 196545 - DNA, 477 bp, Glycine max
gatctctaagtcacctgcagctgcagcttaaagtagagataaacactgggtttatctatttactcaacctctcaagctacatctaattatcctttaaaacctttgaagagttccattcatcaagttattacaaaacaagtattctaccctgccacttttgactacgagtattttctatgtcacttctgatacacccttaatcttcctctgagattaataaacatcaagtattcttggattactaagtcactcttagcttcccaaacaataatttaaatgaatacaattgattcaactatcaaagagaggatacacaattaagtttagttacaataaaaaattttgtacaacaaagaataactctctaaggataagtggttagataagtggttaacttatctgatgattcaatactagaatattgtagctcattgggagtgggagcttgatttcttctagactcaaaaaagattattg

SEQ ID NO: 196546 - DNA, 146 bp, Glycine max
aaaagaggtgagatgagacaccatccactatggaatataccatggtagaagaagcgtccccaccaagagtgtctcggataagatgcttatagaggaaatttccatggatgaagagcattgagatggagaaagagataaattggcat

SEQ ID NO: 196547 - DNA, 296 bp, Glycine max
  unsure (1)..(296): unsure at all n locations
agcttggaacatataaactgaatcctagttcctcttattgacttagncaaaangtctgctggctgatcattagaattgatgaactcagtggtaatctccttggacaataatttttctcgaatgaagtgacaatcaatctctatgtgtctggtcctctcatgaaagactggatcggacgcactgcgtagggctgcctgattgtcacacaataacattctttctgccacttcaccaacttttatcttgaagaagtagcttattcacttcttgttgcatgtgaccaaagccatagatcg

SEQ ID NO: 196548 - DNA, 394 bp, Glycine max
  unsure (1)..(394): unsure at all n locations
cacccaagttnttctagaaaaatcatctgtgaaagtaatgaagtattttttacctccattggaagaaggatntattggaccacatatatctgaatgaatcaattccacaacacatnttgctctctaagactntccattagggaactgagaatgatgtttgttgctaataacacattctttacaaacttgagaaggagcagtaatttggggaaaggcctatcaccatgtttatttgttcaagggtctntattccactaaaactcaaatgaccataacaataatgccacactaaatagaaacaatatctttggccataaactagaatgaatgctttcaattgttagagagaataacctgtttgaattcatttntataactgcaatggcacctcaac

SEQ ID NO: 196549 - DNA, 431 bp, Glycine max
  unsure (1)..(431): unsure at all n locations
tgaatcaagtaactagaaaagatcattttcccctgcctttcattgatcaaatgcttgagcgcttggcaagtaagtctcattactattttcttgatgggttttctggttatttacaaattcatattgctcttgaggatcaagaaaagaccacattcacctgtccctttggcagttttgcctatatgaggatgccctttggcctatgcaatgcccttggtaccttccagcggtgtatgcttagcattttcagtgattttttagagacttgcatagaggtgtttatggatgattttactgtttatggatcactctttgatgcatgtttggatagtctggatagagttcttaatagatgcatggatacaaaccntgtgctgaatttgtaaaatgtcattcatggtataacattgtatagtttaagcatatcattc

SEQ ID NO: 196550 - DNA, 413 bp, Glycine max
  unsure (1)..(413): unsure at all n locations
atcttaagtcacctgcggcatgcaagcttcttacataacaaacaaaaccatacatctacatngttcttatgacaaataacaaggatatgccaatgacccctacattgtagaacaatagttagtgataatgcaaatattatttaaatgcatnagttaaaatttacttatccattcaagtatgttcctaggaaatctctctttgttattgattcaaccatgtntcaatgtaaagttgacattcatcgcatccatcctttgcattgtgtatggactgaggcaaggaatccatacacataaccatgacccaagtttattgacaacttatttggaaaaccgttaatcatattacaagtaattatgtaatgaattaaccttgaaataaaatatacttacatcatccacaactgcaatat

SEQ ID NO: 196551 - DNA, 219 bp, Glycine max
actgtgctgtgaggacacaatttttataattttttacatccactcgatggtgaagcaacatattgctaagttcctatttataaacaagttgcgaaagtgatggtaatgtggaatatagtcatacatgaaaacaactagtagatttgattgacaataccagtcaagtctcattaatcaagcacatttgcttgaaggatctgaattgagggagaatgtcgg

SEQ ID NO: 196552 - DNA, 454 bp, Glycine max
  unsure (1)..(454): unsure at all n locations
ttaagtcacctgcggcatgcaagcttctcgatatattatgcgttggaatcggattttcatgtganaagntatgaccatttgaatntctcgagagcctcccgcgatcaatntcaagcctcttgatattatatgcgctcgaatcggactgcgcgtgtgacatagctatgactcatttgaatctcctccagagcactccgttgttcaattctcgagcgctctcagtatattattgcgctcagaatcgtacctttcgntgtgacaagtcttgaccatctcgaaatnttcagagagcttccattgcttacattccaagcgtttcgatatactatgcacctgactccgacctccgcctgataagttatagacattgtactctctcgagaacctctgatgttcaattccagcgcctcgtattttatgctcctgaactgacatcactgtgataaatatgaca

SEQ ID NO: 196553 - DNA, 456 bp, Glycine max
  unsure (1)..(456): unsure at all n locations
ggatcttaagtcacctgcggcatgcaagctngtaatactacaatactccttaatgtntgttcttgntggcactccacatccagcattcactgtatagagcnaacttgaacttccaaattcatgtatttaagcatagctcccatgccattctaagttagatagccaacaaacaaagttgaatgtgcttttactcaattaagttcctttatggttgcaaagttaatagaacaatcctctttatggccactatcaaactcattaattagtgtaatcaagatacttctattaagaagaatggttgtattgatgaccattcctctntactgattaggctaaaaacaaacattatgcatagaacaataacaataagaatctntaattgaaatagaaacaaggtacatatcacacgatagggaccatatacattaaatcccaacataagagaacaattaacta

SEQ ID NO: 196554 - DNA, 450 bp, Glycine max
  unsure (1)..(450): unsure at all n locations
agcttggaagaggttgcaagagatgatataattttgttcataccgnggcattactcaacaaaggttggtccatatcttatatggtgaagtgtcctcacataataagacaatcttagatgttgtttgtgggggcaatctcatgttaaagccacatgctaatgccatcaaaataattgaaggcatgtgctctaacccctacaataactcaggggatatcatgaatagaggcatgcaccaagtggagacatatggatcccaaactgagttgggaaagcaaatgcaagatctatcaatgaagattgagatactcatgagagctcaagctcatatccttattactacaccttcattcccaacctatgataaatgtgggattatgcatgggccaagagaaagcactatcgatgacaagtatttgcagccatggatgatatcaacnttgttggtgta

SEQ ID NO: 196555 - DNA, 465 bp, Glycine max
  unsure (1)..(465): unsure at all n locations
tcacagtgcctagaggataactttctttcctagcactattnggctttaaagcattactctagtacaaacatgcaacactaaggcttgagtcctattttatgacaaccctaagatctctggatgtagcctaaaataagaaacacatattcagagcccaaaatctagttgtaacatgttatcttacaaagattcaatagctacctcattcacaccatttgtgcaatcaaccatcatgcgtgcatacaacatcatatccttctagcttccattcaatcacttaatactcaattaaaagcctctaaatcatggatttaagtcaagaacaaattcagtaaatcactacaatgcactaacaataacaattatctctatgagttacaatcttacattgtgtgaattggtacagctatctctgggaaaaatcaatatatttgaagagaaaatgattcacaacttacagaatca

SEQ ID NO: 196556 - DNA, 421 bp, Glycine max
  unsure (1)..(421): unsure at all n locations
agcttctaaactntatacaagaatgaagctctgataccacttgttagacaagtggcctcagatatcttaagaggggggggttgaattaagatatcccanactacttccctaattaaaaatctatttcactttcttttcaagttatcaattcccttaacaatgaacttcttaaatattaattcaaataaaacaatttgaatatgaatataaagcaataataaacaaaggagattatntgaattatattcatttatcagtggaaagttttattattgctttataactgtgtaatcgattacacaaacattgtaatcgattaccagtggaaatnttacgaaagcaaatgcttatcatttgaagcagccttggtagattcttctttgacatcatcaaaatcatgtatacatacattcacagatta

SEQ ID NO: 196557 - DNA, 418 bp, Glycine max
  unsure (1)..(418): unsure at all n locations
ttgcactcgataatggagaacacatgaacaacgctttgctatgacattcatggtgctccgaacaaaggtggagtatggaggatngccttgtaggtccgcacttatgcaatcatgaaactcagctccaaactcgaaagtggatggcacatgaacaaccctaagcaagaacattcatgtggctcttggaaaagatgagaatggaagattgccttgagggtcctctcttatgcaatcatgaaacacagctccaaactcataagtggaggacacatgaacagccctaatcaataacattcatgtggctccggaaaaggatgagaatggaggattgccttgagggtcctctcttatgcaatcatggaacacagcttcaaactcaaaaatggaggacacatgaatgacaacgcaattcattcat

SEQ ID NO: 196558 - DNA, 357 bp, Glycine max
  unsure (1)..(357): unsure at all n locations
cagctggctaagcttgcatgtcgcgttaaacctaaaaacatctttgttntgtaatatctcaaattgggctaagcgtgcaggcacaggctaagcgagtcatgcattcccggtaagcctgtggtgctcgctaagcggattttgcaggaaatttcctcctgcaaaactctctaagccctatgtggcatgctaagcccaataatatctctgaagttgcaatttcatttttgggcttagcgcacaagtttgggcttagtgcgcaaaaaaaaaaatcaaaatttcttgtacttctattgtggtatgtctcctacgcagcaagcttagtgcgcacttacacgctaagccttagtgttcctcaat

SEQ ID NO: 196559 - DNA, 482 bp, Glycine max
  unsure (1)..(482): unsure at all n locations
ccttaagtcacctgaggcatgcaagctttgatgatatggtcttcaccgatgaaattgatcttttntggtctnanaagaggcaaatctgatcatcatgctctgataaatgccaaanaaaactagggcaaatgaagagggtgagaatgagggagaagcccatgctgtgactgccattcctatacagccaagtttcccaccaacccaacaatgtcattactcagccaataacaaaccttctccttacccactgcccagttatccacaaaggcaatccctaaatcaaccacaaagtctgtctaccgcacttctaatgacgaacaccacctttagcacaaaccataaacaccaatcaagatatgaattttgcagcgagaaagcctgtataattcaccctaattccagtgtcctatgctgacttgctcccatatctacttgatattcaatggtagccataccctaccaaggttcataacctctatttc

SEQ ID NO: 196560 - DNA, 496 bp, Glycine max
tactaagctcgttgctgcaactgattgacaattgtatctaactgtccaatctgtgtcttcatgtcttggatggtggcactcacattctattgaaactgaatggtattggtggccatttgcttcattatctactccaaggaaggtccaaatctactattcttcactggttgtgcaagtaaaggtgtaaactattggaattgttgttgttggtatcgtttgaaaggcggagcttggtattttctggtggattgttgaaactgttattgactgaatggttgtaactgttgttgtgtctgttgctattgttgtggaccaggaccatatctcaagtttggatgatctctccaaataggattaaaagtgttatactaacgattatattgctgttgttgacggctaaatggctgactaagttgcatggcagaaacatcaacaacttgttctgtgtcttggagtgtggacatacatatatatttgatcaggtgcacacaatacc

SEQ ID NO: 196561 - DNA, 410 bp, Glycine max
  unsure (1)..(410): unsure at all n locations
aagtcacctgaggcatgcaagcttgctccagacccatgagagaatttgcgtctatctaatgacgnnacacgagcattnactgggagggaacccaactctctttattntcattaatcattgcatatagttaggattaacttgtttatgattgcttgagtaagtcatcaacatgtttagtgttgaaaatggtgttgtttaagcttctttgaagttgtggatgagaagtaacttagaaaattntntagtcatccacttgcttagcgtgccctgtgtgctaagcaaatcattatctatgcgctaagcgagtcattattcgcgctaagcgcatcatcccctaccaatgggctgagggggtctcgctaagcaaaaccactgtgctaagcccaaaaacttctctagaatttcattta

SEQ ID NO: 196562 - DNA, 428 bp, Glycine max
  unsure (1)..(428): unsure at all n locations
agcttgcggatntggtctttgctggctaaatgatctaattgggtctaaaaagaggcaaatctgatcatcatgctttgctaaatgcanaaactggggcaaatgaagagggtgagaatganggagaaacccatgcgctgtgactgccattcctatatggccaagtttcccaccaacccaacaatgtcattactcagccaataacaaccctttcaaaagccacctaccacacaaccaatgctaaacatcacctatagcgccaaccaataaatgaatgttgcaacgaataagcctgtagaattcaccctaattccggtgtcctatgctgacttgctcccatatccacttgataattcaatggtagccataaccccaaccaaggttcatcaacctccatttctatgaggatacgagtcgaacgcaacgtgtgc

SEQ ID NO: 196563 - DNA, 350 bp, Glycine max
agcacgtgataagcaacattaagggcagaagaataataattaaatataactaaagttcacataatcattcataagtcaaaaacaaatagaatccagtcataaaatactaagtgccaaatactgaaatataaatatagtttagagaatgataacttaaaaatcatagccaaatacatggcttaaaataaaagataatattaatctaaatctatgaaggtggtggaaggtcaaagcaccgacgaagataactcacatcctcttcaagctgtgtgatgcatgtatccattccttcaaagcgagcatcaatggcatctatgcgaccatccaatgaatcaaagtgttctgcaaca

SEQ ID NO: 196564 - DNA, 355 bp, Glycine max
  unsure (1)..(355): unsure at all n locations
atcttatgattacaaaaaggtacgttttattgcattactttcctttaatttataaattagtgaccaaggggttcccatggaccctataagaatataggacattcctgattggcccactccaccaagtataagggaaatctggggctgccatgacttaacaaacttttgcaaaaggtgtgtcccatatctttctatacttgtagcaccactcatcgagttggtgaggaaccatgttccctcatgggaagatgtccatgaaaagggttttcagaccttaccctactcttacattatccccaccactaatacatattgttttattctcttataggtgcnagggaaggacccaaatatg

SEQ ID NO: 196565 - DNA, 392 bp, Glycine max
  unsure (1)..(392): unsure at all n locations
gaaacagcatgtgctctatctcttcaatacagacacctntatttggttcttcctcgttcatggccatctaaaagacaccaccacaaccacaggcaccttcggttgggcatgctcaacaggtactggtctatatgggctcgtagaattctagctaccataggctcttgtgctattactcacagcttgtgtggcagcgttctgagtgtgtcgcaaacattggcttgctgaatgaagatgatgcagaaggagggcacacttgaaagaagcacgacaaatgaaaaggatcgttgtggtgaaatcagagattcagatgaagaacttganactgtacatggagaacacaaccatcatagaagagaatgagaagttgaggaaacaagctatgcttctgc

SEQ ID NO: 196566 - DNA, 363 bp, Glycine max
ttccttattaaaccattgggagactcgttgtggtgaaccctacccacaaacctgacatgtacccctgtgactctttggggatattaagatgagctgctgacatgtatctgagagtctgtgatgggatgacacataatgtttaatgcagcgcatggatctctttacacacataaaaagagtgatgttccaagcaatggaacatcacaaagcgtcagataaagcccgtgaagaacgcactgatcattgactagctgtcaagaagctggtgaatgacacacaaagggtatcccaattttgttgaatcttcatataatgccactccgaacaaatagggaagataatcctgatatcactgacaactgg

SEQ ID NO: 196567 - DNA, 454 bp, Glycine max
  unsure (1)..(454): unsure at all n locations
agctngtagcaaatacaaacaggaataactntttacttttatgtccgatagngtcttggagnatatcgagacgctcgttattgaaaacagaagctcgtagtaaattcaaatgacaataactatttactcggatgtccgattgtgtcccgtaatatatctagacgcttgtaattgaaaatggaagcttgtagcaaattcaaacaggaataactttttactcggatgtccgattgtgtctcgtagtatatcgagacgctcgttatcgaaaacagatgctcatagcaaattcacacgacaatataattttactcaaatgttcgaatgtgtctccgtatatatcgagacgctcaaaattgaatacgaaagctcgtagcaaatgcaaaccacaatatactttatctcggatttctgatatagccagaatatatcgtgagctcgaatcgaaacataactc

SEQ ID NO: 196568 - DNA, 258 bp, Glycine max
gaatattacgggacacaatcagacatccgattaatagttattgggggttgcattcgcaatgaacctcagtttcaatttcgagcggctcgatatattacaagaccggattatacatccgagttaaaaggtgttgtcggtagaatttgctcaaaacttttgtgttaaattcgagcgtcccgatgattacggaattattcgacattcgaataaaaatattgcggttggattgctacaactaccttttaaatacaacgcttg

SEQ ID NO: 196569 - DNA, 434 bp, Glycine max
ttaagcaccgcggctgcagcttaaggaaacttgtgccttggcaacctattttctcagcttgccatggaataaaaatctacacctgttgcaagagtctgtggtctatgttcttctgtagatcaccatatagatctttgtccttctttgcaacaatctagagtcaatgagcaacctgaagcttatgttgcaaacatttataatagaccccctcagcagcaaatccaacaacaacagaataattatgatctttcaagcaacatatacaatccaggttggaggaatcatccaaatctaagatggacaagtcctcaacaacaacaacaacttgtccctccttttcagaatgctactagcccaagcaagccatatgttcctcccctaatgcagcaacaacaacaacaacaaagacaacaagaacctgaagcccctcctca

SEQ ID NO: 196570 - DNA, 75 bp, Glycine max
agaaaaagaggaaaccctttgaaaacaagatataccatccaacaaaaactatacccacaaaaacataatggagag

SEQ ID NO: 196571 - DNA, 412 bp, Glycine max
  unsure (1)..(412): unsure at all n locations
agctngactaggcgagttgattttagccttattttctttctatttattagtcaattcaattaagaatgagaaatcccaaagagaaaacgtccgatagattntttgctntattctcctaaaatatactttttattattattttacctctttttttatttccaacgtggttacggcacgaccaaacggtcggaattcattttaactaaaattaacggatgatacaattcaaacgatcggtggaaatttattttatttttagattaggcgagaaatgacttaaataaatgacttaagcacgtctaaagggggtatagaaagtgaatgaaaacgagaataataatacatgatacaaaatgtggaccacctcnggttcatatattgtatggtaatctcgtttgataacatacctttg

SEQ ID NO: 196572 - DNA, 373 bp, Glycine max
aatcaatattcatgcgacattccagaatcaaagaggcattcaatcaataatcaagatgcatgtgaagacttatggaaagactcacgatatgcaagaaccttctagaatagcatcccgataagtttaaaaagaatgtgtcaaagaaaagattgaatatcacaatttgtccaaaagaatttttcaaagaaaaatcttataccagagtttttactctctggtgatcgattaccataagggcagaatttgattacccgtagcccaaaacagttgtataactgtctgtcaatgtatgaatcgattaccatggacatgtaatccgataccaatggttttgaacattgattttcaaatctcaagagtcacaacttgtgac

SEQ ID NO: 196573 - DNA, 409 bp, Glycine max
acccaacccgcccatgcccacgatataaatttttgacagcttgttttcatggtcataagtgagccaagtaatgatgatttctttattaccatctctgccacaaatatcactttcaccaccgaagatgttgattgtggcactttaccaccaaatactgatcctgatcctgatcctgctacattaccaatatgcctttgtaaacctagattatccatccggcttgcaagatcatctatgtcatcaagcacgtttctatgccggcaataatttccttgttcaatgaactaacacgggaagatttatagaaattagtaccttgcaagtcagggttggattcaaatgaagtgaacttgaatttggagtgtgatttctacacacatttcaactatacatggactttatcttatta

SEQ ID NO: 196574 - DNA, 375 bp, Glycine max
  unsure (1)..(375): unsure at all n locations
agctntcttaacanaacttacttgagaagcttcttttataaaacttccttgagaagctagagcttagctacacacacccatctaaaaactaagctcaccttcttgacaaaatacatgaaaatacaaaaaaagttcctaccacagagactactcaaaatgccctaaaatacaaggctaaaaccctatactaatggaatggccaaaatacaaggcccaaaagaaggaaaaacctattctaatatttacaaagaagaaaggatccaaccttgacccatgggctcaaaaatctaccctaaggttcatgagaaccctagggccttctttagtagctctagcccgagcctctatgagtcttctatccaatacccttggggg

SEQ ID NO: 196575 - DNA, 476 bp, Glycine max
  unsure (1)..(476): unsure at all n locations
tcttcactacatcaagaatcaccggggtgtgtttctttttggttgtcctaccgggttatctccatcctctaaatttattcgatgcatacatgtggatgggctaataccaggaatgtctgccaaggtccaacctatatccttcttatgcttcttgagaactgacaacaacttctcctcttgctcattagcaagggatgcagatataatcactggaaaactcttgctatcatccaaattagcgtatgttaaatttgatggcagaggcttcaattctggtgtggtcggctggacagnggtagaatgagatgtgttctcagcctttacctcatatagaaagtcagaggtatgtgtacttactgatacatggctagtcctatctgtctctattaaatcaatctcaagaaggtaaacaccaccaccaggcatgccatcaatatcactctcatatttcctctcagcgtcatattcagacatat

SEQ ID NO: 196576 - DNA, 432 bp, Glycine max
  unsure (1)..(432): unsure at all n locations
tcttggttaatcactggactcaaaagactaaccacttctgggttcattgcaagaagcaggatntgcttcttggttaaacattggactcaaataactaactgcttttgggttcattgcaagaagaggatttgcttcttggctgatcattggacttaaaagactaaccgctcttgggttcattgcaagaagtgggtataacttcttggttattatcactggacacaagggaccaacgttccttgtggttcatngcaagaagtgggcaaaacttcttggttgtatcaaggttatcacactctcgagttaactcgctaactctcacgaatttacgagtccacttgatctctacgagttgactcttgagtgaactctcttattagtagactctgagtaaactctataaacttctagtacactctatagactctcaag

SEQ ID NO: 196577 - DNA, 279 bp, Glycine max
  unsure (1)..(279): unsure at all n locations
cttttcccacaactcttggtaatgggagagaaatgttcatctaaagcatacaaatccctaatgttatcaaatactaatatttgagctcctatggagcataacaatgtgtgtctcctaaatagggcatcagcttccacattntgttttccctttctgtaattgataacatatggaacagggggacgtacaaacacggtaatatcatcaaataatcatatagcagagatgcacatgacatttataggatatgcatgatagtgtaaagaaaacaaaacacgc

SEQ ID NO: 196578 - DNA, 445 bp, Glycine max
  unsure (1)..(445): unsure at all n locations
gcttatccctctaacttatagagacccatgtctttcttntctcctcttttcttgcatgaatacatttgtgtatgattntatgtcacaacacactttggcctttttgttgataccaaagggggagagaaagttgggattaaatcaagaactctaacttaatttcaagtgaagcttaaattcaaaaacaaaggggcggaattaagtgagtgattgattagaagatagagcttgtatgcgtttcttgattttaggtttgtcatcatcaaaaagggggagattgtagaagcaagcttcatgatgatgaaccaagcaattntgattatgccaaaagcccaagtgattgattcaagacttcaagatcaaacatcaagaatccaatccaagactcaagattcaagagaagacatcaagaagcaacaagtcaagacttcatataggataagta

SEQ ID NO: 196579 - DNA, 429 bp, Glycine max
  unsure (1)..(429): unsure at all n locations
agcttntacaccaagatgtctatanattanaattttttnaanaaaaaggttttcttcaatttcaaccaatgtcgatcaccaacgtgagccaaaacagtgaaaaaaatagaagacatatcttcctccatctatataactatataactataagactgcttggatacacaattatcattagccaacactagacagatagcaatgacatctcttgaactatctttacttaatttacatgtcacatgttatatagtttatgcacaaactttgttacaacattattaattattcccatgaatagttatagttcttccacacactgtacaatgttagacaacaccaatgatatccgacaaaactgatctattgagattgtcttaacgtatgttccatctaaacaagtatatcacttcacatgagaaagttctatat

SEQ ID NO: 196580 - DNA, 320 bp, Glycine max
  unsure (1)..(320): unsure at all n locations
acatcatgcaaatttcgntcacggattgaattcaaaactcaatagccgacattggtcacgaaatagccccgactggatattttcagccgacattacgcaattttttttataaaacactcgctggtagataattgttttctttacggcagaagaagtggtatcagagcttcggctcttgatacaggtcctatcctatcctattatttncctttgtaatatgtccacgtccgagttttgtccttgatctgtcatttgttttcttgatagcgtcttgtagcgttgttatttgtgtctatatatcattcttggtcttgttcctt

SEQ ID NO: 196581 - DNA, 400 bp, Glycine max
  unsure (1)..(400): unsure at all n locations
agcttgagcttgttgttgttgccccatatagctctctcggaacttgttcttgctccattcttcctttcgggcccctttggtttcctactctaatgcttcgaccgtagtcatgttgacatctctcaacacatcacactctttcctgaccctagtgactaccatctttagcttctccttgaccactctcattttttcaagctccgctttcaaagctttcacttcttcgctttcctcagggactntagcttctttcccacttaggccttttagctttgggggctaagttatcccttgcgtcctatacttcaaccaattgtgatagccgccgatgacgccattgctacttccactaagctccttatctttcctttccattggattccatgccctataggatctc

SEQ ID NO: 196582 - DNA, 379 bp, Glycine max
  unsure (1)..(379): unsure at all n locations
ttcttcgctttactcatggacatcagctntctttctatctatgtcctttaactangggagacaatttatttcttgcgtcctatacttcaaccacttttgataaccaccgatgatgccattgctacttcccctaagcttattatctttcctttccattgtattccatgcttaatggattctctgaagaatattcgcataggcttcactgaaaccccacgcaacgaaaggcgtgatgatctcctctaacggtgcacctttcatatggtagcctacttgtcttatggccagcatgggattataattaatataacccctcgttccatcaatgtgacgtttgtgaatacttcacacgagcataacactccttgcccttccttct

SEQ ID NO: 196583 - DNA, 224 bp, Glycine max
gggggggggggttttttttttttgagaagaatgagggtagtataaaaggataaggattatatggtggaaagaaaaatggaggatgaagaaaggtgatgggtaaggtgagaataggatggattataatgaagaggatgaagagatagggggtattatgagttggataggattaagttatagaaataatgaggtatatgagagagataggaagttggttttggggg

SEQ ID NO: 196584 - DNA, 470 bp, Glycine max
  unsure (1)..(470): unsure at all n locations
agcttcaacctataggagacagaccattccatttgttttagatgatcaatgacaatgcctacaagatngacttgcctagtgagtataatgtaagtgtcactttcaatgtgtctgatttatctcttattgatgcaaatgaaggagccttgaatttgaggacaaatcattttcaagaaggagggagtgatgaggacacaactaagggcaaggaccatgaaacacttgaagggcccatgaccagagacagacttaaaaaggcccaacacagtgatgaggacataactaagggcaaggaccatgaagcacttgaagaacccatgaccagaggcagacttaaacaggcccaacacgtcatagagacaaggctggtcatttgtatagctgtcattgatgatgattgaagacacatgttnntccataattttaattntaatttattatttaaatnttgcaattaaataaataaaaat

SEQ ID NO: 196585 - DNA, 118 bp, Glycine max
taatgtctcatctagcctataaatcctaaatctctctgtgtgtttctttttgaagctaagctccctttgctgctataaaccggttcttctttcgaaactctgccaacttcagtggttt

SEQ ID NO: 196586 - DNA, 487 bp, Glycine max
  unsure (1)..(487): unsure at all n locations
agcttgtaggccttggatattcttcatcaatgttattcttttgcttcttgaagatcaatggtagcggaatggagaaagaagaaagatgattggagacgccacttcaaggagaagatgagtcaagagcaagctcaccaccataggaagccatggataagagcttaaaggtaggagaagatgaatggagggagaaggagaacgaaattttatgcctcaaatgagggttgaactttgaagtgtaattttcaaatgatcaaagttgataaaatgcacacacggcctctatttatagcctaagtgtcatacaaaattgaagggaaatttgaatttctattaaaacttcactttgaattgaaatcgaatttctggagccaatatttcactaattatgattaatgaatttctgctacggttcacgccattaatccaagatcaagtccaagatnttccactaagtgtgcttaggtatcataagtcatgtaaagca

SEQ ID NO: 196587 - DNA, 211 bp, Glycine max
catggaccgttcaaaagcataaaatctagacgtaactttactgcttttgcaagaactacataggtttgattgtctcatcgcaattgaggattcgtaggagcaaaagccccgctttttgtaaccaccacatagatcgttaatggtccaacgccttaacgttcctctcctttcaaaaccaagaaatcgttattggtcaacgcactaacgtttc

SEQ ID NO: 196588 - DNA, 368 bp, Glycine max
  unsure (1)..(368): unsure at all n locations
ttgcataccgcaaggatccatcananatatacttgtgaaagagagccatgagggtgggctcatgggccacttngggatagacaagacctttgtcttactcaaaaaaagttttattggccccatatgaagaaagatgtccacactaggtgtgtggcttgtttacaagccaagtctagggtgatgcctcatgggctatacacacccttacccatcccatttgcaccttgggtagacattagtatggactttgtccttgggctttcgagaacccaaagaggtgtagactctatctttgtgggtggtgatatagttagcaagatgacacactttataccatgccacaaggtggatgatgcttcctacatctc

SEQ ID NO: 196589 - DNA, 278 bp, Glycine max
tttatcttccgctggatctcatggcggaaagtcaccatttaaggacctgattgaaacatgaaagatgcaacctccatataatctccaacatcatgctttcatcaagttggatcatagcacaagagcttcaagtaagcgcttcttatacctccattaattttttgcttaccctctcttatataggagattttcatttttaacatggattcctcacatgtggtgtgctaaatgttgttaacatgattctttagagttaccaccgattaaaattgctatat

SEQ ID NO: 196590 - DNA, 448 bp, Glycine max
  unsure (1)..(448): unsure at all n locations
agcttcaagaatcaagatcaagagtcaatattctagtattaagattcaagagaagactcaatcaagataagtatgaaaaggatttttcaaaaactgagtagcacatggatttttcacaaaacatgtttaccaaagagtttttactctctggtaatcgattaccagattgctgtaatcgattaccagattgctgtaatcgattaccagtagcataatgtttgtgaaaaagttntcaaattgaatttacaacgttccaattaatttcaaaaagctgttatcgattacaatgtnttggtaatcgattaccagcgcctttgaacgttgaaattcacattcaaatgtgaagagtcacattctttcacataaaagccttgtgtgatcgatacattgatttggaatcattaccaggattgttctgataaatacaagatgtactcttanatgggtt

SEQ ID NO: 196591 - DNA, 470 bp, Glycine max
  unsure (1)..(470): unsure at all n locations
gtcacctgaggctgcagcttaactacaataagagatataaacttgtttcttatatagtaaacanagccataggctgggatgccatgtttctatggcagaattttggccttccaccgtattccgctatccatcattaataatattgccactactccattggaggaacaaaaacaaaattctaccctatgaattttttctacaaacgattgtagacactattatcttccattcatgaactaacatacctcaatgccaaaagggtggggactatgtaaagggactggggaggatcattatatgaaaccttattcttgcaccaaagaaatgagggtgcaattggagtatacatatatattaatataccaaaattataaacttcactaattcattaaagaccgcaaactaaggatcactatcttaattaatcatctagtgactatcagctctatatacttgtaactttagcatat

SEQ ID NO: 196592 - DNA, 363 bp, Glycine max
atactatgcttctctttcttcgttgccggggcggtacttccagggtctattctttgttgtgtcacgatgttgggttgaagcaacgtgctgggtgccggcccttctgggatcgggggatataactctacatccctttgagcatagtcttgatggtctgtggggacttcttcgggctgctgatgatgctctctttcaatgacgggaggaacaattttgcccgcatcgtcttgcaagacgggtggtgagtagttgggcaacaatccttaaaggtaagccgctcggttgtatcccaagagagggctgccatattgacccattgtgttcacttcccgtactactatggttgatggatgatggtgcgca

SEQ ID NO: 196593 - DNA, 418 bp, Glycine max
  unsure (1)..(418): unsure at all n locations
tcgaaaacttgagaacagtgtgcttgacaatgaattntccgattgcttatctcggttacttgcgatccacattacactcctcnaagataatagaagaaacgctttnagaggctcaaatattctgaatgcttctccataatctcttctttgattggctttgtacttatttagaagcagaacagctcctctaagtctaacattgtcatatataatttgcatgaatggcgcgtggataggacatgcacgaactaattgtgattttgtggacagtctaatgtctcacattctctttagactgaagatatcatagttatcttaattccgcttttatagacgatagcatgggagttccatcttccctaatgtatatatggaaaatgcanaataatgaattatcctcttgctataagagtagttg

SEQ ID NO: 196594 - DNA, 248 bp, Glycine max
ttgacttctacagttccaattccacaatgctatgtacctacgaaatgtattaattagttacctatgctatctctacacaatgatggttttatgttactagtactactacattagagacttaaatcattaatttcctagcttaacatgaattatatttgaacaacatcaatctaactacctatatcggatgatgattcaatgcaaataaagccacataatttttactactaactctcaaagcattatta

SEQ ID NO: 196595 - DNA, 376 bp, Glycine max
agcttaaaagtttcttgtagagaaacatcatcttacttgagttctagggtctaagttacaacccaatattaacctttacgatgcaacaaattcgtcataaaacatacgattagtggtgaatccaggaaatttttctattgaagacaaataaataatttataatattttcatataaaaagcgttaaatgtttttacaaatatgagaaaaaaatacttagatttctagatattacaataattctctatatatttcacattcttaaaaaaaattatgattgtttattgtcaacattataaagataatagaatagtaaaatgataaaattattatgaattgattctctcctttatctctataactcttatgttaattcat

SEQ ID NO: 196596 - DNA, 374 bp, Glycine max
  unsure (1)..(374): unsure at all n locations
tcatttgagtagtgatcaatatcacaccgaaatcatgacaaatgttagcgaaaggtgataccggtatttcatggtgttttacatcttactgcgtgatgccattttcctttattcaaaagcttatgggcaggaacgagcaggtgctatgcccatgatcaatcaaccatcatctcacgtgcgactcaagatgtgttaaagaagcgttactatgaggcaacctattacctttaaaattcccatttttacttatttgtctattatatgtgaatacgcctattcttattcgcgaccttacgagtttaatatataaatgaataaaaagggaggataattaactttntgcataagaaatttgaaaaaaaattatgttagct

SEQ ID NO: 196597 - DNA, 445 bp, Glycine max
agcttgtaaagagtctcatcacctactcttttcttaatgcaccttgacacctagtcttccttatcagcattatgctcttcataactctatatggctcgccaccataatgaccatctatgatgcaccataaatggaaggaggacatatacaggaatacagacaacaatatatctaacaatctcaagatacagagtatggttaacacacactaagattcttttaatgttctttattatgtaaaaacagttgaaaaattaataaaacatgagaaataagtagtaacactaacatattataaacaaaaataatccaatgatctatcataatataatattatagcgtaagcgcgatttaacgtaagaacactacaaatacttagtcaatgctaaaatacaataacataaacatcagcattgcaacatcttagtatcaactcgtctcaatc

SEQ ID NO: 196598 - DNA, 403 bp, Glycine max
aaataggttgagagagatatcttggtagttggaatcacaagaatcatgatttgattcatgtgatttgatgcaatgttctcactctatagatgcagattgcataaagtttcattttatcactggagatgcatgttgaattgcttgaactgaaccacattgtaggaatttcaattctatcgtgttttcaacaatatatgaagggtatttagccgaacagctaatgtgggatgaaaaactaagtcagtgttgggtgggtgtgaccgcaatcttgtgggcataggtgtctgcgaagatggcttctgaaaatgctcactgcacacgctacccaatgggtggacactcatactacggccattaattggacatggattgtgttatgctctggggatgataccttcgtgtt

SEQ ID NO: 196599 - DNA, 397 bp, Glycine max
  unsure (1)..(397): unsure at all n locations
acataggcggagtatgaaatgagtgaacgcaatatatctcgcatatacattgcttgaatcttgatttcataaattaaattgtcatcatataataggcggagattgtagaagcaaagactttgcctttgatgttttgatgatgccatatgatcatgatgtcttgatgccttatgaaaatgcgcttctcaagtttaattcangactaaaatccaagaatacaagatacaacatcaagaagatctctagtgttttatgaagagaattccatattgaaacaaccaaagggttggccaagaaatttaagcaaaaatgtgcttttcaagagatctactctctggtaatcgattactcgaggatgtaatcgttaccagtggcaaaatgattataacagctatta

SEQ ID NO: 196600 - DNA, 302 bp, Glycine max
ctaagaactaaagatatctgagaccaccacacaaactaataataaatccccagacaaatatatattgtaacgcatatctatgactttctacaacaattgttctataagcgtcgaatttcgcatgtagacatactacatactaagacgatctgtggacaccgtcttattatatggtgactgtctacgacggttgtcctataaccgtcatagtctataatgtagacatacaacatactacgatgttgtggatataaccgtcttaataaaccaagcaaataatgcgttctaaatgatattaccac

SEQ ID NO: 196601 - DNA, 392 bp, Glycine max
  unsure (1)..(392): unsure at all n locations
agcttgtgcattcaatatcctgatgatggtgttccatatgtnctcaagactagactaatacatttgctgcccaagtttcatggtcttgtaggtgaagatcctcataagcatgttaaggagttccatattgtttgttccaccatgaagccccctgatgaccaggaagatcatatctttctaaaggcttttcctcattctctggagggagtggcaaaagattggctgtactaccttgctcccaggtccattttcagctgggatgaccttaagagggtgttcttggagaaattcttccctacatctaggaccactaccatcaganaagacatttcaggcatcaggcaacttagtggagaaagcttgtatgagtacgggaacaaattcaagatatt

SEQ ID NO: 196602 - DNA, 388 bp, Glycine max
tctcattcatggttccaaaattcgaagttcattcttcttattcttgagacaacaaagacctgaactctctgttcatctgagtcatattgtgtaacttcattcaatggaagggggatctctccacttcttgaaccctaaacttgttgcctttggaagctaagccttattgcatgttgctttgatgtctaaatattcgtaactactgtcttggctggaaccagaaaatatgctgtttttccggaaattctagagataaaaattagttctttaagtgttaaaacttaatgttagccgtaaattgcatttaaatcggaggtttctagcaaaagctatgaataaaacaagttttaagacatcttatttgataaaaaatgtcatgaaattatac

SEQ ID NO: 196603 - DNA, 441 bp, Glycine max
  unsure (1)..(441): unsure at all n locations
agcttctgagctntgataattctttatagttttaacaattgagatgctgaaatattatctcattctcgtgattcatccccttccttagacactatctcttcaatntaatcacaccaacttatctcaattgttttgagttgacccaaacttttgggtgttgaggatgtgaacaaatatagcaggggtgcaatnttttacttccaaaaatgtcaaattcgagaagggcactgtgcatggttccaaattaggcaacactccgctnttatgaaaattcgtagcattattcttcgaataatacaccacaacctattcataaattctctcattctatgtcatccccttggttaaagatgatggaacacaagactttacccaaataanataatacatgccagaatagttgattgtgtacctctaacttaaagtctaaacataaccttt

SEQ ID NO: 196604 - DNA, 413 bp, Glycine max
  unsure (1)..(413): unsure at all n locations
aatctcttgcgagcggatggaaacattatgtccaggtacccttaaagcagacaagttggttcaagttcaacttgagtggtgggggtctgctatcaaattggaaaatgacctgaactctaccatgcgggaggcatttanggaaaaggtatgttttcaattattttgattagatatgattgatattggtgtatgttgttcttataatgcaaaatatacaccgctaattaggttaattagattcatcttcaaattaactttggcctcatccaatttatcttggattctcagcgtcgtctaattgttcggaataccaaataactcacagaaacaacatttatgtgccaattcaatttggctaatattaaatttgtacgtgtaactcataatatgtaaataatttaatttattgtcta

SEQ ID NO: 196605 - DNA, 234 bp, Glycine max
ataagtaaataagtgcaccatctccttttattctctatgaggcggaggggagccatgttctcagaggacaataataactcaatgcccaaaccagaatattagaatcaccatcaccagaatacttcgaatgctcaaaatgcccaaaaggcacaaaatgatccggatgcacactatgcctaactaatccatcacaagctctatctatctcatgatcaaaggcgtagaattcacctg

SEQ ID NO: 196606 - DNA, 357 bp, Glycine max
  unsure (1)..(357): unsure at all n locations
gcttcatcttcaacgctagataacaagaattataattctataacanaaataataataataataataataaacaccagagagaaagtgttgtctcctccagtatccaccttttagcgttcaccaagagttgattattatttgaacatcctctctctctctctctcaacaccgattccagaatattccgaacgtcatgttccatcgccgttcagatccaggtatctccacaaccaccacttctcactcaaactccattcttcttcttcttcttcttcttcgtcggcgacgacgtcagcattggctgttcgtttcatgtaacgattttcacagattactatttacaacctacgttcctta

SEQ ID NO: 196607 - DNA, 244 bp, Glycine max
  unsure (1)..(244): unsure at all n locations
gataaataaaaaaaaaaaacatgtcatgatcctcaaccaaaaantaagtcatgcggacaaacagcaccacccaaaattggtttgatctacaccaaaacccaaaaaaggggccatccgaaacacaccgggtcgtcaaaacggaaaaacaaaagagtcgcgcacagagctcataaggtactgaacccgatcccccacaacacacagtccgaatacaatcagagaccaaaaaggcactacaccccga

SEQ ID NO: 196608 - DNA, 403 bp, Glycine max
  unsure (1)..(403): unsure at all n locations
agcttgncggccgcgatagacatagggtgcataaaattatgttattctctacgggctatcaagctttttgtctacagacagcaaaaagaatgttatacggataaccactcgggtatctccgcccgtcagcgggtctcacatgtcaatatgacagatcttgtgagcgcgaaagatgacgtaaatctccgcgtgtcaacaggcttgtcggccgcgattgacaaaaggcgcaaaatacgatgtcagtcttcgcatgctatcaggcatttcgtcttacagacagcaaaatagaatgtttatacggataaccactcgggtatctcgcccgtcagcgtgtctaaatgtcagtatgacagatcttgtgagcgcggatgatgacgtacatctccacgtgtgaacggcttgt

SEQ ID NO: 196609 - DNA, 333 bp, Glycine max
tatctcttttatcttagtgagagtgattctcctaaattcttgagtgattcatgaacaccctggctgtatcaaaagactttcacaacctttgtgtgttgccctctccgaaaagagtgattctttccttcctttcatctttaaccttgttctgtcaaaccacaattctatataatccacttctgcccagaattatctcgtggccataactgccattttacgcactcaaattaagtgattcttgagcccaaattgtatttcaagacgagacctttcacctcgttgtggaatcacctgatatggagccctgttacttgagttgttgccatttctata

SEQ ID NO: 196610 - DNA, 370 bp, Glycine max
  unsure (1)..(370): unsure at all n locations
gcagctgcaactaaacccatngccccatattctttttatnntgggagccaaccacatcctgcgtgcggactctcagccgcttatgataaccgccgatgatcccattactgcttcccctaagctctctgagctttcttcacgccgcatcccatgcctggcaaactccttggagtaccctcgcgttgtggtcactaaaaccccgtgcgacgaaaggcgagatgctttcgtctaatggcgctcctctcatggggtagccaagctgtcttatggcgagaacgggattataattaatacaaccccttgttcccatctagggaacattcggacatccttcgcatgaagatagaatcttgattcttccttccttcta

SEQ ID NO: 196611 - DNA, 431 bp, Glycine max
  unsure (1)..(431): unsure at all n locations
acatggacttgaggggcctatgcaagttgaaagcctttgaggaaagaggtatgcctatngtgttgtggatgatttctccagatttacctgggtcaactttatcagagagaaaacagacacctttgaagtattcaaagagttgagtctaagacttcaaagagaaaaagactgtgtcatcaagagaattaggagtgaccatggcagagagtttgaaaacagcaatgttactgaattctgcacatctgaaggcatcactcatgagttctctgcagccatcacacctcaacaaaatggcatagttgataggaataacagaactttgcaagaagctgctanggtcatgcttcatgccaaagaacttccctataatctctgggctgaagccatgaacacagcatgctatatccacaacagagtcacacttagaaagg

SEQ ID NO: 196612 - DNA, 390 bp, Glycine max
  unsure (1)..(390): unsure at all n locations
cattggtaacgtgtctactatcattgtgataatctctttctctgttattgggggcgctacttgagctgccaagtctctccatctttgggcgtatcctatgaaagatccgtgccctctntttgcacatgttctgtagttgcatcttatccgaagccattatactgacactgcctaatgaaggcaaccactaggtccttccaagaatggactcgggaaggttccaagttagtgtaccaggtaacagttaccccagtaagactttcttggaaggaatgtatcagcaattcatcattctttgagtatgcccncatcttctgacaatacatctttagatggttcttgtggcaagtagtccccttgtactcgtcaaagtctggcaccttgaacttg

SEQ ID NO: 196613 - DNA, 418 bp, Glycine max
  unsure (1)..(418): unsure at all n locations
ggacataatcacgcagagcactnnagaggtataatgaatgtttttcaacgtncaaattaatataatttatgcaaaaagaattgagtttaataatgtgcttttaacaatcataacaatgagtaccggatcaactaagtattactttatcagataatgtaaacaaacacaatggaagtaatggtgcactgtctatagttttaagcaaaattacaaacttacaggaccgagtattcctcttaataattgctgcgtgagagtctggagaatagatngtgcaagagactgagtagaaacttctgaacaactgtctttaagctatgtagctatgtccgatgctgaccttccatctacaatatgcacatagttactggagtttcacaccatacctactacttcctactacggagcagactgattt

SEQ ID NO: 196614 - DNA, 467 bp, Glycine max
  unsure (1)..(467): unsure at all n locations
gacctcanagtcacctgcggcatgaagctntgcacanatgccactctactcgaaatttctgtttgatatgnnggcgaggaaaaacagatacctccaccaagagaatattatngtggaaggcaactgcattgctataatcagagaattcttccaccataacataaggaccctggaagtgttactattccttgttcaatcggtgaagtcattgtgggaaaggctcttattgatttgggagccagtatcaacctaatactggtctccatgtgtagaaggttgggagagttggaaatcatgcccacgagaatgactttacaacttgctgaccgatccatcacaagaccttacggngtaattgaggatgttctgataagagtgaaacatatggtctttccagctcgatttgtggtaatgtatatgaaggaaaaccataaggttccagtcattttgggatgtccctttatgtc

SEQ ID NO: 196615 - DNA, 458 bp, Glycine max
  unsure (1)..(458): unsure at all n locations
ataagtgtctgatggaaacaaggttttttcttttcttatcaaagaaaaagcaaccgaggcaattgagtgtgaaaacaaataaccacagcgttgggtccttgtatcgagatacttgatgcaatttgagtttttctctattttaaattatatgtggtctatattgaggaaaaatataccaaacaacaatgtcttgtgagtttggactaatttaaactaaacttcgttcgcagatgtctcttgttgaacttatcttaatttaaacagcattatagtcacaacataataaaaaccaaaaccttgcactctattcctagcaatgcagttatctaaccctgctctatcaagttctaaagaaacagaacattttccaatgctatagntgctaacagcacacaccaatgtgtgatcaaacaacaagcgtgcatacgatatgcgtagattgaaacattgaacacatg

SEQ ID NO: 196616 - DNA, 319 bp, Glycine max
atactctgaacccttcctaatagattagatgctatcgcatctgccatggagaatagcacagatctatcaaaaatcaccttgggcgaactaaacaatgccttacaggcttaagaacataggagattgatcagaagtgaagattatgtggaaggagcattgaaggctaagttactcatcaatcaaggagagaaagacaaaaggatgagttttaagaacaatttccacccacgtgatatagctagcgaataagagaaggactttcctccttgcaacattgtacaagaacggcatcctcctttaatatgtggagaaacatgat

SEQ ID NO: 196617 - DNA, 481 bp, Glycine max
  unsure (1)..(481): unsure at all n locations
atactaagctattctcttaatctaacttgaagangcttctttctaccttgtttcagtcaananacaggacgnaaaatagtcctataagattcattcttactctccacacgctgattcttttatcactacttgttctaaaagatttcatcgttcaaagcttatgcatcatagctcataaggtattcaaattcaaatcgattcaaaatcaaaatcaaaatccgctcataaaagactgaatactcaatcaaatcgatttttgtaagatttgtgttggatgattgttatctttaacctactgattcggttcaattcatggttagtgtttttaaaaccgatcaaaattaaatcaaactataataagtatactaacacttatattatttaatatatacatttcttatatgatcacgtgagtttacaatattttatatattattatatataattatacaatcatgtattctttatatacttttaaaaa

SEQ ID NO: 196618 - DNA, 375 bp, Glycine max
  unsure (1)..(375): unsure at all n locations
agctngtanggttaaagtctcactattgtctcttgctcatgcaacaattgttagccgtggctatacgagacatcttgccaaacaaagtcaggttaacgataactcgcctgtgctttttcttccattctatatgtagcanagtcattgatccagtcatgtttgatgagttggaaaatgaggccgcaattatactgtgccagttggagatgtattttccccctgctttctttgacatcatgattcacttgattgtgcatctggtcagagaaatcaaatgttgtggtcctgtttatctacagtggatgtacccggttgagcgatacatgaagatcttataagggtatacaaagaatatatatcgtccagaagcatcta

SEQ ID NO: 196619 - DNA, 333 bp, Glycine max
  unsure (1)..(333): unsure at all n locations
cacccattccatgtctacttaaagaaccactttttctttgacctcccaacctttattgacatgccacaaataacagaacatagaggttntttttttttggtatgcatttgctttcaactcatatttccttttttttttacgatgataggtattacaaaagaatgtagttctgattctctatgtatctgttactcatattcctggacataatttaaccaaaacactcccccaaatttggaacaaatttgtcttgatccataataatgctctcctatagcctaagatagggtgcacaaagatagcatttacatttagcttatggttcaatgacac

SEQ ID NO: 196620 - DNA, 170 bp, Glycine max
atcgtttacacgatcaaccttctgcatgactttcgttggcaccaccaacatagctctaacaaatgaaggtgtggctccactatgaataatgtcatgcgccatccatgagaaattgcgcgaatagcattaaaaagccttatcaaccgtcatgtgcaaaatcacatggataa

SEQ ID NO: 196621 - DNA, 404 bp, Glycine max
  unsure (1)..(404): unsure at all n locations
agcttngcatgcttnatagagggggggagtgtttncatttatctnnactgnnancacaacaaacatgtgacaacaactatgttataaatgttagacatgcggcctggtcttatactctacaaaaggtcaaaaagttgtagaagatcatgtacacactaataaaggtgttgtttagaattcttctcaacaaaaatattgctcaaatctattttcatgcataagctttgcatgctttatagaggtgttgttagtttcattttaactntactgttatcacaacaaacatgtaacaacaactatgttataaatgttagacatgcggcctcagatatcttaagaaaggggggggggtgtaaattaagatatctcaactattccacattaaaatattacttgatgctgaa

SEQ ID NO: 196622 - DNA, 290 bp, Glycine max
cgttctcaaaaaaagagagtatgatctaatctacattagatccaaatcagatcagatctttatttataataattcagtctaagactcctactaaaatttatgtaattacacaaatcaaaccctatgcaatttagaaagtcttttaagccctaatgagctaacatgttcaaaaaagaaaatatttattcactgctagattattatgatattaaatgtgtgataatgttataaaaacttacatgttggtatcttttttaatgttaatcatggtcatataaaggtaagttaaa

SEQ ID NO: 196623 - DNA, 428 bp, Glycine max
  unsure (1)..(428): unsure at all n locations
accgcagctgcaacttctggagcaaccttgtcaagcgggtattttgtttttcntcattgacgnagaagccaaaggagcatcttaaggtggagaggaccttgggggtgttgacattgggcctataaataaatataaaaaaaaaatcatgtaactcaaaccaattacaaaaacatataagcatgaaattgtaaatctccacaaaaataaaatgtaatatacttgatttcatatattaaacattactagggtatatggcagttacgtaggcatattttcccataaaccttcatgatgatcattacgagtgacatgtacatcatccttctcattctcaacatatatggaaggcgtctgtggtgagaacgtgggcatgttgctaacatcaagtgttgaagcattaatatccgaagtgataccagcttgttttt

SEQ ID NO: 196624 - DNA, 144 bp, Glycine max
  unsure (1)..(144): unsure at all n locations
acttgangaatgagagtgctgtgagacatacttcaaagttccactcttctccctctttattccttcaatttcgtgctcaccccctctctctttctctccctctatcttatactccattgaagcattctctccaagcgtcttatc

SEQ ID NO: 196625 - DNA, 419 bp, Glycine max
  unsure (1)..(419): unsure at all n locations
agctntgcagcccgagacagaagaacataattttaatgttatctgcatatactattcccccacccccacaaaaaaaaaaaaaaaatcaatcaaatcttatacagaatgatattaaaacttaaaatctatagatatgcgggagagtttgttctatagtatatatattataaataattataatcttgagaccctaactcttttgtgttttttggcacagattcattntgtgttgggtaaaatgatataactcttataagatctattctataatcaaatacaccaaaaaattatatcatacaccaaaaaagatacacattttttaagacataactaacttttattgtatcactccttgcaagtgaactgtaataaatatttggtaaagtgataaagaanttttttatggacaaatgtttaag

SEQ ID NO: 196626 - DNA, 420 bp, Glycine max
  unsure (1)..(420): unsure at all n locations
agcttgaagaaagagtcatagaggctcgtattttatctataatcnattgttggcaanggcaataggtattattgagctcatcacctcacgaacgaattctattaattattttaatacggttaattctttggacataaaacataataacttgcattttacatgcatttgaaggatcaaatcagtataaagtaaaataaaggaggtaaataaggagaaattgtttatctttgaaggacataatgagaaattgttaagaaaataatcaaatactactgcccagttagatactttgacttggtgcccaacagcaattagagtgcatcnaacatattctatttgacttagtgtgcatgtgcaacagcaattatagctttcaacggtcaaggttctcactgccacattaactattgttgcccaagt

SEQ ID NO: 196627 - DNA, 197 bp, Glycine max
gctcaccacgcaatggcgccatttcttaacagaggatgtgattgcatgctactcgcttacataagtcgatgctctctgttactgaggacatagaaccttgcctttattaaccaattggttggccttcctgaaataacactacacactttggcgtagccccacttgactgcttcattcgctaaagtctcagatcattt

SEQ ID NO: 196628 - DNA, 346 bp, Glycine max
gaggccacacgctgcgatttctgccattaaaagatgtccttgcatcactgccaataaccaacgagataatgaattataactgccaacgttggtctctagcggccttgactctcctcatggcagtgtgtgtagtttctcaactcgtccaaatactattatattcacagagaatgagttatctaccgaagtggataagcatttggccaagttccaacatgactctgggaaggatgtcatcccaggcgctactcagcaaggtggagaaaatattagtgattctcgtgtctgccatcctgccacaatagattcactaatcccgtcacatggaaaatattcttctcatctt

SEQ ID NO: 196629 - DNA, 363 bp, Glycine max
acaagtaggggtgaaaatgggttatactggatatggcctacctaaaattggtataacactatgacctgtcttatatttttacagcttcaagtctcggcttgttgcccatcacgagcctattgtttatgcttgagtttggtttttgtaaaagtttgatgggcccattagcacatttaaaagatgtttcatagaaaaaagtgtaaaatatattatttttaaaaaaattaagagattttcattaaaaataagataatcttagaccacacgatataaacgaaatttgtctactaacatttcatgtaacatatgacgagaggcttttatgtttcactaaaagcaaatgaatcatattctggctaccca

SEQ ID NO: 196630 - DNA, 389 bp, Glycine max
agctcgctaattggtaacaaaacatttcatttatttcaacttaatcccttatgaatcctcaataaattccacactccttccctcactcccacaccaaggaccactcttcctttcagttgttcacacctcactcactgattctcaaaaactcaaaagatggtgatgaagaaaaaccttctcttctcactctcacttctcctaatggttctcttcacttcatctcaaaccaccccagcaccatcaccttcctcaaccccaacagacatcatcagaatcctcaaaaaagccggaggattcaccaccctaatccgtcttctcaccactacacaagtctcaacccaaatcaacgcccaacttctgaactcaaacaacggattaacagtgtttgc

SEQ ID NO: 196631 - DNA, 415 bp, Glycine max
  unsure (1)..(415): unsure at all n locations
agctttacagcagattntagtaatgacccactaacttagaattaaaataacttaatgccattaacctagggaattaaaaaaaaacttaatggctgagtgtaactgaaatcgtggcaaccaaaagtcacccccaacagccaacaagtcagccaccatttggtctcccaaaaggctgatgcctaggttgccaattgggcccttattacaacttgaactaaacctaactaaagcccttttagttgattaacccaaaacatatttttggtcagccaactttacaaggattgggccattatttagacaaactaaacactctaaaattgaaacaaagtggtgtcatttagtcctcctccatttgggccatgatacaactcacaaccttggacttttctgcttgaaacttgggcttgtattc

SEQ ID NO: 196632 - DNA, 418 bp, Glycine max
agcttctctcgctaactaaaaatttacttttttgtgctaagcgtgactttttgcgctgagtgaaatttcctctcgggttggggtttgcgctgagtgcgattccctctcgggttggaattacgcttagtgcgcttctcgcgccaagctagatgtcaaaaattattttttttttcaaatcccaacggttgaatggtgtagactttggttatgaacctatagtataaatttgaaggcgatccaacggttaacaagtttgagatcgtgattttaccagagcacgcttagctgaaacttgaaatctcataattttaacctaagtcattaaaactccacataaatcaacattcatatcaagcaaatcacacatggcaaatttacaccataccttaactcatccaagtcaatcatataatcaaat

SEQ ID NO: 196633 - DNA, 204 bp, Glycine max
agaacatctagacaaaatgatctatggtgtaaacttcactcactaaacaagatacttgacgaatataggcatcttactttgttcgctgcaagattcattgatttgaggtaaacactgttggacaatggcctcatataattaagaaggggttaattaatttaacgcgcttactattcacaaatctcttatatgtttattattcta

SEQ ID NO: 196634 - DNA, 407 bp, Glycine max
  unsure (1)..(407): unsure at all n locations
agcttcagactnttttcttttctcagnnttattaactgcatcttgtagtttccacagcatttcctcactatgcttttttgacaaagacagctgttgtcttagttcttgcaactttgattcatattgctccttgataaatgcaattctcaaggactcctgcatagcaaccggtggtccttcaggtcctcttctgtcatgagcattagcacactcagcctctgctttgtctttcagttccttcaaatgaatagacaaattcttaaactcctctgttttcaaaacttgttcagcaagcctcttggtaagttcattgcattggttctgcagccttatcagctcattatcagattgtttaatgaagtgaatgcagtttccagttcatccaatttgccaggagaactatacac

SEQ ID NO: 196635 - DNA, 388 bp, Glycine max
accacttggcctgagcagaattctggtttaataccaacttcaatatctctaccaaaatgtctccttttaaagctttgtatggacaggaacccccactattaggtaaaggagctgacattccttccagattggaagagggtaatcaatggagtaaggacagagatgaattattgcaggaactgaggaacaacctgctcaaggctcaagatcagatgaaaagatatgcgaataatcatagacgggagctaatatttcatgaaggagattgggtctttttgaaactgcaaccttatagaatgaagtctctagcaagatagccatatgagaagctgagtccacgattctatggaccctaaccaataggagaggtcgcttataaactataact

SEQ ID NO: 196636 - DNA, 394 bp, Glycine max
  unsure (1)..(394): unsure at all n locations
gcttctagccaaatggacttttcttgaattattttctttgatagcccctttgagcctatgttcccctttctttgttttgaagctcattacaagccttaagtgaaaaaccatgataagcttacccttaaggaattttggagctttggaatttttttgggaataagtgtagggggatatgtttcattggaagatatgatttttggccatgcttaatgttttattttggccatgcttgatgtatatatatattgcctagttcttgctttaatcttcaaattcgtactgttttaaaaaaattaattaaaaaaaagagaagaagaaaataagtgaagttgaataaatgaggtcttgttatgcgaacttgatttaggagccttggttgattntgttgata

SEQ ID NO: 196637 - DNA, 159 bp, Glycine max
gtacaactttatgtcatccaaatgaatttttgcggagcaggttttaaatatgaaaaaaatctaatttctgagaaataacttttgaaaaaatatatgatgcagaactatactgatagaatattgtctagaaattttcccaaattattgtaaagtgatatg

SEQ ID NO: 196638 - DNA, 425 bp, Glycine max
agcttgaaggtgcgtaccccaccattgttcatagtaattttctggtaatgtgtctactattattgtgatcatctctttctccatcattggaggtgccacttgagctgccaggtctctccacctttgggcgtattctttgaaagattcgtgcccctttctgcacatgttctggggttgcatcctatccggagccatatcataattgtactgatactgcccaatgaaggcaaccattaggtctttccaagaatggactcgggaaggttccaagttagtgtaccaggtaacaactaccccagtaagactttcttggaagaaatgtatcagcagtttctcatcttttgcatatgcccccatcttccgacaatacatctttagatggttcttggggcaagtagtccccttatacttgtcaaagtctagca

SEQ ID NO: 196639 - DNA, 377 bp, Glycine max
  unsure (1)..(377): unsure at all n locations
gcttaccacccagctcgcccaggcgagctcttttgcttctttcanattctactgtaacgacccgcctcgtcgctacggtatccacactctaatattcgataatttcaatccttataagaagaactcccttaattttttattatgagaaatagaagagattgtgacacaacatagattcatccaacggcgcgtcgttacttaggagaatatgcataattgcctagaaacaagaattcagtacatgtcgtacgcataacgaaaattaagtctgttcatatatatatatatataaaatgaaacagccaattttacatctttaactcaacagagaagaacttaatagccgactacggaggagttgattcagaacacaactc

SEQ ID NO: 196640 - DNA, 318 bp, Glycine max
atccctgtgcttgtttagaagcccactacaagctctatatgaaaaaccatgatatcaccatatcctttaggaattctggagctttgaaattgttttgggaattagtgtgggggggttttgttcactaggataaaatgttttgatggctatgcttcacgatgtattttgggccatacttgatgcaccattgtatattggttaaatgttggacatgctgaaagaaatgatgtttctcaaaggcttttgaggcaataaccaaaaatacatcatttctaagaaaagaatatgaaagccatacagttgaggaatacaatctta

SEQ ID NO: 196641 - DNA, 427 bp, Glycine max
  unsure (1)..(427): unsure at all n locations
agcttgaagaanannggaagtattatagaattaaaatttatttaaatctatgcctttnntaagtttcaaggtatttataaacttaattaaaattcttatatatatttgattcagctggtcctgaaggtgtcactttaaagccattgcaatataatttggctgtaattgaagcagcaaccagcaacttttcaaatgataataggatcggcaaaggcgggtttggagaagtttacaaggtgagaaaatgtggcatatacttgcttttttgttcttgtttttcacataaataatggtttgatttccagggcaatctttctgatggacgacaaatagctgtaaaaagactctcaaaaagttctaagcaaggcgcaaaagagnttaagaatgaagttttattaatagccaaacttcaacacagaaatcttgt

SEQ ID NO: 196642 - DNA, 352 bp, Glycine max
ttccttcatctaacaaattaaacttttggaatgaatggtcgtgacataatattagagactctttgaacaagtggtctagagtactattcttattgcttccatacttcgttgaaaaagaagttgaaatcgaaatcaaacataagtaagcatgtgccttattcaaacttctaggtaaaaagctcttgtgcaagggatcgttgtcgaaatgccatataacattgctaatatatttcttcctcacaggtctaagtttaacttttggaatatgggtcacatacactatccacctgttcactccactgtcaactaaatgctgcatttcatacacatataaaatacacgacaatacgta

SEQ ID NO: 196643 - DNA, 420 bp, Glycine max
  unsure (1)..(420): unsure at all n locations
cgacctgcggcatgcaagcgccaaacaagagagcagggtttgctattatgancctagcangcccaagncggaaactcctatataacggaagaactcgagtttaggcaaaagggtattctctgcatcctcaaaaagcaccaaaggttgtttcttcgcaagttttgcaacctggattttgtcaaacccatagttgctgagcatatcaataacagcatctgggccatctgggtttttaaaattgaccctgttggagagttccttggcttttcatgggggcaccccacatgagttgatgaggtatgacacaataaaggtgtcaccttctgggcggtttccatctgattcacaatcacaagagctggctgaagtgaatgaattgaataaaacactgaagcctgtgttgagttgcacagaaaccca

SEQ ID NO: 196644 - DNA, 406 bp, Glycine max
agcttggacttcctgtgttatgggaacctcttcttcctcatgtgtacccaaacccaatcacctggttcaagcacgactttctttctgcttttgttggcttgccttgcatagctcgcatttttcttttcaatttgaaccttcacttgctcatgcaacttcttcacatactcagctatagcctgtgcatccttatgcttaaacatagcaatgttaggcataggcaacaaatcaagaggagtcaaaggattaaatccatacactatctcaaatggtgaacaattagttgtgctatggacagcccgattataagcaaactcaacatgaggcaaacaggcttcccaagatttaagatttttctttataacagtcctaagcagtgtgcctaaagtcctattgactacctcag

SEQ ID NO: 196645 - DNA, 333 bp, Glycine max
accaacgagaataatctttatcaacaactcaaacatttggacaaactcttgtgcaaatttggctaaagtattctcacattctcccattccactgaaaacggcatctggatgacccaatatcatataaccacaaagaacaactctcacaggataccttgataacctaactaagctattgtttgactccctgactgaatctactttctttgcctgtcggcttctcataaaactcttggaagtagcctttttcttggggtaagcaacccatttaagaaaaatatcaatgttatccaagctagacaaattgttggcaggagccactgtcgtatacac

SEQ ID NO: 196646 - DNA, 413 bp, Glycine max
  unsure (1)..(413): unsure at all n locations
agctnctagctcacccttgacgatgtgncaatantgtatgtttatgggacacncttcttttaggtgcatgatgaaaaaagtatggagttccaagtgggaaatacaagtgaattcccaagggaactaacaaggttactaaccaataaggacccaactcaacttgtgtaccaaaatctaccttctaaatctgtttgtaggtgtgcctagcagtggataaaaaactatggtatcttgacaatggctgctcaaggcatatgataggagacaagtcaaagttcatgtttctaaaagctaaggaaggagggattgttacatatgatgacaacaaccaagggagaattcttagtgtagctaatattagtaattctctaactatatctatagagaatgtcttatatgtggaaaggctgaaa

SEQ ID NO: 196647 - DNA, 408 bp, Glycine max
  unsure (1)..(408): unsure at all n locations
agctntgcggatttggtcttcaccggggaatgtatcgaagtgggtatgaaaagaggcaaatttgatcatcttgcttggacgaatgagaaaactggggcaaatgaagagggtgagaatgaaggagaaacccatgctgcgactgccgttccttcatggaaaatcctccaccagctcaacaacgtcattactcagccaatattagcccttctcattacccaccacccagtcatccacaaaagccatccccaaatcagccacaaggcctgcctgcttaccacacgcccaatgcccaaacactacctttagcataaaccaaaaaggaattttgcagcaaaaagactataggattcaccccaaatttcggtgtcatatgctaacttgctcccatatctacttgataatgcaatg

SEQ ID NO: 196648 - DNA, 379 bp, Glycine max
  unsure (1)..(379): unsure at all n locations
aaaaaaattattaataagggtagaaactaaataggtgccataagtgcagntagaacaataaattgaggctgaaaaaaaataagcctagacagaataagtggaagcttttctaggataaatgctctcttataaccctaatttttgaaataccattaaaaccataatttctttaattagccaagccaaattacaggccaataaaattccttagtgatccaccaaatgtaagcatgataactttaactgagatgaggtgcaaaattgggaacattaattgtaggttgtagaaactttcaacactcatccaagacacttgtgcacagagagaaacactaaagccttgtgaggaaaaagtgaggcaagccgacctgattgattt

SEQ ID NO: 196649 - DNA, 386 bp, Glycine max
  unsure (1)..(386): unsure at all n locations
agtctaagaaaatgcttccaactacatatgaaacaagcacaaccagagaaagatgaagacaatagtgcatagaggagatgataacaaagagtgttcagatcccaacacagatgatgacaatagtccagagagcatatcctgagaagactaagagagaagacgagagtggattgttgtttctgtccacaaagagggctnttgatctttaatcgtgaagggttgcagaaagtgtttttgacttctccaatttttctattatttaaattcatatatgggttatcctaataatcacgtgccatcttataattatggacacagaccactcatatgtgttaaataaagcaattctgaccgattctctgaacaccacaaataaacatccaaaa

SEQ ID NO: 196650 - DNA, 363 bp, Glycine max
  unsure (1)..(363): unsure at all n locations
ctcacaagcagcgccatggaggagagaccaacaaataacgtgagggatttcagtaattatatttntatatacttactatggttgatttgatattatatatgttaccacaatggggttatacatgtattttcaatttcataatcaaattaaatatatttatcctaaaactaaataatttctatatttatcatcagttagttcaaatggaaagtctgataccaaagcatggaaaatgtacccactattaaagcaattgtttgatttctatttccaaaaagtatttttattnttcaaaacatgcaattaaacaaagttgctcaaacagttggtgaaaggtagtgtaattgaggatgtggttgaatg

SEQ ID NO: 196651 - DNA, 318 bp, Glycine max
atacattatgacattattctggggaaaccggttttttatatggtttaggccagctctgtgactagggatgggaatttgtcagacaggcttcaaaaggtctgagtctagtctatgatgaattctttaggcttgtgcctgacctattgcctatcaaagacttgtattgtggttcggtctgaccttcttcaaagtctagtttgactttctaaaaaacctaggctgccctgatagtctttctaaaagccttactcacattaaatctttaattttccttgctctgaaatacgaatgaacgtcatatgaaagtgatatgctaac

SEQ ID NO: 196652 - DNA, 338 bp, Glycine max
  unsure (1)..(338): unsure at all n locations
cgcggcatgcagcttctccctatnttgctataaataggggtttaacttatttacatttttttcanccccttaggcacttctctctctttcaaagtggctgacgaaaactatttccgtgaagaaaatataatccaacgcgctatcgtaacgtatccgtgagtaattactctaagattcttgaccgttcttcaagattcatagttcgttcttcattttcttcactcttcatcgggtacgtaccttgaaccacacttttcaagttattatatgtacccgaggcggtccacggagcgctcatgtgtttccatcctcccaatcactcactttttataccccct

SEQ ID NO: 196653 - DNA, 413 bp, Glycine max
  unsure (1)..(413): unsure at all n locations
agcttacccattctgttttagggcttntattantatgcttgngatgtttatgngctgaaattgattatggaaaactgttagagatgaagggtagggttaacctagggttagaaagtgagaatatggtgttatgagtggaaaaagagtgaagctttgaaagttggaaggccaaatctgaatttagtggtatttggaggttaaagggagttaatcctactttgaaatgtcatttacgacttatgagaaagtttgggctgtgcaagagagaaaaacaaatgaccaaagtgaaggcaagagccacttctagggtaaaattgggtgttgaggagtcaaatcttgatttggcagaattttaggcataaaactagtttgagcaagtgtagattgatgttatagacttgtgtgaggtgaga

SEQ ID NO: 196654 - DNA, 224 bp, Glycine max
ttaggctataagcccactcatgcggatataaagagaagcatcgcgggaatgaagagcggtagtcaaaactcactgattgatacaacaaggtgaatgaagctcaccctggcacatatagttgagctttataagcgcgggtctgggagacgaaggtcaagtggtcgcgatatactaatatgatgttcccagtacattggatttggttcgaccatgtccttctgatt

SEQ ID NO: 196655 - DNA, 409 bp, Glycine max
  unsure (1)..(409): unsure at all n locations
agctnggtgcatataatccttatgttctatgttgaggggtattaatatacctttgtagtattaggccaataagcccattattattgatatgatccaatcaaagtccaattagtacaaaatcttttgcaatggatgtattagatttcagcttaaaaccaattggtactaagtgaagttgaccaacaaatatataagctgcatctcgagaattgaagcaagtaatgtgagacttcctacccccccgccccccaccccaaaccacaaatgcctgccaaaaaaggcaagccttctagaataggcgagaaccaagatagattatgggttctgataccatgttagatttcatcttaaaatcaattgacactgagtgaagttacccaatagatacataagctgcactccaagaatt

SEQ ID NO: 196656 - DNA, 403 bp, Glycine max
agcttcttcttcttcatcgcactcgagacttgttacagcttgttcccctacctaggtatgtttcatgagtctttcttctaaatacctaggtacgaacttgtgctctctgtaaggactcgttgtttgtttctgctgcaaggaccttatctaggtacgtttcactttgcagtccgtttagggtgctcattcgtgctcacagggtctaattttgattgaggtaagtcatgcttactttgccaagtgttaatgcatttgaggctttgacgccacaagccgctttatataaaaatgtgcaaatagttttgctcaatgtatattgcctaaagcttttccttttcagcatattcatatgtgttgcaacctacccttcagcgggagggcgacgtgtgactcacgggtgtgt

SEQ ID NO: 196657 - DNA, 117 bp, Glycine max
ccggctcgtttgtattctaaccccactcccgccgactattaacaagctattcattgttcgattatggaacactgatcataatgtctggatggtggaggacgttggagaagatggtga

SEQ ID NO: 196658 - DNA, 396 bp, Glycine max
  unsure (1)..(396): unsure at all n locations
agcttnctcggggccattcctgttaagctatcatntggacagttagcnaacaagaaatataacaatcattacaaacaagggccaaacaacacttctcatggcacgagtgtcaacatgcactttataaaataatcatattggggtcgtgctattttatgacacatacgtatttgcacacataaaaatnttgtatgaagcattttacgacacctatccatgtacatattttgacaaaccttttcatgctacatcctatatatatacacattttttggaaggcttcttttgttacctactcacaaatacacatattttgaaaaacacttttacgctacccatccaacactttgtaaggcacttcatgctatatatattcatattatgcaaggcatttta

SEQ ID NO: 196659 - DNA, 422 bp, Glycine max
  unsure (1)..(422): unsure at all n locations
agcttctacttatgtggcagggcttttgctttttcacttnctngnctccaaagcgagcttttaccactgttcttccttcccgcgatgcttcttttcatgtccgcctgagtgggcttatagcctaaaccatacttcccacgatttccttgagtatttatcaggctagttatgccgccgttgtctttgcctaaacccatcccgggttcataaccattcctcaacataactcgggccatcattaccgctgcatcggacagacaaggctgcccaaagagggagtccacggaggaaatgctgaccacctcaaaagactggaaagcagtttctaacgattcttctgcggcttccacataaggcatggaggatgggcagcttaccaagatgtcttcctcgcctgacacgatgaccaagtgcccctccac

SEQ ID NO: 196660 - DNA, 315 bp, Glycine max
gctctcaagaagtgtgtcaataagcttctcaagggagctacctagtctataaatagaagcatgtgtcaaacttggtgtaactttgatgaatgaaagtcttatgagacacacttcaaagttccacttctctccctcgtttattacttcaatttcgggtcccccctctctctttctttcctccataaagcattctcttcagcttcttatccaggcacattcttggtgatgaagctccttcttcatggcttattccctagtggatggtgcctcccctctccttttcttcttttcctttcactacatctccatggaagc

SEQ ID NO: 196661 - DNA, 374 bp, Glycine max
aaccgtttttacttctccccataacgatttattaaccattcttatatagttgatatacacactattcaccccccccccccaccttttagtgtgtttcttgttgtttcacaacaaataaattctcgaaccagttccctatcactcatgcaggtgtcatgttgacaagaacatccatacctattgtggtttccccttcctttatggtgtttgtggcggctacctcaaacaaccaaaattatttgttaagaattacaaggacagtgagggtgagacccctaccaccatggcgccaatgcttcaaatggcacaacccattctatcgcttgtcgtcaagagataaaggaaggagttcgtgatatcatgaaacaaattac

SEQ ID NO: 196662 - DNA, 223 bp, Glycine max
  unsure (1)..(223): unsure at all n locations
accaatcaacacacgtgataaagtctcaactcttagggttctcctaattatatcgttcaagtnggaagagagtttttgaatgtatttgattatgcaatgtgcttgttatctttgaaattcataccttggatatcccctctttgtgtgtttgcctctccgtttataattactggtcgtgatattaccttcttgatattatattcgtgtaagtctaattgtgctt

SEQ ID NO: 196663 - DNA, 331 bp, Glycine max
  unsure (1)..(331): unsure at all n locations
attaaagggtttgtttaaaatgaagggtaantaataaaaaatttnnataattntnnagttnnaatttagtacaaatgtaaaatgnttaanttgnnnttaatattttatttttntgaaattnttntatgcaaaactgagtncacaaaaatatcatgccttcttaattgcagaaaattgattaactattgcattttgccggcttctgaaacaaatagcttaaatggcccaatcagtttgttattttggtaacattagttaaaaggcagaaagaaatataagcagatgaaaaaatatatgtaagaaaccattatctaccagaaacctaatagca

SEQ ID NO: 196664 - DNA, 174 bp, Glycine max
ttatggtgtggtggtcaaacgtataattatatattattcatatattaatacacagacattaggggtgattggtcgaatatatatattcatatgcttcatttaggcaaaaaagattaaagaataggattcacatgattttggtgttgttaaattaatgttactcagtaacgtttt

SEQ ID NO: 196665 - DNA, 420 bp, Glycine max
  unsure (1)..(420): unsure at all n locations
ctgcagctgcttactggatgaaaataagctcctatgttcctagcttttatctngcgatgactagattcggggacggatggaaaggggggcaagctaccccctccttggcacttctcatgtatatagatatatatttttaagttagtcaatgtaaaattgtgtaaatttaattatctgttattattataataattattaaggttagttagtataaaattaattgttttatgattaagcagttgaagtgataactataataaaattgtattaaacaattgtgtgtttattgtttttatgatgatgatttaaagattattatcatttaaaataaaaattaatttcaattttatgtgtaaaaatatgtaatatttcttaaagatattattacttatttataagttaaacatttaaacaattact

SEQ ID NO: 196666 - DNA, 432 bp, Glycine max
  unsure (1)..(432): unsure at all n locations
agcaccgcggctgcagcttctcatgtctagagagttatggagagtgaagtgtttctgttccagagagtcngggagattttgttgtgtgaagatctgcagagaccatagcttgaagaggaagtcgtcctgagagcttgggatgagtttgtgagtgattgtgaggtcttagaggtggaggagacatccccactacttgtatttctgcaatctttcatcattctcttctctttgttgaaaaggaagcttcccagttatggaaagctaaatcctctgttgaatcttccttgtaggtacttgatgtaaatatctttttatctatctaatgatgttttgtgtgttctctgtgctatcagtatttcattctagtatgctcttaccttgatcacatagatgcacgctttgttanggtcattcaacaatggatactggtct

SEQ ID NO: 196667 - DNA, 385 bp, Glycine max
  unsure (1)..(385): unsure at all n locations
ggaaaataatgatatttaacccataccaatttaaaacttcaaaaaaaaattagtggagaatgaagaaagaatggaaaaaataaccatacttaagtgcttgaagaggtttagtaggaaatgaaacaagtgaaccctccaaatcctgaagattgttgcatccatcatgcaataagagatgtaaatcatgtccagtatactttaagaaaagtttatagtttgcaaagaacatatggtaaagaaaacataagatcaatatcagacaataacagtncctccttgtcctttttataacttcacaagtgaacaactgagaaaacacatacataaattagcaccaaacaatgtaatgaataataatgattgaaatcatcctttntataacttc

SEQ ID NO: 196668 - DNA, 146 bp, Glycine max
  unsure (1)..(146): unsure at all n locations
tttttctatanacacacgcattgaaaaactctttctctctataccgacatggtctatataaaactctatttcttttaaagatttctttcccctttcaatatacactcgttgttatataaaattcctttattacactcatggtcata

SEQ ID NO: 196669 - DNA, 413 bp, Glycine max
  unsure (1)..(413): unsure at all n locations
agcttcttatccaaggctcatcttggtggtgtttctccttcttccatggcttattccttaatggatggcgcctcctctcacctattttcctttgtcttctgctgcatctccatggtggaaaatcaccattaaaggaccccattgaagctcaaagatccagcctccatagaagccccacaagcaagcttccatcaagtggtaatcagagcacaagagcttcaagtaggtgctccttaaacctccattaatttttttgctttaccttctcttccattgttgtttcttcatttttctccatgtatctcctcacatgtcttgttctaaatgttgttaacatgattctttagagtttccaccgattaaacttgctatagaagttagattngattntctatggttcaaatttcttgttc

SEQ ID NO: 196670 - DNA, 160 bp, Glycine max
  unsure (1)..(160): unsure at all n locations
attcctctaacagcacctctgtcaatgaatatcttcatgcctcttaagtgcatatgtccaaatctttgatgccatattctgactnnnncttctttggatgctatacatgtggaggagtaactgggttcttgacgtgtccataggaacatcggtccttgat

SEQ ID NO: 196671 - DNA, 430 bp, Glycine max
  unsure (1)..(430): unsure at all n locations
agcttgttccataagctgctgtaatagatctttaaatgtaattnttgcaaaaaataattatatagcgcctaactaaataggatattgagtttttttttacatgcatttacttaacaagaaacttaaacattagtaagttttaaactatatggttggaaaaagaacaagtggaagagtgaaggtttccaaacaacaatccttgacaaaaaattaaaaaagctggttctagcaaataaatcaaatcacactaagaatgagaaataataccagcatccctatccaaaaaatattcaaggatgagacgtganaaaggtcaggattttcatgctgctaatgatatatctaacataataatcttgttccttttataccttttaggggtattatggagatggacgggagtggtatcgatggcgcctcacatattggg

SEQ ID NO: 196672 - DNA, 388 bp, Glycine max
agcttgaatcttgaaacttgattcttgaaattttaaccttgaagaggggggcttgattcaatcttgaactcattctttgattcttgagatcatcatctttgttatcatgaattgttcttgatctttgagctttttgtcattacctttgtcatcatcaaaacttctttgaatcaatcttgattcatcatgaagcttgcttctacacttgggactgcttatctatgaagaagcaaaatggtggtcttggatttcgtcatctttatggctttaattaacctagccaggctaataaggaagaaaaaaaattatgacctcattttcaaagctagggatgcaagtatggtttgggtaatgcctctacactttgttttcaatgaatattaaatag

SEQ ID NO: 196673 - DNA, 405 bp, Glycine max
agcttactgagcacctgactaatcttctgtttgtgcattttactctgacaactatgaaatggtgcacaacctactaaataatatataatacctctataaattatcttcgaaggtacttattacatatgaacaagttttgaactaaattattaaatattaattaactgattaattagcattattttttagtacaaaacatacggattaattcactcaaattaaagattgatttgtaaaattttattagtattaaattaaaagatggaccaaaagcattcctggaaacacatgagatcaatgctcgttcatttgaatgctttttaaaaaagtgtatttgcataccaaacatagcaaattactatttctaacaggagaattctggctaaattaataaaaaaacttcgg

SEQ ID NO: 196674 - DNA, 343 bp, Glycine max
  unsure (1)..(343): unsure at all n locations
cttactncccacttattcccattgctcctctattcatttgggttttagctattatcccatactttcatctaccttgtccttggccccattacaaccttaaaagaccgtttgatcctcatgtgcatgtgtttgtgatgtgattgtcaattttagagtcttgccaagtctatgtggcgtttgttttcattggtgctctgagagtaaacagtagcctagacacttgagagataaagtgcatatcttgtgaggctttatcacttttcattcttgagctgattgactatcttgccatgtttgagatacttggatgattttcatgatggccttgattcttaactcttta

SEQ ID NO: 196675 - DNA, 139 bp, Glycine max
tttcatacttatcctacgtaaattcctctctcgagtcttgaatcttgagtcttgaatcttgatcttgattcttggaagcttgaaccttgaatcttggatttcgacacctgtaaacagatctactctggcgctaattaac

SEQ ID NO: 196676 - DNA, 408 bp, Glycine max
agctttgatggtgtcgagaagaatttacatgtttgtcatcttctaaaagggggagaatgtgaatgtatgtatacatgattttgatgatgtcaaagaagaatctaacaaggctgcttcaaatgataagcatttgcttcaagaataattcaagattgcttcaacaaacaaagccttgtttcaagattcactaaagaccaagccttgccttaaaacaaagtgctttcaagacatgcaaggctctggtaatcgattaccaggaagtgtaatcgattaccacaagacagggttgagaaatagctgttgaaaaaggttttgaatttgaattttcaacatgtaatcgattaccatatgtctgtaatcgattaccagcaacgaaactttggaaattcaaattcaaaagtcataacc

SEQ ID NO: 196677 - DNA, 418 bp, Glycine max
agctttggagactcgagttgcatcttcattttatgacgactccacgggtgccttgtacaagctaacccaacatggttctgtcgatgactacctttccgagtttgaatcgctcgcgaatcatatcattggacttccacccccttttctcttgagttgctttatctctagcccgacccttcaaattcgtcaagaggttcaagtgctccagcctctgacattggttcaggtcgtaggcttggctcgattgcccgaggagaagtttcaagacctttcacatttgtcttgtggaaagcctcttcctcccactcttacattaccaccataccatgttcaagtctgtcatctcccttcgtatcaccacaggccaaatcgtcgtttgtccctttaaacagttgtcccctgacgagttggcgacatg

SEQ ID NO: 196678 - DNA, 405 bp, Glycine max
agcttgtgctttcaatatcctgatgaggatttttcatatgttctcaagactggactaatacatttgctgcccaagtttcatggtcttgcaggtgaggatcctcataagcatcttaaagatttccatattgtctgttccaccatgaagccccttgatgtccaggaatatcatatctttctaaaggcttttccttattctctgtagggagtggcgaaagattggctgtactaccttgctcccaggtccattaccagctgggatgaccttaagagggtgttcttggagaaattcttccctgcatctaggaccactaccatcagaaaagacatttcaggcatcaggcaacttattggagagagctcgtatgagtactgggaaagattcatgaaattgtgtgcaagctgt

SEQ ID NO: 196679 - DNA, 407 bp, Glycine max
agcttcacaaaaagtggagattatatgaattttttttcaagttcctttaactagtgcttctacttcaagaattggtgttccttatactattgaaccacacaacaatcaagaagaacaacaaattaatgatcctgaggttaacaatgaacttatagtagaacaatcacaagaaatagtattatgaagatcttaaagagaaaggagataaactatttcgaatgactatgtgatttatctacaagagtcagaaaatgacttaagcattgataatgatccagtttcattttcagaagccattaatggtgatgattctggaaaatggttagatgctatgaaagatgagcttaaataaatggcacaaaatggtgtatgggaccttgtggaattgcctaaaggatgcaagagag

SEQ ID NO: 196680 - DNA, 141 bp, Glycine max
gggtatggtattgtgagtgacataacttgccagagtgggcttgattgggatggcactaatcacatgatcatagttgagaatgaaaatactcggaatgaatatcgcactgtgagtattctttaatatatagctattagttat

SEQ ID NO: 196681 - DNA, 407 bp, Glycine max
  unsure (1)..(407): unsure at all n locations
agcttctatggaggctggatcttngagctttttatggtcttcaatttgatntaaaccatggagttgccgcagaagataaaagagaagaggtgagatgaggcgtcttctactatagataagccatggaaggagaagtttcaccaccaagagagtgccttggataagaagtttagagagaaagcttcaatggaggaaaagaatgagatagagaggggggggcacaaaattgaaggagaaaaagagggagaacagttgaactttgaagtgtgtctcacaagtttcacattcatcaaagatatggcaagtggtacacatgcttctatttacagcctaggtcactaactatatgaaagcttccttgagaagctagagcttaactacacacacgcctctaatagctaagctca

SEQ ID NO: 196682 - DNA, 421 bp, Glycine max
  unsure (1)..(421): unsure at all n locations
agcttcacaaagaggcatttctaaaagtatctcttctgtttatctgnatctatcagtataatctagcatgacaggaaaaccaaatggaattaacaccaacttaataattactttatacaaaaaaaaaatagtcaagtgataaaaaataagaaccgtgtagatctattctctatacaatgtggttgtcatgtgaaacaatgatcatattcgtatatttggttatactgaaacttaattacaaaaatgagaatttggatatatttaaagcttaattcatcaatctgatctcttagacgctacaactcttctcttttgcttgcattgaggttcaatccatttcggcaaagtctctcacctgtcattggttaaaaaagactcaaatctgctatttatactgatcatggaaaagtatattaatcac

SEQ ID NO: 196683 - DNA, 293 bp, Glycine max
  unsure (1)..(293): unsure at all n locations
cttgcaagctaggcgcnctcgccacgctctctggtgtttatgactantggcgtttatttcaaagcncaagccgaaggcgaagtggacacggagtctatggccgtaatatgctacagctcgcggcggatcaaaaaaacatccgtggtgtggtgctgagggaacaggtgcacttatgataggcgatagcgagaaatgacactattgtggtggtcacggaatcggtctaaagtgtgtctaacgacgatgatgatcatctgcaggagcatggttatggctgatgcattggttatggt

SEQ ID NO: 196684 - DNA, 112 bp, Glycine max
catttcaaacacaacagttttagccagccagtattgcataccactacctcatgtctcttgatagattaatcacagtttaaaaagttcactcttgtcatgagaaatatcaatt

SEQ ID NO: 196685 - DNA, 411 bp, Glycine max
  unsure (1)..(411): unsure at all n locations
agctntaagcaacanaaacacgagncgagatttttattttgttaancgnnggagccgcgagcctgaacatatgaacttgttaaaatgactgggaattggtcaattccaatttgagttgaaatttttactgaaatttctagacatctggaaaaaaaattatgaaaaaaagaaacacgtgatttggataaagtgaaaaatacgaataatcacacaagttggcaggaaagttattgtctaggaagacaaaagtgaaaaggaagtgtgcttgttgctttgactcgaattttgttctataattggtgcctattttataccaatcttatgtttgaaatttcaattgaaaattagtggcaaaacaagtgccacaactaaaggttgcttgagccttttatttgttttttactctactct

SEQ ID NO: 196686 - DNA, 127 bp, Glycine max
ggggattttttttaagccgccttgagaattcaacataaactttctactatcagagagcatgatgacaaaatttttggctaaagcatttcatatacaccaatcaaagcctcaagagtggcttcaaaaa

SEQ ID NO: 196687 - DNA, 417 bp, Glycine max
  unsure (1)..(417): unsure at all n locations
agctngtaggattatggggtactcttcactatgtggtactaggtggcggncaggcgatggtgcacaacaagtttttccacatccacaatgcgcgcataaacccaccatcccctgtagcccacctccaactgagctcacgtactcccacgtagcccatatcctcgtttctctcaacaccgggtccccatcaatcctcccaagcttccccaacatcagaataatacaacattcaaacagcacaaactatcacagccaagaaaacagagcaaaggcagaaaactctgccaaaacaccaaccaaaatcacagcttttctcacttaaagaccccagtaacaattccttcgttccaattcgttaaccgttggatcgaactccaaattttactggaagtctctagtacaaaagcctacattttg

SEQ ID NO: 196688 - DNA, 315 bp, Glycine max
accacctgaatatctcgagagctttggctgcacactatccagtgtcccgatatataatgcgcgagacacggacttctgtgtgacaagtaataaacatttgaatttctctaaacctttcggcttcacattagatcgcctcaatgtgtgatgctccagagactgacttccgtgtacaagatatcaccattggaatgtatctagatgctacggtgttcaatttcaagggtgtcgaatactacgtgcctgaatcggacgttagtgtgacaagctttgaacctcgcaatctttcgacaccctactattgcataaatctat

SEQ ID NO: 196689 - DNA, 387 bp, Glycine max
  unsure (1)..(387): unsure at all n locations
agctntacaacagattgtaggaattaccctttttcctanatattaaaaaacttaatgccattaacctatggaattaaaaaaacttaatggctgagtgtaactganaatgtggcaaccaaaagtcacccccaacagccaacaagtcagccaccatttggtctcccaaaaggctgatgcctaggttgccaattgggcccttattacaacttgaactaaacctaactaaagcccttttagttgattaacccaaaacatatttttggtcagccaactttacaaggattgggcaattatttagacaaactaaacactctaaaattgaaactaagtggtgtcatttagtcctccttcatttgggccatgatacaactcacaacctttggattt

SEQ ID NO: 196690 - DNA, 405 bp, Glycine max
agcttgcatcaagtggtaatcaattcacaatatcttcatgttggtgctccttaaacctccattaattttcaactttaccttctcctccattgttgtttcttcatttttctccatgtatctcctcacatgtcttgtgctaaatgttgttaacatgattttttagaattaccactaattaaacttgctatagaagctagatttgattttctatggttcaaatttcttgttcttgttcaagaaccatgaatcgtgttgagtttaagttcctttgagtattgtattgctatattttgtggctgaaacctacaccataaagttcttagaataacatttaagtagaagacaaccctcaaaatctagagtgacatgttcacctattgtagttttgtcatagaaatcatgtct

SEQ ID NO: 196691 - DNA, 402 bp, Glycine max
  unsure (1)..(402): unsure at all n locations
agcttatgagcacattgagtatggaatgttttacattcaagatagactcaacaatttgtttcttgttagagagtagatgaatctgatgccagaagagaaggaaaggagacacaagtttgcattgatttagaatacaaaaatatcatcatcattcattgcaaacatagttgcaaaggatttgtgccattgttgtacatttattccactgtatgtctcaacacaaaatcccaactgtgtaaggattcctctttaatttgtttccatgtttaagattggttaaatccaagaacgataatcatcatggtgattgttcatgtattgcctttgccacatgttgtacaaatggtgcatgcacgcactanatccagtatatatagcaatttcctgtacgactgttatttg

SEQ ID NO: 196692 - DNA, 372 bp, Glycine max
  unsure (1)..(372): unsure at all n locations
accttagagacacctgangcatgcaagctgccgccatgatattattgagtttatataaagngtatatcagtttaatgtctggtaattacagacaaaaaagttatattgtgaatcattacaattgtgctcatgtgatcactgttacttaaagcaataaattattattcactatgattatgatagatgacaatataaaaattctttcagaaactatctactcctattatatttatcaccatgttagatatttaacaaatcgtttgacacaactatgcagcggaatgtaagaatatacaaaagtttctttttttaaagatcaagataataattgctagtgttggaaggtttaacgcttagatcttgattgagcag

SEQ ID NO: 196693 - DNA, 67 bp, Glycine max
atataagctaatatatggcaaaatgaaaattcaaggtacatactgagggggagggtataaaagggca

SEQ ID NO: 196694 - DNA, 397 bp, Glycine max
  unsure (1)..(397): unsure at all n locations
agcttgacgtgctcctaacactaatccccattgtttacttaccgccatatgatagtatcttgcgcaaacatatccaaaattggtgtttccaaattagcatgcacatctctcggataaatagttgagtgattaattcttaggacatccataatatctaccactttcagattttgaaggccgtcaataataggagtgtcaagagcaaggttgctctccaatctcagccatgccacgactcattccaaagtccagtatttgatccattgtccaatttccatttatatccttacttaatgacaattttagaagagaaaatgcttccccaaggaaatgatgggttgtgtcctaaagtagctcccataaaattctacgaaaatatttagatntgaagactcta

SEQ ID NO: 196695 - DNA, 413 bp, Glycine max
gctgatatgtgagtagctaccttattgctctcctctaatgactatggcatcatttctggcgctaaactgctgggagttggaagccatcttctcaatcaagattctggcttcaacaggagtcatgtctccaagggctccaccactggcagcatctatcatactcttctccatattactgagtccctcataaaaatataagacaagaatctgccccgaaatcttatggtgtaggcaatgccacatgatatataaattgcatacagataaatataagcttatacactatacgtcaatacttagataccttctgaggtcgggtccggagcaggaaattttctaaaaacctctaagcatccactctgaggacctgacaagaatcagcatccttgcctccttaaaagagaaacctcaaa

SEQ ID NO: 196696 - DNA, 402 bp, Glycine max
tgcaagctttccatctagcaagcttagacacaatcttctacactataaaatttttgtacctttcctaagagaatttcccagcaaggagactcccaaatacttgcctaaagaaatgagcagtctaaaaccagatagctaagaaatagcatcataaacttagtggttgacattcttggaagaaaaataatgctaatcttgtccatgctaataccttgccggggcatcctactaaatttattcgtaacctccaacaaaaccttcatttggttcatgtttgcttgaccaaaaagaataaggtcatcaacaaacatcaaattagaaataagagagccattccttctaactctcatgggaagtcaacttccatcatcaaccgattgagatataagatgggataacttc

SEQ ID NO: 196697 - DNA, 299 bp, Glycine max
cccctatgccttcttctctccaggaatccttaacatgacatgaccctatggctagtgttatctttttgaccaagtgtgcacctacccttcggggggcaaaaagcaaataatgccaacgttgttcaagataaacaccgtttgcccacatttttagaaacttaattaccaattacggcatgtattttgtatattctcgcgttatttctaaatttttactatcacctatagacgagcctataggcaaaatactatatagttttctttagtacttttttgggaaaagtgtgcttgtctctatc

SEQ ID NO: 196698 - DNA, 429 bp, Glycine max
  unsure (1)..(429): unsure at all n locations
accgcagctgcagcttggtntgggcaatagcaccccactgtattcttttgtctcctgaccaccgcgacatatctccaggtaccactctgtggtcaacaataaaagcaggaagtttcacccttcaacacttcctcatctcaagcttgtaggattatggggtacccatcacatgtggtactaggtggcggtcgggcgatggtgcacaacaagtttttcacatccacaaagcgcgcataaacccaccatcccctgttgcccacctccatctgagctcacgtactcccacgtagcccatatcctcgtttctctcaacaccgggtccccatcaatcctctcaagcttccacaacatccaagcaaaacaacattcaaacagcacaagctatcacagccaagcaaaacagagcaaaggcagaaactctgctcaaca

SEQ ID NO: 196699 - DNA, 187 bp, Glycine max
ttctgcgacaccattctgatccggagaaccaggcatagtgcattgggcaacaatccccatgtcttgataaaattccacagatgaacctggtgcttgtccatcctctgtgcatctaccataatactccccacctctatctgatctcacgaacttaatgttgtttccacaattgtgttctacttgcgtc

SEQ ID NO: 196700 - DNA, 430 bp, Glycine max
  unsure (1)..(430): unsure at all n locations
acctgcaggcacgcaagcttcatgaagaancaagagtgaggcagagtagtntttagttgacaaaaagctcaaaagacaagaacacgttatgataacaaagatgatgatctcaagaatcaaagaatgagttcacgattgaatcaagaacacttcaagggtcatgaggaaanttgatttcaagaatcaagaaccaagttttaagattcaagttccaagaatctagatcatgattcaagactcaagattcatgaatcaagagaagactctatcaagataagtatgaaaaagttttttcaaaaactgaacaacacatggagtttttctcaaaacatgtttaccaaagagtttttactctctagtaatcgattaccagactgttgtgatcgagtaccagtaagcaaaatgggtttcataaagctttcaattgaat

SEQ ID NO: 196701 - DNA, 425 bp, Glycine max
  unsure (1)..(425): unsure at all n locations
gacttaagcaccgcagcagcaactnncgggagcggaggttttatttaaactccccttccgaacaagggttgaaaccaaccattgtttcacccatttagttgccgcctcctcctcacgtaatcccaagcccccaagtccacaaaatggactatttcacggtttcagactagtgggtaagttttcttatatgacaaggtctttcctttttccaattcaaaagacaacctagtctgaaaaccgaagccacgccaaacccccttttggggaggctatcttccattctttcttgatctgacacaaaacaaaatgtatggaaccaaaaacaaaatagaacctgcctttgaataccacacccaagttgcagtgttgaggcccacgatccattccagaagagcacatctgactgtgaaattccaagaccttta

SEQ ID NO: 196702 - DNA, 407 bp, Glycine max
  unsure (1)..(407): unsure at all n locations
agctngttcatgtcttcatgggcttgaggcttatgtctcaattaactaattctgagtgtctcacataaatctatcatgcccattttccaacctataatttttggataaagaatgaccaattgactagcaaaaatgaataaaaagaaggtaatttctcataagttatcccaataaagaagcaaaacattcttcttcaactagtatctcctttagtaagttcccaatgaggtcaaatgaataagaatttgagcaaaatgaccaaacatctgattatgtgtagcttcatccaaggatataggactacccatagccccaacaatcttaaataacattttagggtgccaatacttttatgggagatcatggaatcttacccaacattaggcatgtgtctatttttgcttatt

SEQ ID NO: 196703 - DNA, 408 bp, Glycine max
  unsure (1)..(408): unsure at all n locations
agcttgctcaagacaaaaatctatatcattttattccactcaattcatacaanntctcattcatatcaatcacaaacacttcatttcatatgaaatcaaaccactgaatatcattcaaatcactgttcaatcatgcttttgtacaagctactactacaaacaaaatactgaaatttaaataactagaacttaaagactgaaatttaaataactgaaacataaagcataaactaaatagaatgataaaaataaactgttcaaatatgcagaatttaaaactcctagtcatcctgccagtgatcctccacatgctcattaagatccaacaccggagcagttggtgggtcttgaagaacaggctgctctaactccgatgctggtacagatggctgggaatcatcaagaact

SEQ ID NO: 196704 - DNA, 415 bp, Glycine max
  unsure (1)..(415): unsure at all n locations
agcttgcccagagaaggagnccttgtaggtattgcttaccacctcaaaagactggaaagcggtttctaatgactcctctgcggcctccacataaggcatagaggatgggcagctcaccaagatgtcttcctcacctgacacgatgaccaaatgcccctccactacgaatttcaacttttggtggagtgtagagggcacaactcccactgagtggatccacggatgccccaacagacagctgtagggggggttaatatccattatttggaaggtgacttgacaggtgtgagggcctatttgtactgggagatcgatctctcccctaacctctcggcgggtgtcgtcgaaggcacgaaccaccattgaactcggctttaagtgggaagcattgaatggtaatttctccaaagtgctc

SEQ ID NO: 196705 - DNA, 254 bp, Glycine max
  unsure (1)..(254): unsure at all n locations
cgggacaaccaccagaatgtgtgatatnttacaagagaaaaaggttctttccagaagccaccaagtatgtttgggatgatgttattctttttcgcattgcctattattcttcgtattggttctaacaatatcgtaattgaagggttacaaatggagaagtctccatatttaggccactccaactcagagagaacgactacatagaatcttccagccttgatttattggcctacattcttcaaagatgctcaata

SEQ ID NO: 196706 - DNA, 385 bp, Glycine max
  unsure (1)..(385): unsure at all n locations
agcctctatatattttgaccttatttattattattcacaagnngaggtttattcagaaaattagagtttatctcttttatcttagtgagagtgattctcctaaattcttgagtgattcaagaacaccctggctgtatcaaaggactttcacaacctttgtgtgttgccctcgctggaaagagtgattctttccttcctttcatcttcacccttgttctttcaaaccacaattccagaaaatccacctctgcccagaattatctcgtggccataactcccattttacgcactcagattaagtgattcttgagcctaaattgactttcaaaacgagacctttcacctcgttttggaatcacctcatttggagccctgtagcttcagt

SEQ ID NO: 196707 - DNA, 241 bp, Glycine max
cttttttaacaaggcgcctaagaaatccaaaccctctctcttgaaaccaccccgatatatcaaacctggcaatctgctttgtacacactcacactactgacaaatttccggaatgtaatgaactagaacctatagactgaaatttaaataactggagcatagagcataaactaaatagaatgataaaaactaacgggtcatatatgcagaaattaaaacacccacacatcctgccagtgat

SEQ ID NO: 196708 - DNA, 400 bp, Glycine max
  unsure (1)..(400): unsure at all n locations
ttgagacanataagtagaccatgggttttctttttttaancataataagccaaaacttaaaatatttttacccctattaatgacactaattttcactttggttcctatacagaaaaagcttttgatttgtgtataatcatcttcaatgtcattttcaccatatattgccaattgcctttataacaccatgacattaacaaggagttattgtggagtataggaactgtcacagaactaaaaattatagtatttctggtccttactatatcacactcatttaaaatttagaagaagattganaggacttatgcaaagtttatttggcttaagaaagtggcttatgacctttccatangcttccctttagctaatttcaatcaacttgacagtgaagcttatc

SEQ ID NO: 196709 - DNA, 70 bp, Glycine max
ggggttttttttttttcatgccggggacattaggttatcatacatcaggccctgaccatttttctctaaa

SEQ ID NO: 196710 - DNA, 345 bp, Glycine max
tcaaatatgtaatttttaataaaaaaaataatattaattcattatctagattttttagaatactaaaaaacattttgatttcaatggtcaatttataatacatgcatagattcgttcaaaaaaaattaatacgtgcatagtcagcatagatagtataaagattttattttattgttcaattacttgctattatattaagttttctaacttttataatttatttacaatacaaacaagaagatttccatatcacatatcaactgtacaaagaattattcttcgctcaaagcattttgaatatttgatcattctatagtatccattcctgtggccatccataattac

SEQ ID NO: 196711 - DNA, 422 bp, Glycine max
  unsure (1)..(422): unsure at all n locations
taaaataaaatatattttataagaatagagtcgaaatgattagttcaattttaattaaaacacttttacattcatttaaaaataatgtaaatttgatttaattttaaaaaagtacaccctccctatatttcacaatagctctttccatcattagaataatagaatttgatagttgttgtcaccccttcatatatacactctgtaactatttataatgatagataactcttaaattaagtngtttaaactaaaaattatataacatatttaatctaagaactgataattgtcttagaatatttgaaaaacatacgactaagtatcactccaagtgagactagtgtcctagaaactcctagtgagacctcaatagggatatcgttatatatatgtattcatgtatattatatatatattatata

SEQ ID NO: 196712 - DNA, 369 bp, Glycine max
  unsure (1)..(369): unsure at all n locations
atcaatagacctccaatctttaatggagagggttaccactaccggaaaacccgaatgcaaatttttattgaggcaatagacttaaatatttgggaagccatagaaatagggccttatatacccaccacagtagaaagaattacaatagatggaagcacatcaagtgaaagcataacaatagaaaaacctagagataaatggtctaaagaggatagaagacgagtacaatacaatttaaaagccaaaaacataataacatctaccctgggaatggatgaatatttcagtgtttcaaattgtaagagtgctaaggaaatgtgggacactctacaattaaaacatgaaggaactacnagatgtanaagatct

SEQ ID NO: 196713 - DNA, 257 bp, Glycine max
acacagcggaaattaaagagtgtagggaagaagaagacaaacacaagatttatactggttcggccacaaaccatgcctacattcagtccccaagcaacctgtggttcttgagatttctttcaacctttgataatgtctttactagtccatagatccacaatggatgttctctcccttgttctcttgataaaacaagtggatgtaccctccagttgaactgatcctcaagagatgtacccttctcttgttctcaatat

SEQ ID NO: 196714 - DNA, 369 bp, Glycine max
acaagaccaccagggggactagcatttgttagttataagttagttactcttataactaactatataacaacttactaacattagttatataaggttcaatatattaatataaaaaatgatttgctcatttgaatgttatccaaaaaaatattcaatttgtctttttttctatttttcatctctataccttgaattttattatgatatcagagcaataccatttcctctccggtccactatcaatcaacctctttgttcatcgtcatcaccactggtctttgtcataagtcaccgatttcagctaacacctaccttcattcagtccgtattcatcttctcctcatattgtccttttcaattttcgagtac

SEQ ID NO: 196715 - DNA, 204 bp, Glycine max
  unsure (1)..(204): unsure at all n locations
gaaaaaacggacacacccgaccccgagaaaaagcaccgccacgccgaaatgcacagagcagcaacangcaaaagcgaacgcgccgcagaacacgggacacaangacacatccgaaaaaaacggagggcgtagaaaacgtcagagggccgatgcatgcaagcgctcgaacacacaggacccagcaacaccgacaaaaggatgccg

SEQ ID NO: 196716 - DNA, 409 bp, Glycine max
agctttctcccaattcctaaatgacatttcttgctagtattaactcactttaacctccatttaccacagaattcagacttagccttcccactctcaaagcctcactctttttccactcataacaccacattctcactttccaaccctaggttaactctatatttcatctctaacagttttccttcagcaactttagcatacaaacatcacaaacatcatcacaaaaccctaaaacagaatgggtatgtctaactcacccaaacatggcaatttcaacaagctttcaacaaaagtcttcacaaataatcatcacccagcagaaacctagcaagactacccatcatatctcccaaaaccccatacccacgaaatttaagagagaaagaagtccacccaaacctggaatttc

SEQ ID NO: 196717 - DNA, 395 bp, Glycine max
agcttcctttacaacaaagagaatagaatgatgattgattgttaaaataaaagtagtggggatgtatcctaataataataatctaaaaagaaaaaatcatcatcaggaatcaacaatgtcaacagtgtctaaattggggaatcagtgagagcaacaacttctccagatgacgaaccagaaagatcagcaattcctccaactagggaagcaggggggtcagctgtttctccagctggtgaatcaggaggggcagcagcttcatctaatgatgcatcgaagatgagaattagaggtggagatgggggaactacttcaagctcaggagaaggaggtggattcaccattggagttcgtggctcaattggcattggttcaacccgtgttggtgcgggctc

SEQ ID NO: 196718 - DNA, 384 bp, Glycine max
gctttacagcgagagggagcagattactttctatcctagaattaaaataacttaatgcctttaacctatggaattaaaaaaaaacttacaggctgactgtaactgttatcgttgcgacgcaatatcacccccaacagccaacaagacagccaccatttggtctcccacaacgctgatgcctaagttgccaattgggcccttattacaacttgaactaaacctaactaaagcccttttatttgattaacccaaaacatatttttggtcagccaactttacaaggatggtgccattatttagacaaactaaacactctaaaattgaaacaaagtggtgtcatttagtcctcctccattgggccatgatcaactcacaaccttggac

SEQ ID NO: 196719 - DNA, 413 bp, Glycine max
  unsure (1)..(413): unsure at all n locations
cagctngtanggttaaagacgacgttttgttttttgctcattcttcaanngnnagcccgggctatactagatatcttgccaaacaaagtcacgttaacgataactcgcctgtgctttttcttccattctatatgtagcaaagtcattgatccagtcatgtttgatgagttggaaaatgaggccgcaattatgttgtgccagttggagatgtattttccccctgctttctttgacaatcatgattcacttgattgtgcatctggtcagagaaatcaaatgttgtggtcctgtttatctacagtggatgtacccggttgagcgatacatgaagatcttaanagggtatacaaagaatctatattgtccagaagcatctattgttgagaggtacattgcacaagaagccattgaat

SEQ ID NO: 196720 - DNA, 382 bp, Glycine max
agcttattcagcattaaattattgtcaatatatcttcagggcttcacagataactaaatgatagataatgtgatcattataccactgcattaaaagccccttccaatttatcactctgcactacttgttacctgtgttaagatttcgtttaatgaaagtactataagcaaaggtgccgaaaggcgtgccaaagccactgaggcatggtgcacgaagcttttttggcttttttttttaatcattttatgcctgctatcttttcaatgagttgtgtctatcaagttaatagtgtgctgaacttatttatttatgcttggtagtgtcgtgcattacagccttcagacattattttcttactttcagggtttgtctgtgacattgg

SEQ ID NO: 196721 - DNA, 365 bp, Glycine max
  unsure (1)..(365): unsure at all n locations
aaccatggagttgcagcagaagataaaagagaagaggtgagatgaagcgtcatctactagaaaatacgccatggaaggagaaagttcaccaccaagagagtgccttggataagaagtttatagagaaagcttctatggaggaaaagaatgagatatagaggggggggctcaaaattgaaggagaaaaagagggagaaaagttgaactttgaagtgtgtctcacnaagttcacattcatcaaagttatggcaagtgttacacatgcttctatntacagcctatgtcactaactaaatgaaagctctcttgtgaagctagagcttaactacacacacccctctaatagctaagctcacctccttgag

SEQ ID NO: 196722 - DNA, 324 bp, Glycine max
  unsure (1)..(324): unsure at all n locations
aaggctctgtttgccactttgccttttctggaatggccggtgagctccagttctttggagaacctctcgtggactaccatttttaactatggtagtaacaaacaggtaacattttttgggaaataaaaaagctatgctanactggggggcattctgctttaacgcattgtttaagtaaacaagctcttcgaatgaagaaatgtctcagtcatttaatctccactcgatgtaacacttcttgctctggataatttaaagggactgggaaccacaatcgatttcttctcatgtttctcacagagggaacccttttctcctaacttc

SEQ ID NO: 196723 - DNA, 404 bp, Glycine max
  unsure (1)..(404): unsure at all n locations
agctttaataaagctatggcgaggggagttgtttgtaatanttcatcancaccaacgtactttgagtcttgacacagtccacacacacaccatcattttccaacatccaaaaacaaagtcctaggataagttaagaactccgatctcttgcactttcttgttttcacattaattattataactacttgtttgtgtgtgtctgatctacattggtgcttgctaccctacccatgatcttggaactgggaccagatgcctcattgattaacaacaacaacactaacatcattagatctcaagttggagtctttgtttggagacacccattattgggggtgtgagtctgaaggaatcttggtgtttctgcaacgtgtgagcaaatctgacaaaagaaagctgctatt

SEQ ID NO: 196724 - DNA, 389 bp, Glycine max
  unsure (1)..(389): unsure at all n locations
agcttaagcagaatatgtgcataatattaatacaccncaaaacgtgcaagagagatactccaaacccctccccaaaatccaatgcacataaaatcctataacattatgtccaaggtgatattccatcccaaaaacatgacagaaaccacaaacatgtatacatataatatttgcgggattcattataataagataaaagaaatccttttatttattcacacatcttttatatttaactacattccctgtgaaatgttaaatcacctcatatacatagaaaagaaatctaagtaggtgtgtgattacaaagttgataacaggcgctaaaaggcggaaaatgaaaagctatatgacataacttctacttatttgtgggaaatatattgtac

SEQ ID NO: 196725 - DNA, 61 bp, Glycine max
ggaaatctgaccaccccctggatttctacagcctcctgtaatattcttggcatcgacccga

SEQ ID NO: 196726 - DNA, 411 bp, Glycine max
agcttgttcaaacacaatgttccttaacattatgtcttgcggactgataatgctaaagaattagctttgactgagtttttgcagaatgcaagagtagttcaccagttttcttgcccacactgaccccaacaaaatttggtagtaaagaggcgccatcaacacctattgaatgtagcacatgctttaaaatgtttcaagctcagttgccaatttatttttggggagagtgtgtatccacaacagcttacatcatcaacagaacaccaagcttaaatctgcagaaccagtcaccatataagttgctatatggtaaaataccagcctatgatttgatgaaagtgtttgggtgcttgtgctatgcagccactgtccctgctcaaagacataaattcactcctcgggccactaaat

SEQ ID NO: 196727 - DNA, 416 bp, Glycine max
  unsure (1)..(416): unsure at all n locations
agcttgccgcaaagtttacgggaagattctttatttgaccacaacggaggtatttacggaagctatcgtatccctcgcccaatactatgaccagccgttgaggtgcttcacgtttggggacttccaaatggtaccgactattgaagagttcgaggaaatactaggatgccctcttggaggaagaagaccgtatcttttctccaggtttcttccctccttgagcaagattgcagctgtggtcggtgattcgacaaaagagttggatcgcatgaagcaaactcgcaacggcgtagtaggcctgccacggaaatacttggaaggcaaagcaagggatatggcgagccaagagaagtagggcccgtttgcggatatattagctttgttgatttttggggttgtcctctntccgaacgtgg

SEQ ID NO: 196728 - DNA, 418 bp, Glycine max
agcttattgccatagggatagatagatgtatatataagtaactaaagccagccaaaattttatgtatggatagaagactaagcagtgatagtgaatataaagaggctcgcaaaggtcgtgctcatcttgtcaagtatcaaatgatgtgaaagaaatgctattcaatggacaacaatatatatacgagatttgataaacatgaaagggaaaatgaaaaggaaaagaaagaaagcaatagataagttatgtaatgagaaaagaagaaatataaacaaaaagtatagaaaaaatgagtatatattttataactaaaaatttgttttaaaaaaatagaatgaaagaaatactctatcttaaatataaaagagttagaaagtcatataaaagaaatcagtatatatttatgtttacaatgtat

SEQ ID NO: 196729 - DNA, 413 bp, Glycine max
agcttccatcaagtggtaatcagagcacattatcttcaattatgtgctccttaaacctccattaatttttttgctttaccttctcttccattgttgtttcttcatttttctccatgtatctcctcacatgtcttgtgctaaatgttgttaacatgattctttagaatttccacggattgatcttgctagagaagttagatttcattttctatggttcaaatttcttgttcatgttcttgaaccatgagttgtgttgagtttacgttcctttgagttttgtcttgctattttttgtggctgaaccctaaaccataaaattcttacaaaataaagtagaataaaaccttcaaaatctatagtgacttgttcacctattgtagttttgtcatagaagtcatgtctagtcatgaaac

SEQ ID NO: 196730 - DNA, 367 bp, Glycine max
  unsure (1)..(367): unsure at all n locations
gcggaggaaatttgtcttttgtgactctataccncacnaanggcctatatgtcttcaagaaatatgattataggtcactagttgtatgtttgatcatattgcacacatgtttaattctccacaagttgtcctaaaaaacaacattgtttcttgttgtgcaattgaagggggtaaacaccgagatgatctatgttgatgggccatgagcaaccatatcatgagcttgacaccgcactttaacccaaaaccttaaggctcaagtttatgggtcttattcctacttatatgggtgctcaaccttttcttattcctactcaatgtgagacttcaccttacacttgtatatcaacatttgcttatttccaca

SEQ ID NO: 196731 - DNA, 408 bp, Glycine max
  unsure (1)..(408): unsure at all n locations
agcttaaccaagttctgatatttctctagctctttaaagacaaantctgttgttgagaatatagtcttaatcagactatgtgaaaagtagcatcatcaatgaaaatacaatgactttccttaccttctctctttctggaagcactggtcctcaaaaccagattttcttttcttcccctatcattctccttgttcaaaatgaaaattactcttcttgaacatcaaaactgcaatgaaaaccctcatttggatattacatacaggtaaatntcataaaatcagacttgtgattcctaaaatcaaaatctctaaatttgcatctacagaagaaaaaaaaatagcaaccaatacaactgcataaatgatctaatcttacatataatttgaatggataaatacaaacttcttt

SEQ ID NO: 196732 - DNA, 298 bp, Glycine max
  unsure (1)..(298): unsure at all n locations
agcttgtatagttccacattatatgggtattttttatttgatttttgaaataaatcttgntctctggttaatgttgtctctagaacatttccattggatttaatgatgaaatatgtgcattttcaggtgaaaaggaagctaagttttgaattgcaaaatgtagcagttgggctaagctcaacaattgtgctaagcatagcagtcgcgcttagcaaagcaggtgccttcagctagactaagctcaagactggtgctaagcccaatttcacttactcgcgctaagcgtgagggtggccct

SEQ ID NO: 196733 - DNA, 408 bp, Glycine max
  unsure (1)..(408): unsure at all n locations
agctttagccgaancaaaacctgaagtgttgttgttctttgctggagtcatgccaactttgtctcatttcgagtcccaccgctcgtattcttggtggtgggatagctacctaccaaagaattcaaaatggcttcaataaaaccttgtaggactatctctccatgtatttatgcgtttctacaattatgctataggaatttgaatatattgtttgaacttgttacattatctagttaggaaattgaaaccacaatagaggcccataaattttgcatactacacaggcatgtgtgtattgcatttatgatactttctattccttcagatcttttggattgatggactgaggtaaagccagtagtagaagctatgatagcaccataaaaacaaaaacaaaattcaaattct

SEQ ID NO: 196734 - DNA, 418 bp, Glycine max
agcttccaagttagtataccaagtgattgccgctttatccaaactcttttgaaaaaagtgcatcaagagtttctcatctcttgagtatgtccccatcttcctgcagtacatcttcaagtggttcttaggacaagtggtccctttgtacttatcaaagtctggcaccttgaacttgggagggatgacgatgtcaggcactaagcatagctctgtcatgtcggcaaatgggtaatcactaatcccatcaatggccctcaatctttcctctgtaagatcaagtttctctttttcttccatggcagaaggtagtctccccactgagaaatgtaagggttgcagcaaacgatgctgaggggcccctgaggtattgggctgaggcatgccaccaaacgctggtccctcaacagcatatgcaggg

SEQ ID NO: 196735 - DNA, 417 bp, Glycine max
agcttgacatttttgctaaacgagccgagtggattttattcttaaactagttgtgtcataggccttcaacggacgacttaacttacatccatccctatcgataatggtcttgagtagggtttatctagtgaatgatatttgtgattcttagcataaccaaaactattttaatctatgaaattattgagtctttgatatgcacttctatgaaatacttgaagaaaaaaattgttgcactcgagtataatattgtgggttgggttcgtgtaattttttaaaacccaaatcaaaccaacttgttcatataccagataaagtactcgcatcagggcgagaaaacacttattgcctccaaactgagtaccctctcggtcacgtactcacatatttcgtatgacacgtctcagtcttcaacac

SEQ ID NO: 196736 - DNA, 419 bp, Glycine max
  unsure (1)..(419): unsure at all n locations
agcttccatcacatgcatgcaaaatctttattttcacatacatagggactcattaggtagggttattgttatttttggtttcaatacaaacctaggtgctcatatgggacaccttangtttgtcgtactttttggntggaataatcagcatgaaaatacagaaaaaggtacgttttattgcattactttccttaattntttaaatagtgtgcaaagggttcccatggaccctaagagaataaagttcattcctgagtagcccactccaccaagtataagggaaattaggggctcccatgacataacaaacttttaaaaaggttttcccatatttttctatacttgtagcattactcattgagttgatgaggaaaccatgtntctcatgggaaaatgcctacgaaagaggttctcacacc

SEQ ID NO: 196737 - DNA, 361 bp, Glycine max
  unsure (1)..(361): unsure at all n locations
tggatcgaggtagcttacccgtgaagatcgcagaacgatgaatatttaatgaagaacggttgaaacctctgcgaaattcctcacggaaaacgttacggaaacgtttcggaagcgcctcggcttagattntcttcacggaaacaatatttccaagcaaactcgaaagagagagaagtgccaaaggggctgaacccttttcttcttcacttcctcccctatttatagcaaaataagggaggtgggtgtcgcccagctcgcccaggcgagccaggttgcttcctccagatgcaaccggcttctggaggaatattctggagggcccaagtgggcctgggtgctcattgcacccccatttttacta

SEQ ID NO: 196738 - DNA, 416 bp, Glycine max
agcttgtatggatgtaagagacatcttcttcgttcttggtaatccttgactccatctcatcgaatcgcatgtccacttgtaactccaaagtatcaaacctttcaccaacaaaggtttgaagaccatcgaacctttccaaaatcttttgaagaatagaggaatcttctccaccttgtaaatgtccttcttcatcaattggttgagcaccatttttcacccaagagccatcatgctcttttcgataaccaaaggatgcaatcacagcagcgcctattagaaaggatctcttgattggaacataaggttcagaatcaagagggatgttaaagtgttgaaagaagagagtgactaggtgtggacatggcaatggagcatttaatcgcaatgccttatgcatgcgatatcggactaagtct

SEQ ID NO: 196739 - DNA, 167 bp, Glycine max
  unsure (1)..(167): unsure at all n locations
ctcagcttaccttattgatgaattgngatttgctccctttgagggcctacacatcatgctggagagaagcttagtgtcacaaatgatagtttaggaggagcgatttngccattcattgagtatatgatataaatgttcgtgagaaattacactaacttctgtgagag

SEQ ID NO: 196740 - DNA, 398 bp, Glycine max
  unsure (1)..(398): unsure at all n locations
agcangctngnggggcaagaaaggaggctgttatctttgaccttcaaggaggaccttnaaaggagattttccaccctcgagatgcaccggaagacaaaggagaagaggtaagaggcggcgccatccactagggaataagccatggaagaaggagcttcaccaccaagacgagccttggataacaagcttggagagggagcttcaatggaggaaaagaaagagggagagaaagagagaggggggagcacgaaactgaaggaagaaaaagggagagaagtcgaactttgagttgtgtctgccaagactctcattcatcaaagatacaacaagtgttacacatgcttctatttatagactacgtagcttccttaagaagctttctggagataacttccttg

SEQ ID NO: 196741 - DNA, 501 bp, Glycine max
  unsure (1)..(501): unsure at all n locations
aaagaaaggccanactcncctccgaatgtgatttctggctttatatgtggctcntgtcgcgctcatgtgcttagcgcaattctgaaatgcttagtgcgcattagtgaatttcggcttaacgcggcttttctcgctcagcgaatggaccgaagcagtgcgcttatcgggatggcccttcgcttagcgaacaagcacatttcatccttcttgcagattcttctttgcgcttagtcgaggatagttgcgctcatcgaatagctcgctaagccagcagattggcttatcgagagggtgaaaatcaacacttcataacttgcctaattatcctgaaattgagagaaaatgattattaaatacacaaaatgggagtactacgtatttggtacctatctctaacaaaaagtaattacaacactacaaaataaccatatattggagaagttcgatactatttacacaagttgtatacacaaaagttagccgtattcaccgattactact

SEQ ID NO: 196742 - DNA, 342 bp, Glycine max
  unsure (1)..(342): unsure at all n locations
caagctggaggganggctacacgggaaggacttttttttgtttttttcncagaaccatggatcgaagagtattggacatcaccaatttcggcgcgactcacttctcatttaatggctctgttgattaaaaagtgggaaccaccagcttgtgtgaatctcaatacacttcaaccgagcatagggtcacacagtgttagacagagccttgctagcattcctcaataaagcttagagacatcttcatctcagcgcgtgtaattcgtaaatcagagaacattccttttatatgaattaatatggcagcacatgtaatttccaaagcaaaacacattgcttttatat

SEQ ID NO: 196743 - DNA, 442 bp, Glycine max
  unsure (1)..(442): unsure at all n locations
ntntggagtagaaacatgggaccaactgatattattttatattattanatcatatctagtccagggctgagagaccatacaagattcctaacgacttctaattatgcgggtcattaagtctatcatatgctgacaatagccgagaagcccatgaatctcttcgagggcggagtaagtgtctgccatcgccttggccttggctaataatcggggaagttcttgactcccgttcaaggtaagagcaaaccgatccatccacatggttgcctcttggtgaaagagtcgatcacccttcctctagcctcttctttcgcatatacttgggcatactcatccgcgattctatgctcgtgggtctgggctagacccaactctatttggtactcggcgatgatagctaacatgttggattctgtctcgcatagacactgagacaagcttc

SEQ ID NO: 196744 - DNA, 463 bp, Glycine max
  unsure (1)..(463): unsure at all n locations
actcagcttttggaaacttcttgagagctagagctttgctttctcacccctctcataactaagctcacctccttgagaagcttccttgagaatattcctaaagaagctagagcttagctacacacacctctctaatagctaagatcacctccttgagatgagaagctagagcttagctacacaccccctataatagctaagctcacccncatgacaaaatacatgaaaatacaaaaaaaagtccctactacaaagattactcanaatgccctgaaatacaaggctaaaaccctatactactagaatggccaaaatacaaggcccaaaagaaggaagaaacctattataatatttacaaagaagagtggatccaacattgacccatgggctcaaaaatctaccctagggtcatgagaacnctagggccttctttagtagctctagccgaagcctcttggagtct

SEQ ID NO: 196745 - DNA, 427 bp, Glycine max
  unsure (1)..(427): unsure at all n locations
agcttaatatctttgtgaaagatccagttggtccttgtaacaagnngaaagaaagatatgaccactagaaaactatgatacttccaaaagctccttatgaatggatgcatttatgcttacaggattttaaatcagttagtgagtatgtaattctgcaatatttagaattacctataaattggccttatgtggaggagaaaaaattattgatgaagacatgttagaaaaaacactccatttctcatgcatccaatgtgcttctgcaacaacaatatagagaaaagggttcaagaaatattttcaattaatctcttgtctccttgtggatgaacaaaataatgagctgttgatgaaaaatcacaagtctcgcccaactggttatgcttcatttcttgaagtgaatgtgacaactaatgatcattacaat

SEQ ID NO: 196746 - DNA, 473 bp, Glycine max
  unsure (1)..(473): unsure at all n locations
ctcagcttctcataacatcaaaatnttccttgcccacttcgatccctctatattatatcttgacgcccaagacaatcccctcttggaccatgaaatgatacttttcctagttcaacaccaaattagtttctacacaccgttgtagcaccaattccagatttgttaaacaacagtcaaaggaggggctggagactgagaaatcatccatgaacacttcaatgcattnttcattcagatcaaccaaaatagctagcatacatctctggaagacggcaggggcattacataacccagatgacattcttctgtaagcaaagacaccacaagggcatggtaaagaagtcttttcttggtccttagggtctactattatctgattagtaccccagtagccatccaagagacaataanaagcttctctagcaagccgctctaacatctggtccatgaacgacagagggtgtaacatccca

SEQ ID NO: 196747 - DNA, 424 bp, Glycine max
  unsure (1)..(424): unsure at all n locations
agcttgaccaaaacaannatctaatcatgcctaatccattcaaatcatacaatttctcattcaaatcattctcaaacactcatttcaaacaaaacaatccactgcatatcattttcaatcaattcactgttcaaacacactttttgttcaagcaaacaactcaaagtactaaaatttaaataattgaaatttaaagaactgaaacataaaaactgaaatttaaatgactgaacataaatcataaaatatctgaaaataaaataaaatgttcaaaatgcacaaatttaaatgtcctgctcctgtgcatgctcattaagatccaacacctaagcagctggtgaatcctgagagataggttgctctaactcagatgctggtgcatatgctatggcatcattaggtatgggtgctgaggatggctctg

SEQ ID NO: 196748 - DNA, 419 bp, Glycine max
  unsure (1)..(419): unsure at all n locations
actcaacatgtttgtactaggttacacaaaatgtagcctatattactgactaactacatacaccatctacatcttatgacaaagaaaattattggtaaaggtcatgaatattgcgatctctatgttcttgatgcagaaagtattcctaaatgtcctaanaataattataaatattatggaaaaatataattaatatgagacacttcaaaacacaaggtatatttccttgacatggtgaatttttgcatcgaatgtattcatccagatctacttgctagaagaatgcagaatttttttcagaaaactcttgaggagttgcanaagaaagagttaacatatttcatgttacgaaatgaaacaaatttcaagtattgatgaatgtgaaactgaacaacattttcaatttctcttttctatct

SEQ ID NO: 196749 - DNA, 418 bp, Glycine max
  unsure (1)..(418): unsure at all n locations
agctcgctagctgctttcctactcactaggtgtatgttattactctncattaanatgaataggaaggaatttatttaccccaagactatattatctatttattctattactattaattgtctactatatcctaataattgaataggctgccgaaatgtcaaaattatccctgcctacaccatcgacacgtggcttgctcctctgtgtttctttgtttctcttttgctcttctttgatggtgggttagggtttctgatgttgggcattagtttttgtgttttatttgttggccagtgcaagttggttttacgttgagctctgtttgcttgtgatgtaactcgaaatctgcttttaggttctgaggttaggtattgcgctatgttnttttggaagtttggtctcaggattccagagttgg

SEQ ID NO: 196750 - DNA, 423 bp, Glycine max
  unsure (1)..(423): unsure at all n locations
agcttattaggatacaagattgagcttaaataatttgttttaatgttatnggagctaaatcttgtatcctaaccagcctgcactaaggtcgaatctgcagtcacacatttaacttaaaggtgtggaggctttgaaagcccaatatttgaccacaatcagtctttgcaaagactaaaacaactcacaatcttgtaaacatcacgcataaaattatgaaggctttggaaactcaacctctaaccataattaatatttacgaagatcgaaaaacctacaaagcattttgtacaacctcataacaaaacattgtgtttggttttacctcatagttgatttcattattattagtttaatattaaatgtatacaaagaacttgataataataaaaaaacatgatatcaatggtttattaatttcatcac

SEQ ID NO: 196751 - DNA, 402 bp, Glycine max
  unsure (1)..(402): unsure at all n locations
gctgggtgggagaatagcatctggctgtngtgatgttttcaaaatcgatgttctagtaaaactgcagctgttggccgctctgctggatttcttttaaagcagcacctcaagaaatctataccctcagatgaaagtgtttcaggtataggaggggtctccttcataaccttaaacagagctgcagcctgcataattagaaaagaagtttatttagcaagataaaaaaaaaggacccgtatacagatagcatctctgcctaatccacaagttgcaaacagaacaaagttggctaaagatgccttagctggttgttaaactgaggtttgccaaaatcaagtaaaagctgacacattatcctacattaccaaacctcagaatctcatattctcatagaagcagata

SEQ ID NO: 196752 - DNA, 258 bp, Glycine max
acaaggaagcctttcaagaacctcatcacctttgaggagctggacatttttctccggcactacaaactcggtcactatatactttgattcgagacccgctgaatgtctcgtgagggatataatcgaaaggaggggcgagatgcgggaaatacatggaggggagcttaggatttatatggcgggttggagcacgactgaaaagatgctgaacatggcctgtccctggtgaagacaggaattgaagctcagacggaaact

SEQ ID NO: 196753 - DNA, 423 bp, Glycine max
  unsure (1)..(423): unsure at all n locations
agctacnggggaacagcacctatgaagtngtanatttctgactgcaccaggacatgagaaagataaaacattcaacataactatggagttcgatgattaaaagctaattttctggcaataatagtatgattcaaagcacaatagcattcaaaaaaataaattgttacatacacatgcacaatgtgtatgtggatgtcaagctaacaagtaataaactaggcaagtcaaaatttatgtagaaacacactgggatttctacataagaaacaactagttatgcttacagaagcatatgaaacagataatgtaaaattcaactcaaacacactcaagtttattaaagggagaacatgctaatattacaaagaatttagactcgtgcagtcatgtttaaaataaagcgtgaaatgctggaggataaaa

SEQ ID NO: 196754 - DNA, 457 bp, Glycine max
  unsure (1)..(457): unsure at all n locations
taaactctggaaagataaatggttcggggatgaatggtaacttgaacaacaatataatcagttgttcttgattagtggtcagcagaatattaccatctcgaacatgggaagcttctctcaaggaaattggtgttgtggcttatagtggagaacgaatctattngattatgagcaacatatagctgtggcatttatggaagcatttactgatatacaaatccagcctcatatgcacgatattatggtctagagagcagatcccagtggtgtatattccactacgtcagcctacagatgattgatgaccaactatcaacattcataggccaacatcttagagacaatctgctaatgatataaataagagaaaccacacaacaatctatgcactcttaccaccgcaacttaatgtagaccttaatcattacacattccgaagaagtatgcaaataatact

SEQ ID NO: 196755 - DNA, 412 bp, Glycine max
agcttctagccaaagggactgacgttgaattatttcttttgatagcccttttgagccttgtttccctttccttgttttgaagctcactacaagccttaagtgaaaaaccatgatattaccatatccttaaggaattttggagctttggaattgttttgggaataagtgtggggggtttttgtttcattggacaacttgttttgttggctatgcttcatgatgtattttgggccatacttgatgtacattgtatattggttaaatgttggacatgctgaatgaaatgttgtttctcaaaggctaaagagttaaaaaaaaaattcgaaaaaagaaaaagagaagcaataaagttgagtgaataagatcttaaatggcacaagaatgatgaaactcttggttctactcttcatgt

SEQ ID NO: 196756 - DNA, 485 bp, Glycine max
  unsure (1)..(485): unsure at all n locations
ttagacttagtttcactctatttattattctattcacngaagaaagaaagatcccaaagagaaacgtccgattgatttttctgttttattntactaaaagatatattctctttattatattattattttatctcttttttggtttccaacgtggttatggcatgaccgaacggtcggatttcattttaacagacactaatagatattacaattcatatgatcggtggaaatttattctatgttttgattatgcgagaaaatgacttatataaatgactatagcacgtcaaaaggtggtacgacaagtaactgaaatgaatataaaagtacgcgaaacatatggngaccaccaagggtacatagaatgaagtgaanagttcgatttcgggaacttaccaggtgaagaccgaagaacgaacganagacggcggaaaatcttcacggatttgcttacggaaacgtctcggacgagttacggaagcacc

SEQ ID NO: 196757 - DNA, 325 bp, Glycine max
ttggccttagtatagtgatcctttatgatgggataagaaaccaagacgtcgatgctttgtgctgctttcattttttttttgcaaatataacagagcttcttgctgtcctctactaagacgagttgagatgatgatgccctttaaaatgttccccttctggagtcccgggaagtagatagtggtaattaattgccaccaccctgccgccaactactactctagaagaaatcttagtatatttggactcagattaacatataatataccactgtccatcatctactgtatttatgaagcatgcacttgaatctctccctctctcctg

SEQ ID NO: 196758 - DNA, 416 bp, Glycine max
agcttaggcatgggatgagataaggatattataatctttttattagcacagaattagagaacattctatcacattacttttctcttataagaaatgcatggtgaagcatgtttacatgacaagccagttatctgccaatatttatagccacaataactatctttcaactttaccacaaaattagtaaacccatcctttacttgatactcatcattcccaatatgtgtgactaacattattgcaatctccacacttttatccaaaatacttttgaccttaggggtagcagtaaattgataagttacaaccttgtctctcctattgtcaaaaagtttcattaatctacaaattagagattgaggattaaatatgtgtctagcctatgtatgctttggtctggctttatgtaagagcca

SEQ ID NO: 196759 - DNA, 351 bp, Glycine max
  unsure (1)..(351): unsure at all n locations
agcttatgaagcagctgagcagacttgttctattctgaagncctcttataatacgttcacaacaatgtgtcacgaattaatttaaaattaatgacccaaacaagaatcaagactttcaagttattagtacaatactctaaccaattgagtgaataggtcaattatattataaaataaataatgttatacataacactaaactttctaatggatatttaatgcgcatgaaacaataacaatcgcaatgtagttgtgtttttcattgggacaccacaagtgctaagctaattttattgtttctttcaatgccaatctaataattaactcccattgtttgccctttgcattggt

SEQ ID NO: 196760 - DNA, 490 bp, Glycine max
  unsure (1)..(490): unsure at all n locations
actaacttaggatcatgaaaaatgtgaaaacatattttattttttcaatagttcggacctatagaataatatataaatgtatttaaaatataaaaaaaattcacttaattgaatagtgtgtacacaatgagtgcattatattaaatctatcaagacataacctgtaaggagaaactaaaaggacaatcagccaattggtgcttctagggtttaagaatactagttgaagaacacagattgaaaatcctaagtttagaacctacataagtgaatatacttaccaagataagtgagaataataacttgaagaactaacaataccctgcacatatatgcagaggtgacaatgttagattcaaaagcgctctacacatgcttataatatatgtacacactangtgaaagaagaatttgagaattgcacactacgcgaatgaaatatattcgaattctttaattaaatcttaaacaatctctatttattagatca

SEQ ID NO: 196761 - DNA, 351 bp, Glycine max
aaggaacttaatatttagattcactctggaacatgaaaaatcattttaaaccccttcaaaacattttcttcattcaaaaaccaatttaaatcattttattccccttcacttgttgaattttcaattcctaaaattctctcttgaatgcttagaaccaaccccccaccagtcaaccacacaagacattcttgaacatgtctctggcgtgaacacacggtataggagaaatttcaaaaaatcatcttacatataatgtgtgctaaaaacctaaaacctagaataagtaattaggcaaagacccatttagggaaatggatttagcactgcataaaattacacgtcgacaaattt

SEQ ID NO: 196762 - DNA, 420 bp, Glycine max
  unsure (1)..(420): unsure at all n locations
tccacccttncaccaagccaacaagagaaaaagatttttttaatattatataanncatatagaagaacttgctaccggtgcctctgctgattagaacctaaaatgaacaattcaagtacatataaatttgttatcaacctttcattaaaagcaaaccaggtgaggtaatagcataatccaaaggaaacacgcagcatataggtcctctaataagagcatgccaagtaccaacacaaccctaagaaatggcacgcatgctctcaaacaagacacgagttcttggtgtctcacacacttaaccagatataacaaactcttactgtagaactaacataatgaaatcgcacataccagaaaccactgacataattaacaaaaacccattactacgatgcccttagagcaagttcttaacttagt

SEQ ID NO: 196763 - DNA, 422 bp, Glycine max
agcttatggtgttcaaggttagcggagccttgtttcttttattgattccctagatttaaactctaaaaccctttgttttttcttttcttttatgtaggcattagtaatgaacttttataatttctttattttctatgttacctttatttttgtctgaaatatatttttttcttaatgatatttttatccgttgtttctgaaatgcaaaacttttgattctttctttgaactagacaattagaattgcaaagaagttgattttttcattgtgataccacaagtctaaattttattttatttttactttttaatcccaatctaataatttactccattgtttgccttcaggcattggttgcacatttactaaatttagacaaagaaagcctggacctttacctagtaccataaacaacaacttt

SEQ ID NO: 196764 - DNA, 492 bp, Glycine max
  unsure (1)..(492): unsure at all n locations
gggtgatttaacgttaaggatgagatgggaatntaaaggaagactcatatcatacaaacaaacaaatctttaattatataagagtaaaaaatcaagaatatttttgagttgcttaagagggacaaatacagcaaactagaagcaacaagtaacacatcacatanccttttctgacttgatcccggaggagtgcaaagcaatgtcggtgatgccggtgtcggaagagtggaggtggcatccatagttgatggttggagttagaatgttggaattaaaactggaaagaacccaagtgcaagtagaagaagagtctcacaagtcaaaactcattaataaataaagcgtcatcatttgatgatcattgcatttgatggcctatatattatgataactcatgctcattttaaagcactttcagttttgaaagcttacattacatacatacgtggctgcatcacgacaccacccataataaataaagcaactcaacaa

SEQ ID NO: 196765 - DNA, 238 bp, Glycine max
aagaattaaccacaatacttatctcaaacaccccagtttcgttttcatcgataatcattgcgttcgaaatcattataatatgaattgaactatttaaatattaatttttcatgacgaaaaatatatagtattagatattttttgagcgaattctatgtgcaaaacatatagtatctattaaatatttgaacaataaatagcattaattgtgcgagtcaatcttcgatgttagaatacc

SEQ ID NO: 196766 - DNA, 410 bp, Glycine max
  unsure (1)..(410): unsure at all n locations
agcttgaaaaacaancttatttcgagagggggtttttttttattttgggacagataaattattatagatagattttgaaaatcttggttaaaaaaaccctaagctaagcggtgacgatgggaaacacggaaacttgtgaatagatcacgaaatttaaatgggtgttgctaggtgcacctagcattattgctggtgcacccatctcattcagcttgatccgtgtatgctatgacgtgatccgcatagggttttgttgatctgcagaagctatatttgatccgtagttgacatagatgatccgcaagcttgttacggatcaagttgatccatatgcctgttgcgaatcaagttgatatgcaagtgacttactaatcaagttgatcccgaacatgcttgtggatcaagttgat

SEQ ID NO: 196767 - DNA, 303 bp, Glycine max
  unsure (1)..(303): unsure at all n locations
tctttatctnacaatgcaactgcatgggtgagaataccatcgaaggacctcattgaagctcaaagatccagcccctatagaagcttctcaagcaagcttcgaacaattcctatgatggggatgagtcacgaatagaggaggaacaatcaacatttatgaacgagctcgaaaactttctttaggagaggagcatggaaatcaaaccttccacattctacaaagaaagactaatatgccttaagtgagatatgcatgatcatgtatactatcttctatcattaaatatgacatacaatacacact

SEQ ID NO: 196768 - DNA, 421 bp, Glycine max
agctctaacaaaagtacaaaacaggagcccttatttcttttcttaaccacaacctaccaattagaggttgaaaattaactaactcatcaacgaacaaattaattgattgtgttaaatttaaaatagacttcccaatcagcttaaataataggatatacattctgactattaatagagtacagaaatagtaatattaaagttacaagcttaggattttcaagtcaagtgtccatcaaataaaaaaatagaggatcatttgtccctttttttcaagtttaagtaaagcaccttctttcaataattgtacaaaacaataaattctaaagaataatccaattaaggagttacctcattagctaaaagagcaaaaccttcaatagttttactcacaaaattctactatatactgctgattttcctc

SEQ ID NO: 196769 - DNA, 459 bp, Glycine max
  unsure (1)..(459): unsure at all n locations
taagctggtaggggaatgtttntggtntcacatagattatgggattttcttcttactatttctcgatagaaaatggagaatggtacaatatggtttagtaaaatcttgcattagtgaagaaacaaagataacaatcaaggttaatttcagtagatatcctttacccctaactaggaccacaaatggtctctatcggttcaaaaccccattttcaacaaataccctcatatgaacagatcgagaggaaaagatagaatatggaaacttacgaaggcaaggcgacacacgggagacgctatcatggcaccaccacagctgactgacgaaacgacggacactatggagtgcaccaccacagctaaggacggtggacctactggacgaaggcacgatataatgcatgatggaacgcacgagggagggcatgacaatggaggtaacagaatgaagtaatggatg

SEQ ID NO: 196770 - DNA, 360 bp, Glycine max
gcgactatcgagcatcttgccaaacaaagtaaggttagtgataactcgccagtgctttttctttcattctatatgtagaaaagtcattgatcttgtcaagtttgatgagttggaaaatgaggccgcaattatactgtgtcaagtggagatgtattttcccccttgcttctttgacatcatgattcacttgattgtgcatctggtcagagaaatcaaatgtcgtggtcctgtttatctacggtggatgtacccggttgagcgatacatgaatatcttaaaaaggtatacaaagaatctatatcgcctagaagcatctattgttgagaggtacattgcagaagaagccatttgaattttttc

SEQ ID NO: 196771 - DNA, 495 bp, Glycine max
  unsure (1)..(495): unsure at all n locations
ctcagctgggagggagnggcggagancgaaaatcagacgactaggatggttgttttttgttttgaatgacactaagacgggtctaagactgagagagaggagaatctgggtttgacttgttggctttggtttgaaatctgtggctgccatatggtggtaattctgtgattgttgaacagagagactgtatccaaacacagaatttaaaaaatgaaggaatttaaattgtagcatttgaattcttagaattttatattgcctcatccaaacacactctatagatttcttccaaacaagatataaggaactaagctcagtccctataagaaagatttctagtctgaaccttgctggtagaacagtataacctttttcagactacatggtttaatgactacaaacttttaagacgaatatgataagtcccgtatacttgtgctactaatgtgataccttatgtaattttnaagagacatgacttantcatataacatg

SEQ ID NO: 196772 - DNA, 417 bp, Glycine max
  unsure (1)..(417): unsure at all n locations
agctnctaaaccttatacaagaaggaatcctgtatctcctggngggacaagaggcctcagatattttaagaaggggggggggggttgaattaagacattacaaattatctccccaattaaaaattctatttaactttccattcaagttataaatacccttaatattgaattccttaaatattaattcaaatagaacaattcgaatattattatataacattcttaaataaatgagtttaagggaacagaaagtgcaaactcatatttatactggctcggccacacccttgtgcctacttccatttcccaagcaacccgcttgaaagttacactatcttgtaaattcctcttacaagttctaaacacacaatgacaatccttcctttgtgtgtacaattctctcacaacaagagaccc

SEQ ID NO: 196773 - DNA, 490 bp, Glycine max
  unsure (1)..(490): unsure at all n locations
agattgagtcatgaatcaagagtgtctttttatgatgaatcgagattgattcaaggtgttttgatgataacaaagatgatgacaaaaagcccaagagaatgacttcaagattgagtcaagaacaattcaagaattaagaattaagtttcaagtttcaagtttcaagaatcaagaatcaagaataatcaagatcaagattcatgactcaagattcaagaatcaagaatagactcaatcaagataagtactaaaaaggttttcacaacatggagtagcacatgaattcacanaagcttttaccaaagagtttttactctttggtaatcgattaccagtttactgtaatcaattaccagtagcaaagtttggtttcanaagctttcaaactgaatttacaacgttccaattaatctcaacatggtgtaatcgattaccagtgtggttgaatgggtgaattcaaattcaattgtgaagagtcacatcctttcac

SEQ ID NO: 196774 - DNA, 421 bp, Glycine max
  unsure (1)..(421): unsure at all n locations
agcttctgaatgagctaagatcacgtgtaggtantatttaaataaagaagagaagaaaagttcttagaagaagtaactcaaaccttcaaatcttttgattgtgaatatcttttgtgataagtgagttgtgtcactttcttgagttcaagaagaacccctcttcagtcaagtaagattttgcagaaaggattgatcaggttgggtctatctttactcttggtttntgtgtatggctttacacatatttttgtttgtacatgaatttcttagggcatgctagaataggtgtttctagtttgggctaagagtagggttctcttaggctcttattcacaaagggccctagagttgggtgcctaagtctctttttctagggtgagaactgtagattggttgtgattgcttgtaaggattctatatg

SEQ ID NO: 196775 - DNA, 376 bp, Glycine max
  unsure (1)..(376): unsure at all n locations
cgtcttcttcattgttttctgtgagcatttcttccgtcatcgaggttagtgttctaaccccattggctttatgatagacgataatggccttatgatagacgataatggccttaggatagacgacattgttgtttggtgctggaggttgaagacgaagttcttccgcgagaagaagcttcttccgcgcgtgtgttatgggacgaaaatgntttttatttatactttttcattcgtatcctcttttcattctttattctctcccaatttcctacgtattgtcacattatcttacgcctctacacaatttctttcttacacctttactctttatcatactaattactcttattgatttgttctatttattgccttattt

SEQ ID NO: 196776 - DNA, 417 bp, Glycine max
agctttgagccaattcaaacgagaaggactttttattcttatgcccagacgagtcccttaatatatcgagacgaactaacttgaatgttgaatctctgagcaaatgcaaacgacattagatttctactcggacgtctgattgagtaccgaaacatatcctgactcttcaaaagagacagatgaacctctgagacaagtcaaacgcacatgactttatacgcggatgtctgattgattcccgcattaattctagacgctccaatttgaatggtgaagccctgagccacttcatatgacattagacttatactcggatgtctgatagaagcccgtattatgacgtcaccccttaactagaaaagtgaacctttgagcgtattcacacgcaaattactctttattcggatgtctgatcga

SEQ ID NO: 196777 - DNA, 433 bp, Glycine max
atatatcgagaggctccagattgaagacggaagctcatatccaattcaaaggacaataactctatactcggatgtccattagagatccgttatatattctaaacactccagattgaagatggaagctcgtatcaaattcaaacgacaataactttttactcagatctccaatagagtgccgtaatatatcacgacgctccacattgaaattggaagcttgtatcaaattcaaacgacgattactcttaactcggatgttcgattgagttcggtaatatatcgcgacgctccacattgatagctgaagctctatactaattctaaccgacataactttttattctgatgttcgattaagactcgtactatatcgagacgctccacattgaaaacgggagctcttatacaatgtgaccacaataacgtttatctc

SEQ ID NO: 196778 - DNA, 375 bp, Glycine max
agctttgcttctacacactggactagcactttgttatataaccccacactcactgagaatgacgggtccatttggaaaaatgaatgccaaccttgagttcacgatcgtctgggacgaagtctctcctaagaatggcattgcttatcggaaatacatttgacacactctgaataccacttgttgttgagtaccatggacatccccatctatcatttatttaaatggcccagtcaggcacatggtttcacttttaccggacccgtgactattttacattgtgaagcgttaaactaaagcaacctcctttcacgtcattcactggcgggtccgttagtcgatgtcctctgtacgcactaactattgagctacatcaaa

SEQ ID NO: 196779 - DNA, 402 bp, Glycine max
  unsure (1)..(402): unsure at all n locations
ttttggattgatttgattagatttattttgcttctctttttcttctcctttgcggagaacacagatttcctgtctctttccgaaagaggtgataactcacccgacttcatcctatctttttgcaaatctcttcggggactcccttagagtgcatgtntggtttgatttagccacttgacaatnttggagtgacggaaatggagccttttgacatttaaccaatcaatcgaaatattgatcctaggctcgccctctttttgtttaaaatcatcgactattctacacagcaagaaaacataatgttctgggatcgatcgtgcaccccattgaaggatgacaatggattgttacactttggtatctgaccaagtgatactttcttgattaacgtcatagagtgat

SEQ ID NO: 196780 - DNA, 412 bp, Glycine max
  unsure (1)..(412): unsure at all n locations
agcttaatgtnngaaccaactcggctgttttttttgtgcgngcttcctccatcaatgagaatctgaacacggtggtttccaatgaggcccgtgactcgcaaggtttctggggctccgtgaccagaaagcgtatgaagacttatctgagctggtgatgtcttctatggagctacaagagctgttggagacaactggttggaatcagaatcctgcaggcactcctcatcctctgtaacaaacaggaacaaggacggggtgcacttatggcctcgagagtatttttcttcacaatttacacataatagcttctcccttctaataactaattctgtggaaatgcttttaatgggaatggtggttgtggcatgtttagctgatgaaagagttaagagcggcttaactggtttagtga

SEQ ID NO: 196781 - DNA, 411 bp, Glycine max
  unsure (1)..(411): unsure at all n locations
atctntatatcttgtaagcagaagtgattttttttttcttgangctctnggatcatgctctttccactcaagagtattatctggttttctcttttccaaatgttcctcattttttgccttatgcttcttacacattgtaggattctgataaaaatatggatcttttatggacataatgagataaggtaaccttgcatcatcgtgaatatcagttatattcaagatatatattgtgtgctaatattcaataatatgtgtagctctccgtagaagaggcaaaggaagttgtgtcattcaagaatgtgatgttggaggtaatatctcttttgctccttatgtgacatagttatttctatatgaagttatgttgatgtgatttgccttactcaagtactggttaggtcaatatgt

SEQ ID NO: 196782 - DNA, 415 bp, Glycine max
  unsure (1)..(415): unsure at all n locations
agcttttactaggttcagaaatgattgtttccttgtatgtataaattcgnatttgtatttaggtcacatgaatgttttcttattaattattatgaagcatgtattgtatgattctgattaaatgttacatgttcaactttatcggttccgtattcaaaggactaacaacaatttcaatgttgtgatactcaagcgcttgttcatgagcaaggttaacaagcctctaatttctttgtcaaggttaattaagtattcaaaggggaaactatgtctcactctatctttatatatcccaacactaattgctaattttcttaaaatttgattaattgtagtttactttgatttttattaatgtagaaggataaaactgttgtagtagttaggatggtaattgatgatataagagtatata

SEQ ID NO: 196783 - DNA, 368 bp, Glycine max
gcacattacataacgaaatgggcacgggtccttcaatcctattgtcattagtaggtgacagtactcagttacgtttcttcctagcagaagctgaagagtggaaaaacttagtattcttgtctccatcactcaaccaataaactttatccctttgcttccaaaagtcttcttccttcataaggagggcagtgggattttcttttgtctcattaagcttggccactaaaaactcatcatccttctcatgccatgtctccaaatccccatgatttctattaatatcatcacagaatggtgactatagacttttaccacaaacatctaggttcttcgcaaaatagtccaacttcccgatgacatccctacac

SEQ ID NO: 196784 - DNA, 423 bp, Glycine max
agcttcgatgtaagaagatgttgtttctaagactgttgttacgccagcaccatctttgaaagctcatcttactacatcggtggttacgcgacaaacgacttagaaagcacatcttattacgtcggtgctaaacctgacaccatagttgaaaatccatctttcaaatatggtcatgacgtaagcaacgattttgaaaacacatgttctaagtcgatgctaacgtcaccaccgtagtcgaaggtcacctttttacatcagtggttgggaaaggaccgatgtagaaatcattgtatttatacaacggtctattgttgaccgttgttgaaactttttactttcaacaacgttacaatcaaaaatggttgaccatcgtctttgaatactcatttcgaccaatgtagaaagcgtgttttctagtagtgt

SEQ ID NO: 196785 - DNA, 491 bp, Glycine max
  unsure (1)..(491): unsure at all n locations
cacttgcaaagagcttggcttgttctcttgcaagttgctatatggctccaaaaccgaagagcaaggttcaagaccaagcagctagaanaagactatggcgtgttgaaagctagttatgataggctcaaaggtgactatgatagtcttgttcaagagaatgacaagttaaaagcagaggtaaaaagaaattttttttaaaaatagagacacacacaacacacacatacatacacanctcaatttgcttttgtgctntatgctactagtactacttggcttaataaagtgcaatttttatttatttgtcccactaatgggttaatgattggattggcacacaattctgttactaacaggtgaattctctggagagcaaattgattcttagagataaagagaaggaggagaattctgatgacaagtcatctnctgatgatgctgtcaattcttcaccccacaacaacantgagcctattatggatttattaatt

SEQ ID NO: 196786 - DNA, 405 bp, Glycine max
agcttcaaagaagattttgagatacttacagggttttatatatcatatgattacatataggaggtcttatcaccttgaggtgattgggtattcagacttagactttgttggatgtgtggatacgagaaaatctactcttggctatgaatttcttttaatcagagcaatattgtggaagagtgcaaagcaatcagttgttgctacatctatcatgtaagctgaattttgtagcatgttttgaggctataattcaggctaattggctgtagaactttatttcaaggctttgaattgttgatagtattgctagaccactgaaactatattatgataactctgcagcagtatttttctctaagaatgataagtactctaagagtgataagcatatgaaattaatgtact

SEQ ID NO: 196787 - DNA, 512 bp, Glycine max
  unsure (1)..(512): unsure at all n locations
agctngctatggggtattcttaaagggaanacatcactagtagaattatttttatgtatgcgtgcgctntctaaaatccgaccatctgttaatccaatcaaatgcagcgaaaagattttaaactaaagaataccatgctccaaaacatataattataataatataatataattgtataaaaaggagaaatacgcgaagatatattggtggagcgcgcctctctgttttgcccctattattttgcaagaggagactatatattagcaatataaaaaaatctttcattacaatgttgcaatattcattgattgatctctgttgggaaatctgatgggtacgtttagtaaaatctttaatcatatgttctcatctatctaattggaacataaaattttacttaaaggaacaaatttctagttcattcataccaataatatataaatactacacgcagctagctcgaatctggtctataagctaattgattcttacacaactatgtatgctgtatt

SEQ ID NO: 196788 - DNA, 417 bp, Glycine max
  unsure (1)..(417): unsure at all n locations
agctntgcttctacaatctccccatttttgatgttttttacttttgaaatcaagaaataagaaacacacacacacacttttagttttatttgtagttgatccttagctacctgtgaaggtgtttgaggatgcaacacaaatttagtgtcaagatgggtgagggtaatctcattagttaggccattataaatgatctttctatcaaattgacatggccttcctaagagaatatgcctaacctccatgggaactatatcacaattaacttcatccttatatgtaccaactgagaaaggtaccatcacgtgttggttaactacaattccctttgctcattgagccattgaagtttataaggttttgggtggggaatgatagtgaggttcaacttcgaaactaatcttgtgctacaacaat

SEQ ID NO: 196789 - DNA, 381 bp, Glycine max
  unsure (1)..(381): unsure at all n locations
actaacttaaactgagtttcgtctgcagatccctcatgtatgactagactgatgcaatcctccctaggaagggaccagtcactagagccatgagcaagaggctccaagaggattgggctagagctgctgaagaagaccctaaggttctcctgaaccttatggtagatttctgagcccatgggccaagggtgggtccaattatatttgtacatattagattaggatgtcattatatttggtccttgtatttanggctccataatgtacgtagggtaccctaaacatataggatctttcagccctttgtatttagggcacctagactatgttctgtattatgggtagttttgtaatcttacatgcactaagtgaatatttgat

SEQ ID NO: 196790 - DNA, 392 bp, Glycine max
  unsure (1)..(392): unsure at all n locations
agcttgnagggaggcttggctacaaaaataattgttttttctatgattgaaaggcttggattctaaaagagcacaaatcccaaacttatccaagtagtcttttcaatacaattagcttattcactagcctttcattttaacttgtatttgaccttattacaacaacacacactttctttgattgctgtttttatttccctctctttttaatgtttcttatatttttttaacacaacttatttgttgggtgtgctgatgtgctttgccttccactttacatcgcggttaactcccccaaatttagggaaaatttccttgaaccatcttgatgcaatcctaccctcaaggacattggatagaagactccaagaagattgggccaaagatgcaag

SEQ ID NO: 196791 - DNA, 482 bp, Glycine max
  unsure (1)..(482): unsure at all n locations
ctcagcttccttgtaacatacctttcaagaatntagagtagagtgacatctactgcatatcttctccaaagggcatgcttatttccagtttcctgaanatatctaaaaatctcaccagatgacgatctttttccttcttggaaggtaccatangatatggtacttccataccttcatccatagctttttcacttctactcttctttgcattcttattattttttttcttctttttcattttgttcattttctatcttttttctacttctttnttntcttggtccttcaattctttattctcgaccattatttgttcctctttttcttgattactctcacctcttacctcatttttcatgccatcggtacctttcttgtcagcagttttcttcttatgcacaacattatcctcatcctcagcctccacaaaccttttactccttgtcatcacagctttgcattcctccctgagattctattct

SEQ ID NO: 196792 - DNA, 422 bp, Glycine max
  unsure (1)..(422): unsure at all n locations
agcttgagatgaggaagtgtagaagggtgttactttctgcttttattcgttgaccacagagtggtacctatagatatgtcgcgggggtcaggagaccttggggacgtcaggttgggtgctattgcccaaaaccaagcttgaccaatcccgacccaacccgagcatagtcggtcagtgagaacctgtgatgtacctaaacaggcgagctcctgacagtcaacagataaaaggaacaaagaccacaaagcanggaggcttgtggtggctggccagctgtgaatcttgtgtgatatatgggttatggcctctggtaatcgattaccaagggtgggtaatcgattacaaggcttataaatgaagacaggaggctaagatggtctttggtaatcgattaccaagggggtgtaatcgaataccaggct

SEQ ID NO: 196793 - DNA, 496 bp, Glycine max
  unsure (1)..(496): unsure at all n locations
tacggtaagatctgggacctagctatggcagaggtctctacatatgccattgcctccctcgcccaatattatgaccagccgttgaggtgcttcacctttggggacttccagttatcacccacggtggaaaagtttgaagagatcctgtgatgccctctatgaggaaggaaaccatacctcttctcaggattctatccctctttagctagaatttctaagatagtccatatctcgacgcaggaattataccacagaaagcaagtcgaaaatggggtggttggagtaccgaggaaatgtttggaagcaaaagcaagagtcttggcaggtaaaggcgaatgggccccgttcatagacatcctcgcactttcgatcttcggaggggtcctctttccacatgaggatgggttggtggaccaggcagtgatcaacacttntctcgcctttcatggccgcaaggaaagcccaattgtcactatcttatccaatctatatgaca

SEQ ID NO: 196794 - DNA, 423 bp, Glycine max
  unsure (1)..(423): unsure at all n locations
agcttgtaatttgtaatagatctaagataattgtggtagattgcaatttcctgagtgaaaatcctcttgtgaggtgaaatctgtatctatgcagtcaaaaatacaaagacctttttgttgttggaagtccaatagtggcagacaaaggttgtaaccaatgttgttttttgtctagcggatgataggtgtgaagtctagtgggagtgcgaataggttgttgaaagctagtggttagttgtgttaatgaaattttatattgaagggtggggactggatgtagcctaatgtagcctaagatagaggtaaatcaatataaaaacattgtacatcattctttgtttctctctctacattgattntgnggtttgatctatttaatatttttgttaatcattaaaaaaaacattntcacaaatacactta

SEQ ID NO: 196795 - DNA, 473 bp, Glycine max
  unsure (1)..(473): unsure at all n locations
tgtcgcccagctcgcccaggcgagcaggttgcttcctctagattctacagccttctggagggcccaagtgggcctggttgctatttgcacccttgtttactaaatgcacccccctttctatttttttgtaattcttcttccgtaacgttacgaaactttacgaatttcgtaacgatacttattttccttccgcaaggttacgaatccttacggattatgtatttactcttttttagctttcgaagaagttacggaaactcacggattgcgcataaacacctcttttcgatttccgcacattacggaatttcacgaatcacgcaagcctgcttcctttcgatttctgagacctcttgggacttcatttattgcatgtcatcaagtaataatccctgtacgaaattanggtatgacagttgccnctctntacttacctctcatcggagataagaggaaagcanagataggacact

SEQ ID NO: 196796 - DNA, 369 bp, Glycine max
acagacaggagcgccgcgcttattttctctagaagggaattttttctaatatccgaagtagactaggtatgactatatggcttcttcaataatctataacattatcttatttcaggtctcattcttcacttgctcttcttaatgtctagccaattaccaacttctattcgttcccatatacctcacgtatttaaggagtcaaagattgcgcaatatagtatcaacgaaaatatcgcctcaccaagaaaaggagaggttagtaaatccgcgatcacttaatgtagaattgagcgctctagatttttgttctgctaagaaggctcatgtgcttgcttgatctctcactggaagatccaatgtgacgacatg

SEQ ID NO: 196797 - DNA, 470 bp, Glycine max
  unsure (1)..(470): unsure at all n locations
tctgcatctcactcttcattnccttgatgaactgtgcgctgcnttgattcatggacgacncaagaacttccacgtcaaaatccggcgtcttaattgaagcaaggctgtcctttgatccagggactctatcatcgaanactccaccagtgcggaaagaatatgttttttcggtgcagtgttggtggctgtgccaccagcagcattagtggtcgggagtgcaattgcagcagtagttattgtagaggagcacggatcctggctggttcggaatgaatctccagaaacatgagagttgttggagttcaagttatgccgccttcgtttgtatatttgagagaaaggctttggattatctgttcgaggtgaatggtagtcatccatgcgcttacaattattatcatccttttccggtgatggatactcagccatgctctccctcttgcacacagctagaagattttgagtttcta

SEQ ID NO: 196798 - DNA, 417 bp, Glycine max
  unsure (1)..(417): unsure at all n locations
agcttcaaaccacagcaacacaaaagctatgttctcttaacccctcaatttaatggattttctaggcttgagaagtgaaattaagaatgggacaaatttgaagcaaactctcacctcacacaagtctataacatcaatttaaacttgtttaaactggatttacgcttaaaatctcaccgaatcaaaatttgactcttcaacacccaaatttaccctaaaaatgactctntgttcactttggtcatttgtttttctctctagcacagcctaacctttctcataagtcctaaatggcatttcaagctaagattaactcactctaacctctaaatactaccaattccagatttggccttccagccctcaaaaattcactctttttccactcataacaccacattctcactttctaaccct

SEQ ID NO: 196799 - DNA, 451 bp, Glycine max
cgagacttcaagatcttagtagctcgctacttatagcatttaattctatcttcattcaagctatgggggtctttccacttcttgaaccttgatcttgatatctttggaagctacgcttcattttatgttgcattgatgttcaaaatttcatagctactgccttggctgaaactgtgagataggtttttttctacaaagtttatggttaaaattgagtgctatgggtgataacacttacggttagccttaaatatcacttatatcagagttttctagcgaaaggtacgaattagacaagtgtaaggacatcttgtaagattaagatctatcacgaaactgaactgactgttatggatgcatggattattggtcttaatgatatgacttcgaaaatgagtttgttaggtgtgaacatgaacggtaaaattcattgaaaaccaattctctgaaa

SEQ ID NO: 196800 - DNA, 416 bp, Glycine max
  unsure (1)..(416): unsure at all n locations
agcttctaattgcggaagtagtgtgcgatttgttttttcttttaacagccattnggaacagcctgagacggatgatcgtggaatttctgggctagctgcggaagaagtgtgcaaaatgcatgttgagaatgtataatccagaaagggtgtgcctcactgatcagaatattctaaatgttgtgacaatttatattatacaagtggattgaaaaggcaatgttggaccttggcacgtcgatgaagaggggtagcagccatcaagcatataatggtggagcaattagggttagcaatgagtgcgcnctttcccgttccggctttgatgtttagcattgcttcggggttcacttcgggaattaccaaaggcacctttttgtccatccgaaacgcggagctggtgttgaccactaccgctc

SEQ ID NO: 196801 - DNA, 488 bp, Glycine max
  unsure (1)..(488): unsure at all n locations
ggacaaactcatttatctgttaatatgagaacacagacattatttatttntaaataaaaagtaaatgaatcacaaagcatttactaataaattttcttttgatatagaaagaaattttagctttcaggagatgccaaccctaagcataaagtattattataagagcaaatagtttactatcaagtcaaagaattgcagtaccacttacccatgtgatagctgttagcctagtaaattcatccggagaacctgccctctgtaccaggatttgagtcatgcgaccataatctacagacttcaagagtaccactgctcgagtcagaaaatgacaaatgaacaaaaaactttgctttcgatcaaagtagtagttgaaaatgaagcacaagctccttaatcaacacaagcacaagctaacaggtatatcaatcctacaagatggattatgggacagatataataatggacaatggctgcaataaattttactc

SEQ ID NO: 196802 - DNA, 414 bp, Glycine max
  unsure (1)..(414): unsure at all n locations
agctngacataagctaattgtagctatatatttttcacacaatctgagagaggaagtatcacaattcagacaaaaaataagggggaaaagaatctagatcaatgaagggtcggaattagcaagtctcatgtgctcttttccaatcccgcaccatcactagcataataacatcccattactctgatttaaagttgaccaagattagataaatacttgagcaacaaaacttatattatattaacagaaaacacaacaacagtgcagtaaactttactgattaagtggacgcagggtatactatctagtaacattttatttctcagtatttaacaattatttgagtgtgtaatcatatatactaataaagtaaaatatgataaacaacatattcatgacattagtgtacagatgaaa

SEQ ID NO: 196803 - DNA, 467 bp, Glycine max
  unsure (1)..(467): unsure at all n locations
tagccctagaggngatggaccttttcaggttttggttaggatctttaacaatgcctataggttggacctcccagaagaatatagagtcagcaccacttttaacatttctgatttaactccttttgcangtggagctgatattgaggaggaggaactaacagatntgaggtcaaatcctcttcaaggggaaggggacatgatgcaagctccattggagcttgtaggcctaggatcttcttcatcaatggattcctttgcttcttggaagatgaatggaagcggaatggagaaaggaagagagagaggagacgccacttcaatgagaagatgagtctagaagaagctcaccaccataggaggccatggataagagcttggaggaagaangagatgaatgatgggagagggagagaagaagcacgaaatttgtgctctcaatgagctcttgaaatctgaagttaatattc

SEQ ID NO: 196804 - DNA, 417 bp, Glycine max
ctagcgcacagggcacgcttaacttaaccttttcttaatgacccttaagcttaacgcacagggcacgcttaaccctgataccaaaacttaaaaaccggaagaaaggtgagcttaacccatcagggcacgcttaactcaacctccatgaaacataacaagggcttagcgcagtaggctgcgcttagccttatacaaaggttgaaaaatagaagcaaagtggcgcttagcctaataggtcaggcttagcgtggatccaaaaaaaaaatctaagtgtctgacacactagtgacgcttagggcacaaacgcgcttagcgtactcatcgtttttgttcatcaggatgacttacactctcccataataggacggcacaaatctttctctcaaaactctcttcatgtcttgccaagtattaatc

SEQ ID NO: 196805 - DNA, 469 bp, Glycine max
  unsure (1)..(469): unsure at all n locations
ctccagcgaaaggatcaaagtgagtcttatattatgctaattngattatcctactttgatgaataagaagcctatggcaaatggagagaacaagaaggatggaggaacccatgtttttgttggatcaagtggcctcagaataattaagaaggggggttgaattaatatttaatgtgtcttgactaattaaaaattcatccttcttaatgttactagattcaactaggcttttactactaagttaagaaagtaaagaacataaacaataacttaaccaaaagtaaaagcaacaattaaaagtgcacagcggaaattaaagagtgttaggaagaagaagacaaacacaagatttatactggttcggcaacaacccgtgcctacattcagtccccaagataccaatgattcttgagatttattcaaccttgtaatatctctacaagccatagatcaacaatggatgtaccct

SEQ ID NO: 196806 - DNA, 421 bp, Glycine max
  unsure (1)..(421): unsure at all n locations
agcttgcttctacacattggagaccatagaagttttttgtatgaacacaatnctaaccttatgagattccaatacacatcaacggggcaaaatgctcatacaactataaattacaccaaacaccttcaatacaatcgcacaatttcacacaacctaacttcacaaaccaaattcaatcttaatactatggcattcttaggagaaacaagcagttagaccattgctaactcaagattagtctttatttttccaaatggatcaatcactcacaaccaaattggtgtttattttcaaagtcccacaccaacactaatgtgagttcctaaggactgttcttttgatacactcaagagtagaatgcacactatccaacgatcaattaatggatgaaatatactactgacaaccattcatagatgca

SEQ ID NO: 196807 - DNA, 402 bp, Glycine max
  unsure (1)..(402): unsure at all n locations
agcatcgtattgaagctatcataaaatgatgactctaaagactgaactttagaatagatttagaatgaccacctcataatgcttttcaaggaacaatatcaagacttcataagactaaagttgantaccacttactttacacatgctgccaaacacattgaggacatattagaaagtaaagtttaactacataagaagatgaacactngttgaaaacagaaatatgtccataagaagcagtggatgaaaacatcatagtagaagattgaagatactagatagtctagccttggatacaacactaacacactagcaactgaactcacttgatggttatgaagcantctacttcagaatgcttggagctatgaataagtgttaagtttgatgaaactgtgctac

SEQ ID NO: 196808 - DNA, 384 bp, Glycine max
  unsure (1)..(384): unsure at all n locations
agcttcgagcaagaagaggtggagagcgtaggttgtttctatttcggcngatacaatacaatcggaggagctgatgcagattctttgcttccgcgccaagcagtaatcacattctgtttacttccccttttttttcttttacaagtcaaaatagatgttgggtgtatatgaataagtcaagcactagcttgataaaaaggttatgaaataaaatttgtgtctgacctttaatgtgaaactcattgaaataaatccaaaagttctgatgttctttcgtctttcttttacaacggttattactgatctactatgcagctttagtaatgatttattcttttttctgtgtcagaaactttaggaatgctctataaataatgggtagac

SEQ ID NO: 196809 - DNA, 421 bp, Glycine max
  unsure (1)..(421): unsure at all n locations
agcttccaaaaccggncgatggagatgctccctttttttattctcgccatcgcattgtaagttgccccatcttgcttaaacatcccactctcctccaaccaccggaaaaatatcaatgccttcgctggctccgaagccaaactctccaaaaccatcttaacgacatcaccggagaaccctacattcaagaccttaatctgcctctcaacatcatcatcccacacattgttcctcacaatcctacacactatagccatattcttctcattcaagttatcatacaaacccttcaacttcgccacatcaacaaccattccacccttctcaaaagactccaacactatctccttcacacctttagaaacaccataccctttnttcttcatcacatcaaccaagtcccaaaactcgtgaacaacac

SEQ ID NO: 196810 - DNA, 283 bp, Glycine max
  unsure (1)..(283): unsure at all n locations
tatgtagagtctattattatcaccatgtactaatcaatgtttgaaaattgttgcagctatcatacagtccatattgaatcccacaacacgctaacaatgactagttatcaattgaaatgagtcttcagctatcaatacatcatatatcgtttccagcgaactagtgtctttgtctacatgtgacaaagttggtgttagagtactaatgacaagntactttatagaagactntaccgntgtcttgatcattatatgcacccatagcccgcgtacgagcacaatg

SEQ ID NO: 196811 - DNA, 404 bp, Glycine max
  unsure (1)..(404): unsure at all n locations
agctntactgcagaaggcgcaacactaaaacgaatcctattgtcgatcgcacaccaatttaaaacaaagcaattgcttcgggttaataaatcgcgtgtttatcttcaggatggaatctcaactgatgcgactggcgaaaaagttggtacctttgctttggcatatgctgcacataaagctgcatctccaattaggtttccacccacagtagctcttaccccaatagtagctggttggattggaaaaaaagttgacaaagataagtagcttgtagtggtttccacccacagtagctcttaccccttctaatatgcttctctatatagtattttcaaatcaacatttattttccacactttaggccatgtacatccttattattacttcaccataatgaaaatgat

SEQ ID NO: 196812 - DNA, 465 bp, Glycine max
  unsure (1)..(465): unsure at all n locations
actaagctttggagtgcaggaagggaaaacacgagtgaagagtttttttatttctgngngcgcttgatggaacttctgactggactaatggctcttgacgaaagccggtcggaggaaagtcgatacctagctgaatggttttggcaaattaaattcagcaaagaaacacttatggcagccattgacccagctcttgaagcaagtgaatacgcttgtgagagcatttctattgtggatgaactcgctggacactgcactctcagggatgcaagtcacatgcctgatatgagtcatgcagtcagtgtgctatcctgattagtggagaaatggcgacctgttgatgaagaatttgattatggctctggcattgacatcagtcaaccacttcctcagttgctgacagattggaaggaatcagaatgcacagaatcatgctatacaagtgcacacagtgaatgaagcata

SEQ ID NO: 196813 - DNA, 282 bp, Glycine max
acaattatataagctaaaacaagcatcacttgctttcagttcgggttgcaactattaggttcattaatctgaggtcacgcctcatgaaatgactattcataacgagcttgaattatcatattcccagagtgaaaaaaaaataagtacttcttaaaagagcattcaaagatgaataacaaaagtttttacatagtacaaacctacactcgtttttaagttggggtgtaactcttgggtcatatagctcgatctgacgtattataaccacgttgaactataatg

SEQ ID NO: 196814 - DNA, 336 bp, Glycine max
  unsure (1)..(336): unsure at all n locations
acaatcacactataacttggactgaaccgacgggagttggaagccatcttcataatcaaatgcctagcctcaacaggagacatatcaccaagggctccaccactggcagcatcaatcatactcctctccatgatgctaagaccctcatacaaatattgcagaaggagtcgctcaaaaactcggcggtgagggcagcttgcatacaatntattgaatctccccagcactacaaaaagctctctccactaagtagcctgatgcccgaaatgtcatctctgatggcagagagcctagatgcacggaagaaattctccaagaacaccctcctaaggccat

SEQ ID NO: 196815 - DNA, 429 bp, Glycine max
gaccttaagcaccgcggctgcagcttgaatttctgacctactggtctattatataataattacttaatttatcaaaactaattaaaataattaaattaattaatttgttataaattttaattttattttaagactatccacgacattaaaatttaaaaaatattaccttttgtttgttatatatcacattggaggtaataatatccatggacactaaatgtatatgcatggtattatttcctaaataaatatcattatttccaacaaacctttattccaatatgattattttggttgagaagaacaagggatgataattttgcaccgattacagggctttaaacaaaattacattgtccaacaagtttccaatttttgtaatagatgaattattagataaactaggagctactcattttactaagccag

SEQ ID NO: 196816 - DNA, 474 bp, Glycine max
acaagatactcagcttacgcagtcatggcccagtccctacataactattattggttttctagccaacgagaaaagacacaccgagtctcagagcactctaatactcacctaaagcctgagaactctcccttagggaattcttttttcgcttcctttattgtctattccctttttccatcccttctcctccatcagtttctataccctttttcaagtgtaagaccccttatggctatgagtggctaaacccttagttagggtctggtcggcctataaagccaaatgatgtattgtatgaatcatatctatcaatgcaaacaggggttttctttcctattatcctctcttatttcaatctcatgtatcattcatacttgcatcattctttggggttaggtgctcgacatacggtaatccttaatagaaatacaaggaagatttacatgcatcacgtttagggattaatcgctcgat

SEQ ID NO: 196817 - DNA, 418 bp, Glycine max
agcttgtcgaaaattgccatgtttgggtgtttttatttccccattctgttttagggtttttgtgatgatgtttgtgatgtttataggctgaaattgctgatagaaatctgttagagacaaagggtagaactaacctagggttagaaagtgagaatgtgatgttatgagtggaaaaagagtgagactttgagagttggaggctaagtctgaattctgtggtaaatggaggttaaagtgagttaatactagcttgaaatgtcatttaggacatgtgagaaaggttaggctgagctagagagaaaaacaaatgaccaaagtgaacaaagagccattgctagggcaaagttgggtgttgaagagtcaaattttgattcggtgagatcttaggtgtaaatccagtttgaacaagtctaaatgg

SEQ ID NO: 196818 - DNA, 336 bp, Glycine max
tttctacttcaaaaccctctgaactacttcacatagacttatgtggtgcctctagaactatgagtttgggtggtaattactatggccttagtatagtagatgaatactcaggattcacatggactttcgtttttgaaacccaagatgaagcgtttgatggtttttgcaaacttgccaaggtcattcaaaatgagaaaaggtcttaacattcgttcacttacaagttatcatggaggtgaatttcaaaatgagtctcttgaaatgttttgcgaagaagatggaattcaccacaacttttctaccctaagaacacctcaacagaatggtgtcatggag

SEQ ID NO: 196819 - DNA, 417 bp, Glycine max
  unsure (1)..(417): unsure at all n locations
agcttataagaacaaaattgccttaatcatttcttattttgcatgngaattaggacgcatcaacaagaatcaaggcaaggctattgtgcaagcaatcaatggggcaaaacacaccaaatgattataatgatggatggctcaaattctcacaaaggtaaaatcatcactttcaaattgagctttctaaactatcatgacatgtagagaagaatcaaggatttcaagtcacaaaatgtcaagaacttttattttcaaaacaattacccatttcttgaacatatcctataattcaaagaaaaacatgcaaagtcgtacgtgcacacgaaattgacccaaaatattaaactgaaaatccgacgaaactaacaacattaacaaattaacacaactaacaaattaaacaaaccaacaaaacta

SEQ ID NO: 196820 - DNA, 499 bp, Glycine max
  unsure (1)..(499): unsure at all n locations
actcagctgacacattgtaaccacctaaaggagaagcaacttttctatctatcatgagtagaagctacacacgatgcttaaccactcaagacagcagcataccaataacagtgcttaaccaccatataggttgaagcaacatagcttaaccatcgaaagtagaagctaaacatggtgcttaaccactaagacagaagcataacaatatttgaatgcttaaccaccataaaggcagaggcaacacaccaatgcttaaccaaaggcacgaaattgacatcaatacttaaccaccatggacagaagcatatgactgtnttttttataacataaaataaacacctataacctcttgatgaatggaggggacagctatagtaaacagagaatatatatacagctgacgcaacacaccaatgcttaaccatccatggcagagatctgacatcaatgcttaaccacactaaatgcagatgcatcacaccaatgcttaaccatccat

SEQ ID NO: 196821 - DNA, 369 bp, Glycine max
  unsure (1)..(369): unsure at all n locations
gcggcagcaagcnncaagagcccggaaagggagtgctttttggagacgccncgaaaacaaacggagatgaggtgagaaaaggcgtcacccactacggaagaagccaaggaaagagaaccctcaccaccaacaaagcgtcttgtataagaagctcagacaggaaccttcaatggacgaacacactgagataaacacacagggacagagagagggatcgtgagagaaagagagaacgagaacgtggcatggaaaatcgaaggaagaaagggagagacgctaacattgaaacgtggctcacaacactctcatatatcaagagcgtgacaagtgttacacatgtgactatttataactcaggtcaccaactaa

SEQ ID NO: 196822 - DNA, 498 bp, Glycine max
  unsure (1)..(498): unsure at all n locations
cgaaggtatgagaagatgagtagagggagagggagagattgttttctttattntgcgcctaaaatgaggtcagaactttgaagtgtaattctcaaatgatcaaagttganaaaatccacacacatgacctctatttatagcctaagtatatcacaaaagtggagggagaattgaatttctattaaaatttcacttgaatttgaaattgaatttgtggagccaaattctggagccaaacattcactaattatgattagtgaattttagctatggttcagcccactaatccaagatcaagtccaagattctccactaactgtgattaggtgtctagaggcatgtaaagcatgatagacatgcacaaagtgtgactatatgatgtggcaatgggatgtatcaagcanatgcttcacctcccctctaaaattcaattggatcgggcttctcccaattagaataaatttatttcccaacacacacatcaaatattcacttaat

SEQ ID NO: 196823 - DNA, 401 bp, Glycine max
  unsure (1)..(401): unsure at all n locations
agcnnagcaagcccgagagggcgattnagtantttaaaacncacccaacanaacgagactagacttaacatctctatgaatgacgggcctctcacacccatgatgcaaatactacaaccctttcgctgtcccaacagcgattttatacctggtttcccaatcaagctccatcttcctactcgtgtgaagccgagcccacatgctcccattgggcaaatactcgtacaccaacaagcttgaatcctcgctggttatgctgcaataaagcttcacgacttttacgtgccttatggagctcaaggcctgaaccttcgcggcaaactcctttgacttcccagcagcgaacttattcccaagcatgggagtgctgctccacgacgactttctcctggcggagacat

SEQ ID NO: 196824 - DNA, 431 bp, Glycine max
  unsure (1)..(431): unsure at all n locations
tcgccaaaacanaagtacaatcaaatatgtcaagtgtttttctttttgaataaacttctaatcaatagaagaaaacaaggaggtcaaataaatcaaacttttctcacaagttaaaatcaacttatgcactctagctatgttagaaactctcttaactaatttctccaaaggttgatttatttaccttcctagttcttctcttataaaatgcttgttgtaaagtttatataaatctagcctatatatatntttaaaagtaaaagaaagtatgaatcaacactgcataanaggacagttataactaccatgttaccaagagaagccaatatcctaaaacaaatcattctcaattagccatataattattaaaatcaaacctagacaaaaaagaagtatactccctaanttgcttctcannaacacgtattccc

SEQ ID NO: 196825 - DNA, 411 bp, Glycine max
agcttcacaaccattattggacactcgcaagtgttgttcacacttcggatattttatgctcattagtcttgatgccctgtaacaagcagcaacaaataattttgtccaataaatattttctgcaggcttttacaggctctattatagaggatgctgaaaatatacaaaacaactgcaagagaacaaagttcaacttcatcacaggtagatttaatttactgatttatatgtggtagtatttcccataaaaatatttgataaacatggtttttatacatgatgctttgcagtttcatcactgacttgtatatatactaatcacgagtctgaccttcacaggattctggttctcaatcttcaaaaccggtctccagattcaaaatgcagagaagataactacaagaaaatgag

SEQ ID NO: 196826 - DNA, 357 bp, Glycine max
  unsure (1)..(357): unsure at all n locations
atgagtctaatgtcattcttccaaggaaggatnttttagatgatatctcagattccttagaagatacacatattcatggaaatgactctaaagattaagatgaaagaagcaatgaagattctcaagataatgggagttagagcaaataatgaacttccaagagaatggatagcctcaagagatcatcccctcgacaacattattggtgatatatcataaggggtacaactagacattctcttaaagacttatgcacttatatggcttttggatctatgattgaacctaatatataacagaaccctagtagatgatactgatcattgcatgcacgaagactgattcatttgaagaaca

SEQ ID NO: 196827 - DNA, 364 bp, Glycine max
cttcatttaactgtctttgggcttggcggtcacgatcaacaaagtactttcgacacctattgtatgttgatttgaccaacactgttatgggtatgttgcgacaatccttcaaaaccttactgatacattctgagaggttggttatcatgtggccatatcgacgcccttctttatctgaagccatcgtccatttttcctttgaaatgcgatcaatccatgttgttatggctggactcacttgacaaaatttttctaaattttgatcgaaaatgtgcttgcaaggagtgtagcctgcataaaattagttcaacaattttaagtatatatgaaacttatattaacgtgaccatcataaatgaaatct

SEQ ID NO: 196828 - DNA, 513 bp, Glycine max
  unsure (1)..(513): unsure at all n locations
tacaaactcaagcttagcacatgggcctcaattttctgtccactgaaccatatgctgttttgtgtgttaagactcacggntacgataccactctatcaaatcacttgctgtcagaacaaaatacctgttgaaagataaaggcattagtctggtaatagagtgcataatcataaggagaaatatcactaagtctcaaagcaaattacaatcatatagttgaataacagaagctcatcacctccataatataagaaaaaagaagtttaattgtatatctcgtaattagtaatcagtgaatctaagacctgcattaacaccttaagatatcgctcacagctcagtaaaatacatgcaagcatgcagacatgagtatatactcaaatgatacagaaaaatcccagaacttgcttgctatcacatanttttcagaacttgaatgtgatagcaacagctctggttntgaatattgctactatttgcacatacatctctaaactcagatcataagatctc

SEQ ID NO: 196829 - DNA, 418 bp, Glycine max
agcttgtccaaaataagggggtttcctcttgacttatttctataatagatcaagccacacaagtgaatatgaccttgaataagtagtgaataggtgctttaatttgcatgtatgttttctgtgggagactttgttttaatagtatacttaatacttgtcctccaagtgtgttaggattggtgattcaaatggagtgagcaaatagaagaaaaataaataaggaggaatgaatatcattgtataattgatcgtcattggatgcgatttataaaataagttgtttttactttgtgtttgtatttgaattaatgtaatgtaatttcatattttaaaaatatgaattgtttgcgacttcacgtacatgaatgccttttttgaaggagttgttgcttcataagaaaattaatcaagagataag

SEQ ID NO: 196830 - DNA, 490 bp, Glycine max
  unsure (1)..(490): unsure at all n locations
gctttaacgttgtcacctacttatcaccaagtgttcatttttctttcgtttggntntgnttacctttatgtctattttcataagggatatgttgcaattntgcatgtgactctgatgtggggcaaccaaaaatgaggtctttacttgactntaattctgttataattttgtgttgctaactacattacaagtatcctatggtcccatgagtacggatttgtgtgcccaaaagtctctctcataatgaaatggaccatataatttactttggcattgatgtggagaacaccttcaaatntgttatttggaatatcctgtggtggtagtggaattattattattattttgttagctgcacttttatggacagaggggacgaaataatgcaaaacagggtacttctgtgtgatgattgtgctagtatgttcttatattataagtaagatatcataacatgacaataatcccagtatcaattcataaatagcat

SEQ ID NO: 196831 - DNA, 415 bp, Glycine max
agcttttgacaaggaagaagaagaagaaggtctttttgacttcttaaatcaattggcaaaagtttgctgtctaaagaatgaattgaaaaagttacgttgaaatgcaaatcaaagcctttcttttatagactcttcatgtctggtcaagaaaatcattagaagagttataacctttagaaaaactagaaagccattggaagaagtacatcttgtgatttttattcaaaacccatcactcgtaatcgattaccaaatcagtgtaatcgattacacaaagcttttttgtgaaaggatgtgactcttcacaattaaattggaattccaacgttcaaacacactggtaatagattaccaaatcattgtaatcgactacaacattttgaaatcaattggaacgttgtaaatccaattgaag

SEQ ID NO: 196832 - DNA, 478 bp, Glycine max
  unsure (1)..(478): unsure at all n locations
tgcttctacaatctcccccttntnttatgatgacaacttctgtattttatatacacactcacactctttcctagtagatcactcacataaatttccattctctccctttgcttttgaatttatgcttctcttaaaattaatgtgatttactcatgtgagttcttgatttaatcgctatttctctccccctttggcatcaacaaaaagccaaagtgcgtaacaagtttgaagcatacatatacaactaagcatccacacaacattcatggaaaaatataaaccatattatgaagcaagaaccatgaatagatcaattatataaaaaccacatagtcaaataacataattaatatgtgttcaaacatatcatgcaaataaacatatagtatattgtcaaatatcataataatatagccaaatacacagctggatatcaaatgactagtaatattaaataatagaaaactaagatgatggt

SEQ ID NO: 196833 - DNA, 356 bp, Glycine max
cctgccgctgcagcttttaggccagagaggcagaggggttgtttatcctcagcctcctcaatgactatggcatatttctgcgctacctgcgggagaaggaaccatctctgaataaatttctggcttagcaggagtatgtctacagggctccaccactggcagcattacatactctctcatatactgatccttaaaaaaattggagaaaactgtctgaaatctgtgggggggcaactaccatagttcttaaatcctccagtactatacagcttctcactgagttgcaatcctgagaacctctgagctgggcctgagctggaatttttctaaatctctttacgcatccagctggagac

SEQ ID NO: 196834 - DNA, 479 bp, Glycine max
  unsure (1)..(479): unsure at all n locations
tantcatttttctgagtccctcatgacaacccagatgtacttttttttgtgttctttacagaacttgtcttttctgaatacacttaagaaaactcatcagtaggcataaattcaaaaggcttatgatttgtgttaagaaggcttgtcataattaacacaacaagggttttggactgaacaaatcgctcataaaataagatgtgaataacaattatcanagagacattagagaacattcactagacagtaatagagagcacatatgaactaatcaaactaaatggtacaaatattgaaataataatggactaaacaataaatattctaacttcatctaaccagttaaaattacctgctacaaaacaatcaatattggtggttcatcgtgcatttgccatnttcaaacatttctaaacattacagtgggtgaaagggttacattgttgaatcaaaaacttgtacatgcacactcttgggct

SEQ ID NO: 196835 - DNA, 267 bp, Glycine max
caccgcagcagcaacacgcgcaacagagagaggcgtgactatgacgaaaaaaacaccaaccaagcgcctaaagaggcaagcagccaccaaccaccaccatcagctggcaacaactttccatacacaaccaaaggaatagcgggcggcctgcacgcaaacatcccaaactaatcaagagtcaaacaacagccaccggtagacaaaaaacaacaacaccaaccgctggcgaaaaccaactcaaagaaaatgaggcagcaagcccaaaac

SEQ ID NO: 196836 - DNA, 412 bp, Glycine max
  unsure (1)..(412): unsure at all n locations
agcttatggatatacaggagagagagatgtttttttttttcttttntcagaatatctatgctcaagttaattttctagaatcacatgatatattatgtcgattccttaaacattttgaaaattaacttaatattttaagagacataatggattatattaaatatcaaacttttatactgaaaagtatttaataattttttgcagaatatgaatttaattaatgtaaccgtcaaagttcttttaaactagtattgaattgatcaatttagccgttaaattgattaaatgttacatattaaacataaatttggtgtttttatctaacaaagttacagaagaaacatgtcaatactttgtttatcctctttatatagataagggggttaaagcttgctgacatcggagcagaacc

SEQ ID NO: 196837 - DNA, 392 bp, Glycine max
ccttttttggtactgatatggcttaagaggaagaaatcaaccgagttgaatttattataattgctagtgatggcctctggaatgccatatcaaacaaggtgagactatcttacttgctaaagttggccctaaacaacatagatttctttatctttctcttcttctagatgtttagtaactattcatttatgttgcttagtacgttgcaccagagctgataactttgctggaatgaatgatcttaaaccccataccttctttattattggtgaaagtatacaaccatcactcattacattaatagcaagctcttttcctctatatattcataatcacatgtctcatcctgtgtcactttcaccgtacttatttgcatggatctataatattat

SEQ ID NO: 196838 - DNA, 421 bp, Glycine max
  unsure (1)..(421): unsure at all n locations
agcaggcatgcaagcntaaccacaaggaaagggaaagagcgttttttttttttgctngccttactacagacacgcaattgactttcattcgaattcgtatgtagaatattgcacttcgcaccctacaaatagtaggacctatcttgcgcatctcagaaagcaaactaaacacatccttaatctatggcttgggatccaattacttttgaatgtctatcctatcctgtaggaggttatgactatcatgcctcctgcacatttatgataacacctcctctgcccctaaatcttgattctcattatcgacttccatatatatattggcactcaactgtcactctatttgctcaattttgagaaaatttggggcggggatagactattaaacaaaaacctctttatgttctcggccttatatttt

SEQ ID NO: 196839 - DNA, 303 bp, Glycine max
catggaatatgaagttggtgagagacatagacaacactattattcttatatcttcccattgcatcattatcatatacagtccttgtagagttgcttgtcaattcttcagacaatacatattacaatactgattgtcaaggaatttatgcgagtgatgctaaatttaacgcatgctaaactcttggcaccatggacttcctggattggatgagtggcccctataattaagacacagcgggtggagggttagaggttgtgataactgattagctttatcatctatggcaacaacgagactattat

SEQ ID NO: 196840 - DNA, 406 bp, Glycine max
  unsure (1)..(406): unsure at all n locations
agcataggcattggatgaataagagatcattgtttttattcnagcatagaattagagaacattctatcacattacttttctcttataagaaatgcatggtgaagcatgtttacatgacaagccagttatctgccaatatttatagccacaataactatctttcaactttaccacaaaattagtaaacccatcctttactngaaactcatcatttccaatatgtgagactaacattattgcaatctccacacttttatccaaaatactttngaccttaggggtagcagtaaattgataagttacaaccttgactctcctattgtcaaaaagtttcattaatctacaaattagagattgaggattaaatatgtgtctaacctatgtatgctttggtctggctttatgt

SEQ ID NO: 196841 - DNA, 492 bp, Glycine max
  unsure (1)..(492): unsure at all n locations
cttgttntgaatttaaaaaatcaagagatcaatcattttctacttatctatcttttccaattcattctttatacaagcaatttttccacattaatttctgagtctctttgaacttcttcttcttcttcttctttgtgccaaaagaattccaaaagttttctggttttctaaaccttgaaaacttgtgctattcatctttttcattctcttctccctttgccgaaaagaattcgccaaggactaaccgcctgaattctttntgtgtctctcttctcccttttccaaaagaacaaaagactaatcgtctgaattcttttgtgtctcccttctcccttctcanagaattcanaacgatatagtctgagaatnntttttattcttccctttcccatatacaaaagaattcaaaggactaatcgcctgagaattcttatgtatccccattcacanagtntcanagggttaactgtctgagatctttatcttaacaca

SEQ ID NO: 196842 - DNA, 400 bp, Glycine max
  unsure (1)..(400): unsure at all n locations
catcaagctngaataacggaggcgcgattttgtttatctcctcatcangcacctttaaatgccgtttggcgaatgaaataaatttaccacttttttattgaatatttttaaaataacttagcattaatcaaataattagtaacaaaacaaacattagatgttttaaaataatgatattgtaaaaaaacaatatccggagggaatttcatcaaggtgtatttttctatattttacctaaggaatttgatattattattgttcctaaacccgtgcaaatttaaaactatgaaacttatattttcttacatatttatttggcttttatcattgcgtgtgaatagattgaattggccatggaaattaaaatcacaatttttttttaaaacagacataatgtctt

SEQ ID NO: 196843 - DNA, 475 bp, Glycine max
  unsure (1)..(475): unsure at all n locations
tcagataatcgntggtgatgtcgtgagagtcgcctgatctgtatctaccgcgggaggaatcgcacgacatgaggatggatctgcggcggctggaccggatcggtgagaggtggagcggcgagaagtctactgcgacggagctcggaacggagcgggcggtggaggcggcattcgtgtgatccgctgcggcggagcccacgccggatacggtgcggacgcaaaaacgtgaacccagctatttgaatcgaaacaacgacgtataatgctgagaatggaagatagagagagagagcggagagggttgttgagattgaatgcgatgaggagagggcacatgacagcgttgtacttgtgggagtggagttgatgttattattgcaattgtttagttactcggttaatatacttacactaaacctcatttaattgtgcctgcctatgctcttgaaatgatggatggaatgctcatgcatga

SEQ ID NO: 196844 - DNA, 320 bp, Glycine max
agcttccttgagaagctagaagggggctacttatatttctacaatagctaagctcacccccatgccaaaatacatgaaaatacaaaaaaagtccctactacaaagactactcaaaatgccctgaaatacaaggctaaaaccttatactactagggtacccttaacttgtagggtagggtgcccttaattcgtaagccaaaaatacaaggcccaaaagaaggaaaacctattataatatttacaaagaaaaatgggcccatacttagcccatggtcccaaaatctaccctaaggctcatgagaaccctagggccttctcct

SEQ ID NO: 196845 - DNA, 373 bp, Glycine max
  unsure (1)..(373): unsure at all n locations
ntaacctcatcgnctctcacagtctttagagatgtgatcctattcaatccttgggtgcagactctcagccacttatgatagccgccgatgatcccattactgcttcccctaagctctctgtcctttcttcacgccgcatcccatgccttgcgaactccttggagtaccctcgcgtttgtggtcactgaaaccccatgcgatgaaaggtgtgatgctttcgtctgatggcacttctctcatggggtagccaagctgtcttatggcgaggacgggattataattaatacaaccccttgttcccatctagagaacatttggacatccttcgcatgaagatagaatcttgattcttcctttcttctatcgagggaac

SEQ ID NO: 196846 - DNA, 420 bp, Glycine max
agcttctttgggaccttgaacaagcaatcaacttctctttcagaaccatgctatgtgctcgcgactggtccctttcttcccttcgcaacttgagttcattattgctaccccatagagctccgcgaaatttgttccggccatactcttccttgcgagccctcttggtctcttgttcaagggctcttgcggtaattgcattctcttcccgtaacccggcgcactccttccaaacatgtgtagcagccaacttgaacttctccttggcgagttttgcctttcctaactcgcttttgagagcttggacttcttcgtcctcttccggtgcttcaaaattctcttcgctgacgacttttaacttggcgagccaatctaaacctcgtatgcgaactttcagccattcgtggtacccaccaatgatgc

SEQ ID NO: 196847 - DNA, 410 bp, Glycine max
  unsure (1)..(410): unsure at all n locations
tagtccaccatcttttcatagtagaatactagtgatgtgtctactatcatcggtatcatatattctgcgtcattgaggtgccacttgagcttccaggtctctttacctttgggcgtattctatgaaagatctgtgccccttgttgcacatgttctgttgttgcatcctatccggaaccatatcaaaattgtactgatactgcctaacgaaggcaaccattaggtccttccaagagtggactcgagatggttccaggatagtggaccaggtaacagctaccccagtaatattttcttggaatgaatgtatcagcagatcctcatctattgcgtatgcccccatcttccgataatacatctgtagatggttcgttgggcaagtagtccccttgtacttgtcnaagtccagca

SEQ ID NO: 196848 - DNA, 421 bp, Glycine max
  unsure (1)..(421): unsure at all n locations
agcttgntattcgaagctatggcagtgaggttatttgttttttattaatgntgcggccttctaggtcatgtatatagtagtagcttcatgtacacactgctagaaaataggctttggttgcacagttttgtttctggtttgcatggttttgtgtgtatgtgtctgataattggactttgggctggtgtgagaattctaccacagccttaggctcccaaaataggaatatcatatcggtatgtcaaatgtatcatgcatattaatgtcatgtctatattgtaaatggaatttagaaaccatggatgaacatcaacaaaactggaaggaaatggctaacataatgatgaagattcacaaagaatcagatgaattgttcaacactgttcatgttactgatcaggttagaaattatttcatgact

SEQ ID NO: 196849 - DNA, 465 bp, Glycine max
  unsure (1)..(465): unsure at all n locations
ggtcttcttcctctccgtagttcatatggagtctttctttatcaatgataatcttatgaatattttgttttgaacatagcaatttatgttcactgcttctgtccataagtgtttaggaagtgaattttcacaaagcatggtcctagccatttctttgcaaagtttatttttcctttcaactatctcattntgttgaggttctctcgatgaagaagaagtgtgagaaaaaacattcctttcataaaatgatttgaactcagcattctcaaactcagttccattggtacttctccatagaagaaataccaaaacccctttcattntaaaccctcttacaaaatatctcacagaccttgaaaggctcatgtttatgtacaaggaagtaaacctatgcatatcttgagtagtcatcaactatgacaaagttatatttcttaccttccagactcaacattcgagttggtc

SEQ ID NO: 196850 - DNA, 416 bp, Glycine max
atgagaccaaaacatgacagaggaacgtttttttttttttaattctcatgctaatctagaaaatcttgtccaaaacacaaacgaattacacaaatatgcttctcacaacatggggagcaaaacccctcaaataatttcacatgatcatatcaaaatcaaaggaatcaaaatcataggttcaaaaacatgagaaacatcaaaagcactcaattttatcaaccaattcgcattagggcatcaattggctcgtcaaacataaaaatcttgtgattataatcataaaggcaaaattacaataccgaaaacatcccacaataaaccctaatttgatcctctaaaaaaccttatgcatattcattctaaccccaattgtgataaatccatcctttacctctaagtgggctcacatgtttact

SEQ ID NO: 196851 - DNA, 503 bp, Glycine max
  unsure (1)..(503): unsure at all n locations
acatacataatcataagcctactcataatctacctagagatttctttcactctttnttcttctgtctagcttcatcgtcaacttcatttgtaatcatctcactacgtagaagattcctacctcccaaaaaggcattttgcctatagtcaatcacctcatgtaacaccttntgcaatctttgttccaaaatctttgccacaattttatacatacatcccaccaaaaagaatggtctaaagtcccctaaactaataggattattgatcttagggataagaatgataaaagatgcatttgtccctttagcacaagtttcggatgtatgaaaatcatcaagagatataaccatatcttccttcaaaacctcccaaaatttcatgatgaatntgaaattgaaactatcgagtcttggactctttgagctaccacaatcccacactggcctcctaatntactctaacccaagagaagtcataagcatatcattatcttcactcgaatac

SEQ ID NO: 196852 - DNA, 420 bp, Glycine max
  unsure (1)..(420): unsure at all n locations
agcttcaagagtttcgatctggcaagaagattaattagtttatcaaagattctttatattcaactactaaagaaataatgcaagagttgaaaggccctcttgagaagtgcaggcaactcgagcatgctcaaaaggagtcaatgaatgcactgtatggttcaaagcattcaatgaactgaaatgaagtcattttattcgacccaccgaatcttcttttgttgtatattcttgaacagattttcaatttgttgatatattntggcattcatgtaatttccttttgaaaaatttgcactttaattatctaagttatgggaatgtttatttcagctatcattgggctatatatctttaagtattttccatttatcgaaccaatgtaattggttgtgtttacttctcgaattgcataagcatttc

SEQ ID NO: 196853 - DNA, 267 bp, Glycine max
atggacctatccattgtccctttcccctcaaacttgagattcttaatcatttattaaatttatattatgaaatgatgggttttatgcctatgacatttcatgtttgtgtgttctttggttgattggaatttggagctatccatgtttaagacttttgtcatgaaagtttaaggttttcatatgtggggtttgagatatctattggctcaatttatctttcttgtgagttaccttaagggagtttggtttgaacaaacttgaacatgg

SEQ ID NO: 196854 - DNA, 418 bp, Glycine max
  unsure (1)..(418): unsure at all n locations
agctntgcagcagaagccactctactctatattcttgaaagatatgttaacaaggaagcataaatatattaatcaggaaaacataatagtggaaggaaactgcagtgctgtgctccaaaagatccttccacccaagcataaagatcctgggagtgtaactattccttgtccaatcagagaggtcaatgtgggaaaatctcttattgacctgngagccaatgatgccactctccatgtgcagaagattgggagagttggcaataatggccactcgaatgactttacaattagctgactgctccattaccagaccatatagagtaattgaagatgtgttggtcagagtaaaacattttatcttcctggcagactttgtggtaatggatatctctgaagatactgacatccctataatatt

SEQ ID NO: 196855 - DNA, 515 bp, Glycine max
  unsure (1)..(515): unsure at all n locations
tcagcctgatcgctaagcgacagcttattcgaggctaagcatgatctattgtcgccaagcgcaattccttacagccataatagaggtccatgatgctaagcgccagtcatggcagctaagcgagattcattgcagcaatatgagcactaagcgagtccctctcagctaagcgcatgctcctctgtacttaagatgcatccttttagctaagctggccagagccaggcttagtgagagttgcagctnttctaatctgtagacctcgctaagcggacccaccctcgcgctaagccaagtctttgttaanaaaaagaactgattttgaatttgaaatgtcggctaagcgcatgggttcgctaagtgagcctggttgagaaaccaaatgtctctcttgctcgcttagcgcagtagtccactaagcgaaagtatcgaataactgcttaagtgagtgtaacagcagttgcacacacattagccagaatccggatacttcgtctctacattctttctctcca

SEQ ID NO: 196856 - DNA, 419 bp, Glycine max
  unsure (1)..(419): unsure at all n locations
agctntgcgggtccgcttcacgggagatggcgtagctgatgcgnccgaaggaggaggaagatgaggatgagaaggaggaggataaggaagaggaggagtggaggcaggtggagaacccatgatctttaatacaatatcatacaacaacatacaaaataggattaatcataagaggatcagtcataagttttgtttggaagggcaaagtataatattattaataaaacatatcagtgccagaggtacttaggagatcagatacaagacacccaaggtgccaccttccaaaaacataaaacccaagaaaaccccaccacagaaggagacacgacaaattaaccataggactccgaaagattggtagttgtgcttttgaatattgatttcgggcaaccatgttataaaaagtctattacatg

SEQ ID NO: 196857 - DNA, 309 bp, Glycine max
  unsure (1)..(309): unsure at all n locations
cttcatctgcacaaggctcttaatataagaagtgtgttcttgnggaaccttcacacccgacgaagacactgagacatgattatcttcttctttctggacaaaggatggctagccgttggcaagtcatatttgttaccatcagaccttggacgcaatagtgatcgcatcctcatatcaactagatcttgacgggtgttctagccatccttcctcttggcttgagagttaacatgcgctcctagcagactgacacatacattgttctccacatgcatgacatcaattcaatgtctcacagctatagcagac

SEQ ID NO: 196858 - DNA, 411 bp, Glycine max
  unsure (1)..(411): unsure at all n locations
agctntgngcagggttcatgtggccaaatttttttttgcgtgnncaaatatgggctttaattttgtttttattccttcaatttagattatttttgtttcatcttctaaatttaaattattttttttagtttctcaatttcaaaaaatatttttcttaaaataaatttaaatttaaaaagccaaattaaaagttactcaaatttaaaagataaaaaatatatctaaatcttaaatatatcaatacgaaattgattttcaattatcatgattatttttttcaaaatatgtgtaaatttaaattaatataatttttgtttgtaaatggatattacactattgattcatagagaatgttgtttagaaacttataatcaaaactaatcttaagtgcataattattcaaatgggttc

SEQ ID NO: 196859 - DNA, 400 bp, Glycine max
  unsure (1)..(400): unsure at all n locations
agctttcacacggattttcgattcggttacttatcntttctagacgctcaaaatttaacaacggaagctctcgagaaatttgaatggtcgtaacatttcacacggatgctcgattcgaggacataattcatctagacgctcgaaactgttcaacggaagctctcgagaaattcgaatggccataacatttcactcggatgtttgattcagggacataactcatctagacgctcaaaatttaacaacggaagctgtcgagaaattcgaatggtcataagttttaacacggatgttcgattcgcggacataatatatcaagaggctcgaaattgaacagcggaagctctcgagaaattcgaatggtcataacttttcacacggatgttcgattcggggacat

SEQ ID NO: 196860 - DNA, 236 bp, Glycine max
tgaggggtcaaaacgtgattcagtggaatgttcggcgaaagtacattcgagcgagaacatattgacgttatggacttgtgtgaggtgacgaggtgcttctaattcacctcattctaaatatgactccttaaacctataaaacccattgaattgaagcgttctggacacctacaatctgtgttgctgcggtttgaagcttggctatgtattatacacgcttgatacatgatctggga

SEQ ID NO: 196861 - DNA, 394 bp, Glycine max
agcttgtagggttaaagtctcacgattgtcactttctcatgcaacaattgttagccgtggctatacgagacatcttgccaaacaaagtcaggttcaccataactcgcctgtgctttttcttccatgctatatgtaccaaagtgattgatccagtaatgtttgatgagttggaaaatgaggccgcaattatactgtgccaattggagatgtattttccccctgctttctttgacatcatgattcacttgattgtgcatctggtcagagaaatcaaatgttgtggtcctgtttatctacggaggatgtacccggttgagcgatacatgaagaacttaaaagggtatacaaagaatctatatcgtccggaagcatctattgttgagaggtacattgc

SEQ ID NO: 196862 - DNA, 389 bp, Glycine max
  unsure (1)..(389): unsure at all n locations
tatctataccatnnntatgacattatgaatgacttcatgaattgagataaagtgcttaaagaattcacttgcatgtgannaaatttcaaaaagaaaaagactcaagttaaaaggataatgcaaccagattaatactttcaaagaaaaaaatgttttgtaaagacattttcagacaacttaaatatttntatttgactatattagtataaatcatctctaantcatgtatttgttaatattatacctctctctttcatttcttttgatatacttcgtggttaaataacttgaattcattatgatttggttatccaatatttttgaattggtatatactatacgaaatttataagttcttttttagtcagatttactacgtttataaaaat

SEQ ID NO: 196863 - DNA, 397 bp, Glycine max
  unsure (1)..(397): unsure at all n locations
agcttattgacactctgaacgcaacgaccagtctattatctaattgacactnttcaattctcttcttaccacccagtaaaagggaaggtcgatcgcacgttcatcctaaagaatggaaatactgacttggattagttgccaactactgactcctcatctaatcctagaaataagcaggctaaactcttaagtttcaagacaaccaattcaatgaacttgtaattttatctggatataaacaataaaataacaaagcccataaataattaaaaatgaccaaagtcccattgaaagaaccgtgaaggattcttccataaaccaccaagaaacttcactgcacactcacaaaaaagagtgtcaacagacagcacttgatgtgatcggaaccaaacaaact

SEQ ID NO: 196864 - DNA, 405 bp, Glycine max
agcttccaaagagagagctctcttggagaagattatttattcaggcgcattatttgaggtcggttcaaactattaataattgatttttacatcttattttgtgagcaaatatcttagatttttctttagaatttttgttaataattgtagtttttgttaataaatcgtataaaatagttttggaaacttcaaaagattgtttctgatttttatttttttttgcacattttaatgttacaagagtagattttgatcaatgaagaattggagagtttcaaagaacacctcatcatagcgaaatatgttttcgacacaaagaaacaagacacttgattacgtggaattgatagagaatcctccttagcgaagttgcactttgccttatcaaaatctacaattagaatt

SEQ ID NO: 196865 - DNA, 416 bp, Glycine max
  unsure (1)..(416): unsure at all n locations
agcttgtctncatccaatgtgattgccttgctatgctttttcgacgactcaccacctgcttcaaaagatgctacaaaccggaagaagcactagtgctatagttatcattgtattaatggtgcttgtgctcttttctttgatctcctttgtacttttaaagctgtggctgaagaagaaaagggaggaccaatatgctcgtctctaatgctaatgattttggctttgtgttttccagcttccaggggataaaatattaggtctggcaaaaatttcttgggtattgtaatcccaggagatgccaaggacttcttcaatcaagtcgagtcattaggttttctagagagcaatatgaaagtgctttactagatacaatcttattttaaattgcagctttatgggggatatttccatatatt

SEQ ID NO: 196866 - DNA, 505 bp, Glycine max
  unsure (1)..(505): unsure at all n locations
ctagaaaggaccttntangatccggtacaatctgtatattaaatcatacgagttggaagaactatntaggaaggtcatcccgaagacttggaattccacacacttaanagtctattatagttagctaccttcctgtaatgaagggtgtactatttttcctaccttggatttttattcctataaaaatgtgaaaggttgagaagcttctcagccatgaaatagtttcctcttgaggngtgtactttntctcctttacctttntgtaatgaggggtgtactctttnntctgaccatgaaatatttcctcttgagtaacctcctcggccaaggttgaacttaattcaatttacttatggttccctaccaattgctntcctcagccaagggtgagcctaacataattctttatctatacttcgaagactcattgattacttanagtcacaatgcagctacaatcattaaggttacacggtgatggaagcttgcttgagaagcttctatg

SEQ ID NO: 196867 - DNA, 419 bp, Glycine max
agcttcttcagcttttgttttagccgacaacacattataatcactcaagtttatctatcctcaatctaaacacttcatgcacaaccacaatccaacacgaaaaaaataaaggaaaacaaaagcatattccacaataacctagacctaaatccattacctacttcgaagcaacaggatctttgtcataatccttatcgtcataatcggtagatgacctcttattacccaagcaacgaaacaatcaaactcaacacaagaattcaaatccaaacaatgtttggcgacaaaataagaaaacctaaatgcctttcgcaaaatccgcctttgaaatcaaagtcatcaaaatagaggttaaagagaattgcgagaacaaaggaaaagagattggcctcgctcggacaaaatctgaaccttaacct

SEQ ID NO: 196868 - DNA, 372 bp, Glycine max
  unsure (1)..(372): unsure at all n locations
aacaatcacaacagatgcactgtgaattgatgctgaattcagtagaatgatttcttgctcaagatcacccccataagagaaatctgctagattgggagcaaaaatcttgatggcagatttatgtgatttatttgatagagagttccatattgctatggaaaacctttccagtagaggtgctntgataccaatgttctgcttagntaaccactcacatcctctagcttcaagcactttgagaactggaaagttaagaattagatcttctgaataattggaggattcactcactaacctttatccagaaatgctaaggttntgaagatttgggagagaagaaaagattggaacactaatagtacatttcatttg

SEQ ID NO: 196869 - DNA, 416 bp, Glycine max
  unsure (1)..(416): unsure at all n locations
agcttcagctntgtccccaaggcgtcatgtttacttttccaaaatcgcgaagagaaccttggatccctgtcagatacaatactagaaggaattccatgcaaccttactacttccttgatgtacaactccactagtttctccattctatacttcatattcactgggataaaatgagcagattcggtgagtcgatcaactatgacccacacagcatcatgtccacgactagtcttgggcaaactagatacaaaatccatagatatgctctcccatttccattccggaatctccaatggcttcaattctcccgatggtcgctggagttcaaccttagccttctgacatgtcaaacatcttgctacatattcagctacatcttttttcatgccatgccaccaaaaacttctctttaaatc

SEQ ID NO: 196870 - DNA, 417 bp, Glycine max
  unsure (1)..(417): unsure at all n locations
agcttcattccttntacagtcgtatgtgcatgtctttgatgccacatggntgaattattgacagcctcagtaattgctaccatatcctcatctacaatcatgtaaagagatcctcgcttctttccacgagccacaatgagatttccttttgttaccttccaagctccatctccaaaagtggagtgatgtccctcatcatccaactgccctatagatattaaatttctctttaaggcaggaatatgtctgacattgtgcaatgtccatagggatccactagaggtcttgatgttgatatcacctctttcgacaatgtctagagattttccatctgcaaggtaaacttttccaaatcttccagaaacatatgtagacattaaatttctagagggagtagtgtggaacgacgcacctgag

SEQ ID NO: 196871 - DNA, 468 bp, Glycine max
  unsure (1)..(468): unsure at all n locations
cggacccagactcnctcaacgggcttgaggttagcaaccaccatggcatgcttttccttctccgtagtagtgctttccaccatgccggtcaagtcatttttctctattagtaagtccttgcaacgcccaaacatttgttaccatgtagtctggtgcacattagcttggaaaggacaccaccaaccttggacaacaacgagtggttgggctgtacggcctcaacaaaggcatcaatgacgttggcaacctcaacctctaataacgtgaccttgcttagagattcctggtgcctttgtccattttcctccaaaatcgccaaacttcttagtaggaataccttcacataatcaatttcatttngaaccctaaatgaccagataaggttcttatcaaaagaagatgcanagccagtcagagttctctgctccggcctatatcccatgctctacgttgaatcaatatcacgag

SEQ ID NO: 196872 - DNA, 415 bp, Glycine max
agcttattgccatagggatggagagatagttcttataagcaactaaagccagccaaaattttatgtatggatagaacactaaacactgatagtgaatataaagaggctcgcaaaggtcgcgctcatcttgtcaagtatcacatgatgtgaaagaaatgctattcaatggacaacaatatatataccagatttgataaacatgaaagggaaaatgaaaaggaaaagacagaaagcactagataagttatgtaatgagaaaagaagaaatataaactaaacgtatagaaaaaatgagtatatattttataactaaaaatttgttttaaaaaaatagaatgaaagaaatactctatcttaaatataaaagacttagagagtcatatagaagacatccgtatatatttatgtttacaat

SEQ ID NO: 196873 - DNA, 497 bp, Glycine max
  unsure (1)..(497): unsure at all n locations
tcgngttcgattaattgcctctatgcttaacttacgttctttcttattgaacaaagggtaaattggcgtatatgttgcttaatcacatattgacaaccctaaattgatcttcgcttagtaaattaaaatatggttggattaagtggttaactgttatggacgaattcttcataatctatgacaagagaatggcttctgaatcagaggaaacaacacgtttttaatactattaatttcgtattccagttcgcttgttctttaattcacaaaacacacaacccccccaattgttactattattatgaagcatattatgaacattcggttagtcattgcttgttgngaaatgacctacgatcancttcctagtactgcattctaatggttatttgattcgggtacagtctcgatcatatttggcggtgtcgccgaggagcagtgtcaaaggtcataaaactagcgatcgggtttcgcgtaagtatctacgttaaatcttt

SEQ ID NO: 196874 - DNA, 357 bp, Glycine max
agcttagcgtggcgcagtgctacaacaccatcttttcgttggcgtatgagacggaggtgcgtttgcgcgaccccatgtatggctgcgtgggcttcatcttgctcttgcaacaatgactatgcgaaatcacaacaaaggtacacaacgcgaaggagttatcaacctacctcaaccctaggccatgcaggttcttttagccaatcttggaatgctacaacatggcggtgttaatgttgagcctcatttggatcaaccaatgttcaatgtcatgtccaaccatattatggttgggcactatgttggacaaatggaggctcgggacccataacaacaagagtatttagaagctcaacaaat

SEQ ID NO: 196875 - DNA, 410 bp, Glycine max
  unsure (1)..(410): unsure at all n locations
ggcttctatagaagaaacanaagacagaggtctattggtgggttgttgtnctcaagagcaagntntgaagctcccaacagtggcagggtttttgactcactgtggttggaattccacgcttganagcataaccaacggngtgcctctgatttgttgccatgtcttaaggattacagagatgggtgaacaagatccttgaacaaaatattgagtttctaaaggatgttacttgttctaatcatgcattgaagggtgaacttgttgaagctaacaaggcanagaatagactactagataggattcttgatctagaagctgattatgatnaagtatttggtgatgtcattgagaacgatatggcttctgaatttcttttcacanggttatttctcgacatcaaacacagagta

SEQ ID NO: 196876 - DNA, 411 bp, Glycine max
  unsure (1)..(411): unsure at all n locations
agcttttcttcgtggggtggtgggttctgtttcttataatggcatgatcactggctgacatattctcaattagatcttttgcttctttcggggtcttcagttttatctttccccctgcagaagcatccaacagttgcttggtttgtggtctcagcccatctataaacatattcaattgaattggctcaaaaaatccatgagntgggagttttcttaacaagcctctgaatctctccaatgcttcacgcaaagattcatcgggaaactgatgaaattaagagattgcagctttcccttctgtagtcttggactctgggaagtatttctttaggaacttttcaacaacttcttcccaggttttcagattgttgcccttgaatgagtggagccacctcttggcttctcctgcca

SEQ ID NO: 196877 - DNA, 492 bp, Glycine max
  unsure (1)..(492): unsure at all n locations
tgatggtgtcgagaagaaatcacatgtttgtcatcatctattatggggagaatgtgaatgtatgtatacatgattntgatgatgtcaaagaagaatctaacaaggctgcttcaaatgataagcatttgcttcaagaataattcaagattgcttcaacaaacaaagccttgtttcaagattcactaaagaccaagccttgccttataacaatgtgctttcaagacatgcaaggctctggtaatcgattaccaggaagtgtaatcgattatcagaagacagggttgagaaatagctgttgaaaaaggttttgaatttgaatnttcaacatgtaatcgattaccatatgcctgtaatcgattaccagcaacgaaactttggaaattcaaattcaaaagtcataacccttcanattataactgtgtaatcgattaccagtggaaagttttcataaatctgccacagtccatcttttcatagatttgtgatggcatc

SEQ ID NO: 196878 - DNA, 414 bp, Glycine max
  unsure (1)..(414): unsure at all n locations
agcttaacattgaggtggggaagagctctatttttatgattagaagnaacggttcactaaaatttaaaagcactcttagagattattaatacacgtgtaagtaaagtacttcaccttgtatagggatctccttgtgacaattggcgcagactgaatgcatttgtctattacaactggcaaaggggtagtaaagccactactatatatctcaggattaaagaaaatctgcagaaatcatagggaaaacatacagatatgttaaattgactggtcctattgatataatgaccccaactgaacctatagattaactcaggaattacaccaaggcactactaaatttcatgaattattcaatagtcaaaggaacacactcaagtggaatcaatagctatcactaagtgataccaggac

SEQ ID NO: 196879 - DNA, 319 bp, Glycine max
tattaccaaaaatatattattagggaactattttgcttatcaaatttacatatgtaaataatattctttaagtattatgtatcattttattcttaatccaatattatattcttttataatatttattgcagaaataattatatttcttctcttcttagataaactatgtgagttacacttctaaaagttataaataaatgtagtttgcaatcaaatgcttttattaatctttgtcaatgtgtcaaactctacacacaccatacatatattctgaaacatgtctacaaatattttatctctctgtcacgataactttata

SEQ ID NO: 196880 - DNA, 377 bp, Glycine max
  unsure (1)..(377): unsure at all n locations
agcttcagaagtaagtgtttgcgttctctttttccagcgnttctttgggtttggcgtttaactgtttgtggtgatgagcaagagggtgaatgttnttgggtgctattttgttttctgacttgggactattgtgggggtgtgggtgatggcaggaaggacacttatggtgtgtttgcggaccctgttgatccaaaagaggtgcgtcgattattcttcctgtgagttggtaaatcttgcttttggaagacacccctgagttggaagttcaaattctgtttttgacatgcagcttcctgattatcatgatgtgattgagcattccatggactttgctactgtgaggaagaagttgggaaatggatcttatactaccttat

SEQ ID NO: 196881 - DNA, 400 bp, Glycine max
aaagtgaatactatcagacatttgattcgagagaaagaacctcatgaatagttgtagacttcgttattctttttcaacatttgttacaaagtgtgactatctgacagctcgaagatctcctttagcaattggagccaacgatgaaaacatgaagagtgcacgttctcatatatgcagtgtttcgaaggggggaagagaatttaaataacgtgtaggagagaacactatgcttggtctataacaggtgaagagataaagtgagaactacacattattaagagtttaatattaatgaactctgatctggaacatatgcgacactaatgaaattataaaatgcttctctgctcacgtttcttacatattcatatccaactaaacagtatatccatgcacggat

SEQ ID NO: 196882 - DNA, 459 bp, Glycine max
  unsure (1)..(459): unsure at all n locations
agcttccatcaagtggtaatcagagcacatgnatcttaagtaggtgctccttaaatctccattaattnttttgctttaccttcacttccattgttgtttcttcatttttctccatgtatctcctcacatgtcttgtgctaaatgtttttaacatgattctttagagtttccaccgattaaacttgctatagaagctaaatttgattttctatggttcaaatttcttgttcttgttcttgaaccatgaattgtgttgagtttaggttcctttgagttttgtcttgttattnttggtggctgaaacctaaaccataaaattcttacaaaaatattaaagtagaagaaaacctcaaaaatctagagtgacttgttcacctattgtagtnttgtcatagaagtcatgtctagtcatgaaacttgtcacataagaattcttatgtngngctgannatttatttc

SEQ ID NO: 196883 - DNA, 294 bp, Glycine max
  unsure (1)..(294): unsure at all n locations
gtcttcgctgggaaaaggatcaaagcgggtctgaaaagagcaatattaatcatcctacttggacgaatgaggaaaaactggggcaaataaagagggtgagaatganggagaaactcaagttgtaactgccattcctatactgcctattttcccaccaacccaacaatgtcattactcatccaataacaaccattctccttacccaccacctatttatccacaaatgccatccctaaatcaaccacaaagcctgtctaccgcacttgcaatgatgaacaccacctttatcacaaa

SEQ ID NO: 196884 - DNA, 424 bp, Glycine max
  unsure (1)..(424): unsure at all n locations
agcttgcattggaattgcgaaagcccctcttttttttaggattagtacctgacatctcaaacaaacaaatcaaatgtaacaagacaattatagttgctgtttgaatacctcacccgctcaagtgtatcacacaatgatggcttttctctaatgaaacaatcttgccttttaccactctaattccccttgagttcttagacaattcaagagattatggccacaacaaagaacaattcaccaatatgcgtaaggtaaggctagagagacaaggaaaaggttaaccaagaaaaaggctaacaatgttnttaggcgcaaatgaaggaaataaaattcagaatttaggaattcaagtaacaatccttcatgcaaccaatatattaccttaaagagattttnttaaaagttcttcaagcatgaaccattc

SEQ ID NO: 196885 - DNA, 402 bp, Glycine max
  unsure (1)..(402): unsure at all n locations
cttcggccttgatctagctgactgtgtttgcccttttttttcagctctcttgtttccacgctaacgcttctgtcatggtcatgttgacatctgtcgcaacctactcttcggcgggaggacgacgcggggcttgcgggtgcgtcttccatgaaaggaaaatgcgcggggtcgccaccaacgtttattcgaggaaaacgttagaaaaattggaaaggtgtggtctacgaactttaagtgtgaaaggtttatgagttgtatttatgcacggtgaatgtattagcaccccacgtgttcgtcacaaaggacgacaacctttaatcaagtgtgcaaagatgacttcaaatggttntattctccctttcttacgttttatgtctctttttggcttttgtnatttttatc

SEQ ID NO: 196886 - DNA, 468 bp, Glycine max
  unsure (1)..(468): unsure at all n locations
agctggtaatcgattaccaatgtgttaaaacattatttttcaaacttcaacagtcagaactagtgataaaacattttcaaattatttttaacttgtgtaatcgattaccagttgtcgcaacctacccttcggcgggagggcgacgcgtgactcgcgggatgcgtgttccacgaaaggaatacgcgcggagtcgccaccaacgtttatttgaggaaaacgtcggataaaccggaaaagacgcgatctacgaacttttaagtgaaaggttcgggagttgtatttactcacggggaaggtattatcaccccacacgtccgccccaagggacggcagcctttaatcgaatgtgcaaacatgactttgantttttatgttccctttttatgtctctatatccttcataccctctttatatttnttctttttgtggtcgacaagggtgtttccctttgctgctacgtattcctc

SEQ ID NO: 196887 - DNA, 435 bp, Glycine max
atggtcaaaaaactctatgaaatgaccatttttccccttccttgtggctttggtttatggaactgacaaacaaccatcaaaaccctgcgcgaacccttggccttgcactgtaactggtgccaaacaccgtaattcaattagcaatgatcaaaacatcatatccaaatgataaaaacattatacccagatgaaattagggtctgacaggatgcaactactctggtatatccatctcaaccaagtcttgatgacacttcaaaccatcctttgtcttgtcttgaatgttaagaagggtgccaattaaacttgttggacaagtggcctcaataacttaagaggggggtgaattaagtcttacaaaatgtcccactaacaaacttttaacccccttttaaatgatagactcataatgcagaagaagaagcaacaatcaat

SEQ ID NO: 196888 - DNA, 369 bp, Glycine max
  unsure (1)..(369): unsure at all n locations
tgaccaccgcacgtgcatagacccataaacggaacctgtcttttgctaaagatgcgatntttaacatcacatgtcttgatttgcccacccgtcttctgcgttaattcttttagaaattagccatttcgcttcctgtgtacgaggggtgttctatgatgctttaacgattctttatttccatgttttctgtgggtgttcctgatacttcgagctactttgattcgcatagaaccccaaacaacactaaagcattcattnttatctcaagaaaagcagcgatttctatcacanaggtgtgttgtctttgaagctctttcaaagcttaatttcttgttggccattgtgggggtgtcctcatccttctactac

SEQ ID NO: 196889 - DNA, 416 bp, Glycine max
  unsure (1)..(416): unsure at all n locations
ctatatatatgactctntcaactaagtcaaacccattaaaaaagtgattaatttaattaatcacattaaatttatcaattattatactgttcttccaaaattattcttcatttctctccccttagttgtttttcaccaaggaaaaattattgtttggagagaaaatacactaattaaagatactataggataataataattaatgtactagacttttagaagagaatcttataaaggagagaatcaatgaaataaaaaagatcttgtatagaaagacagaggtagtactttgtatccctcagttacttttatccatttaaatangaattgtctaattgaaagctatggaaacatgtatgtatgatatggaattaagactcatgctgcaatgtaacaagtacgtatcataacatctg

SEQ ID NO: 196890 - DNA, 447 bp, Glycine max
  unsure (1)..(447): unsure at all n locations
agctngcctgtccgatgcagcagtaatgatggtccgggttatgttggggaacggttacgaacccggaatgagtttaggcaaagacaacggcggcataactagcctgataaatgccaaaggaaatcgtgggaaatatggtttaggctataaacccactcaggcggatataaagagaagcatcgcggggagaaagagcggtggtcaaagctcgcggttgagacaagaaagtgaaggaggcccgccctgccacataagtagaagctttataagcgcgggtctgggagacgaaggtcaagtggtcgcgatatacgaagatgatgttccgagtacattggatttggtacgaccatgccctcctgatttccagttgggaaattggcgagtggaggaacaccccggcatttacgcaacgagcataatgtaaacctttacgggtttaaaagctct

SEQ ID NO: 196891 - DNA, 379 bp, Glycine max
gctcctgagtatgacagtcaccgctttatgagcgctgtacaccatcagcgcttcgaggccatcaagggatggtcgtttctccgggagcgacgcgtccagctcatagacgatgagtatactgatttcccggaggagatatggcgccggcggtggacatcactggttactcccatggccaagttcgatccataaatagccctcgaattttatgccaatgcttggccaatagatgatggcatgcgtgacatgatgtcctatgtaaggggtcagtggatcccgttcgatgcagatgctatctgacagctcctgtgatatccgttagtgctggaaatggccaagagtgcgagtatggccagaggatgaacacgtctgatgggtt

SEQ ID NO: 196892 - DNA, 468 bp, Glycine max
  unsure (1)..(468): unsure at all n locations
agctngtttgtgaatatgtacaaattcatttcatagganaaataacgtaatgaaacataaatctcagaaatatttctgtaatttattctagatatttttttaacaaattatgtttatgtaagactttcatccttataaaatatgttttttttttcatttaggctcttttaaaatctttttatctactttcaaaagaaaaatctttttagcttttgattttagtcttgacttgacattaagttcattctcctaataatgttataaaattgtgatttttctatataaataataaatgtctcgtattgaaaaaaatgcattttagtttcttttattatttaggtaaatatcatacttatttataatatctggtagtgaaactatcacttaataagaaatcttgatatcatggattaaaataaataagtaaataaatctgattagacacaatttttttgaaaataaataaaa

SEQ ID NO: 196893 - DNA, 454 bp, Glycine max
gcactttacctggtcactgtattcactacaaattgtactatactgtagccaaatcgagtatttttgaaccgttttaaagttactagggacctaaaaaccatgaagtatgtttctaagtatagtagcgcgtggggatgtcccagcttgtgactcaaccatttacgggtcgcgcaaacaatggtacgattttgctcacccttggtctgatctcgacactcgcgtgcgaaggcttccctcgattggcgaataatgttctatgaactgtttcgtatgtgtgtgttagttcgctcagtcacttgaactggcagttgtttttttattattatactactagttctgctactgcatattcctgcctaagaactaagaagactttcttatataagttaggttaaattatgaatcgtagtttgtaattatctatggtttaggatttaacttgattctgtgagtt

SEQ ID NO: 196894 - DNA, 455 bp, Glycine max
  unsure (1)..(455): unsure at all n locations
agcttcacccttcgagccaaactttttccttacttatcttcttntaacttctcatcctctagccttcaccacttctctcgcacctctatttcccatctccttccttcctttttcgattccagntgctagtcattataggatctccattggagctcatgcttccaagaagatataacatatgtcaacctatatctaaacatgcaatccaacttcatataaatgttttcataaaattagtaaatactcaacaaaatatcatggtggattattcgtacttccattatgatggttcgcttatcctctacgaccaccaaaatgggtagtgagtcatataccacctacatcttcctcactacctcctctctttgatgatcagaaacttatggcgtatgtggtatgtttaagggtgtcatcattggtagggtacatcatgccaatgcataagcttaacgtca

SEQ ID NO: 196895 - DNA, 450 bp, Glycine max
tgtccttggttatacatgattgatacatgatttatgacttgtaggattcaatttgggaaaaattggatgagggcaagtgtgatttcgaaaatctgcactttatgcagaattttgctgtcaaatatgtgcagcagaattttggctttgtgcagaaaatgttgtgtatttgttggttctggaaagagtagtacagattgggttctggacgttttcttgcagatcccaacggtcacaatgtagacttatgtgctagagactttcagaaaaattttcaagtcgatccaacggttaacgaattggaacgaggagaatgttactagggtttttaagtgagaaaagctgtgatattggtttgtgttgggcagagttttctgcctctgccctggtttccttggttttgatagttcatgatgtttgagatgttgaatcgcttggatgttgtcgaaactt

SEQ ID NO: 196896 - DNA, 325 bp, Glycine max
actgtgactgatatcaagggttctttatgttggccgatgcccgagtttgtgcacagcacgatatatggtaggtcttaaaaatgccttgcaaaaagggagtagggcacgtttgttatgtcatacttgatttacatataacgttccatatggaaggttgaattatggatatatctgaatttgcagcgcagcgtctttgattgatggtgggcttggttggataccgctggaaatatgtcatttactgaaggacacttgtggatctcggatccccgcatagcacgtgaaatatctgtggaatataaactgtttatgtcttattagctct

SEQ ID NO: 196897 - DNA, 470 bp, Glycine max
  unsure (1)..(470): unsure at all n locations
agcttcaagaaaaggccaaacaaaatctgttttcaggcttaaataggtggctttgttcgtgctcgtgtgcttagcgtgattctgaaccgcttagcgcgcatttgtgaattttggcttagcgcatggttttctcactcagcggatagactgaagcggtgcgcttagcgagatgacccttcgctcagcgaatatgcacagctcatccttcttccagattcttcctcgcactcagccgagatgtgttgcactcagcggatggctcgctaagccagaagattggcttaacgagagggtgaaaatcagcacttcaaaacttgcctaattaacctgaaattgagagaaaaatgattattaaacacacaaaatggaagtactaagtatttattacctatctttagcaaaaagtaattacaacactacaaaatacccataaatnggaggagtttgatacaatttacaccaagtttata

SEQ ID NO: 196898 - DNA, 440 bp, Glycine max
  unsure (1)..(440): unsure at all n locations
gctctgttatgctcttccaaatctttttgtaacctangatctctatcagacagtatgctaaatggcataccatgtaacctgaaaatctcactaatatacaaggagatcaaattctccaaggaaaaactgatattaatgggaataaagtgagcagtcttggtcaacctgtcaacaataacccagatagaatcaaaacctttgggggttctaggtagtcctacgacaaaatccatggaaatattgtcccatttccactggggtatctccaagggttgtaacttcccggaaggtctctagtgttctatcttatccttctgacagactaaacatgcatacataaactcactaacctctatcttcatgttggaccactaatacatcatcttcaaatcctgatacatcttggtagcaccaagatgtatgctcaangtactcctatg

SEQ ID NO: 196899 - DNA, 414 bp, Glycine max
agcttgaaggcaaactggatgcattggttttcttggtaacccagctggccttgaatcagaaatctgtacctgtcgcaagggtttgtggtttgtgctcctctgctgaccaccatacagacctttgcccttccatgcagcaacctggagcaattgagcagcctgaagcttatgctgcaaatatttacaatagacctactcaacctcagcagcaaaatcaaccacagcagaacaattatgacctctccagcaacagatacaaccctggatggaggaatcacgctaatctcagatggtccagccctcagcaacaacaacagcagcctgctccttccttccaaaatgctgctggcccaagcagaccatacattcctccaccaatccaacaacaacaacaaccccagaaacaaccaacca

SEQ ID NO: 196900 - DNA, 428 bp, Glycine max
ctaagcttactgtaatgcatcacatctaaaactgagttcgatggtagtatgagctttcgacggtagttggcgggaggtgatgggggaaattgacatccccattcaaatatgcccccacacttgcaatgtggttttccaagtgatggacataaatcccgcctacagctgccttttggggagtccatggatccatgcgctatgggtggtcccctcgacgcttcaccagaaactgaaattcacagttggtggattcttggtgatagtgtcaggcgaagaagatatgttggtaagctgcccctcctcgacaccatatgtagaggcagcggaggaatcattggaaacaactttccaatctttcgagggtggtaagtgtgcctccgtggaaacaagcccattgctaccttgtttctctaatgcatccctgatgg

SEQ ID NO: 196901 - DNA, 440 bp, Glycine max
  unsure (1)..(440): unsure at all n locations
agctngaattaggatacaatccaaaaggtctacttatgttttataaaaatttctttgtatcatctaaaatgactatctctccattcctaacatgtgtttactatggaaagaaatgtcatagtgtatcaacctgttacactagaaagaatagaaatacaataggaaaaatgatatgggttccaaggggaacattgcccaaatctaacattcaaggacccaaggaaanttgggtacctaaatcaaaattgtgatattgaattgaaggatcctttgaagcaaagttggtacattgataatggatgttctaagcacatgactggagatgaatcataatttacacacattactcccaagaatagtggacatgtgacatattgacacaacaataaaggaaaaatctttggagttggtaatgtcggtaaagatccctctaccttaat

SEQ ID NO: 196902 - DNA, 442 bp, Glycine max
cttctcatagtagaacactggttacgtgtctactatcattggtatcatctccctctccattgttgggggcactacttgagctgccaaatccctccatatttgggcgtattctttgaaagattcatgctccctcttacacatattgtgtagctgcattctatccggagccatattatgaatgtactgatactgcctaatgaaggcaaccattatgtctttctatgaatggacccgcgaaggttccatattagtataccatgtgacgactgccccagtaagactttcctgaaagaaatgcatcgaataattttcatcttttgtgtatgcccacattttcctacagtacatctttaagtgattcttggggcaagtagtcccctcgtacttatcgaaatccagcaccttgaacttcggatgaatgaccacgtctggcactatgcac

SEQ ID NO: 196903 - DNA, 467 bp, Glycine max
acctcagagtcacctgaggcatgcagcttccagataggcagtataatacatcactgcttgattctcgatagaacgcagttgcaaaacatgtgtaagcaggagcacgattctttcaaggagtacacccataggtggagggatttggcaatccaagtatcacctcccatgatggagagggagatgattgtataagcaagcttcatgatgatgaatcaagttaattcaagtcgtttagatgatgaaaaagatgatgacaaaaagcccaaagaatgatttcaagattgagtcaacatgttcaagatcaagtttaatttcaagcttcatatgaagaaatcaagaagattcaagaataaagagaagtttgatttcaagaatcaagataagatgaattcaagattcaagagaagaagtcaagaagacttcacaagggaagttttgaaaagattttcaaataacacacatagcac

SEQ ID NO: 196904 - DNA, 254 bp, Glycine max
  unsure (1)..(254): unsure at all n locations
agctctgatggtgttgagaataaaacacatttttgncttcatcacaaagggggagacagcgaatgtatgttacatgattttgatgccgtcaaaagaagaatctaacacggctcattttgcttaaagatattacagtattgtttcaacaaacaaagccttgattcaagatatcttcaagatcaagccttgcctcacaatgaatggtttcacgcattcaaggcgcacgtaatccattaccatttcatgtgttcgat

SEQ ID NO: 196905 - DNA, 383 bp, Glycine max
  unsure (1)..(383): unsure at all n locations
atgcaccctgcaagaccttactatgtctctcttagtgtgcactatcctcactcattgtcctttcactactacaagcaaagttatcctctgagagataatgagtgcaatgtgcaaatcttggtaaaacatcttggatagtgggttngacttctttgtgtccatggtcatctacttggacatctttgacactttcgcggaaaagctcttacaatttcttttcctttctggggatgtttccgccatagaaccaggaattctactcctataaagggttccacaagtgtggtgaattggtgtggcccctcgatatggtgtaaagtctgcataatatgaaatagacaatgcatctgtacgcggttggggagattaatgataatatttga

SEQ ID NO: 196906 - DNA, 298 bp, Glycine max
aagcgcctgcagctgcagctgctatcgtgagtatagatttctttaagcccaagaatcggacaattgaggattatgtacctgggccactgactgagaggaaagagctctctgatttacgactgtacaccacctttatgcttgactgcggagtcggttaaccatactgcacccatgagctgaatgggtataatgtcactattaagaaaagttacctgtttatcaaaaacaacctgatgagatctattattatcactacagcaactaatacgaccgctggcggtggaatctcgctgttctc

SEQ ID NO: 196907 - DNA, 378 bp, Glycine max
ctctaaacaaatctacaagattggttgaaagatgatgtacaactcaaatacatgatcttcttacaaacaaatatatgactcgatattgattaatattatctctcacggcatacaacgtgtgttgagagcttagaatctttacctagatgtacagaaagctttaccacaaaaaatgaggtaattgatttgtgtcttgtgtcttgagagcttcttctatatatcattcatctccaagtatctgttgtctcataacaatttgattttttgctctaatctatcattgaagacatgagttagatggtgcaatgtatgctagcattaaatgcacatacattcttcatgcatgttccatactaatatgatagcgtgccttaaagt

SEQ ID NO: 196908 - DNA, 466 bp, Glycine max
  unsure (1)..(466): unsure at all n locations
agcttaaggtatatcgtctagagactattgcttttaatgaatgaaattttgttcaatatgatagcttagttaacttctgttttttctccggtctttatataggcatcaaaatgagaacaattgtgtgaactgacttgcaaaagagggagatatatctaatgctcttttctatctttggaacatctatcgacaagctcttatacacaagctacttgtcgataaaaataaataaattataaacatgattattacaattaactcaaaaatatatattaaatggtgattaatgaaaaaaaatcaataattaagatttttttaggattaaaaaaagcagaggtactctatataataaaaacaaaccataggaatgattatcataatntactctaggcataccttgtgttagatttagttaatattgttcttctctttgtgtgttatctcccattaattaaaaacatggaac

SEQ ID NO: 196909 - DNA, 473 bp, Glycine max
tgacttgacccatgtttccttctagtgtgagtgtctatgttatgttctaacatcctaaaaacattatttgcgcgataaattagtatactaaagtaagcctttaaggtgtgtcgttagggtataataatcttcatcagctaagagaccaagagacattcgagagaagagcttatagaaacaagggttagacaattttctcagactttgtgcaggagtttgccctaattcatgtaattgatttcttttttccaaatgtaagttattcgtaattctattgtatattttaaatgtgtgggacttaaaaacagtctcaagaaaaattataataatttacttatattgttcaacctattcagttagactctcttaatattcatgattgtattgttaattctatgcttatatgaagttggcaattacacttgacttattaaacatttataatgtaaattatacttataattgcatttgat

SEQ ID NO: 196910 - DNA, 430 bp, Glycine max
tactaatctgacacacccaggaaaaactactgcattctttgttatgtgccagagaagttgctgggtgctgcaattcttgagatgacatgcactttaccatataatatagcttgtatcataagcttgcctctacttttctctgatgtttagcttttctaaggaaatatatactattatcttctgtaactgtttgccacccaatatgttcaatttaagtagacaaaaagattcaagagttaagtctcttatatttttgcctagtggtgaccatgaaaactgaaatgacccattatgatatcacattgcattgacatgttttctggtacacgtctagtagtaattggttaagtgcatgttgcttaattgtctaaatcatatgggatgttcaatgataatctgtaactcttccatgtgatttataataaaatgc

SEQ ID NO: 196911 - DNA, 440 bp, Glycine max
  unsure (1)..(440): unsure at all n locations
agcttgntgtttatagctagacaaccttttatctccattatcnncanttaaccttcattctttttcattccttgcttgctctcttttcctattcctcttttataccttttttagatatttatcatttgtacatttcctctctcttctttctttttttgtctctttttctctctgaaaaagtcgggcggacaagggcacacactacctactcacgtttaaccacaaggtgaacgagaaacgcacaaaaatggttggtcgtaatatggcgacgatataaatgagagccatatcgccgaagatttctaacagaaacgagcaataatgatagttatgttagtaaccatatgaacaacatagaaaatagtaatgtcagcaacaacatgggcaataacagaaaacgtttatagcaaactaatatataaacagatttgctaataatg

SEQ ID NO: 196912 - DNA, 438 bp, Glycine max
tgccacccatctcgcccaggcgagcagggttgcttccttctaatctttgccttctggaggaatcttctatagggcccaagtgggcctggttgctatttgcacccccatttttactaagtacaccccctacactttttggtgattctttcgtcgtaaagttacggaaacttacgaatttcgtaatgatacttgttttctttccataatgttacggaaccttgtggattacataatcatcccctttttgacttacggaatgttacggaacctcactaattgtgcaacgatgcttccatttgatatccggtgtgtcacggatccttacggattgtgcatcaatattttcttttgttttccggcacatcaccgaatctcacatattgcctaatgatgggtgccaagcacctcacatggaccaaacaaaagtcgcatgtcatc

SEQ ID NO: 196913 - DNA, 454 bp, Glycine max
  unsure (1)..(454): unsure at all n locations
ggatccttaagtcacctgaggcatcaagcttatatttttacaagcgaatgatgattgattggaaagcatatggngaaactccaaaggtaatgtaaagttatgtttcaaaatttggagtggggttatagcgtctccaacatatatgagctcaaaaggtaggccaaaaataaaatagtgtacaaagatctcatgtgacctaaagttgtattatatggggtcttagttgtggggttcttttccaaagagctagttccttaggttgcatacttgtggcacctaaatccatatatagccatttttcttatctcacggatatatattccgcgttgctttatgtgatcattgaggtatttcctagccttcaacatttaatcgcaataattaacagcaattcggctaattgctacgtaggactcaagctcccacagatcgccctactatatcacatgacaac

SEQ ID NO: 196914 - DNA, 402 bp, Glycine max
  unsure (1)..(402): unsure at all n locations
cattcggacatataaaactaagcttgcgcatcaataccgacgaggaggtgttacttcctgattngccgaaacaaatgaacaaaatatgattcattaatattataaacatgtctgaacaaataaacatgaaaaaaggttaaacaaaaaaaattatgcctaaaagtaatatattgagaagtgtcaatactaatagtatcaatactcagaatccgagtattagccatatttaaagataagacaaataattctaaacaaaattgatgggatttgatcgactcacgtctggtttgatgagatctataaatgtaaactcatgatccaatctatatatgaatgattatgattggtgtgattcgattttgatcattaaatacataacctatctcaaactgttcagatcga

SEQ ID NO: 196915 - DNA, 315 bp, Glycine max
cttcggcctatatctcagctgctgccgagcgactaatgttccggccgaccaatcccctatggagcttacattactggcgcgttacactgtgacggaaaccgcgtcccacttatcgcttgccacatcccttcgcactgggtatacgaaagccgcccgatcgccttcaacagtgccccgatgggaagggccgagcgatttctcttaccattggcgattacaccgatatgggcactctagacaatctgttgagcgatattaccagccaaccgcaaccgtgaccaccctggggcttgactactcgtacgttgcctcaat

SEQ ID NO: 196916 - DNA, 471 bp, Glycine max
  unsure (1)..(471): unsure at all n locations
agctntgcttctacactngccaggaacattttgccagaaagaaatgtcaagttgtatatcactaagtttgatgatttcagaagagaattgattagaagaaactgtcataaacaactgaccaacttgactaagggaagcattgatgtggcaattgttaaagaattctatgcaaacctatatgtccctaaggacaaagaaccaaagcaagttagggttcgagggcacctgataaaatttgatgccgattccctcaacacctttttggacactccagtggtcatggagcaaggtgagagcttgccctcttactctaggtttgctagattgaggcctgatccatagaagcttgcagcccgactgtgtatccctgggaagggatttgtactttatgtcgaaggtctgccatggaagctcttgaggaaagatcttaccactctagcccaaacctggagtgttctatcttattctaac

SEQ ID NO: 196917 - DNA, 463 bp, Glycine max
acctctgtttctctacctttcatcacaaaccctgttggttgagtgacaaaaacttcttcttctagtgagccattaagaaatgcagattttacatccatttggtgtacttcccagcaattgaagctagccattgctattacaagtttcactgtttccaacctatcaacaggggcaaatacttcatcataaaccagaccttgcttttgcaaaaatccctttgcaaccagtctggctttgaactttgttacttctcctctaggattcaacttagttttgtagacccattttactgctatggctttctttcctattagtagctgtgtgagactccatgtcttgtttctctcaatagacctcaactcttcttccattgcttcaacccaatgtgagtgcttcaaagcttcttccacgccaatatgttccatctcatcaagtaaggccatatggacaaagtcaccatcaa

SEQ ID NO: 196918 - DNA, 474 bp, Glycine max
  unsure (1)..(474): unsure at all n locations
agctntgatcattaaaaggcgatgtctgtaatgcatttctagttttatgttctttgcaggtgtattatgctgtaaagtggtattttcttttatatttcatattcaacttcatgtgtttaacttgtgttgttatattaaaaattactgttttcaaccttcaatttttatttttttttggtttttgaaatctttgaaagtttggttaactacatgtctttgatcttgcaacctttccagcacctttagctcacacgacattctttgtcattctgaaccttttggtggatgacaagtatgtctttgcaatctcaccagcacctatggtttgccaacactttatcttccaaccaagcagtgatcaatattggtctttcgtttgagtctctaaaatttgaaaaaggcacctaagtntgtaaatgcaatcacgcatatacanttctacacatttatgacatcaaataggatattttacat

SEQ ID NO: 196919 - DNA, 461 bp, Glycine max
  unsure (1)..(461): unsure at all n locations
ttttaaattgtaatcctacactttgttttgagaagaagcttcaaatagcagaattagaagaaatgtgcctcaatgcttatacttcttccaagcattataaggagaaaacaaaggcatatcatgacaaatagctagtgtagagagatttcaaggaaggacaacaagttttgttgttgaattcaaggttgaggctctttccangtaaactaaagtcgaaatggtcaggctcatttgtagtcaagggagtgaagccttatagaagaatagaaattgaaggctcctccactcaaagaagttgggttgtgaatggtcataggctaaaaccatatcttggtggagaaatttagaggatggctacaattcttcatttggaggaacactgatccttctcatccgtcaagctagtgacgttaaataagtgcttatgggatgcaacccactcttctcattcctcttctttt

SEQ ID NO: 196920 - DNA, 344 bp, Glycine max
atgtcatgatgcttcaaatgctcaaactatggcttccgatgggactgtctcaccttccatggatgaacctgccagtattgactccattctgcagctgttccaaaagcatacacttagtttaatctattgtgaaaccttgtacataaaaagtgacgttttatggcaataggcttgattctttcttactcagcaaaggataagctagtaatattaaacttcacataactccaatcttgactagtgttttcgttaatacaagcagctaacaaatcagttactagaattatcatacccaatacgctcatcacagctttttgatgatatggtagactgagctccactat

SEQ ID NO: 196921 - DNA, 465 bp, Glycine max
  unsure (1)..(465): unsure at all n locations
agctnttcgatncatgctatgtacccgtagtggtccatttttgttacgagcattcttattctcgttatgtttactttttataccccctgttgacgtgcttaagccattttacttaagacatttctcgcttaacttaaaaataaaataaatttccaccgaacgtttgaattatattatccgctaacttcggttaaaatcaattccgaccgttcggtcgtgccgtaaccacgttggaaatcaaaaagaggtaaaaaataatataataatcaaaaaatatcttttttagtaaaataaagcggagaatcaatcggacgttttctctttgggatttctcattcttaatcgaattgattaataactaaagtgaaactaaaggctaaaatcaattcgcctagtcaagctcggccacaatnataggcttttgagagttgtcatttcaatttctcactaagtaagatggatcat

SEQ ID NO: 196922 - DNA, 350 bp, Glycine max
gatgatgatctcagactcgttgtaaagatgttcaacaaatctctaagaaacaaaggacatcagagatgagcaaatttcatatcagagaacagagtggaagattcatgctctcttccaaaatgttatgaatgcgagcaaccaggacatctaatagttgcttgccctagtttcaagaaaattatagagagatctgaaaagaaaactttctatgataagaaagcaaacaaagcctacattacttaagaagacaatgatatggactcatctgaagattaaaaaatgaagttgtaaacctgagtctgatggccaagaattatgaaagcgatgaagaggtgacatcttctgacaac

SEQ ID NO: 196923 - DNA, 272 bp, Glycine max
  unsure (1)..(272): unsure at all n locations
cccagacctatcgttcaaccctnnannntagaagaatgagctctccgcaccaacacgggcgacggccaaacaaaccctaataagaacagaccccaaaagcaaagcaccagccccaacccaaacggggcacccccggaaaaaaagggagaggacacacacacgccaaaacccagaacacccagggcagagcccccaaccgaaacgcaccacggaccagggacccaagcgagcacaaccgaaaagagaccaacaacccccagggcccaaaacca

SEQ ID NO: 196924 - DNA, 418 bp, Glycine max
gcccgagtcattcatccgtatgagatgctgttatgtattgtctatcagaattgccattccttggattataaggttgaaccaatctcatgcctttacaaaaatgttcatcaagtcaagttgaaatatggaagtaaccgtcttgcaaaattgtggcaaaagatgaattgagtcacatcactgcttcgtctactgccaaacatatctaagattattgatgtccttgttacttccagtttcaccttgacaaagatgtcatggaccatgttgaaaatctaaattgattcaaccccatatcttgcgtaaaaattcgcaatacttctactgtcatcattcgcatgcatccatgctcttcattggttgcattgctcgttgcattctttccttgaaaaataaaattaaatgaacttaatcattggta

SEQ ID NO: 196925 - DNA, 461 bp, Glycine max
  unsure (1)..(461): unsure at all n locations
gcctgcggcatgcaagcatcataagaggagatgggagttatgttatctcaaantcctacaaaatacacgttgtttttcgttattacgttacgttgaatattcaataatatacaagcctctctgctgctatagcgctatactaacctcaactgtcgtgttccatcttcataatgcttattgttgtggtctttacatttttcacaagctttaattaaaaatatcctcgaatttacatccgtatcgatatctttatatatcaccgaaatttataataataaagaacttctaatatgatagattatattatcattgaaattcaaagaggcaatattttgtaatttgtatcacttgcatcctaaacgtataatagatagtgtaaatctcgacacacatttagtttaataatggaactattttttacacaactaccgaaatcaatcttagacttagagtaaagatat

SEQ ID NO: 196926 - DNA, 318 bp, Glycine max
tccaatgctccgttataaacaaaatgcgcatgtctgatatctcattattggagctgaaaaatgatatctatatggcttcattcctccttgtcataccgtaattacatccggtgacgatcatttgcaatcatttggattcttgccagccgagttgatttgcttaacaccaattgtcggacaatctgtcatgttttttaacgttgcagaaaagactgaggaaaatacccaaaaatgagggctcatcggtcattttgggactttttagacccctgtctacccatgctatcctctgactcgactgtgccactataagactta

SEQ ID NO: 196927 - DNA, 464 bp, Glycine max
  unsure (1)..(464): unsure at all n locations
agcttatgcgcatatttccttacgatcgttcgcttgcacaagacattcttttaactaagaaaaatgcacccatatacaatcaaggcagcttcgttacctagattatttacatgtacttccaaagcgtatttgttacttacatcacacacatctccttggctaaatttacatacatgcatactcaaagcattttggggtaccaaaaattgcacatgtgcacatcttggtatttctaatacctatacatacacaaacttcatgatgaatattgactatctacacaataaagtgctactattcatgctcttctcaagtttttgctacctaaagccgcatgcaaattcaagtatattttcctttgctgactaaaattgtattaagaggtatatattctttttgtagtgcaacatatttatatatantttntttgtgagaacatttgactaccaagaatatacgtcata

SEQ ID NO: 196928 - DNA, 470 bp, Glycine max
tcgggctgctcaattgctccaggttgctgcatggtttggcaaatgtctgtatggtggtcagcagaagagcacaaaccgcagacccttgcgacaggtacagatttttggttcaaggccaactgggttaccaagttaaccaatgcgtccagtttgccttcaagcttcttagtttcagatgatgcaactgagtttgtagctacctcatgcactcctctaatgactatcgcatcatttctggcactaaactgctaggagttggaagccatcttctcaattaaatttctggcttcagcatgagtcatgtctccaagggctccaccactggcagcatctatcatacttctctccatattactgagtccttcataaaaatattggagaagaagccgctccgaaatctgatggtgagagcaactggcacataattttttacatctctcccaatactcatacaagctctctccactgag

SEQ ID NO: 196929 - DNA, 269 bp, Glycine max
  unsure (1)..(269): unsure at all n locations
atcttttataaagaaaacagatgatgaacaatnttgaggtacagtatcacgcaaacaaagattaccattcacgatccgatggcacatccatgccttgcacagtaggttgggcatgactcaagatatgataggacctcttatgaatgacatgcgcttgatataaatggccggtaagactcccttagcgacattgaaaaagagatctgatccagcggcatcgctcagaatgtgtgacaaccataggttgccatgatggcgaaaaaaacaat

SEQ ID NO: 196930 - DNA, 455 bp, Glycine max
  unsure (1)..(455): unsure at all n locations
agctntagccttaggtggtgccatgttgttcttttgctactccctctatctctaaaaaccatcgtatatttccttttacatgtctaaccgccatattgagttatgaatgacaattatgaaaaggtttgatcctatcaaacaaagatgcaaaatatctacttattccaggaaacaagatcaagatcaacaatgattatattatttaatactgaagacactttccttaattatgagactctctatattagacatcaacgatttgaagaaatctgatgaacaagtgtagaaaagaaaaagtcgcgaatcatgaaatgaaagaaaagaataacaatcgtagagaaacacactaacctttagagagtctatcctttgttatatacaaagttttcattgaagattaagaactgtatgcatatcactattgagtgttgaagtattccgatctaaaacaactt

SEQ ID NO: 196931 - DNA, 387 bp, Glycine max
aattacaaagagcggccgtctctttcttttcaccacacgagcattagacctgccactacatagcaaccctggatggaggaatcaccctaacctcagatggttcagccctcagcatcaaacacagcagcctgatccttccgtccaaaaagactgcggcccaagaagaccatacattccgacaccaatgcaacatcagcggcatccccagatacagccaacagatgatgcctgtccacaagcttcgctcgaagaacttgtgaggcaaatgactatgcagaacatgcagattgggcaagagaccacagcctccattcaaagctgagccaatcagatgggacaattagctactcaattgaatcaacaacgagtccataattctgacaagct

SEQ ID NO: 196932 - DNA, 306 bp, Glycine max
  unsure (1)..(306): unsure at all n locations
ngcacacattttacattatatataaatactgcctgtattcgtacgtgctggcatgtactggctattcatggaatctatgttgaactaaaaaaacatgtgtgtattattgttatatatatcagccatcttattaattacatccttcggtaatatcttgttactaaacatcagggcattagactcttatgagacgatatcgatatccattgactaactcaacgaacttacactgtagatatatatacagaataatttgtgatagaccttctaatattgatgacatgcacttatcgctttgatcggctt

SEQ ID NO: 196933 - DNA, 448 bp, Glycine max
  unsure (1)..(448): unsure at all n locations
agctngtagagctatgtcgatgctttgttaacctgtgaggatcaccaagcgcaaagcttgggtttgacgagtcttatgttcagcacatgtgttgtgctcttgcatacttggcacttttggataagtggcctcaataacttaagagagggggtgaattaagttcaaaaatttccaactaatagattttaatcccctctttaaatgaaatatggtcgatttataatgcagaagaaaaagcagcaatcaatttaattgatgttctttaaaagttcaagacaaaatcaattgcaataaaataaatgagataagagaagagagaattgtaaactcgatttatacttgtttggccacttcctgtgcttacgtccagtcctgaagcaactcacttgagattatcactatctttgtaaactctttataacttctgaccacctaaggattccactcc

SEQ ID NO: 196934 - DNA, 454 bp, Glycine max
  unsure (1)..(454): unsure at all n locations
taagttggatgacaaatgatgggatgctagttntatatgaaatcctttagactataatagtgcaatggaagatttcataatagcattggacgataactttntattggcgcattggacgttgagcttttataaaaactgtggacgcatcactntggatgcttcattaaaaagataactttagggtgtctgagatagaaagtttatacctatttcttcattggacacaaattcgatctgcaaatctcaataaacttcatcagttcatcgaagttcaataacatttgttatcataaaaataagatattttaagggcttaacatagtctttggttccaacacatgttggaatatatgttccaaaaagatattctaaaatgattttggttctcttgaattgtaaaaaaacactcttatgcagtaaatctataaaattataacactatataatagaatat

SEQ ID NO: 196935 - DNA, 432 bp, Glycine max
  unsure (1)..(432): unsure at all n locations
agcttagagccaattcaaacgacattatttttttactcggatgtctgattgagtcccgtcatatatcgagacgctcgaaatttaatgttgaagctcttagccatttcaaacgacaataactttttactcgaatgtctgattgagtcctgtaatataacgagatgctcgaaattgaatgttgaagctctgagccaattcaaacgacaataactttttacacggatgtctgattgagtcccgtcatatattgagacgctcgaaattgaatgttgaatctctgagccaatccaaacgacaataactntttactcgaatgtctgattgagtcccgtaatataacgagacgctcagaattgaatgttgaagctctgagccaattcaaacgacaataactttttacacggatgtctgattgagtcccggtatatatcg

SEQ ID NO: 196936 - DNA, 430 bp, Glycine max
tcaacattcaatttcgagcgtctcgatatatgacaggtcttctccagacatccgagtaaaaagttattgtcgtttgaattggctcagagcttcaactttcaatttcgagcgtctagatatatgacaggactcaatcagacatccgagtaaaaagttattgtcgtttgaatttgctcagagcttcaacattcaatttcgagcgtctcgttatattacgggactcaatcagacatccgagtaaaatgttattgtcgtttgaattggctcagagattcaacattcaatttcgagcgtctcgatatacgacgggactcaatcagacatccgagtaaaaagttattgtcgttggaattggctcagagacttcaacattcaattcgagcgtctcgatatatgacaggactcaatcagacatccgaggtaaaagata

SEQ ID NO: 196937 - DNA, 433 bp, Glycine max
agcttctgaacaattattatgataaaatgtttgtgatttgcttggatcggtattcctgcatgttctgtgagcccatattttatacttttgatgttgcgggcttcttttccctgtgcaataaattcagaagtcaacttaggactgcaaatttcactataagtttgctgagtgaatttggtaaatgtctttgagatgtaaacatgggttaaaaggattgaaattctctaaatgaaaaagatcaacaaattaaaatcttgattgtgaggaagagcgtaggactacatttctaattttacaaaaagggtggattcatcaaaatcttaagaacaatggattaaggctaaatcttcccatgctcttcgtgattattatcaaggattctgctttatctctctaattgaatatttgaatagcaatgtgtttattatttttg

SEQ ID NO: 196938 - DNA, 455 bp, Glycine max
  unsure (1)..(455): unsure at all n locations
tatctcttttctgtgcacaatatattgggacctcctttctcaattattatgatttctatttttgcagtattggtcaattcatgggctctgaatcatggcattcaaatattgatgttcctgtaagtgttttcttatatatgtttcagctagcaatgcattttcagtttgcatgtttcttagtggtcctttcgtgttctcaggaagacattcttgctctctcaagcgaatgttcggataatttcaggtatgcgtangttgtggctgattgctttaggtcatctgttttcttctaattgaataaatctttctgccaatacttttatgccattcttgagttaattggttntggctttgctagttgtgaaaatgctccattttgtttcttctctattcaggaaaatgggatctccacaaggtgtgaaattgttgcctccagcctggatgattctataaaa

SEQ ID NO: 196939 - DNA, 483 bp, Glycine max
  unsure (1)..(483): unsure at all n locations
atccttaagtcacctgcggcatgcaagcttctatataagctgaaccattttatctatttatacaagttgagttttattcagaaaattagagtttatctcttttattttagtgagagtgattctcctaaattattaagtgattcaagaacaccctggctgtatcaaaggacttttacaacctttgtgtgttgccctcgccggaaagagtgattatttccttcctttcatcttcaaccttgttctttcaaaccacaattccagaaaatccacttctgcccagaattatctcgtggtcataactcccgttttacgcgctcaaattaagtgattcttgagcctaaattgaatttcaagacgagacctttcacctcgttttggaatcacctcatttggagccctgtagcttgagtctttgccatttctatatttctgtctagccaccacttaacctacgttntctcatctcattattccactttatgc

SEQ ID NO: 196940 - DNA, 428 bp, Glycine max
  unsure (1)..(428): unsure at all n locations
ggacacttaatactaagcttaaaattaaattcnatttctaaagttgtacattttttttaaactcctttagccaaacctgtgcagcatcaattaaggaattctttataagatctgtcacaacctaccctttggcgggatggcgacgcgtgactcgcgggatgcgtgttccacgaatggaatacgcgcggagtcgccaccaacgtttatttgaggaaaacgtcggataaaccaaataagacgcgatctacgaacttttaagtgaaaggctcgggagttgtatttacgcacggtgaatgtattatcaccccacacgtccgtcacaatggacggcagcctttaatcgaatgtgcaaacatgactttgatttttacattcccgtttatgtctntatatcacttatacaccttttatatattttttctctcttt

SEQ ID NO: 196941 - DNA, 432 bp, Glycine max
  unsure (1)..(432): unsure at all n locations
agcttataaaaacaaaatagcgctaaacttttttcatttttcatgngaaagaagaagcatcaactagaatcaatccaaggctattgtgcaagcaatcaatggggcaaaacacaccaaatgattatgatgatggatggttcaaattctcacaaaggtaaactcatcactttcaaattgagctctcaaaactatcatgacatgttgaggagaatcaaggatttcaagtcacaaaatgtctataacttttatttacaaaacaattacccattttttgaacatatcctatatttcaaagaaaaacatgcaaagttgtacatgcacacataattgacccacaatattaaactagaaatcctacgaaactaacatcattatctaattaactcatctaacaaattaacaaatcgcaccaaactaacaaaaaccaaagaa

SEQ ID NO: 196942 - DNA, 454 bp, Glycine max
  unsure (1)..(454): unsure at all n locations
agcttatcaaagccgcgctcttgtttaatgttatgtngctttcttggagtcaacagcaatggctctgtcatacaaagccaaagcctcttcaaatcttccctgcttgtacgcttcattccccatggacttcaacacctcagggtccactctgctgttcctcagactccgaaattgcccaagctcatcgctgttcttcctcatgatgttccccatcatgcctttgttagtactattactgttgtaagaacaggaaccggacaaagagttcaactctttgctctttgtgacactagttcttgggctgctattcacaagcaaattcccagtgattggaaacacaaattctttggccggngatttcgtcccgtaattttgatgatgactggtactagtacttatcctggcaagttccagagagttaacaacagggtgatctttctgttgttggctactc

SEQ ID NO: 196943 - DNA, 465 bp, Glycine max
  unsure (1)..(465): unsure at all n locations
tgcatgatcagaatgganggggatcacatgttcttttttgcctcatcatcaaaagagaggggtgtgaaagataaattaaaataatatttgtaaaaagtattaaaatgttatataaataatataattcttttatcatcaccctgctaagtagctaattactgcatgcatatcacaaaagaccaaaatattatgaagtgaccatagactatatgatccgtaattaattatcacattatgagtaatcaaaggttattaattgttttaaaattaaaaaatttaaatacgtgccaaataaatattgattggtactatagatatttttctagagacggcataattttccatctggaatttgctgactgttgctttccatcatggactctctttgtttttttaattgacgccttgacgagtcataaataagccatcttcttcaatgtatagtaatacatagcttcaattatt

SEQ ID NO: 196944 - DNA, 397 bp, Glycine max
  unsure (1)..(397): unsure at all n locations
agctnttggatctcaagtattaacattattcctgttgaaaaagaagaggactagtattggaacctgacctgcaaggtcagcatgcgagaaattcagggttaacttgttcaacttgttaaatccaaaaggaatgataaaattgaagttgatatcaggaaaattcaatttctagagatgttggagggtgaaaagaacacttgaatcttgaaatccaccacagattgattctccattaaggtctaaaccagtgacatgttccttcatatcataggacacccatatccacccacaacaatcatgactatggtgtactttctaagaaaaaagtgaatattgtcttgagcttgagcagcaaagacctctgatcatctagacaaaggccagaaaccacatgatg

SEQ ID NO: 196945 - DNA, 449 bp, Glycine max
  unsure (1)..(449): unsure at all n locations
ntgcaaccggaatgttgggaagatatcaaagtattcctttaatggaacattggaaagctgcaaagaaagttctgagatacttacagggaacaaaagaccacatgcttacatataagaggtctgatcacctagaggtgattggatattcagactcatactttgctggatgtgtggatacaagaaaatccactcttggctttgtatttctcttatccggaggagcaatatcatggaagagtgcaaaacaatcagttgttgctgcatccaccatggaagctgaatttgtagcatgttttgaggctacaattcatgctaattggctgcggaactttatttcanggcttggaattgtcgacagtattgctaggccgctgataatgtattgtgataactccgcatcagtattcttttctaataacgacaagtactctacgggtgctaagcatatg

SEQ ID NO: 196946 - DNA, 387 bp, Glycine max
agcttgaaggtgtgtaacccaccattttcctttttataatactggtaatgtgtctactatcattgtcatcattttttcttcattgaggtcccacttgagctgccaggtttctccacctttgggcgtatcctttgaaagatctgtgccttctttttgcacatgttctgtagttgcatcctatccgaaaccatatcaaaactgtactgatactgcctaatgaaggcaatcattatgtccttccaagagtggactcgagaaggttccaggttagtgtaccaggtaacagctaccctagtaagattttcttggaaggaatgtatcagcagttcctcatcttttgcgcatgcctccatcttccgatgatacatctttatatggttcttgggg

SEQ ID NO: 196947 - DNA, 345 bp, Glycine max
tatagctgaacaactagtgtgtcatcattttgtcatactttcttaacaccatattgccaacattttaattattgattagccttaatcgcacaatgagttatgcatttttatcatttgggcctaccggatcaatctcatgtatttaacttaatctctagagaatgataaagcattggactggaatcaataatcgtgcttgcacttgatgagaggaatcaattttattctaccacatcttatcttatctagatttctcatctggatatcatttgatctagagcttatgttatcatatgtagatcttatctgatctagatatcatattatctaagggttatcttatgt

SEQ ID NO: 196948 - DNA, 465 bp, Glycine max
  unsure (1)..(465): unsure at all n locations
agctntgagccaaaatcctaactcttcatataccttgccctcaaaagaaaacaaaaaaaggaggagaaaaagaaaagaagagaaaaggagaaaaggagaattcccgatcaaaagaatcggaagaaagcaaaaaaggaaagaaaattcccaatcaaagatcgggagaaaacagaagaaatatacagaaaggtctttggaccaaacgacatctgaacaaatacagagttatcaccaaagtaaatatagaaagaaaggaaaccacgacctaaagtggtcccctccctttgattgccaaccaaaatcccgtgcgtcggtgacttgttcgcctcgcgctaaacaaaaacagaaaagataaaggccaaaaacactcaaagccaaattttccaccaagataaaccccattcccaagaaaaaatcctaatgatccatgatcacgcatgtagatcttgatttgataggaaatga

SEQ ID NO: 196949 - DNA, 450 bp, Glycine max
  unsure (1)..(450): unsure at all n locations
taaataggtgagttggtccgtgctcgggcgcttatcgcatatttgagtcgcttagcgcgcataattagattntggcttatcgcgcttctctcgcttagtggatgagctgaagcggtgcgcttgatgacttggagcggtgcgctcatcaaacctgatagctcatcttcttctagattcttcctcgcgcttatccactgagtgtcgcgctttgtgaattctcactaagccagcagattggcttatcgagaatgtcgaaacaacactttttccaacttggctaattaacctgaaattgagagaaattgattatgaaacacacaaaacaaaagtataaatgatctattacctatatttaatagaaagtacttataatattataaaacaactataaattggagaagtttgaacaatatacacaagttgtatacacaaaagtaggcgtattcatcg

SEQ ID NO: 196950 - DNA, 435 bp, Glycine max
  unsure (1)..(435): unsure at all n locations
tctatagttatggaataatcgattatcttatgtggtaattgattagntcgatacacgaagaactcctaaagtttcctaacacaatataaatgattactaaatgtggtaatcaattatctggaaccacaacgacttccttctgttggaactagcttatgtaatcggttactaaaaatggtaatcaattaatttgatgattcttatcaaatttcaagagaagtgagttttgttgcttgttctaacactttgtaattaattaccaaacttggtaatcaattacactatgttgaattcattgcttctaagaaactgtgagattaatacatttatcttatcatgttggattcctactaaacctatatgataaaactaagtctaaaacacttgacatgcctagtctaaaaacatttgatagatatgtcacatctgtaaaaa

SEQ ID NO: 196951 - DNA, 471 bp, Glycine max
  unsure (1)..(471): unsure at all n locations
agcttctatagaaggttcgttcctaatttctctacaattgcatcacctctcaatgagctggtgaagaagaatgtggcatttacctgnggtgaaaaacaagagcaagcctttgctttgctcaaagaaaagcttactaaggcacctgttctagctcttcctgacttttttaaaacttttgagctagaatgtgatgcctctagagtgggagttggagatgtattgttacaaggtgggcaccctattgcttattttagtgaaaaacttcatggtgccaccctcaactaccccacctatgataaagagctttatgccttaataagagccttccaaacttgggaacattaccttgtttccaagagatttgtcattcatagtgatcatcactcacttaagtacattagagggcaaagcangttaaacaagaggcatgcaaaatgggtagagtacctagagcactttccatatgttatc

SEQ ID NO: 196952 - DNA, 448 bp, Glycine max
cttggaaagtgctattgttcaccttctcgctaatccaatatgctggcttagcgagcgtctgctatgcgcaacattcagtggctaagcgcgaggaagaatctagaagaagatgagctgtacaggttcattaagcataccgctccaggtcatcaagcgcaccgcttcatctcatccgctaagcaagagaagcgcgctaagccaaaaatcactaacgtgtgctaagtggtccataagtgcgctaagcgcacgagcacgaacaaggctacctatttaagctcgaaatcagaatttgtgaaggtagtttggactatgattcagagctttgcatgtctagggtttctagagagaaaaaggtccaagttccagagagttttgagagatttttccgtgtgaagatctatatagaccaaagcttgtagcaagagccagtttgagagcttgagatgag

SEQ ID NO: 196953 - DNA, 458 bp, Glycine max
  unsure (1)..(458): unsure at all n locations
agcnttgcataatgagaatctgcccttattcatgctttgcaattngncatctgaagtgtgagagctctgggcagataaatctgctaaagctggaagtggggctaaagtagaagatgcagggatgccaactattggtgcaaaggaagagggaacattanatgctctgagcttggtcttccttgcctctggaaaattaactgtttggtcattcatattccaatagttccttatgatataagctaagtcaatgaccagccttaggttttcataggaggtaagagcatcagatccaactcccctcgatctacacaaggctgtgattaaagctgggaagcctaagcgagaagagttagactgagccatcatagtcatttgtccagagatcaaactaccaatgttcatgtccatccttgtgattaagccatagaccaacctatctctatctgtgttcaaatctg

SEQ ID NO: 196954 - DNA, 432 bp, Glycine max
  unsure (1)..(432): unsure at all n locations
tgattggtacatgattagggacttgtatganttcaattgggaaanattggatgagggaaagagtggttttcgaaatctgcactgtatgcaagaatttgctgttgaaatgtgcagcagaattttgcataagtggcagaaaaatgctatgtatttgctggttgtagaaagagtagtacagaattagtgctggatggttgctagtatatcccaacggtcaaaatgtagacttatgtactatagacttccagtaaaattttcgagtcgatccaacggttaacgaattggaacgaaggaaatgttactggagtctttaagtgagaaaaagttgtgatttttgtntgagttttgggcagagtattttgccttttgcctcgtttgcttggttggttaattngtgatgttttggatgttgaactacctggatgttgggga

SEQ ID NO: 196955 - DNA, 479 bp, Glycine max
  unsure (1)..(479): unsure at all n locations
agctntgatctcattgttttaatagatttcttttaacccgtctgacgttcaaattaacatcaattatgtacacatttgggcttcaacataccaaaacaaaaccatcactcaataaacccatttatgcgtgcagttaattgatcacgttttttctgttttaattcactgtaaagagagaaaagcgtagctgcaggtaaaggaaaacacttttcaaattcttttagaaaaatgaatcgatcaatcccatcctttaaattcttttagtgccacatgcacagaggtgagtggggtcaaactatctttgcaagtaattacaagttaacaatagcataaacaatacaaattctccaacttaacagaccaaattcttctttaattattcatgtacacattacattgcgcaatacacccccaagcaaacactaaagcattagaatcctttattttatcggttgaatcacgtgctgcaacatattcaa

SEQ ID NO: 196956 - DNA, 417 bp, Glycine max
  unsure (1)..(417): unsure at all n locations
agcatctgacttgcctatttctgaccaaagacactgataaatganaattgtcccttaactgcgccttctgaataagatttgtggaaggaatgtctagagcagacatgatggcatctaaagttgtggttgtagcagttgctgtcataacaagcacagaacgaacattaagtgtcttatgaagcagagatgctctaagtctcataaaagatggtcggaaattgtgagacctgtaaaaatgttcaaaatttcaagatcaaccagataagcagattaaatcaccataagacattgggattccctcaccattcatatatacaatgtgcttcatcaataacaacaagtgagatggctggcaaagaaaaaatagtagacagaaactcctcattcagaaaccgctctggtgaaacaaaaagcacc

SEQ ID NO: 196957 - DNA, 482 bp, Glycine max
  unsure (1)..(482): unsure at all n locations
gcgacctcttagtcacctgaggcatgcaagcttgatagagctatcatcacatgacgtctttattggcncacaacangttagcttcataagcatcttgagatcttaataaaaacacttgtgtagctgccaactaatttgtctatgggtcaacctacacactcttctattttggaatttacaggttgcaccatatgtggagaggctcatgaaataggccaatgtattcccactgaagaaaacactcaagaaattcattatatgggaaatcaacaacaacaagggtatactcacggaggattttcacgctctcagcaggtgtcctattatcaacaaggataatggaggacacaccctggctaccagttcaacaaagaccagagttggccttaaataggccaatccatatagacctacacttttaaaggactcccatgagaggtgacctgatctcattatgcgagtacaatgtcaatcataaaccc

SEQ ID NO: 196958 - DNA, 362 bp, Glycine max
actaaccgctcgaattcttttggtgtctactctactcccttttccaaaataacaaaggactaaccgcttgaattcttatgaggctcccttctcctttgtcaaagaattcaaaacgacatatgttgagaatgcgtgtgattctctcctttcccatatacataagattaaaagggactgactgcctgagaattcttttgtatgcccattcacaaagtttcataggtggaaccgcctgagaactctgtcttaacacatgtgagaggacactccttgtggtcaagtggagggacatctacttgtgtttgctgagaacatagagacacatctcttgtgatcagtctatggagggacatcactcagtg

SEQ ID NO: 196959 - DNA, 433 bp, Glycine max
  unsure (1)..(433): unsure at all n locations
ttaagtcacctgcggcagcaagctncacaccctgagagtgcctgcctggaacttcaactaaaaacttattgataaacttctgaaaacaactctatcaaaaatctataaaaataattgaaaagtgcatataggctactaaaataatcaaattagttaagcaatggaggacctcttctatacagagataatctataacaatctttcctacaaattgttgtgatttcttaatgttcccatgctggtgagatggaagttgacgacgccattcaaacctgaaacagcggaaaaaatgtctgtgacaccctctaccccagcatacgtacttatttaatatcatacttgaaaatgcgaaatctattaaaatgagtttattcacaaacataaggagctcacctgggtaaaggatccattcgcgtaatcaccaattataact

SEQ ID NO: 196960 - DNA, 446 bp, Glycine max
cacccagctcgcccatgcgagcagagggtgttttctctataagcaacagccttctggatgaatctctggatggcccaagtgtgcctggttgctatttgcacccccatttttactaaatacacccccctgcccttttttggtgattcttttttcgtaaagttacggaaacttacgaatttcgtaacgatacttgttttctttccgtaatgttacggaaccttgcggattacataatcatccactttttgacttacggaatgttacggaacctcactatttgtgcaacgatgcttccttgtaatgtccggtgtgtcacagaaccttacggattgtgcatcaatattttcttttgatttccggcacgtcacggaatttaccaaatttcctaatgatgggtgccaagcaccgtcataatgaccaaacacaaattgcatgccaccatgcaa

SEQ ID NO: 196961 - DNA, 447 bp, Glycine max
  unsure (1)..(447): unsure at all n locations
agctggtttggttaaatatgattttttcatgattcaggacttgtaggatccaatttgagcaaaattggatgtgggtaagatggatttcgaaatctgccaaattgtgcagcaaaaagctgtcaaatatgtgcaacagaatttttcaacatgtgcggaaaatgcttgtgcattgctggttatgggaaaggtagtacatattgggttctggacattntatagcagatcccaacggtcaaaatttagatttatgtactgggaacatccagtaaaactttcgagtcgatccaacggttaacgagtcagaacgaagagaatgttacatgggtatttgagtagggaaagctgtggtattgaaatgtgttttggccagagttttctgcctctgccctgttntcttggtttacggtagttcatgatagttggaattgaattgcttggatattatgg

SEQ ID NO: 196962 - DNA, 468 bp, Glycine max
  unsure (1)..(468): unsure at all n locations
tcattaagaagcttcctccagaagcttcctcgtggcttctttgataagctttctcaagaagcttctttgagaagctagatccttatctatccacacccctctattaactaaattaacttccttaaaaataattacggatgaaaataacgcaacaaataatcaaacatcaaacataattactaatattatacagatatatatatcagggtgttacaatagccacttatccaaaaagctgaccacgtgcttgaatcaattatcccttgcacctagtttgagctgaatgcattattgattgattgaaccctgagcctatacagtgttatctcctgctaccttgacttatgttgtatgagagcatcatccacaggaagcatggttcaaagcatatttgtcccaaatttgtgggagtaattatcaaggtaaatttgttccaaatttggggaggcactangtaagaattgaaat

SEQ ID NO: 196963 - DNA, 461 bp, Glycine max
  unsure (1)..(461): unsure at all n locations
ncaagcttggagacccattatgctcttttatttatgangacccanagggagctctattcaagctcgcacaatccaggtcagtcaattactacctcacgatgtttgagcgccaaattaatcaaattgtaggtcttgcaccgttcttcctattgagttattttttttctagcctcgccccaaatctccacaaagaagttcaggttatacaccgcaggcagccaaccttgccaagttgcaggaggacaagctcctcgactatcatcgtagatttaaaggtcccactacccattggacacccattgtcactcatcacttcaactctaaacaacaccacgctcctaactcataggtgcagttaaagtacctcacacccgaggaacttgcttcttgtaggagaaagggcttgctaccttgaatgagaaaagcgataatatcccattgcttcttcagcaaccttttat

SEQ ID NO: 196964 - DNA, 463 bp, Glycine max
  unsure (1)..(463): unsure at all n locations
ggtgagannatgaattcggaaacgaagaagctgtagcttcgcattctcttgagacgccattgatgatcgtcaccaagctctatataccataaaagagttcttaacagaagtgaagaagaagaagatgagatgaagagaataaaagagaaagaacttacagaatcagaaaatgttattatgattgggcaactgatctctgttacaaagagaagtatatatagagttctagaacagttgagttttactaactaaccttctaacaaagtcttaactaacattgacacttaactaatgtagtgactgtcataactaactaagaactaacatggtaacagtcatagttaagtgagtgtgcagctgaatactggaccttcctttctactactctaatactacacgaactctagaattgaacatagaattttgcagagaagtcatgggtcggatagattaaagctcatga

SEQ ID NO: 196965 - DNA, 442 bp, Glycine max
  unsure (1)..(442): unsure at all n locations
agctntagtgaagaaattcacccgtttgttgatctncatacacttgactatgaacctacacacaaacattcattttctttttgtaaaaaactctttataaatgtctatataactccgcaaaataacttgattatcttaagaaaaatgactaagggctaagattgtatattcgtttgtaagacaattaagagcccgtcattgtgcacacaaataacaaatgtgtttgatttatataaaggctaataaaattgtatattcatatgtaagaagattaaaacctagccattgtacaaacaaacaacaaattcatttgatttatgtagagtcaacaatggctntgtaggacaaaaatatcgagtggtagaaacaagccaatataactttggcttatgtactcctacttataacttcgaagttgatgtctttttatatctctattatt

SEQ ID NO: 196966 - DNA, 470 bp, Glycine max
  unsure (1)..(470): unsure at all n locations
gtggagcatgatagaagtgtgtcttcttacatgctcatgttcttgagtgacatctgtattgattattgcatcctagtatccatcttttcatatgtacattgtgcatcatcatgtataggtaagaagattgtttctaaagttagaaacttcttcggtgcataaaattctccaatttaatcgattacaaggttgaccgtcatcgattacataagtgtttgcagcttgcagagagattctagttntggtttaaccgattgctagttaacagtaatcgattatataattcaattgagaccatgtctgggtcttcatgagtttcatctttaatttagatactaaatgattgtgactgatttttcattcttaaaggtgttcctaaaagtgatcaagaacactttaatcgattacattaagaattctattcgattacatttgttcttaaaaattttgcagatgtcgttatgaacact

SEQ ID NO: 196967 - DNA, 454 bp, Glycine max
  unsure (1)..(454): unsure at all n locations
agcttcatggtgaatcaaaggtggattgttatgtttttgatgataacacaagatgatgacaaaggtgatgacaaaaagctcaaagatcaatcaaagaacaactcaagtgaatcaagaacacttgaagagtttccgataagaatcaagaagaatttcagactcaagaagaaaggttatagtcaagaatcatgatcaagattcctgactcaagattcaagaatcaagagaaggcttaatcaagataagtatgaacagtttttctcacaaattgagtagcacatgattgttctcagaacatgtttaccnacgagtttttactctctggtaatcgataccagattggtgtatcgattcnagtagcaaattgtttgaaacagtttaaattgaattcgacgtctattaattcaaaagctgaatcgatacaagttttggatcattccagtccttgacgttg

SEQ ID NO: 196968 - DNA, 478 bp, Glycine max
tcttttggaccttgaacaggcaactaactcctctttctttaccatgctatgtgctcgcgactggtccctttcctcccttcgcaacttgagttcattattgctaccccatagggctccgcgatatttgttccggccatactcttccttgcgagccctcttggtctctcgttcaagggctcttgcggtaattgcattctcttcccgtaacccggcacactccttccgaacgtgtgtagcagccaacttgaacttctccttggcgagttttgcctttcctaactcgcttttgagagcttggacttcctcgtcctcttccggtgcttcaaaattctcttcgctgacgactgttaacttggcgagccaatctaaacctcgtatgcgaactttcagccattcgtggtacccaccaatgatgccattacgaatgcctctaagctcttgatctttccttaacggagtttcccatgccttatggatc

SEQ ID NO: 196969 - DNA, 456 bp, Glycine max
  unsure (1)..(456): unsure at all n locations
agctagtaatttgtctaacattattttccacattnccatcatcattgattatgtgcttgattgcaacgttcagattatttgtcattttacccttatagaccttacctaaaattgaaatccattaataagaattcgttatgcatacagattcaatcaagcttggacaatttaaataaataagtggatgtcttcaattggttaggcaaggcaaagaaccaagattttaagtttttaactctaggaacacctatccaattccatgttatgctagtgtgatcctgtatctgcattgacagtaagtacctaaagtcacatgcgtcaataaactgattacatctttcacaatgccatgtcccatctgcgttattagtcacctttttgttacattgtctatcccctatctgagagggcaccctgngtaacagaagttatcaaccttaatggtgaaacaactac

SEQ ID NO: 196970 - DNA, 453 bp, Glycine max
tcagggtgctcattgactccagattgctgcatttaatgacaaagatctgaatggtgatctgcagaagaacatagaccacagactcttgcaacaggtgtagatttctgattcatggcaagctgggttactatgttgaccaaggcattaagttttccttcaagctttttattttcagtagatgaagatgaatctgtggccacctcattgactcctctaaggacaatagcatcatttcttgcattgaattattgggagttggaagccatcttctcaattaaatttctggcttcagcaagggtcatgtctccaatggctccaccattggcaacatctatcatacttctctccatgttactgagtccttcataaaaatattggaggagaagctgctcagaaatctggtagtgaggacaactggcacatagtttcttgaatctcacccagtattcatat

SEQ ID NO: 196971 - DNA, 476 bp, Glycine max
agcttctgcttatgtggcagggcgggctttcttcactttcttgtctcaaccgcgagctttgaccactgctcttccttcccgcgatgcttctcttcatatccgcctgagtgggcttatagcctaaaccatacttcccacgatttcctttggcatttatcaggctagttatgtcgtcgttgtctttgcccaaacccattccgggttcgtaaccattccccaacataactcgggccatcattactgctgcatcggacaggcaaggctacccagaaaaggaatccacagaggaaatgcttaccacctcgaaagactggaaagcggtttctaatgactcctctgcggcctccacataaggcatagaggatgggcaactcaccaagatgtcttcctcgcctgacacgatgaccaaatgcccttccactacgaatttcaactttgggtggagagtagagggaacaactcccactgagtggatc

SEQ ID NO: 196972 - DNA, 395 bp, Glycine max
tgcttctacaaagggttgtcccatgtgtttctatacttgtatcaccacttattgagttggtgagaaaccatgttccttcatgggaagatgcccagtaaatgggatgtcagaccttaccttacttcaacataccaaacaccactaatacatatgtttttgttctttttacaggtgttgagggaaggagcccatattatgaagaacctcaagaattgaggtcaaatcctttccaaggtggagggaatgatgcaatcctaccccgcaagggcattggatataatactccaagtatattgggccagagatccaatggaatgcccaagggttctcattagccttatggtagatttcgagcccatgggctaagtatgagcccgcttatacttgtaaatatt

SEQ ID NO: 196973 - DNA, 480 bp, Glycine max
  unsure (1)..(480): unsure at all n locations
agctngaaggtagaagaagatgaatggtgtgatatttatagaaggagcacgaaattntgtgcctcaaatgaggtctgaactttgaagtgtaattctcaaatgatcaaagttgaaaaaatcacacacatggcctctatttatagcctaagtgtcacacaaaattggagaaaaatttgaatttctattcaaatttcacttgaatttgtggagccaaaatttcactaattacaattagtgaattttagctatgtttcatcctactaatacaagatcaagtccaagattcttcactaactatgcttaggtgtcatgagggatgtaaagcatgaaggacatgcacaaagtgtaactatatgatgtggcaatgaggtgtagcaagcaaatgctcacctccccctctaaaatttaattggattgggcttctcccaattcaattataattatttctcaacacacacattaaatattcacttaatgcat

SEQ ID NO: 196974 - DNA, 356 bp, Glycine max
  unsure (1)..(356): unsure at all n locations
actaagcttgggcagataatgctaggttgaattcttggcatgtcatatggatgccattcgatacaagttgtgtttctatataggacatangcaaagcgtcggtgctcatggctggtgatgtccctattgagctgcgtacattgtccgggtttgggtccgatctgcaacttgacaacctcttcgatgggctgtgggcctctatgataactgcaaaatttgagttaatttgatagtcaattttggctaagaatgattgtaatttctttactttattgttctttttagtgaaataataaagaaattaatatcttttcagtttttatcaacataagtcaaaagaagaagatctcaagtgc

SEQ ID NO: 196975 - DNA, 449 bp, Glycine max
agcttgaatgctctattcaatggagttgtcatattatcttcagactgatcaacacatgcacagtggccaaggatgcatgggagatcctgaaaaccactcatgaaggaacctccaaagtgaagatgtccagattgcaactattggctacaaaattcgaaaatctgaagatgaaggaggaagagtgtattcatgacttccacatgaacattcttgaaattgccaatgcttgcactgccttgggagaaagaatgacagatgaaaagctggtgagaaagatcctcagatctttgcctaagagatttgacatgaaagtcactgcaatagaggaggcccaagacatttgcaacatgagagtagatgaactcattggttcccttcaaacctttgagctaggactctcggatagggctgaaaagaagagcaagaacttggcgttcgtgtccaatgat

SEQ ID NO: 196976 - DNA, 442 bp, Glycine max
  unsure (1)..(442): unsure at all n locations
gctagacatgatacatgtcagggcttggtttgtgttcaatgataaaaggatgccccacattatttccatgacacaaatgcaaaaatgatgatttggaaactttatgcaaaactggtcatgcatgcacctatgcgaacaactcaatgtcaaatttttatggtcatgtgatgctaaggctcatgattcattttcctctattttaaatcaacccaatgtttccaaaatatgctcttttatccattggtgcattcatccgagtccattttgggcgtccggggaatatttcacagcattcacccttcatgtgtatacacatttttaaaaactagttatgatcagtgaattgtttcaaagaaaagttggaagtcatctcttttcaatagcatgctggcttttcagcttgacaacntatatttcttttttctctcttttcactttttat

SEQ ID NO: 196977 - DNA, 260 bp, Glycine max
acctgacatcccaaacaaacacaagcaaaacgtaacgaagacaatgcacaggtcgatgtgagaacacctcacccactcaagtgtatcacacaaacacggcacttctataaggaaacactcttgccttttaccactcgaattccactcgaagtgcataggcaatccaagagattatggccacaacatagaacaaggcaccaatatgtggcaggtaaggccagagagacaaggaaaaggttaaccaagacaaaggcggacaa

SEQ ID NO: 196978 - DNA, 466 bp, Glycine max
  unsure (1)..(466): unsure at all n locations
agctncacattctgtatctgtggcttactatattgnaacatcacaaggactaagaagttaatatatggtatcacaatgacataaagcgataagcatagcccttctatcttgcaaagaagttagtccacttctctactatcaaatgtttgaataaagtggccaccccacaaaatggtttgatcttttgactttgaacagtataaccatgaatttatattgactagaaacgttaaaatgtgtgtcgtaatgtatgagttgggctaaaaaaaaataagaaaaaattaatcgaacttaataattctatggaatttccaccataagttaacttaggttatatattattattaataaattatttaaaataatatgttatattctaaatatatgaataaattatactaataatgtgtcagtttaaatactcttcaacataaaaccaaattaattaggccaaataacctcgctg

SEQ ID NO: 196979 - DNA, 465 bp, Glycine max
  unsure (1)..(465): unsure at all n locations
acactataaaactcagcttaatgtccacanattcataaggtgaaatgttttttttcacaacaaaagagttaagaagaatttgtttataattaattgcaagagaacataaccaaacggatcatgagactcataatgactgccaattcatttgtgagtggagttaaaaaatgtagattcccaactcaagtatggtgtttctgtttaatgtgtttaagttgccagttgttttaataagttatcctagagaacctattaaaataacctgtaaacagtcattttcacaaattatctctatatcgtacgataagctaaaataaattgtaaataagttcttccgaatacaccctaagtccgtaactgagaaagaaaaagaaaactgtcaaaaacataacagatgatatctacacttaatatatagatataggcattgcttggataaattctcagacattcaaaagtaaaatg

SEQ ID NO: 196980 - DNA, 426 bp, Glycine max
  unsure (1)..(426): unsure at all n locations
agcttgaccaaaagcaaagacagtctctctttctatgtttcaatgattcaaatagccaagcaaaggtgttgcttgcttctgtaaaagcatcttctgatggcattaacttaattggagcttcaagggtcatgcttcttgatgttgttaggaatccctcagtggaaaggcaagctatttgtcgagcatatagacttggacaaaagagggttgttttcacatatcatcttcttgcacagggcacccccgaatgcacaaagtattgtaaacaagcagaaaagaaccggttatctgaacttgttttctcaaatagaaatgctgaaagtgataagctcaagagtagtggagtaaggtttgaggatagagttcttgatctcatggttcancataaaaaactcaaggatatngttggtgaatgtctggttcaac

SEQ ID NO: 196981 - DNA, 453 bp, Glycine max
  unsure (1)..(453): unsure at all n locations
ttatctgctgctgttacatgcacaatattggctgttgcttgacctcaacgttcccgtgttcttgccactttgtacaatgtgaatgtttacacattaaacaatatacagattntataatcctgtttgcaaaggtcaaatctcataatatataatgtttgtgggcttggattaagatgagcggtgttcaaagttgaagatctatccaatactgcagaatgtatctccccctacccatccctcctctctcgtatggccttccacacggatcacataacatgaatctcttgaatatcangtgtatttggagagaattctcagatcaccagaaattgatgctgttgcagaagaattgaaaccacatcaggttattttagttatatggtatcttcatatattgtgaaataataatcagtatgcttcagctnttacttttcgaacagcaagctcttcttc

SEQ ID NO: 196982 - DNA, 51 bp, Glycine max
cattaacagcttttcatccgtagaatatgcccccatccctctacaatacat

SEQ ID NO: 196983 - DNA, 465 bp, Glycine max
  unsure (1)..(465): unsure at all n locations
ccgatcgtttaagctattatctcacctattgtatgataaaatgaatntcaactgatcatttgtgttgtaatgtcttttaatcactgttaaagcaaaatttaaccgattattcacactgtaaccttagttaaataaaaaaaaaggtaaaataataataaaataatcaaaatatcttaaaaaaataaaaaaataataaaaaaaaatcaatcggacgtttttctttgatagtttccttgaatgaattgactaataaccaaagtgaaactaaggctaaaattaactcacaaaccaagctttgttcgcaaaagtcacttaaaaccgttttaagttccaacgccttaaaacggtcctctgtgctgttatcgattaacatggactgttcaagagaataatatcaacacataactttactgctgtcgcaagaactacgtangtctgagtttctcatcgcanatcgatgatacg

SEQ ID NO: 196984 - DNA, 435 bp, Glycine max
  unsure (1)..(435): unsure at all n locations
agctttctccgtgaggtacgttggttaacttggngtatgctaagttttcgtgggtgttcatgttttattgatgataataataataatacgtcttcagttacagtattgctgattgaggtacgaggaaagcttcaagtttcatgccattttgttagatctcactgccatcgtcactgtttgggtttgaggtaagcttggtctctttttcatttgtagtatagtttactctttttcactgccattgtctctgtttcagagggtgctcactttttttcattgccactgccattgtcactgtgtgtaaaagtaatatagtttactaatttgtcctgtacttctttgttcaatgttgtaaatagcggttaggtatgaagtgactgattgggttagtgaaaattgattgggtagggtctgagcagaaagctggtccatcta

SEQ ID NO: 196985 - DNA, 471 bp, Glycine max
  unsure (1)..(471): unsure at all n locations
ctgtacggatgtaagagacatcttcttctaccttggtgattcttgactccatttcattgaatcgcatgtccacttgtaactccaaagtatcaaacctttcaccaacaaatgtttgaagaccatcgaacctatccaaaatcttttgaagaagagaggaatcttctccaccatgtaaatgtccttcttcatcaacgggtcgagcaccctttttcacccaagagccatcatgctctttttgataaccaaatgatgcatccacaacagtgcctattagaaaggatctcttgnatggaacataaggttcagaatcaagaaggatgttgaagtgttgaacgaagatggtgattangtgtggatatggcaattgaagcattaatcgataagccttatgcatgcgatatcgaactaagtgtgcctaatcaatttgtaggccgttatgaataagccacatatcaataagatcttctttat

SEQ ID NO: 196986 - DNA, 443 bp, Glycine max
  unsure (1)..(443): unsure at all n locations
tgtagttcccctgtgctcgaaagccagtgtatatcttatctgcaatcgctcttcgtcttctctctctcctcttggtgttctctctctccttccacgtcggcaacctccccgtggatccgccgccggtcatcgttccggcgtgacgaaacttgctccggcacctcttgttctactgctgggggtagaagaagtggaggatatttgtttttatgtgtgtgaggagaaggacttggtggattcaagtgatgaagaagaggatatagaaatgttgctgcctttntagattcttctgttctctctccctcccttgtcacactctcgtagttgtcacttcattaattctctttttcctttctttgttaagaaaaaagatattggactccagccaaatggatgatataataaagactgctgcttttttttttttgttcttccattctcta

SEQ ID NO: 196987 - DNA, 449 bp, Glycine max
  unsure (1)..(449): unsure at all n locations
agctttagtgataattcccaaggggggctantctctctnganggnnactagaggaatcatccctcttgaaaaaaaacatattgcgacagtatggactaccagcaacaatatgttatcaaagagaaaaactctagatgaggggtcactgttatcaagcaagtcggagacctagcatgaccacagattcgcctctttcaactcattgtgtggcaaatagtgttggtgtctgcgtgatcaaatgaataaatatttacctcatgcgtacattttataacacactanaagcatcaaaagagtttatttatgctatatcatatgagaataataagacatagtaatagatcacagaggtatgtcttagtaggaaagctcactgattgattggcctaactctataacaatagtccctatgggagtcccatactgtcacaacctacccttcatcggga

SEQ ID NO: 196988 - DNA, 463 bp, Glycine max
tcttccagattggtataccatgctacagctgctccggccaatctgtcttgaatgaaatggaccaacaactgtttgtgcggagaatacgcccacatttttcggcgatacatacgaagatgccctttcggacatgtcgtacctttgtacttatcaaagtacggtactttgaacttgggaggaatgacgatattgggtatgagacataagtgcgctagatccgagaatgggttattgccgaggccctcgactgctcttaacctctcttcaagcgcctcaatctttcccttatcttccacgataggaacagattctcttacgggtgtgggtgaagtcgggatatggcggactatgtgtggttggcgtaattcatggggggatggatctttgaggtggagcacgggaccgagatgggtatcttcttcctcattgtcttgcaccggatagtcgtcataaggtgggagct

SEQ ID NO: 196989 - DNA, 473 bp, Glycine max
  unsure (1)..(473): unsure at all n locations
agctngtatgagtactaggaaatattcattaattgtgtgcaagctgtcctcaccgccagatttctgagcaactccttcttcaatatttctatgagggacttagcaacatggagaggagtatgattgatgctgccagtggtggagttcttggtgatatgacccctactgaggctaggaatttgactgagaagatggcttccaactcccaataattcagtgcaagaaatgatgctattgttcttagaggagtccatgaggtggccacggattcatcttcatctactgaaaataaaaagcttgaaggaaaacttgatgccttggtcaacttagtaacttagcttgccatgaatcagaaatctacacctgttacgggagtcaatgagcaacctgaagcttatgctgcaaacatttataatagacctcctcagcaacaaaaccaacaacagcagaataattatgtcctttcaagcaat

SEQ ID NO: 196990 - DNA, 467 bp, Glycine max
  unsure (1)..(467): unsure at all n locations
tccatcatttctggtgcgggccgaaaagctcggatggttctggtcatattgatgagtattgggaggggttaattgaggttttggccaaacaagagtcgaggtcacgacatgagcatccccttctttcctctttgccccaatcggcccggaccttctgttgcttgtgttggcaagggcaacatagttgaacttcccccttttatgcctacctcaatcctctcacctatgaatactagatccgcaaagctagatggcatgtatcctactaacttctcgtagtagaacactgtgagtgtgtccactatcatggtgatcgtctccctttccatcatgggaggtgctacctgagccttcaaatccctccatctctgggcatactctttgaaaattcatgctcctttntgcacatgttctggagctgcattctatccggagccatatcagcattgtactgatacttcctaatg

SEQ ID NO: 196991 - DNA, 471 bp, Glycine max
  unsure (1)..(471): unsure at all n locations
agctttctccgcgaggaacgtaagtcaatttcttgtatgctaagtnancgtgcgagtggtttgacccgaattgggagtggcatcggataataaagaaaaggtttttgtttgcgattgtacaagctccgctgacgtgcgtgtgttgctgggttctcttcatcaaggtaacactaacttctatacttcatttgacctattttattttttctgggtagtaataagtaatgttgcatgacttttagtaacgtgttattctgtttgcactataacagagaatcaaccatgatttctgtacacagatccacagggttgttgaaatttcctgcaattgctntaacattttactgtccaacagagggggcttcactattgttgtataacatatatcttgtttcttgagcaacgtatgcttatatatatatattgttttacccaatggatttaaggaactgggttcttgctctctttcta

SEQ ID NO: 196992 - DNA, 461 bp, Glycine max
  unsure (1)..(461): unsure at all n locations
tctaagctttatttcggtatctttatttctcttatcctatccttttttatctntatcatcttttaatttaaatattttatttttatctttaaatctttatcttatctaatatatttctttatctgctattttaaaagaaaagcttaaagtgaaatagagaaaattaaatctaatataattaggtcaaggtcacacaaatcaaatctaatgcgggctgcgggtaacccgcggactccgcgggtcatacctgcatattcccaagttaagtgggacggacaaaaaatatgacattatcatatacgtttaatagccgtaacctacgctgaccgctgaccctgcgggccaatccatggacctggtctatttacccacctctaacaataaatggtataatattatgtactttgtaaaaaatatcattgtcattaatgcttctctttcttttaaatgcatgttaatat

SEQ ID NO: 196993 - DNA, 478 bp, Glycine max
  unsure (1)..(478): unsure at all n locations
agcttatgcacggaaaatgtaattatgattttttgatgcccgaagaaacaccatttcctagttaaccatgcattaggtaccatgttcaattattttgttttgttgttgtgtgcattnttttttagaattgggtttatgatcccaacatggttggctcatggtgcctaacacatgcaactaagaatgtagtgtgaagtttcacgcttcccccttttttgtttttgttttgtagaggaaaacgcaaggatgagcaaacatgaaaacaaatggtatgcaattttgcagatcaaaaagtttgttgaacgcatatgcatgatgatgccatgactcatgcaaaatgtgaggctggaatatgataacggacaaatgcaggatatgtccattatgatgttatgaagagatgcttatgcgatgcatgatatgaatgcattntacggacacgagagcccggaaaatttctnttttacttgacattggg

SEQ ID NO: 196994 - DNA, 485 bp, Glycine max
  unsure (1)..(485): unsure at all n locations
tactaagctttggttcagagctactgttgaatatggttaggaagaatacactctgtccaaaatggatcatggtcacttgatgatttcctgtgagtccatagaaatctccgagttttgtccatccagccagtatagttgggttcaccagatctttgttgcatataacatagtgcatgctgtcattactatctaacagatgccatgtatcttctagttaatccttccatcttacagcataggacctacttacttcaccataaggctacatttaaagtaaactaatataagcaatactgatgtgttatatcatgtcatgtttatttgagaatagtcttgaaattcctaacctgatccttaatatgaatggtgttgaatatttcctctggttntttgtaatcttcatcattgtcatagccatttcattccaatattgttttgtatcttcattcatcattggtggtacattgtatgttaagtggatatat

SEQ ID NO: 196995 - DNA, 246 bp, Glycine max
caactcgaaagagaatcattttcaggatttttttatgatggggataaattttttatttagtacaaactacttgatccagtaatttaaatgtgaaaataaatataaggtagtataacttaaagcacaaggttgtattttttcaagtactgatggcaattatagttgccaatcaaataatgtcagggacctaataccaccagctaaaaaaatgactcttatatcactttcctgcgtaaaaaaaccttc

SEQ ID NO: 196996 - DNA, 421 bp, Glycine max
  unsure (1)..(421): unsure at all n locations
actaagcttgatacatgattcggattttatgatcctcatatctttgttgtggngaaacataaactttctcttcaatgtatccatttatgaaaaaactttcgacatccatttggtataacttgaaattcataacataagcataagcaagttgcaatctaaaaacttctaatctatctacctgtgcataggtttcaccaaagtctatatcctcttgttggttatagtccttggctactagctttgctttattcctagtgatcaatccatgttcaaccaatttatttttaaacacccatttagtgtcaatgttgtccatattggtagaataagctaccaattcacatacatcattccttgtaaattgatttaactcctcatgcatggacattatccaaaactcatctttaagtgtctcctctat

SEQ ID NO: 196997 - DNA, 318 bp, Glycine max
aagaaggttattgagtttataagctactcacgattcaacagatgtgacttggaccattgtagctacgttgttgcaacctacccttcggcgggagggcgacacatgactcgcgggatgcgtattccacgaaagggatacgcgcggagtctccaccaacgtttatttgaggaagacgtcagaaaaaccagatatgacgcgatctacgaacttttaagtgaaacgctcgcgagttgtatttatgcacggggatggtattaccaccccacacgaccgttacaagggacggtacgcttaatcgaatgtgcaacatgactttga

SEQ ID NO: 196998 - DNA, 438 bp, Glycine max
ctaagcttggtttgggcatagcaccccacctgacgttttattgtcttctgaccaccgcgacatatctccaggtaccactctgtggtcaacaataaaagcatgaagtttcacccttcaacacttcctcatctcatgcttgtaggattatggtgtacccatcacatgtggtactatgtggcggtcgggcgatggtgcacaacaagttttccacattcacaatgcgcgcattaatccaccatcccctgttgcccacctccaactgatctcacgttctcccacgtatcccatatcctcgtttgtctcaacaccgggtgcccatcaatcctaccaagctttcacaacatccaagcataacaacattcatacagctcaagctatcacatgtcagcgaaacagagcaaacgctgaaaactctgcttacacaccaaccataatcac

SEQ ID NO: 196999 - DNA, 463 bp, Glycine max
agcttgcagggtcacaacacctttactatatcttgatcatttgccaagtctgtttccactgattctactcctgcacatacaattattactacacataatttttttgggtgaatctacacaatattattagtatgactcgtattacgtagcaatgattgatttatcatttacggattatgaatgtcagtttttcgagtgttaaaagagtagggcatggaatgtattaatcattaagtatttctaacaaagttcagaaacttttccatgaagaagttatctttcaaaaagaatcctctattcatggaatcaatcaagggtggaagggaagggaagttatctttgaaatacctctaaccagaagagtgctattcacatgacaacccaacaaaccatagaggccatcaacccggagaaagggccaaaataaaatacaaggctaataactgctagtgaaagttgaaca

SEQ ID NO: 197000 - DNA, 462 bp, Glycine max
  unsure (1)..(462): unsure at all n locations
tcaccatntggaggtgtgtagccatatgtccactatgtcttgtgcacccacatactcaaacatgctccaaccttcagttcacagttccaacacttaaccaagtattaagaagatcatggttttttctcgtggagtttaaacagttgtgcaaacaattaaacattcttgaaatcaaatcatgattgaaagccaaaaacaaagaaattaaagaaaaatcttatattctatgatatttgtttcaaaattacctttatagctgttatctttttcttttgagtaatggacaaagattagggaatatttgcccttctcattaaggaagttcttttcattgatattttcatggcatccataaattatntgatctacaattgctgcatgttatttgtaggatcctttaaatgcaatggtgatattatgtgatgcanagcttcaagagctacttggatgtgaaagcatttc

SEQ ID NO: 197001 - DNA, 458 bp, Glycine max
  unsure (1)..(458): unsure at all n locations
agcttataaacaatatgatgacttgtaatttttgganaaggatcaatggaagaatattcatgtttgttcttggcagcaatatcatgagatttccaatctatacactactatttagtgtacgatgcatataagatgtggatagaaaatactgtttttgaaacatgacattcagtgttttctgttctcagactggtcagtctttatcatttttcttttcctgaactttcttacgattgacactgttttgatttactaatttttcttttcactctgtttcaagaaccttggctaatggcattactaggattccatgttgggttgctgcttgtaactatcatctctaggaagaagactaactttcaaatgttcttgttccttttgacatgtatgtggcattccatatctattttattgaatgaatgttttaatcgactatttaggcttatttaaaactgctc

SEQ ID NO: 197002 - DNA, 396 bp, Glycine max
tgtcagtgtcggaattctatctgacattcaaattttattcttaattatttagataaagatatctaaatatatattttaataaagaaaaagatagactaaattattttaatatattagaatgttatttttattttgaaaaaatgttaatatatataataatatattagattggttaaaaataattataattaaagataataaaaataataaataaaaaagattgattaaacaaatttcatattatgtatcattatcattcttttataaggataaataatttcttctcttaaaattagacacacataaattatttttttgatattaataggctgctcaatagaaaatgaaaaaattcttacgatgtcattctctggaattctcttatatttttcgata

SEQ ID NO: 197003 - DNA, 353 bp, Glycine max
  unsure (1)..(353): unsure at all n locations
agctntgtctgcaaaaatcacttgatgtctttttatggtccaacaccttaaacggtcacgaagaactacgtaggtctgagtttctcatcgcaattaaggatacgtaggagcaaaagctcctcttttgttgaccaccccaagagatcgttaattgtccaacgccttaacatttctctccttttcaaaaatcaaaagatcgtttaaaggtccaatgccttaaacgactttngttcggttaaaatatatcttgcgaaaaaagataaaaacaacttaaccaacgtttagttctcaaagaactacgtaggtntgatttcctcatcacaattgaggatacgtaggagcgagggaaacac

SEQ ID NO: 197004 - DNA, 435 bp, Glycine max
tgtgactcttggcaatttctttaacaaaaccagtcacttaattaagttatgacttttgaaagaatcttcagaaacaagtcacttgaagaattgtgacttttggaaatgtgtttttcgaaatcagtcactggtaatcgattaccattaaggtgtaattgattacacatcaacagatgtgactcttcattttgaattttgaaaatcttaacgttgtaaaacactggtaatcgattactacattctggtaatcgattaccagagaataaaactctgtggtaatgattgtgtgaaaacttcttgtgctactcaatgttgtgaaaaactgtttaatacttattttgattgagtcttctgttgattcttgaatcttgagtcttgaatcttgatcttgattattcttgaatcttgaatcttggaacttgattcttgaatctt

SEQ ID NO: 197005 - DNA, 418 bp, Glycine max
  unsure (1)..(418): unsure at all n locations
agctntcctattatcaaaattttatactggtttaccttgagagagcaaatgggattaaggaccctctttgaatcaaccctcataaaaattcttcaaatctaacaaattctacaaatttttcaatcctgtttgaaaatctacacattcttcttccacttatacaaatccaacaaatctttaatacccttaatttttttttataaaaaatgaaaaagtcacgtgatccttcgtattttaaacactttgattaagaaaattaaaaacatatatttatggtaaaaattataaaaaacataattttataccttctaataaaaatgttnttttattaattctttaatctatgtgatagtatgaggcgacattattttgacatagaatactaacaacaacctatcatgtaataaggaacccctat

SEQ ID NO: 197006 - DNA, 430 bp, Glycine max
  unsure (1)..(430): unsure at all n locations
taggatctccangaagtttaatagaatatatttcctatgtaccagatgaaaataaagaatgcattagaaaagatacacgagataaaacagtaaatgttagagttgaataataacctaataattcaaagcgggaatatgatatcccagactagcatggagagttctatttttaagaatgattgacaaagcattcaatctggctaaagaaaagaaaattggcaatgaaaataaaaagcaggacaaagaattcttggtatgaagtaaaaaagaataaactaattacataatttagaagtaagccaacaattatcaaagctccaagtacaaagtaagccaacaattaacaatatattaccacattaaaagcaatttattaataaaaaaagcctctttgatgaataacatataatattcaagaaaattacaaaaa

SEQ ID NO: 197007 - DNA, 473 bp, Glycine max
  unsure (1)..(473): unsure at all n locations
agcttgtccgcanaagtcacctattattttttaaggtccaacgccttaaatggtcctctttgctcttattggttaaaataaaccattaaaagcataaaaccaacacataactttacctcttttgcaagaactacgtaggtatgatttcctcattgcaattgaggatacgtaggagaaaaagtcctgcttttgttgaccaccccaagagatcgttaatggtccaacgccttaatgtttctctcctttcaaaaacaagacatcgttaatggtccaacgccttaacgtttctctcctttcaaaaccaaaagatcttttaatggtccaacgccttaaatgaccttttgttcggttaaaatatatcttgcgaaanaagataaaanaaaacttaaccaatgtttagttttgaaagaactacgtaggtctgatttcctcattgcaattgaggatacgtatgagcgagggaaacacccttg

SEQ ID NO: 197008 - DNA, 90 bp, Glycine max
tatacatttctaatatcacttcaatgctatcttatatgttgaaagtggacacgtcaactgaatcagatgcaactgctgctcttcaaaaac

SEQ ID NO: 197009 - DNA, 466 bp, Glycine max
  unsure (1)..(466): unsure at all n locations
agcttcaagaaaaatggcctcagcaaacttcttatttccagaaggaaattcaatcaatagacctccaatctttaatggagagggttaccactaccggaaaacccgaatgcaaatttttattgaggcaatagacttaaatatttgggaagccatagaaatagggccttatatacccaccacagtagaaagaattacaatagatggaagcacatcaagtgaaagcataacaatagaaaaacctagagataaatggtctaaagaggatagaagacgagtacaatacaatttaaaagccaaaaacataataacatctaccctgngaatggatgaatatttcagtgtttcaaattgtaagagtgctaaggaaatgtgggacactctacaattaatacatgaaggaactacagatgttaaaagatctaggataaacacattaactcatgaatatgaactatttatgatgaat

SEQ ID NO: 197010 - DNA, 464 bp, Glycine max
  unsure (1)..(464): unsure at all n locations
ctgcttctacaactnttactagtaagttaagaaagtaatttcattaatagaaacttaaccaaaagttaaagcgattattaaaagtacacagcggaaattaaagagtggtagggaagaagaagacaaacacaagatttatactggttcggccacataccatgcctacatccagtccccaagcaacctgtggttcttgagatttctttcaaccttgtaaaatcctttacaagccaaagatccacaagggatgtaccctcccttgttctctttgaaaaaacaagtggatgtaccctccagttgaactgatccacaagagatgtaccctctcttgttctcagtataacaatccccaagtatatgtaccctctacttgtaccacatatgatataccctccaatgtgttgggacaaagaattctcaggcggttatttctttgaatctttgaaggggaaacaaaaatatct

SEQ ID NO: 197011 - DNA, 472 bp, Glycine max
  unsure (1)..(472): unsure at all n locations
agctngntgttntctatatccacttgcattctgtttttacattgttcataattgtttctttgttcaattctttgtttgtcactttgccttttctggagtgtcaggtgagttccagtttcttggagaagctcttgttgactaccttttctagctttggtataagtaaacaagcaacatttttgtggaaatataaagtttatgctacagtttggtgcatttggctattaacgcatcttttaagtaaacaagctctttgaatgaagtaatgtcttagtcatttgatttccacttgatgtaacactttatgcttttgatcattttagagggactgggaacctctattgattnttcctcttttttctcccaggaggaaccctttgtctcctagctgtctgtaaaaatcttaatctttttctttttgtataaaanaaaatgccaaccagttaggctagaactgctacttccaaatctg

SEQ ID NO: 197012 - DNA, 441 bp, Glycine max
acatacaatggcttctgtgaatctgttttaaatcatcataaatatgtgcatgaacatcccataaacccttttggccaagaccatgtatcatatcttccattcgatctccactttgtacattaaccggctcaggttgagatgttgttgacacgtgtggcaattcaccatgccatatccaatttgtgtaactcgggctaaacccatcacatatcagatgtgatctaatgtcattcaacgactggcgtctaccattcacacatttaacacatgggtagaaatattttgcagctaaatctggtgcatgttgttcggcaaatgccaaaaactcttcaacccccttgtaaataatttcacttatgtgaggtgctgtaatccaacttcgatccatggtcattgttctataatactaggtacattatcctatatgcatgataatctcac

SEQ ID NO: 197013 - DNA, 483 bp, Glycine max
  unsure (1)..(483): unsure at all n locations
agcttctcatttgatctaacagagaaggttcattcttcctatttcactcaagtcacacccacggaactctggcacaagagacttggtcattgccatcttgaaagaatgctaaacatgaaaaaaaggacatgtcaaaaggtctaccaatactttctgatagtttgccaaactataatgcttgtcaatttggtaaacaaaatagaaaatcattccccaaattagcttggagaacctctcaaaagttgcagctaattcacactgatgtggcaggacctcagagaacaccatcactacaaggtagtctctactttattcttttcatagatgactttacaagaatgtgctggattttntttcttgaaattcaagcatgaagtggctgaagtatttgtgaagttcaagaaaatggtggaaactcaaagtgactgcaagattcaatgaaaatgggaaagagtttcatctacaaaatttaatcaattttgt

SEQ ID NO: 197014 - DNA, 255 bp, Glycine max
aaataggatagaagggatgataaaatgatagagatgaaggatccagatggtggctctcttacttgctcatagatgatcctaaaattgggttttcctctcttctattttataggaacactatttaccaccttcctatgccttgcattaccgtgccctaccgtgttcctatccttacttaacttatctcttgtaggtcatctcagacacctccctccggtaaatcaaatggcagtcaaagttggaattgactgctat

SEQ ID NO: 197015 - DNA, 401 bp, Glycine max
cctcgactattccaagagcagtgtattgttttttctacccacacagttccaacagcagtgtaggggtttcttcgacttttcttcgataggaggttcttggggttctaaccaacgtgttttgataatatcgatatgaatgtggggcaatgtgggtgtcgaccgagcggtttctggcagatttcacgtgggaggagaaagataatcgagagtgtagaagggttttcgaaagcgcgggttgtgaaatttcaagacgttttaacttattaacataacaacatcaacatcgtgtttttaaggataaccgatgttaggatgaatctgttaacatcggttgtctaaaaaccgatgttaacttcaacatggtaacatcgggttctcaaagaatcgatgttcaattcaac

SEQ ID NO: 197016 - DNA, 313 bp, Glycine max
gctctcaatccaattggacagttgttgagttagttgcaactcgcaacatgctcagctattgcactaattgtattctataaacaccttctctatataaaatcaatggatgatgatacagttcgtgatactctcttatctctgtaaattctctaaattttacatggtatctcatcacaaccatatatctgttagagcagatattataacatgcgcatgacgaacaatttaatgtatgacaggataagtgctgcattataaccttgcctatttgtgtagaatattcataagattccgcactcttttaagtcacgtg

SEQ ID NO: 197017 - DNA, 323 bp, Glycine max
ggagcacgaaatggaaggaataatagatcgctacaagtggtactctgagagttgtctaacaagactctcactcgtcatatgcacatcaagtgctacacatgctcctatttatatactaagtagcctccttgagatacggacttgagaaaacctccttgagaagcttctttgacaaaactcccttgagaatctagagcttatctacacacacgcatatcataactgatctcacctccttgagaagcgttcctaagaagattgctactgaagctagatcttagctacacatacctgtctatagctcatctcacctgcttgagatg

SEQ ID NO: 197018 - DNA, 250 bp, Glycine max
  unsure (1)..(250): unsure at all n locations
agctatacttagctaataatgtgcgtactaccattctgnctaaaattggcatagccacaaattgttgcttagccaattttcttcggacacatgcacacacacacacacacatataatattacaatgtgttaactttgcacacacacacacatcaacaaagataatgaattacaaaaacataaaagatactacaacccttaaaggtgttagaatcaacactacaaggtgtttagcaaatcataagttccaa

SEQ ID NO: 197019 - DNA, 472 bp, Glycine max
ctttatctagctaagatcatacaaaagtgttacaatagatcctaacagtttctaattatatgggccattaaatctatcatgtgttgacaataattgattagcccgtgaatttcttctggggctgaacacacttcatcgatcgcctttgctttggctagtaatcgcgggaggtcttgacttccatttaaggtcaaggcgaacctatccatccatatggtcgcttcttgatgcaatgcatcaatcaccctccctcttgcttccttctcggcgtacgcttgtgcgaagtcctctactagtttttgttcatgggtcaaagactggtttaactcttctttgtactgccctattatagctagcatgctttgctccatggcttctaagtgttgggccaaactcctcttggatcttgagcaagcagctaagtcctcctttaagaccatgccatgtactcgtgactggtctctttcctctc

SEQ ID NO: 197020 - DNA, 476 bp, Glycine max
  unsure (1)..(476): unsure at all n locations
agctntcctcacaggtcactatcttttgtttttaaagagaanaaacccatacacattgtgtatgattatacctctgatgtagaccctctctgccataagcatatcatccttgtttttcttccaaggttaaaggaacaatctacctcttatctgtattgtatcctttcgttttctctttcagatttttagggtaagcaaatataatcaaatcaaaatgcagaaatgttccatttaataatttatataaatacaaaattacatgtgctggaatggtaaagatatatatacagcccctgcaatagaattcttctttgatgattaccaatataaaaggtaaaaaaataattgcctaaattataataacatggttgaaccaagtggtgcaggttttaatcaccttcattaatataagtcatcagcaatctcactatgcgttgaaggatttctccattactatggacatctattgttaaata

SEQ ID NO: 197021 - DNA, 192 bp, Glycine max
  unsure (1)..(192): unsure at all n locations
actggttactntagtgggagtaatgtggatatttctttggtacgttaataataaattaaaatggtttcactagttaaaataagattaaacaatgatttcagtaactctttttttccgttacaatttaaaatgattcgttntctcaaaagtattaattgactgtgcaaggagctggatgtcatattatggggg

SEQ ID NO: 197022 - DNA, 455 bp, Glycine max
  unsure (1)..(455): unsure at all n locations
agcttagcgtggcgcagtgctacaacaccttctattcgttggcgtatgagacggaggtgcgtttgcgcgaccccatgtatggctgcgtgggcttcatcttgctcttgcaacaatgactatgcgaaatcacaacaaaggtacacaacgcgaaggagttatcaacctacctcaaccctaggccatgcaggttcttttagccaatcttggaatgttacaacatggtggtgttaatgttgtgcctcatttggatcaaccaatgttcaatgtcatgtccaaccatattttggttgggcacgatgttggacaaatggtggtttgggacccataacaacaagagtttctagaagctcaacaaatgtttctcttagatagggatcatatataagaattaatgtctcatgtgagagacatgtgatntatgttgggactaactaataaataactaataatttaag

SEQ ID NO: 197023 - DNA, 449 bp, Glycine max
  unsure (1)..(449): unsure at all n locations
ggcttctatagaagaaacataagacagaggtctattggtttgttgttgtcctcaagatcaagttttgaagctcccaacagtggcatggtttttgactcactgtggttggaattccacgcttgaaagcataaccaacggggtgcctctgatttgttgccatgtcttaaggattacagagatgggtgaacaagatccttgaacaaaatattgagtttctaaaggatgttacttgttctaatcatgcattgaagggtgaacttgttgaagctaacaaggcaaagaatagactactagataggattcttgatctaaaagctgattatgataaagtaattggtgatgtcattgagaaggatatggcttctgaattttctttccaacaagtttattntctcgaacatcataacacagagttgaagaaagtaaactatgtgtggataattcatctt

SEQ ID NO: 197024 - DNA, 448 bp, Glycine max
  unsure (1)..(448): unsure at all n locations
agctnttctatcggggtaggtgggttctttctcgtanaatggcatgatcactggctgacatattctcaattagatcttttgcttctttcggggtcttcaattttatctttccccctgcagaagcatccaacagtggcttggtttgtggtctcaacccatctataaacataatcaattgaattggctcaaaaaatccatgagtgggagtttttcttaacaagcctctgaatctctccaatgcttcacgcagagaatcatcgggaaactgatgaaattagagattgcagcttcccttctgtaatcttggactctgggaagtatatcttatgaactttcaacaacttcttcccaggtttcagattgtcgccttgaatgagggaccacctcttggcttctcctgcaatgaaatgagaaaggctgacctaatacttctctggccactgcaatc

SEQ ID NO: 197025 - DNA, 441 bp, Glycine max
cttgatggtgtcgagaagaaatcacatgtttgtcatcatctataaggggagaatgtgaatgtatgtatacatgattttgatgatgtcaaagaagaatctaacaatgctgcttcaaatgataatcatttgcttcaagaataattcaagattgcttcaacaaacaaagccttgtttcaagattcactaaagaccaagccttgccttaaaacaatgtgctttcaagacatgcaatgctctggttatcgattaccaggaagtgtaatcgattatcagaagacagggttgagaaatagctgctgaaaaaggttctgaatttgaattttcaacatgtaatcgattaccatatgcctgtaatcgattaccatcaacgaaactgtggaaattcaaattcataagtcataacccttcatatttaactgtgtaatcgattaccagtggaaa

SEQ ID NO: 197026 - DNA, 433 bp, Glycine max
  unsure (1)..(433): unsure at all n locations
agcttagagaccaattganaaagaatntttgataatctaattaaaaaattctcagttacaagttaatattcttacctctgcagcacactgcacacccaagcctatattgagtttagagataggcaatttttttttgtcatttttaattaagttactaggattcctaaacttatatttacttttttaattaagtttgacaacaacctaattaaaaaaactcatacaagttcagagacccaataggagaaaaaaaatatattcaaagacgtagttaaaaattgtgaaatagttcaggaatttgcaaattaatttaacgtagattaaattatagcatacattaatctctctaaaaaataataatgtaactgtacaatttatgatgtatttttttattaaatgctctaaattacttagaaattaagcattgattttt

SEQ ID NO: 197027 - DNA, 452 bp, Glycine max
  unsure (1)..(452): unsure at all n locations
ttcaacttatatctgtacatccttgatagactaatctgtaatgtaattntacatttcagataaggtgcatgaactgattaccattattaaatatagaggtgcaagaagtaattatcctttcctttacatagttttttcttgttgataaaatttcccctaaaatatgttttgaatatatctaataaatacttgaatcttgtgtttgatctttaataattttttgttaaatctctaataaaataataattctattcttgattcttgatatcttttttagtccctaatttgtgaattttgtatttattttttgataatttgtttatttgttattaatctcttcataatgactaatatccaatgatgttggttatgttattgtcaattattaaattagctacaagtagttgaaacaattcgaatatgtactggctggcacacactatatatatgct

SEQ ID NO: 197028 - DNA, 448 bp, Glycine max
  unsure (1)..(448): unsure at all n locations
agcttcagaagtaagtggtttcgtttcctcnttccagagtttctttgggtttggtgtttaactgtttgtggtgatgagcaagagggtgaatgtttttgggtgctattttgttttctgacttgggactattgtgggggtgtgggtgatggcacgaaggacacttatggtgtgtttgcggaccctgttgatccagaagaggtgcgtcgattcttcttcctgtgagttggcaaatcttgcttttgaaaacacccctgagttggaagttcaaatcctgttcttgacttgcactctcctgattattatgttggtgttgatcacttccatggacttttgctcttgtgaagacaaagatgggtacactttcttctcaccctcttatacatttcgacgcctgcgaacggccttacctcctttaccttatccttatattatatacttatagtgatgc

SEQ ID NO: 197029 - DNA, 425 bp, Glycine max
  unsure (1)..(425): unsure at all n locations
actttatcattgattacacaatgacagacttcatatatcattcaattatggcaatgaaagtgaatactatcagaaatttgattcgagagaaagaacctcaagaatagttgtagacttcgttnttttttttcaacattggttacaaagtgttactatctgacagctcgaagatctcctttagcaattggagccaacgatgaagacatgaagagtgcacgttctcatatatgcagtgttttgaaggggggaaagaattttaaataacgtgtaggaaagaaaactatgtttggtttataacaggtgaagagaaaaagtgaaatactacaaattattaagagtttaatattaatgaactctgatctggaacatatgcgaaactaataaatgtataaaatcttccccttctcacgtttcttacatattca

SEQ ID NO: 197030 - DNA, 280 bp, Glycine max
ggcacttttctctctctccaaattgctgaggaaaattatttccgtgaagaaaatctcatccgaggcgcttccgtaacctttccgcgagtaatcacgcgaagattcttgaccgttcttcaacgttcatcgttcgttcttcgttttcttcacccttcatcgggctcagtccttcaaccgagcttttcaattcattctatgtacccgtggtggcccacattttgtttcatgtatttttattctcgctttcatttacattttatacccacttttgacgcgctta

SEQ ID NO: 197031 - DNA, 300 bp, Glycine max
agttgatcgtcaaacatggttgatatcttactcgcttcatgtgaaaagttatacttactgtcaacaagctgacttgtggtttacctatgatgacctttatcgtcaagctaatgtgtccacattgctttgacttctgggcttagaccttgatattcttctaaagaagccctgctgacattttgagcttaagtcaccttacaagtatctcaggccttctgaacacccttaatccctgattaaaatcccaagattttgtcctagccttctacttacaacaagttgtataatataatctttaca

SEQ ID NO: 197032 - DNA, 337 bp, Glycine max
ccaagcaccgcggctgcaagctcgcaggggctaaatggaggctttatcttagtgattcaatgacgccctccaatggtgaggtacaccatggagacgcaccggaacacaaacgaaaacaagtgagaggaggtgccatccactaaggaataagccatggaagaaagagcttcaccaccaagatgagccttggataaaaagctggaagagggtgcttcaacggaggaaaatacagcgggagacaaagagagaggggggagcatgacaacgaaggaagacagagggagagaagtgaaacttggagttgggatccacaagactctcatccatcaaagacaca

SEQ ID NO: 197033 - DNA, 399 bp, Glycine max
  unsure (1)..(399): unsure at all n locations
gaaattcttgcaaaacaaatattcaaatttattttataggaaatgccattntaaagcaaaggctagcatcaacagcctacgaccctatccgagtgtaaacctagaacaacttatatacttactggcatacacgcatattcaaggtattttcgctacctaagaaatacacatgcacatagccaaggcatttgctaattaagtcaacaaggcatttcgctacctaaattgaataaggtatcttcgctacctaacacaacacacatacatttcatgagacatttgctacctacactcaacacacatacattcacgaagcacatgcaacatatatacagtgtatgatgcattttcgctatcaaaaattacatacacacattcaagtatttagctactgaattt

SEQ ID NO: 197034 - DNA, 416 bp, Glycine max
agcttgaggatgctcatgctaaatttgtttttcttttgagaataatttgagacaaattgaacaagtactgtaacattgtcagtttcattggacaaagaaaacttgaggaaattgagtgaatcttagctttgctaagttaacacgtttcattgtatttgaacttactgtgtaaacactcattgagtgattagagtacattttctatcaaacatatattgtttgtgaaagacaggagtgacttaatgacaaaatacttggatcttaatcctagggggagattaattgtagcgccaggaatggcccatagagtactcgttgttgccaaaagtgacatagagaatacttggttgtaattaaatatttgattagtggaacacttcaaggtttgaaggagaattagacgtagcccaagagtt

SEQ ID NO: 197035 - DNA, 382 bp, Glycine max
gaaactcaagcttaagcaagtctagagagttcaaaattctcagatagacatttatcttaagctagcccataaatagatagtgcatagttattaaacacttttaagttttacaaaactatttttatgttaccataacattggtgagaagtatctatcgactttgtcaatgactaatttccaccaaagaatctatttggtcaacttaaatagagtctttcttgtcaaccatattttttcacccacaagtcgaacttgaaaccttggttatgacattcgaattcaatatcactcaaaccaacaacttgatgtgaaaatgttgtgaatcatgcaaggtttgatgatgccaaaaagaatatacttgataatggttggtatcataaaa

SEQ ID NO: 197036 - DNA, 424 bp, Glycine max
  unsure (1)..(424): unsure at all n locations
agcttgtagaatggctagacatgatacatgttattgttttgtttggtncaaggataaaagggatgcgccacattatatccatgacacacatgcaaaaatgatgatttggaaacttcatgcaaaactggtcatgcatgcacatatgtggacactcaagtgtcaaatttttatggtcatgggatgctaaggctcaagattcatttcctctattttaaaacaacccaatgtttacaaaatatgttcttttatccatttgtgcattcatccgagtccatttcgggcgtccggggaaattacacagcattcacccttcaggtgtagacacatttgccaaaaattggttatgatcaatgaatttttttcaaagataagttggaaatattctcttttaaaagcatgtctggttttcagctaacaacttatt

SEQ ID NO: 197037 - DNA, 484 bp, Glycine max
  unsure (1)..(484): unsure at all n locations
ctcaccccataattcccccaaatatgggcaagatttctttgttccttattttccttttatgaatgatgctctcatacaacctaagacaaggtagaaggagataaactgtataggctcaaggttcaatcaaacaatcatactttcagctcaaaatgggtgcaagggataattcaatcatgcacaaggtaagctttttagctaagtggctatcttcaatccaaacatggccttcatcatcttcaatttcacacattcattccatactcatagattcatgaaaaaatcattactcaatgttagtcgttttctcacaattaaagatcacactctcaccgggttgcagctaatgcgttccttcacaatcaacctaacaaaccaactaacattntcagtcatgatcctaattccatgttctttctcttctaatgactgcatgctcattcaaggcatatgaattatgcatttcaattcactcacatcatac

SEQ ID NO: 197038 - DNA, 424 bp, Glycine max
agcttccccaacatcaaagtaatattctttcacacagcataagctatcacagccaagttaaacagggcaaaggcagaaaactctgctcaaaacaccaaccaaaatcacagcttttctcacttaaagaccccagtaacaattccttcgatccaattcgttaaccgtttgatcgactccaaaattttactggaagtctatagtacatatgcctacagtttgaccgttgggatctactagaaaacatccagaactcattctgtactactctttcgacaaccaatcacacacaagcatttttctgcacttgtgcaaaattctgctgcacaatttcacagcaaaaatctgcacaaagtgcagattttgaaaaccacactttccctcatccaatccttcccaaatcaaatcctgcaagtcccaaatcatg

SEQ ID NO: 197039 - DNA, 398 bp, Glycine max
  unsure (1)..(398): unsure at all n locations
ctaagctctttggaccttgaacggcaactaactcctctttcatactctgctatgtgctcgcgactggtccctttcctcccttcgcaacttgagttcattattgctaccccatagggctccgcgaaatttgttccggccatactcttccttgcgagccctcttggtctctcgttcaagggctcttgcggtaattgcattctcttcccgtaacccggcacactccttccgaacgtgtgtagcagccaacttgaacttctccttggcgagttttgcctttcctaactcgcttttgagagcttggacttcctcgtcctcttccggtgcttcaacattctcttcgctgacgactnttaacttggcgagccaatctaaacctcgtatgcgaactttcagccatt

SEQ ID NO: 197040 - DNA, 367 bp, Glycine max
ttctcaagagctgccgtggtgcaattccgatcctctcgacatattatgcacccgaatcggacatctgtgtgaaaagtcatgatcatttgaatttctcgagagtttccgatgtttaatttccagcgtatcgatatattataaccctgaatcggacctcagtgtgaaaagttatgaccattggaatttgacgagagcttccgttgtacaatttccaatatcactgcatgtgatgcgcctaaatcggacattcgagttaaatgttatgaccatttgaatttctcaagagcttccgttgtcaattctgagcgtctcgatatgtgatttgcctgaatcggacatccgcgtgaaaagtttaaccatttgaatt

SEQ ID NO: 197041 - DNA, 303 bp, Glycine max
  unsure (1)..(303): unsure at all n locations
ctataatatatcgacacgctcgaaattaacatnggtactctctggaaattcaaatagncataacttttcacacggatgtccgattcgggcgcataatatgtcgagaggctcgaaattgaacaacgcaagctcttgagaaattagactggtataacctttcacaccgaagctctcatgaaattcatatggtcataacttctatcactgatgtccgatttaagtttataatatatcgatacactcgaaactaaacatgcgaaactctctacaaatccaaatggtcataatgttgcacacagatgt

SEQ ID NO: 197042 - DNA, 407 bp, Glycine max
  unsure (1)..(407): unsure at all n locations
agcttgattntgtgattggtcactttgttttatttncggcaacttcattattaatcttaactaaaccatgggaaaaaaacattagtaataacaaaagcatcccatctagatcgaagtttaccgaaaataagcttgaggcgagagttaaacaataacactttttggacaatatagggtttatggtcatgaaaccatcttacttgcttatttcccttcagcttcctcttttgggaaaaatccttcaagaactttgcatacttaaggtgctcaggaagcagttttaactccaaggaaggtggctgaacggtggaaggcaagggaaggttgacgacggatgaaagagaactaggaggcatcacaatcagagtaaatgcataaaagatctttgccaaatattgacacattac

SEQ ID NO: 197043 - DNA, 384 bp, Glycine max
  unsure (1)..(384): unsure at all n locations
gctgagaatgatggaagctgtagcatagccttgattgtctagccttgggggagacctacgaaatagatatacatattctctatacgaggactagtttaaccggtcatgcttntgcgaattgctatctataataagatatcactgctataagtcttctatctgctcggaccataccacaggggaaggactagtcgacatgtgaagaattagacatactgattcgccctctatgttaccttgattatccaatgaccccccttctgaagaaatgatggctctatcattatgactataccatgagtcactctgtaagaggcacatatgccacagcatgtgcaacattatgactcccgtatatgacacctacgagaactgacatatatg

SEQ ID NO: 197044 - DNA, 262 bp, Glycine max
  unsure (1)..(262): unsure at all n locations
agctagcatcaaatacacatntcttgaatattcataatatccccaactccagggcatggagaaatgtacaccattactatagcttccttctacactatcaaaaaccggaataatcatcgatgatggaaaggaaataccttgcccctcccaatgatggaactctcgaaggcccccaacagatgaaatgcacatagcccaacatggcctttgttggtgcacaacatttggaaacttcatcccatggggcttcctatagaataac

SEQ ID NO: 197045 - DNA, 395 bp, Glycine max
  unsure (1)..(395): unsure at all n locations
ntntattntcagtaactgaagatgaatctatggctttctatggactcctctaagaacaatagcatcatttcttgcactgaattgttgggagttagaatccatcttctcaatcaaattcctagcctcagtaggggtcatatcaccaagagctccaccactggcagcatcaatcatactcctctccatattgctaagtctctcatagaaatattgaagaagaagttgctcagaaatctggtggtgagggcagcttgcacataatttcttgaatctttcccagtactcatacaagctttctccactaagttgcctgatgtctgaaatgtctcttctgatggtagcggtcctagatgcagggaagaatatctcccagaacaccctcttaaggtcatccc

SEQ ID NO: 197046 - DNA, 231 bp, Glycine max
gagctcctatgcccaataacacagttgcattgcttagtggagcataaactaaccctgtgatctggagtatgaaatgccagatttcatttttccaagtgcagatccgtgaaagaaaaccagcctctactagtttgatcttaacacaaaccttgtattagacttctatagattccgcagcgctctcaacaaactcatcatgtgaaacctgagattaccaactgcagctttggt

SEQ ID NO: 197047 - DNA, 414 bp, Glycine max
agcttccccatcagtgattttattcttttaatcaagagtagtgtttatgttgcttaaggcttggataattacaattattgtttgcttatgctcaaatgtcttgaataacacaattcaagagagcttaagactcattttgattcacaaatccagccacaacttggcaccacaacttaatttcttcataggcatcgtataggaaacttataaaacaaaacaaaggtcaacaacaagactacttctaggaattgatttagaacatgttatgaactaaataacatgcatgacttagactcaaaattcaaaagataggctaagaatgacaagaatacatgaacaaatgtttctagaattcaatcaacaaaatccaaattcaacacaaacttagaacataatgagacaattatttgacta

SEQ ID NO: 197048 - DNA, 323 bp, Glycine max
  unsure (1)..(323): unsure at all n locations
aagtgggagtccttactttgtcttgacatttttttttttgttgatanagtctcatgagttccatctcgtgttcctaaagttgtccaaacagagtagcaagagacatgttggtaagattacttgattctgcaattgttgttacctttggatgacattccctgcttaaacatcttagaactttgttaataagatcttcattgggaaatatctttcctagtgatgcaagatgatttactatatgtgtgaatctctttagcatatgctgtatagnttcattttgattcattctaaacaattcatattcattggttagggcatttatt

SEQ ID NO: 197049 - DNA, 382 bp, Glycine max
  unsure (1)..(382): unsure at all n locations
agcttngatactaggctaccatgatcattttatcttgcgcaaaaagtcgattacatgacacataaaactcggtaaccgtgtacatacttatgtgtccacttgggttactctgtttaaaaaaaactgatggaaaattaaggcgcattctttatgttctttatgaagctgactcttaaattgtgtattggagagtgttcgatattttctctactcataagtagttattctatagatcttatagtgttaacttaacctagaattgatatattccaccaagacaatctaacacataagcgtaaattaaacgtaacttattttattaccttcaggtgagattttttaaaaaatttatcagtacaatcaggaccccacatcaagccaa

SEQ ID NO: 197050 - DNA, 378 bp, Glycine max
  unsure (1)..(378): unsure at all n locations
aactatgaaactaagcttgcgtttactctgtgatcatgctgcgaatcatgctgttttgatacgtangaatttcttacattgaaatggcttattgtattatgtgcaggcctttgatgctgcggtgggggacattaccattactacaaaccgaactaagatagcggattttacacagccatatattgagtctggtctagttgttgtggctcctatcaagaagctgaaatcaagtgcttgggctttcctcacaccattcactccaatgatgtggtttgtgacacgaatgtgtttcttggtgggtggagctgttgcgtggagtctatagcgtcgcatatatgatgactgtagacgccctcctacaagacaatctgtcaccat

SEQ ID NO: 197051 - DNA, 391 bp, Glycine max
  unsure (1)..(391): unsure at all n locations
catgcaagcnngcataactaanagaaannnnggctctatttattgccgctaagngaagctcaagcttggctaagcgcaaatccatgcgactaaccattggctaagcaggcttcttgccagctaagccaacgttgcagacactgtaacctagcattttctataaagcggcattcctgtgtcgctatgcctagtgtcgatttttggaaagcccgctaagcgaatttcgtctcgctaagcagccagtgccttctctagtattatttctcgggtctaaaaagttgaataaccgagacctgagaaattgttgggttctctatatgcagatggcctctagaaacataagaatagcgttctagaccacatgaacataatgataataggagattcaatc

SEQ ID NO: 197052 - DNA, 429 bp, Glycine max
  unsure (1)..(429): unsure at all n locations
gaaactaacctccagactagtcttatgttgctaccccatctctactatctctttttttagctggatgatagccaacttgaattgccatttgagtgcatccggagagtcttaaaggtaaagggctttcttagacaaacctgaaagtttcttaacactaagagaagcatcaattcatatcatcatcatcattaagtagagttatatatgaatgtatattctaatccaatgctaatgcaatttcttttttttttttctttatccccctacataatgctaatgcaatacactatgctaatgcaatgcactatgctaatgcaatntttctcccccttttggcacaacaaggccaaaaagttattactattcatagaataaaaacaaacaagcatataatgtgaaaagggaaaatatcatggccttttattcata

SEQ ID NO: 197053 - DNA, 371 bp, Glycine max
  unsure (1)..(371): unsure at all n locations
aagtctgacgattgtttcgtgttcatgcaacaatngctagttggggctatacgagacatattgccgaacaaagtcaggataacgataacttgcctatgctttttcttccattctatatgcagcaaaggcattcatccagtcatgtttgatgagttggaaaatgaggccgcaattatactgtgccagttggagatgtattgtccccctcctttttttgacatcatgattcacttgattgtgcatctggacagagaaatcaaatgttgtggtcctgtttatctacggtggatgtacccaggcgagcgatacatgacgatcttaaaggggactacaaagaatctatatcgaccataagcatctattgttgagag

SEQ ID NO: 197054 - DNA, 408 bp, Glycine max
catgcaagctttgatctaccaccaccgacgccactattattttattttttctataaataaatagtactagggcgttgctagctagccgggaatttggctataatatgacattcggataaataaaaaatactttatatgcatggtgagaaagaacaactatgaattatataatatgacaatgtgggtttcatattcatgttgctagctccatgatggggtaatattcattcaagaatgcctcgcgagaaagtagtagaatatgtacgtgacatacttgaaacgcacaacggctatttgccgatgccaacgggggagagaaatgcagattgaagcaagagcccacatcgagtgattcgctaacttaatttcaaatgaagcataaactgaaacacaagggggagaatggaa

SEQ ID NO: 197055 - DNA, 366 bp, Glycine max
agagacgtttcttttttggtttttaaacaggggaaggaaatcaaccacacatgcaaatcacgtgacctcttagttaggcgttatcaaaccaaggtttgctttttacttaacctatttatttttatttcctttctttttgaaatgatataaaaagtgacgaagtatttctttcttacttttttctctctatctatgtaatatatccttttttgtttttatctttcatatttctttctaatccaaacaaaaatttaaagatgaaaattcccagtttttctatgagaaacgattattatgataaggtaattatatttatgattaaaacttattagagtcagactgacgatagagagtgatttagaattt

SEQ ID NO: 197056 - DNA, 386 bp, Glycine max
  unsure (1)..(386): unsure at all n locations
gcagcagcagctnnnacaataaaaacacccacttagctttactatcgcgccaagcgaacaaagagtagaagagaaacctaacccaacgaaaagcggaaattaaaatgcccaacggaaattaaaagagaagggaagaaggagacaaacacaccagagtctttatactgatgcggcaacaacccgtgcctacatccagtccccaagcgacctgcggcccttgagatttctatcccaaccttgaaaaaatcctcttacaagcaaagatccacaagggaggtaccctcccttggtctctttgaacctagaggatggaccctccactagaactgaaccacaagagatgcacccgctcttgttcaacgcaaacccaagacaggtaccctcta

SEQ ID NO: 197057 - DNA, 422 bp, Glycine max
agctcggacattcctcttctataagtcagtggtgtggggttgttattttgtcctaagcccaacttctaacacttattataattctatacgtaaataccttgtaacgatcacaagacaacggaattgtgtgaccaactaattttttatcttgccacaactgattcattctgttgtttggtagttgatatcacaggcaaaccagccataattgattaatttcacattatttgaaattttccagtgttatttatttgtatttcaagttgtgtttttgtccatagaaaacatcatgaattttgcagcatcattgtgcagaagattgaatatataggaactcgcgacaaatgttcctgtgataaaagcaccagtggtatacttcatgtcctatattggctattgattatggatttcaaagtaattac

SEQ ID NO: 197058 - DNA, 409 bp, Glycine max
ggaccttaagcacctgagctgcaactttaaaagggtattcctttttttttacacttccccacctctcaatgagccagtgaaaaagaatgtggcattcacttgagatgaaagacaagagcaagcctttactttgctcaaagaaaagctcaccaaggcacctgctctagctctttttaacttttctaacacttttgagctacaatgtgatgcctctagagtgggagtgggagttgtattgttacaagatggacaccctatttattattttaatgaaaaactttatggtgccaccctcaactaccccacctatgataaagagctttatgccttaataaaagccctccaaacttgtgaacatcgccttgtttccaaggaatttttcattcctagtgatcatgaatcacataag

SEQ ID NO: 197059 - DNA, 322 bp, Glycine max
atgagcgaaggatgaacatctaggattgtttggattgtgagatgcctctgcattctcgacttattgggttttctgtacgcacaagccatgctgtgaggtcccaatttggtgagaatgtgcaacaaacatttctatgctcacgtggactgatggaggatacaagtttgacttacatagcaagcatcaaaaaattatgcaagcagtgagcatgggcgatgtgggccaccgcccaagtctcccatttatagaggggcacccacaattttatgtattttgatgaatagtgaaataaaaagttacataatttatactatccttatat

SEQ ID NO: 197060 - DNA, 421 bp, Glycine max
  unsure (1)..(421): unsure at all n locations
agcttaaaccgntaagtgatagctcatgtttnttttacacatcttttttataccaaatcatgaatcaagatttagctttgcatcacagatcatcacaattcctttcttgtggcatcttttcccaaatttacaaatggtatgttttccacttattctattttagggtttcttttctttgttataagtggaagcttaagagatgtattagtcatcaaggatgtcaatatttttcataaatgttaaaggaaaactaaaagcaggaaaggtcttcgtctctatacatttctgaaatttgaaggttaacataggaacttggattataaaatacaagacaaactattgaaagaaagcctttatgtgctgcatttgcaatctactttgtgagctntaggcttgtntgaaattttgtgtgcctatgttg

SEQ ID NO: 197061 - DNA, 407 bp, Glycine max
  unsure (1)..(407): unsure at all n locations
cgtntactaaggcctgaaggaatcagctcacccattcgtgttgtttgcttatggctaaagttttctctttagcccaggcgagctagatgctagcctgagcaaatntatggtcagaaaccttcatgaaatgaccatttttcctttcctttaagctttgttttgggatccatcaaacaaccataaaaaacctacagagtcatggatgaatctttcatatttaagcaaaaatattagtaaatatacaatatatatatatataactaaatttaaaggtaatttggaagaaaactattacaataaaaggataagtgctaacaatttaaacccaaaaacaacttaaatttgacacttatcagccactcttggatggccttgantttctcaaggtccacatgcatcccattttt

SEQ ID NO: 197062 - DNA, 405 bp, Glycine max
agcttatgttatacaacaaagatttgagtttctgcaaaatacaagcaatctattcaatctgccatagctactcagtttgccaatctccctcaaatgctactacaaaacctacaacatgctcagcaaaacatgttgggtgttgtcatccaaccacctcccattatccaacaacaaccaactccaagtatattgcttgcacctgttgaaggaaaaccatcatcacccacatcaacaccaccagttcagccaccaccaccaccaccgaccaatcaagagtgacaatgatgtcccatcataatttctttctgtcaatgacaaaaggaggagaaggttatagaattttgatttatgtaaataggacactcttaaaaaatacacgtgttgtttggtgatctcttgtgtggt

SEQ ID NO: 197063 - DNA, 361 bp, Glycine max
  unsure (1)..(361): unsure at all n locations
actcacctgtatcgatcacactctgtatcgatacttttttttnttnncagaaatattctcaacagtgacatctttttacttgattcttgaatggttgtcaaaggcctatatatgtgtgacttgtgacacgaattgaagaagagtttctgagaacaaaaaggtcttatcctcttaaaaagcaaatcgtcttatcctcttacaaattccttggccaaattacttgtgattcaataaggaattatttgagtgctcaaattgttcaatctatctctttcaagagagatttcttcttttcttcttcttcattctcaaaagggattaagagaccgagggtcttctgttgcgaaagaattctaaacac

SEQ ID NO: 197064 - DNA, 405 bp, Glycine max
  unsure (1)..(405): unsure at all n locations
agctnttagctaataaaaaaactaatatctatctttaatatcttgcaaaccacattcaaaattaaactttcaaatagcacaagacattaatgtatttcatttactatttattgaaatccgaaaaatatctcataattaagggtatttctatataaaaaaaaattaatacatgcaacattatgaattgattcttatgaaatatgttagacttgtacgattggaaacattttgatgaaagaattatgttaaaaaaatgaaactatagaattgatgagattttttttcttttttgtgtgtgtacaataacaacaatgtgattcaaacaatgctattcaagcttaggacctcgtgcaactatttcatcctctatcactaagtatcctaagagtctgacataaatcattt

SEQ ID NO: 197065 - DNA, 428 bp, Glycine max
  unsure (1)..(428): unsure at all n locations
taagcttatgtatatntcaataagataaagaaatcatatttattatgaacaacaaagtatttgttaacgttaatttttctttttctttctatcttttaaccaattttctctctctctcttcatctttatctctgatcaaacataatgtgaagtttagataaatgcatcgttgtacggactaaatttcacaaaatattacagttcgattttgtgttataaaaattgtgataagtttatctaggcaacacttccaacagaagagagtctcgtcttgcccagattgcaaggcataaggcatagaattttctccctcatatgccaataacctgtttgatgatcttgtggctaagctaagacagggaattgatgcaatcttactttgcgatgaaatcttctgcttttgatctcctttgtatgaataatttctt

SEQ ID NO: 197066 - DNA, 420 bp, Glycine max
tcagctatttcatagaaagctattttctgttctaataacacttcatacctcgggcgagtcgaaatgaacacagaacgttccaactacacagcatcacaattttaaaaaaccacactgtaacacagtatcgggaccacaccggaaaaatggcacttaaaaggttagctagtagggactacaacaaaaaaacgcgataaaacaaagccgaaaccgtaagtgaagagggaccacaagcttcctttaaaagaaaataattggaggggaaaatggggattttttaatattgttgggtgcaccagcaatgttgttgggtgcacctagcaacacccatggaagcatggtcccctctataagcctaaaatgtacaatacccaagataatactttcttggggcctctatgattacattaatgaaaaaat

SEQ ID NO: 197067 - DNA, 378 bp, Glycine max
  unsure (1)..(378): unsure at all n locations
aactaagctagagagcctcaactggtggatgagccctttttttatatcttccgaagnttgctcgagcctctccctcttgattcaggttcaacccagacaatactgtagcgcatactctacctacacactaagaaatacacctaactactcagttgttttcaaaacctcagtcatttttaagaacaatttaactcatcgagtcccacatggagcccatcacacaaatcgacgtgcattaactcatttccccttaaagagttttacaggtgtgtgattgcacaatgcatagtccgcaactcaatgcatacgacatcttagtacacatgtgtctcacgattcaacaacgtgtactcgatttgtgacatacaccccatggta

SEQ ID NO: 197068 - DNA, 417 bp, Glycine max
  unsure (1)..(417): unsure at all n locations
caagcttccatagaagtggttcttgtttttctaatncacnctaaattaagacttaaccaaatgaaacatagttgggttgggtgtgttgttttttgttaagcaacctaacccaacaaaaattttgagagtacaagtataggtatttagcatgttagaggaaaattaaatctttttaagagtgttaaataaaccaaggacatatattcttgaatagagaagggagacgttgactcgaggtgaacagagaanaaatcagacaatttattttatagagacaaatcatcaatgaagaaagagaaattggtgagttcattgaagagagatgaatcattgtatcggatgcgatggagagagtgttccaacaagatggtataataggacacaaatgtacaattttatttaaaataaaagcatttt

SEQ ID NO: 197069 - DNA, 382 bp, Glycine max
  unsure (1)..(382): unsure at all n locations
tagaaaactcacgccttcttcattgaatggttacccggatggattgtatgtnctttatttgagcgccctacaggagtaacaacacaccttagtatcttaagaaatgtcttgcaagataaaggctcgtgttcaatggcatcattctggtgacacaaatactttcttttttcatcgcgtgactaagatttctaatgctactccacgcatcgagtcattcattcatgaaggtcacattttaagtaaccctaatgatattgagaaagttgggattgattatttccaagatctctaggtcttggataaccaatgcaacgagaacgtcttggttcatataactattcctaaacctgtgacccaggacgataatattatgttgactcgg

SEQ ID NO: 197070 - DNA, 267 bp, Glycine max
ccggaccttaagcaccgcgcagcagcttgatcaaaccttttctattttacttataactcaccaattatggcccattaatctggttacttcttattgtccactccttgcttgttactctaccacttcacctgaactttctactttctttgcaattattactcacaccataaacataattgctgttcctctatgcaaaggctcctcgatttgtggataacaacactttatctgcgctaatagtgtgccgaaagtgaatctctaatattt

SEQ ID NO: 197071 - DNA, 278 bp, Glycine max
attattagatgtgatctttagagaagatctccctatcttatctagctgaagaagacagcagcgtgtactgtcttgtaaagcttgcaagctgtctctctcctattggtatatatatatgttattagaatgaaatataactcagccactgagagaaaagttttactcctcacatattcaaagctgtaagtcttataatggcatgcataaaaaactaagagcgtgcacgtaagatatcttgtcgctactctaagatgtcaaaaccgataattcacttattc

SEQ ID NO: 197072 - DNA, 414 bp, Glycine max
atgacctaacaagggattcatttttttttttcttacatgtcctattaaacgctttcttcattcgcctatatgggtgaagagtttttaaaaatcttcgatgtcttgtatacactgtcttctttccatgctttaattggatgtaacttgtgtctttctcacatatatgacatacgtggtggcctttcacactatatccactcatattcccatatgttggaaagccgttaatggtgcaaaaaatcattgcacacaactggaaggtctcctgagcattcccattacacacattaaccccttttacccacaattttctgaggtcttcaatcaagggagcatgatagacattaatgttaattcctggctgtcttgcaccgactatcatcatacgcatcattatgtacttccatttgatgc

SEQ ID NO: 197073 - DNA, 460 bp, Glycine max
  unsure (1)..(460): unsure at all n locations
agctcggcctatacatcaacttgtggttaataatgcatgtttgttgtattttaaaaganattgtgtatattcattagcccatgggttttagggacccaaatcatcctaattatgtttgtttattgatgaaatctttgtatgggctcaagcaagcttctcaagcctggtataagtgatttgttgattatatctccactgttgggttctctcacagcaagtcaaatcactctctnttcatctatagtaaaggtactcatatggcttacattcttctgtatgtggatgatattatattaattgcctcctctaattaatgatcttcgctagtctatcgtgtcacatctaagttcaaaattttccatgaaagactttgggccattgagttatttcttgggtctattnttatctcagaacaagtatgtagaagaatcatcgaacgggcttgcatgtttttttgtag

SEQ ID NO: 197074 - DNA, 416 bp, Glycine max
ggctcaccaccttgcataatcaactgatttaatttgtgtaaggactgacccaccttcatctatgagctatattcaggcccagatcatatatgatgcgttcacacatactatttctgtccataatgctgatgccacccgttcctccatgactgtatttaagattgatcaacaattaattaatccgacatctattcagaaaacagatgttccatctgaaatcgaaagttccctttattagacacttttgaaacatcatataatatattctatcatttaaaaaaattaatgttatggaagaaggaacgaaacccaataaaccaccgagaagcccatgtctctatactgccaccctggcttctgctgactccaactaatttcgcagctgatgcacaattatgaaacaattgaatgcccca

SEQ ID NO: 197075 - DNA, 502 bp, Glycine max
  unsure (1)..(502): unsure at all n locations
tatagaatacataagctcctacatctctactatggattgaaaagtcaattcatctatctttataaactgctcgntaaatgtttcctttttcctgtgtcattttggtctcactcttatgtttgtcccttttaggaggggagtgttttgtccgttacaaataactgaaaggataatgtcatgattaaaagctgtgtatccttctccagattttcaatgtaagagcaaagttccgttgaacggaaagtgagagtaccttaaaacaaaaacacactaagtgtttgtgtggattaaagtttaaaaatttaagtttgttaactaaattcacaaaaataattcaagtcttatgtatataaaattgagttttcaaataaaactgtaacatgcatacgtatttttgagaataatcaaacatgtcacaacattgagttgatttttcagactgagtgtatactattccacaccggaaactacacataatgcatataagcataaattcttatgt

SEQ ID NO: 197076 - DNA, 403 bp, Glycine max
  unsure (1)..(403): unsure at all n locations
agctggganctaattatatacaacacactttatattttatttcgggtagaacaaaagcaaagtctagggaaagcctaacaaatataaacatgattatattcttcagggaatatttgaggggctaaaggcacataaaactgaggatgggtgcatacttctatttcgaccaaatgagaatgctcaacgcatgaagagaagtgcagatagaatgtggatgccatctccatctaatgaccaattagtatatgctggaaagcaaatagatcttgcaaagaaacgctggggattcatatgctcctattgaatcatctctagaatggatcttcccgctataaatggaaaaacagaataagctctaaaattgaaaaatgtgcctcctttaagaaaaggggcgccatatatt

SEQ ID NO: 197077 - DNA, 419 bp, Glycine max
  unsure (1)..(419): unsure at all n locations
ctaagctgacgctgcnacaaagctgtctccaagatgggagagcttatgttatgtggttctagtggcagttcctcagctggaggttctcagggtggtgaacaggctcccgaggcagagtatgaggaagtcaagaaatgacatttaggcgtggttttgtagccatttgtttcttattaatcatcacataattgcaagaatacaaggttacttcttttgtatctaatgttgaaaaccattttttgctggaaggctctttaatttgtagcacttttggagtccaaagttccgaacacacggctgtctgaataactgatttgaattctttgcataaagtttgttcactacgtttggctctgactagtattttgcactttgattggagactcgcatgcacctgttcgcacactcaaagtatattc

SEQ ID NO: 197078 - DNA, 409 bp, Glycine max
agcttctagagaaaacttcatgcagctgttcttttttaaacgctgcccagcctttgttaaccgttggatcttctcgaaatttggtttgcaacttcacaagacacttttccatgatctgaccgttgggatctttgaaaaaatgtctggagtgtgctaaaagcttccgttcccgagagcatctcttatttaagcatttcagcctttgctttggtgtaccttaggaaaaacgtcatttcttcttctttttttcttccaaagccatttctaatgttccaagaactttctccatcacccacagccaccattagccaccacaaaccatcgttgttctccacaccgagaggaacccttcaaccgaaacggaatcttccaacttggcttgcggtttcagtagagaacgaaaccctaa

SEQ ID NO: 197079 - DNA, 484 bp, Glycine max
  unsure (1)..(484): unsure at all n locations
ctatgatactaagctatgcgctggtagcgcagcccatctatttcgggacagtgactacgaggggttcctggaaaacattcaagaaacaatgtaattgattacactcttgatttaatcgattaagtgttcttgatcacttttgggaacactttcaagaatgatgtaatcgattactatatcctcgcaatcgattaaaccagaaactcgaaaaacaatcatgatctcaatttgagttgtgtaattgactatgaatatatgataatcgattaaactagagacatgatttctctacaagttatcaaagacttatgtaatcgattatacgcatgtggtaatcgattaaaccaatgagttatatagcacatantgattttcttattntagaaactattntcctatntctatatgatgatgcatgatgtgcacacaaattgactaaggataataataagcaatacaaattcctcaatctggagttgggtat

SEQ ID NO: 197080 - DNA, 442 bp, Glycine max
  unsure (1)..(442): unsure at all n locations
actgatacannataatttacagtctagaggtgtatttttatttctcttctagtggtttcataaaatatatgatgttcaggattgatttaattattcagctnttttataaaaaaaaaaaatccactgctacatagtttctaaatgcatattattattatttttgcaacatttccagcagttttagtccagcaaaatattttcaacaattaaagatagccagaaacttaaacaaaaaattttcaaacgcaaattntgctcaccatgtcatcttttggtagttgaaattaatcacagggacaacaaacaaaatgaaacagtttacgagggaataaatcagaataaaaaagttatgtgatgagaataaaaactgtccaaatacataaatttatgatcagaggaccaaacaggcggcggagactctncaatagatagtaacaaacac

SEQ ID NO: 197081 - DNA, 420 bp, Glycine max
  unsure (1)..(420): unsure at all n locations
agcttctgtgttctgacattgccttattgttgcaattctgnatccagccttctttcagtcatagcttcgggccgcgataagactcactgatctgaccctgattcctcttgcagactntatagaccaattaaaatgcagtttctgcaggtcaacgtctgaccatcattgtcatcactctggccattagagtaaccttctgcattcatccttttgtaaaaagtttatattagtatcagcaattaaccggacctgatactgatatgagtcttaccgcatatacggtcaatttcagcaattaattacattatccacgccaaagtatttgtcatcacaatgatggtaccttctttcagacaccattnttttaactccgttttccacggaccgcactcttattgcaagagtgccgtccgtggatac

SEQ ID NO: 197082 - DNA, 409 bp, Glycine max
  unsure (1)..(409): unsure at all n locations
agctngtatggttcttgagaaggtggattttttaatagtnggggttatcaaatagatgttcttaaaggatttccagtactcctgtgttataggaaaatatataatatagttttccaattggtacttgttattttctacaaaagtagttgagatctgctagtgctaatgatatatccactttgtatagaattttgttatttatgaattggccagaagttcttaccttaaaactgtcaatgtaattcggctcattggttatatatatgttcttttgtgccactgtcagtctgttatacttgattaccttgccagcaagactatttgttcagatgatttggtagttgtctcaccagatgttggtggtgttgccagaccacgtgcttttgctaaaaaattatctgatgctcct

SEQ ID NO: 197083 - DNA, 460 bp, Glycine max
acacaaaaactaagctataacatacagctaaattctaaaacaatgcttatttagtactaatgttcactaaatacatatttgaggctgaatacaaaattaatgccaaatttgaacacccattaaatctcctttcattaacataccaattcaacaattccacaactacaatctgcacattacaaagaaccaaaaaccatttgcacagacccagcaaataaaccaccaacaaccaataacattcccctacgacattgccaaattacattccttgctacattatcaaattacagtcctttgctacataataaacacactaacaagataacacggacctaagaaacaaccaatacaatccttataatttttccttcatcttcactaatcctgctttgcaaatccttttccctcaacttcaattcatcaaccttcttcatcaatgctacaatgatcttcttctgat

SEQ ID NO: 197084 - DNA, 455 bp, Glycine max
  unsure (1)..(455): unsure at all n locations
tgtaggattatggggtacccatcacatgtggcacaatttggctgtcgggcgatggtgcacaacaagttttccacatccacaatgcgcgcataaacccaccatcccctgttgcccacctccaactgagctcatgtactcccacgtagcccatatcctcgtttctctcaacaccgggtccccatcaatcctctcaagcttccacaacatccaagcaaaacaacattcaaaccgcacaagctatcacagtcaagcaaaacagagcataggcagaaaactctgccaaaacaccaaccaaaatcacagcttttctcacttaaagaccccagtaacaattccttctatccaattcattaaccgatggatcgactccagnaatttactggaagtctctagtgcatcagccctacatttgaccgttgggatctactggcaaacatccagaacttattctgact

SEQ ID NO: 197085 - DNA, 440 bp, Glycine max
  unsure (1)..(440): unsure at all n locations
gggatccttgagtcacctgcggcatgcaagcttaatcagcaantgctaatattatcttttcatctaaatgttgaaaatatatatttgataaagccaaacaattggcccatcaaatttgagaaagttgaaaaaattggcccatcaaattaatgaccatgtgaggttttttctaaaaatatattatgataaaaaaaacaaaaactgagtttttttgtcattgaatttattacatgcattgcataattagcattagagaatcgtgatgaacaccaacacaaaacacccattatgtgggtgacaaataaaaaatttacagggagtgaaagaattataaagaacgcagattcattgctttcaaattgaacatataccatggaaagaaaaataaatgtgaaaattgcagacctaacaagagaaaaatatacaagggaatacatatc

SEQ ID NO: 197086 - DNA, 386 bp, Glycine max
  unsure (1)..(386): unsure at all n locations
tcttccccattntcctataaatagggggagaattgtagtttanaaatgttcagccctcttggtaattcgagaatcacttgaaattagtgaaaaaaattggttccgtgaagaaaatccaagccgagacgctttcgtaacgtttctgtaacgttttcgtgggtgatttcgtaaagattttcaaccattcttcgacgttcttcattcgttcttcggtcttcaactggtaagttcccgaaatcgaacttttcaattcattctatgtacccttagtggtcatcatttgctttcacgtgctttgactttcatttcatttactttccgtacccccttttgacgtgctttagtcatttacttaaggtattttctcgcttaatcaacgaataaat

SEQ ID NO: 197087 - DNA, 388 bp, Glycine max
  unsure (1)..(388): unsure at all n locations
gatccttaagcaccgcggctgcgcttgaagtggaattttttttnttttaatagaacactagtaatatgtctactatcattgctattatttctttcttcgccattgagggaaacacttgggctgcctgatccctccacctttgtgcgtattctttgaaagatctgtgccccctttttgcacatgttctgttgttgcatcctatccgaagtcatatcaaaattgtattgatactgcctaacgaaagcaaccattaggtccttccaagaatggactctataaggttccaagttagcgtaccaggtaacagctaccccagtaagactttcatggaagaaatgtattagtagttcctcgtcgtttgcatatgccctcatcttccgactataca

SEQ ID NO: 197088 - DNA, 374 bp, Glycine max
  unsure (1)..(374): unsure at all n locations
tcgtcataatactgcccaaaatattgcatctcaagtgtatgataccctctttgncccttcttataagtatcttttcaagttgtttttgcattaattattttttaacccaaatacctttaattactttacaataaatgttatgcactaaaaagataaatgcatgatctctcttataaggattagataagaagactagtacacattaattaggcgggaaagtaattaagtgaaaaaagagagcttgagtcccaataattctaaggtagttttggttaaataaaacaaattgttaacaaatttaatgctactaactatattaactaactttttttaaagtgcatgaattagttaaaagagtcttatatttagtgata

SEQ ID NO: 197089 - DNA, 418 bp, Glycine max
  unsure (1)..(418): unsure at all n locations
ctaagctttccttaatggagcaccattactcatagggactgtatttatttatgccgctaatccaatntgaactccatgtctaggatagagctccaccattcaactttttaacatacagccaacaactcaattgtcctataatctggcataatgctaatccattacaaatcacttacatgccaatggtaagaatatcaaaaagataaaaaatcttttttcccctcttttcttcccctaattatgaggggaacataatatttgatgctggtgaagatgccatattcaggatatttaaccccttctgatgcatgtatcacatctcatcccttgctatcactttcaactgtattactgcttctagtacaagaatttatatttttaagtccactggaacaagctttctcttatctatgtctac

SEQ ID NO: 197090 - DNA, 423 bp, Glycine max
  unsure (1)..(423): unsure at all n locations
agcttatgcaagggaattctntgctattattgtttctttagcaaaattcaggcattatctgcttggtcacaaatttgtcatcaagacagatcagaagagcctcaggtcactcactgatcaaggttgttcacacacttgagtaggaaaactggttgcataagttgattggttatgatttcaccattgagtataagtcaagaaaagagaatgtagccactgattctctttctagatcctttatgatggctatatctcaacctaagttgtagctgattctagaattgagggaagcccttgcacaggacaaacaattgagtctaattatgcagctttgtttgcagaataagcctcacaatccgagttattcggtttctgataagttgctgtattggaaaggtcgtctggtgttaccacgaggccatg

SEQ ID NO: 197091 - DNA, 256 bp, Glycine max
actaagctgctacccaggaagctctaatatctcccacacttttgtgtggccattcttggaggccttgattttccaggttccacttgaccccatttctaccactcaaaacctaagaaaacttattatctacacaaaggtacacttctttatatttgcataaaaggtgtttctctaacgactgaaagaacttgtctgagatgtcctaagtgatcatctatgctcctactatacactaaaatatcatccaaataaacca

SEQ ID NO: 197092 - DNA, 413 bp, Glycine max
agcttgagaggattgatggggacccggtttgttataatctaggatatgggctacgtgggagtacgtgagctcagttggaggtgggcaacaggggatggtgggtttatgcgcacattgtggatgtggaaaacttgttgtgcaccatcgcccgaccgccacctattaccacatgtgatgggtaccccataatcctacaagcttgcgatgaggaagtgttgaagggtgaaacttcctgcttttattgttgaccacatagtggtacctggagatatgtcgcgggggtcaggagaccttgcggacgtcaggtggggtgcttttgcccaaaaccaagcttgaccaatcccgacccaacccgggcatattcgatcagtgagaacctgtgatgtacctaagcaggcgagcttctggcagtc

SEQ ID NO: 197093 - DNA, 436 bp, Glycine max
tcatgatgatgaatcaagttgattcaagtagttgtgatgatgacttttatgatgacaaaaagcccacagaatgatttcaagattgagtcaacaagtttcaagatcaagattaatttcaagtttcatgagaagaaatcaagaagattcaagaatcaagagaagtttgatttcaagattcaagagaagatgaattcaagattcaagagaagaaatcaagaagacttcacaagggaagtattgaaaagaatttttcaaaaaccaaacatagcacaattttgttttacaagacaaatttttctcaaaatcttcttagttaccagagtctttactctctagtaatcgattaccagtgggaaagtttgatttcaaaatcttttaactgaatctgcaacgttccaattgatttttaaatggtgtaattgattacaatatattg

SEQ ID NO: 197094 - DNA, 441 bp, Glycine max
  unsure (1)..(441): unsure at all n locations
ctcagagtcacctgcggcatgcaagctnttagtgatagcttggcaagaaaattatatcatttaacagaaagggggaaaacataaaacaaaatctaaccccaaatctcaccataacctacacagctctagtcagttttacacacggcaatggtgttaagattcgaaacaaggggaaacaaaaaaaccctatgcgctttctcccgacatagcaatggtgttaagattgaaatctgcacctttgagtttgtgattctttgcgtcaaagaaggcgaagagagggcgaatctgtgtttccctctctttcgtgctttctcccaatgctagcaacacgtgatccagtgtcgctctttctctgattcgaccctatgcggttacgctgcttagagtggtggaaaaagcaaagtgaatgacactgttaaggttaaaggaggagaggaggga

SEQ ID NO: 197095 - DNA, 462 bp, Glycine max
tactaagctcgatatatactgatgtttctccttattttcgaatctatgtggctgcttcacatacaactcttcatttatgaaacaattcaaaaaaacactcttgacatccatttgatatagcttgatgtctttatgtgtttcataggctaagagtattctgatggcttcaattctttctactggtgcaaaggtttcttcgtggtcaatcccttcttattgattgtacccttgagtaaccaatctagccttgtttatgactacttctccttcttcattgagcttgtttttgaacactcatttggtttcaataactaaatgattcttaagagcgagaacaagattctagaaattgctcttagtgaattgactcagttcctcttccatagcagtcacccaagaatcttcacttagtgcttcatcagcattcttaggctcaatggttgatagaagaaccatcattac

SEQ ID NO: 197096 - DNA, 426 bp, Glycine max
  unsure (1)..(426): unsure at all n locations
ctaagcttcctcatgtggtaatcagagcacaagagcttcaagtatgtgctcctttttcctccattaatcatttttctttcccttctcttccattgttgcttcttcatttttctccatgtatctcctcacatgtcttgttctaaatgttgttaacatgattctttagagtttccaccaattaaacttgctatagaaactagagttgattntctatggttcaaatttcttgttcttgttcttgaaccatgaattgtgttgagtttgagttcctttgagttctgtcttgttactttttcgggctgaaacctacaccctagaattattacggaaatattaaagtggaagaaaacctcacaatctagagtgacttgttcacctattggagttnttcatagaactcatgtctagtcatgacatatgtcacat

SEQ ID NO: 197097 - DNA, 421 bp, Glycine max
agctttattgtcccacaataattttaatttttatagacaataaacaaagggctaagctgttcctcccacataatcatcttgaccttatagcgtgtcacccgtaaaagtaacattcagtccaaatacaaacaaaacaaacaaatggaaagtaagatacatttcacaaatatttaaaactcacagaagacatagagagaaaagatatattataaataattgtatcacacaaacacacaacatccacttcaaatgttcaatacacatagacacagatgcaggatgattcacatttaacttatgaattagcatgcatgtggtaccatttcaaaaacactttgtgaatgtagcctgagagtccatgtagtcaacggattgtcacacaatgagcaacttgacattatcactctcactgagatgacac

SEQ ID NO: 197098 - DNA, 417 bp, Glycine max
tcaagctgatcaaaatagagtctattctttttatttctctcaattcatacgatttctcattcaagtcattcataaacactcattcataagaattaacaccactgaataacattatcaatcagttcactgttcaaacaagctttttgtacaagcaatcaacactcaaataactagaatttaaatgacaaaaatttaaatgaatgaaacataaggcaactaaataactaataactaaattgttcatgatttgcagaaattaaaacaaaacagaatttaaacatcctactcattcgatggctgatcttcatttaaatccagcgctggagtagctggtgcatcctgaagaatgggttggaggggatggctctggcatgggatattgtgaagatacctcttcttgagccatagatgtatctg

SEQ ID NO: 197099 - DNA, 317 bp, Glycine max
tgtagagttcagtctcatatcggtttaatcgattactgttgtctcataatcgattacactgttgtttgagatgatgactgatttattcacgagtctttgctttaatcaattacttctctctcacttagttgttcaaaggtgaacaagaacactttaatcgattacctagagcctctaatcacttaaattgctcttgagttatttccaggtgttgggaataacactttaatcgattacttagataatctaattcattattctattgaattaatcgattacagcttagatttattcaatattagcgcgtaataattttt

SEQ ID NO: 197100 - DNA, 415 bp, Glycine max
acccggatcttaagcaccgcggctgcaacttgttgggagcttcatgtgtgtttttctttgagcttgaatgaggtccttcaatggtgatttttcaccatggagatgcatcggaaggcataggataagaggataggggaggcaccatccactagggaataagccaaggaagaaggagcttctccaccaagaattgccttggataagaagcttgaagaggatgctttaatggaggaaaataaagagagaaggggggagcacgaaattgaaggaataaaagagggaaagaagtataactttgaagtgtatctcataatactttcattcatcaaagttaccacaagtgttacacatgcttctatttatagactacgtagcttgcttgagaagatttcttgagaaaactttcttgagaagc

SEQ ID NO: 197101 - DNA, 394 bp, Glycine max
  unsure (1)..(394): unsure at all n locations
ataaaactcagcttttatnttcatagatgaagatgaatccgtggcctctctcatggactccactaaggacaatagcatcatttcttgcactgaattgatgggagttggaagccatcttctcaatcaaattcctagcttcagcaggggttatatcaccaagaggtccaccactggcagcatcaatcatactcctctccatgttgctaagtccctcgtagaaatattgaagaaggagttgctcagaaatctggtggtgagggcagcttgcacacaatttcttgaatctttcccagtactcatacaagctttctccactaagttgcctaatgcctgaaatgtcttttctgatggcagcggtcctagatgcaaggaagaatttctccaagaacaccct

SEQ ID NO: 197102 - DNA, 414 bp, Glycine max
agcttccacaacatccaagcaaaatatcttttatacagcacaagctatcacagccaagcaaaaacagagcaaaggcagaaaactctgctcaaacaccaaccaaaatcacagcttttctcacttaaagaccacagtaacaattccttcgatccaattcgttaaccgttggatcgactccaaaattttactggaagtctatagtgcataagcctacattgtgaccgttgggatctactaacaaacatccagaactcattctgtactactctttccacagccaaccacacacaagcattttctgcaccaagctaaaatcctgctgcacctattttgacagcaaaattctgcataagtgcagatatcgaaaatcacacttcctctcatccaatcttgcccaaatcaattcctacaagt

SEQ ID NO: 197103 - DNA, 427 bp, Glycine max
ttataagtgcgggtctgggagacgaaggtcaagtgttctcgatatgtgaagatgatgttccaagtactttggatttggtacgaccatgctctcctgatttccagctgggaaattggcgagtggaggaacgccccggcatttacgcaacaagcataatgtaaacctttacggttttaaaagctctatagttgggcctaggctttagagttttcattctgttaaggctttgtgtcttttgtttttgaatttataatacgaggatctttcttcatctgttcctggtctctacccattctcattcatttgcatgtttatttctttttctaaaacggcagattcgatgacgagtcccccgaatgtactaatacctgtgacccgtctatcaacttctagcaagaaatgaatcacacggaagatgaacgagatg

SEQ ID NO: 197104 - DNA, 422 bp, Glycine max
  unsure (1)..(422): unsure at all n locations
agctntaactgaaacactaagtaagttgttcttcttatttgcatgttggacaatcttcaccctcttctgttttgcaggtggcaggttgtgttatatatggtggagcacatgattttggctgctgcattcccacagaagatacaacacatgaagtgaactatatggggaaccagccaagaccaaactttaatgcatgtggatattctggatttcaacatggccaacaatataatcagtaacagggacaatggagaactcaccctagtaatcagtcacaagccacaacaacaagggcgtagtctctatgacagaacgacgaagctggaagagactcttgctcagttcatgcaagtatccatgtccaatcanaagagcacaaagtcagccattaagaatctagaagtccacgtgggacaattggg

SEQ ID NO: 197105 - DNA, 415 bp, Glycine max
  unsure (1)..(415): unsure at all n locations
ntctaagttttctgttttccaaacctttgtcttctgcataatttataagtgtgctatatcttttcattctcttctccctttgccaaaatgaattcaacaaggactaatcgcctgaattctttttgtgtctcttttcccctttttccaaaataacaaaggactaaccgcctgaattcttttgtgtctcccttcttccttttcaaagaattcaaaaggacacagtctgagaattattttgattcttccctttcccttaaacaaaagatttcaaaggactaaccgcctgatatatcttttgtttcccctttacaaagattcaaaggactaaccgcctgagaactttgtcttaacacattggagggtacatcctttgtggtacaagtagagggtacatctacttgggttgttgtaactg

SEQ ID NO: 197106 - DNA, 389 bp, Glycine max
agcttgtaaagaatgaagtcttatcttgttcaacctcaagatgatttaaaacttaatgaggagattgatactttaagtcttaatgtcaatttcggtccattatattttgtagttgtttcgctttggaacatttaagttttaaaagtttcattatggttctttacgtttttgcaatgtatcattttggtccttttttataattttctgttagaaacattaatgttctgttagtttttaaattttaaaatgagttaatgtcacttttggtccatcatgttttaaaagtttcattcatcctttgtgttcttgaattgtatcgttttagtcattttttcaattttttgttagaaacattagtgttttaaattttaaaatattaagttaacata

SEQ ID NO: 197107 - DNA, 427 bp, Glycine max
  unsure (1)..(427): unsure at all n locations
tataagaacgaaattgcctaaatcatttccaaatatgcatgtgaattangaagcataaacaagaatcaagccaaggctattgcgcaagcaatcaatggggcaaaacacaccaaaagattatgatgatggatgactcaaattctcacaaaggtaaacttatcactttcaaattgagctttcaaaactatcatgacatgtaaatgaaaaacaaggatttcaagtcacaaaatgtcaagagactnttattttcagagcaattacccattacttgaacatatcctataattcaaagacaaacatgcaaatntaacacaacaaaactaacaaaattaaactagaacccaacaaaactaacaaaattaaactaatttaacacaacttacaaaacccaaaccaaagaacacactttccccccncccccatactt

SEQ ID NO: 197108 - DNA, 396 bp, Glycine max
  unsure (1)..(396): unsure at all n locations
agcttttcgattcattctatgtacccatggtggnccacattgtgttttgtgtatttttattcccgtttcgtttactttttataccctctcttgacatgcttaagccattttacttaagtcatttctcgcttaacttaaaaataaaatcaatttccaccaaacgtttgaattgtattgtccgttaacttcggttaaaatgaattccgaccgttcggtcgtgccataaccacgttggaaatcaaaaaaagaggtaaaaaaataatataataatcaaaaaaatatcttttagcaaaataaagcggataatcaatcggacgttttctctttgggatttctcattcttaatcgaattgactaataactaaagtgaatcttagggctaaatcaactcgccta

SEQ ID NO: 197109 - DNA, 375 bp, Glycine max
  unsure (1)..(375): unsure at all n locations
tcatgaataatagcctcaacagacttcttattcccagaatgatattcaataaataggcctcctttttttttaatggagagggttaccacttctggaaaacccgaatgcaaatcttcaatgaggcaatatacttaaatatttgggaagccatagaaataagaacttatgtacccaccatggtggctggaaatacaacaacagaaaatcctatggaaattgaagtgaggaagaaagaagacaagtacaatataacttanaatctattcatggaagaatctattcatgtttcatttgatgagtctaatgctattcctcgaagaaaggatattntaaatgatattgcagaatctttataacanatgcatattcatggac

SEQ ID NO: 197110 - DNA, 409 bp, Glycine max
  unsure (1)..(409): unsure at all n locations
agcttcctttctctctcgagcctcctttctctatctctgtccttgatctctcgtnnnctncttccccgcgagcttcgagctctctcgcggccgcgtgcagagtggaggttccctagtgtcataccctaatttcagccggtgacctttgcttgatgacatgcgaccattctttggtccttgtgaggtgcttggcatccatcattatgctattggtgaaattccaggacatgccgaaaaaccaaaaaatattgatgcacaatccgtaagtttccgtgacacaccggaaatcaaacggaagcatcgttgcataattaagtgaggctccgtaacattccgtatgtcaaagggggatgattatgtaatacacaaggctctctaacattactgaaagaaaacaagtatcgttacc

SEQ ID NO: 197111 - DNA, 415 bp, Glycine max
  unsure (1)..(415): unsure at all n locations
agctgggtcctagccaagtcctattattggacctacttattttctaaagncgccctaaacttgcaacagcagccacctatgcccaagttagtcccataaataaaactcataattgtgctcacatgccattgatgcatttcactgagcacttggtgggtgcacctttaagcatgaaacatatggggaataagggcaatgtgacatgcccaattatctcataacacaacctaggcctaaggccaaattgctccacggatttgagcaaattcacacaatttagagcacaaaagggcatcaatggaaggctagacaaacaaagaatgatgtactcacttgttgggagtgaacaacaatgccaaacggaaccaaaattgcaagaaaatgcgactntggactggaaaatttatgatttctg

SEQ ID NO: 197112 - DNA, 413 bp, Glycine max
agctttgtggatggctgcccaagcccatgtatttttgttaaggcagaaatctcgatcaagatgactaaaggagggtgattgtatcaccagatatttccatatcaggatgaatgtaaatagaaacagaaattgctttaaaggactactcattgagggtatatggatagatgaacctaacaaggtgaaggaagaaatcataaccttcttttccaagagatttcaagaagcagatattcatagacctaagattgatggtattagtttcaaaaccatagatcaacatcagaattccatgcttgtggccccttctcaggagatagaaatacacaatgcagtttgggagtgtggcaatgataaaagcccaggtcctaatggcattaatttcagattcataaagcagttctgggatacat

SEQ ID NO: 197113 - DNA, 480 bp, Glycine max
  unsure (1)..(480): unsure at all n locations
ggaagctcgaggaaaagtntgaaggatctgtagaagatgttttggcttttacatgcccaactcccttgagtagcatttgtattggttgttaacttgattgttgcatctcagtacatttgatatttgttttgcattgtgcatcatcatagtgtgtgtgaaggaaattttctaagttagaaaaatttcttcaaaggcaaaaactctatgttttaatcgattacagagttgtcataattgattacaacaagttgtttgaagcttaaagagttaagccttgtattggtttaatttattacactattgtttgagacaatgactgattttttcaggagtctctgctttaatcgattgccagatgtattaatcgattacttctctcttgcttaattgttcagaggtgaacaataacactttaatcgattacttaggtcatctaatcgattactttgtcttgagtcgtttctagatgttggataacac

SEQ ID NO: 197114 - DNA, 426 bp, Glycine max
aagcacctgagctgcagcttatcttaggctgcctcggcttattttttttgccccccggaagatttaagccaagcccctacttttgaggggcaactcccgccttatgacgactattccgggcaagatgatgagaaaggagatacccatcttggccccctgctccacctcaaagatccgtccccacatgaactaccccaaccgaacatagtccgccatatcccggcctcacccacacccgtaaaagaatctgttcccttcgcggaagataatggaaagattgaggcgcttgaagaaaggttataagcagtcgagggccttggcaattacccattctcggatttagcagatttatgtctcgtgcccaatattttcattccttccaagttcaaataccggactttgtaagtacaaaggcgacatgttcaa

SEQ ID NO: 197115 - DNA, 484 bp, Glycine max
  unsure (1)..(484): unsure at all n locations
aactaagctcgcgctatccttcaccaaaccggtcggtgttttcttgtccgattcaggcgggctgcagcaccggctccgcttccctaactgtactgaggcggttgccgtggctctatcctctatggttttctggagttttaacatgatctccgagatggaagccatttgatcttttaagaccgatagatcggccttcatctgttcctgcacaccctcttcattatccatttttctggatcgagtgttataggggtgccttggtgttttcttagttatgatgaaattcctaaagaaataaacaacggtgagtatgccaccaaaacatgagtatgcaaatggatgatcggagcacttggatccaccccaaggttntttagatataatgatgagttcagaacttctctnttataaaaaggacaaagctctcatctagccaagaatatacaaaagggtgtacaagagaacctaactgattctaattata

SEQ ID NO: 197116 - DNA, 433 bp, Glycine max
  unsure (1)..(433): unsure at all n locations
agctgactcattagacacatattcatctgcagtctattttgntnanaaccgcattatttatatatattatttattaataaaaaataatattaattaaaataaatatataaatttaataatataaaatattatatatatgtatgttatgaaccaatcaaattcaactacccataactcaaatttaattcatttatttaacaaattcaattttgaatttaagttaagttcatcttaggaataagatgaaaaagacgaaaataacgaatattgtgaaaaaagtcattgccctaataacaaattccgacaaaacttcaatgcaatctgatttctgatttactttcgaggaattacagaacgttgtgtctatactcatgccttccatgccaaatacgttggaccttacgaccatgcccaaagaacaaagtagagaaaa

SEQ ID NO: 197117 - DNA, 417 bp, Glycine max
agcttgcttgtggagcttctatgtttgttttatctttgagcttcaatgaggtcctttaatggtgattttccaccatggagatgcagcggatgacaaaggagaataggtaagaggcggcgccatccactatagaataagccttggaagaaggagcttcaccaccaagatgagccttggataaaaagcttggagaggatgcttctatggaggaaaagaaagagggagagaaagagaaacgggggagcacgaaattgaaggaagaaaaagggagagaagttaaactttgagttgtgtctcacaagactctcattcatcaaagttacaacaagtgttacacatgtttctatttatagactaggtagcttccttgagaaagtttcttgagaaaactctcttgagaagcttttttgagaaaac

SEQ ID NO: 197118 - DNA, 427 bp, Glycine max
  unsure (1)..(427): unsure at all n locations
gaaactcagctatgagtgatcagatgattcggggagtttgttataacaaagatgatgacaaaaagcccaagagaatgagttcaagactgaatcaagaacacttcaagaatcaagaagaaatttgatttcaagattcaagaatcaagtttcaagatttaagttgcaagaatcaagaatcaagaataatcaagttgaagattcaagaatcaagacaagactcaatcaagataagtactaaaaaaattttcaaaaaaatgagtagcacatgaagttttcacaaaagcttttaccaaagagtttttactctctggtaatcgattactagtttactggaatcgattaccagtggcaagttntgttttcaaaaagctttcaactaaatttacaacgtttnaatcaatttcaaatggtgtatcgattacatata

SEQ ID NO: 197119 - DNA, 383 bp, Glycine max
agctagatattgcacaacggaagctctctatatttttaaatgggcatcacctttcaaagggaagaccgattcacgcgcgtaatatatacgagatacttgatattgaaaaacggaagttgtcgagaaattcaaatggtcataacttatcacacgaaagttcgattcaggcgcataatatatcgagacgctcgaaattgagcaatggaagctctcgagaaattcaaagggtcataacttctcaaatggacatccgattcaggcgcataatatatcgagacgcttgaaattgaacaacggaagctctcgataaatacaaatggtcataacttttcaaaacgaagaccgatttacgcggataatatatcgagaagctagaaatcgaa

SEQ ID NO: 197120 - DNA, 252 bp, Glycine max
actcagcttctcgaatatatgcgctgaataaacatgcgttatttttatgaccatagaattctcactggattcgtgtgacagtatgagcttggaattctcgatgcgttcgttatcaattccagcgcgtcatatatatgcgcctgaagcggacttcggggacaagccttgaccatagaaggcgctgaagcatcctggctagagcccagtatctcgatatatctgcgcctgaatcggacatccagtgtcagtgat

SEQ ID NO: 197121 - DNA, 348 bp, Glycine max
  unsure (1)..(348): unsure at all n locations
agcttgtgatattctgatggatttccttttctcttgttcgnaatgacagaatttgctatatcttcctgagcagtttgctcatgatacactttccgagaatgacatacaggtaattcacatgatgcgctttataccgtctatttgttgatattaaaaatatcattagggcaatgtctttcatttgttgtgattactactttaaatcttatttactctacgggcaaatatgatattatatttttttgtcacatgtttacaaatcttccatacacctgaaggaatgctttttaccgagcaaggggtttatgttgtctaatctggtactgcaaagacacaaaacaagcaaag

SEQ ID NO: 197122 - DNA, 331 bp, Glycine max
  unsure (1)..(331): unsure at all n locations
agctttgaattaatacttgcatttgtaatgagtaaactctatcattctttatttctgtgataaatattcttttcatcttagtantgtttttttttcttcatctaatctttccgaacgacaacatgggaattgtgttgctcagaaaaaaagaaagaaagaaattaccaatagtagtctcaatggctgtgctggagcccggatggtgcatgaaatttgtgcaattgtgcgtacactttaactaaagcctaaaggtataccattgtacctcttcctaatattctaatttctatctgaagatgctggccttagaatgtaaacacagttttataat

SEQ ID NO: 197123 - DNA, 413 bp, Glycine max
agcttctacttatgtggcagggcgggcttccttcattttcttgactcaactgcgagctttgaccactgctcttccttcccgcgatgcttctcttcacatctgcctgagtgggcttatagcctaaaccatacttcccacgatttcctttggcatttatcaggctagttatgccgccattgtctttgcctaaacccattccgggttcgtaaccgttccccaacataactcgggccatcattactgctgcatcggacaggcagggctgcccagaaaatgaatcaatggaggaaatgcttaccacctcataagactggaaagcgtgttctaatgactcctccgcggctcccacataaggcataaaggatgggcagctcaccaagatgtcttcctcgcctaatacgatgaccagatgc

SEQ ID NO: 197124 - DNA, 352 bp, Glycine max
tcttagtctcacctgatgaagatgaattcgttgctactttatgcactcctctaatgacaatagcatcatttctggcactgaattactgggagttggaagtcatcttctcaattaaatttctggcttcagcaggggtcatgtctccaagggctccaccactggcagcatctatcatacttctctccatgttgctgagtccttcataaaaatattggagaagaagctgctttgaaatctggtggtgaggacaactagcacataatttcttaaatctctccaagtattcatataggctctctccactgagttgtctaatacctgaaatatcctttctgatggtcgtggtcctgga

SEQ ID NO: 197125 - DNA, 410 bp, Glycine max
  unsure (1)..(410): unsure at all n locations
agctttataacagattttagtaatgaccttttaacctagaattaaaataacttaatgccattaacctagggaattaaaaaaaacattatggctgagtgtaaatgaaattttggcaaccaaaagttacccccaacagccaacaagtcagccaccatttggtctcccaaaaggctgatgcctaggttgccaattgggcccttattacaacttgaactaaacctactaaagcccttttagttgattaacccaaaacatatttttggtcagccaactttacaaggattgagccattatttagacaaactaaacactctaaaattgagacaaagtggngccatttagtcctcctccatttgggccatgatacaactcacaaccttggacttttctccttgaaactagagcttgta

SEQ ID NO: 197126 - DNA, 416 bp, Glycine max
  unsure (1)..(416): unsure at all n locations
ntacagcagaatttagtaatgacccactaacctagaatttaaataacttaatgccattaacctagggaattaaaacaaactaaatggctgagtgtaactgaaattgttggcaaccaaaagtcacccccaacagccaacaagtcagccaccatttggtctcccaaaaggctgatgcctaggttgccaattgggcccttattacaacttgaactaaagcccttttagttgattaacccaaaacatatttttggtcagccaactttacaaggattgggccattatttagacaaactaaacactctaaaattgaaataaagtggtgtcatttagtcctccatttgggccatgatacaactcacaaccttggacttttctccttgaaacttgggcttgtattcaaatagtatggacagcac

SEQ ID NO: 197127 - DNA, 177 bp, Glycine max
accggcaagacctgcttaagctgaaaacatatcagcctagacctaaccagcaaatgaaaaaccaaaaacaaaccacgacttgcgagacaccccacccaatcatgttacaaaaaaagcatttaaaacaatccaacactatccaacagccaacaatagaaacatctcgactccagaaga

SEQ ID NO: 197128 - DNA, 444 bp, Glycine max
  unsure (1)..(444): unsure at all n locations
agaaactaagcttacagtgcatataaccttgagtactatctgtgagggttctttattctttntctcttcttccttcttttcctctgtggtctcttctttcctttcttcttccttgttctcctttaacagcaaagagaatattaattgaatatagcaaagatgtgactgaaaaatctccaccatgtgtagaactagagtatatatggcatgcattacttgataatgatgccaccaccatatatatcatagagcagacattatatacaaaagatcataaaagttaaaaaaatgcatgatcctagtcctatagtgtagttagttttcaaggctaaagctgtcgaacaaaggaagagacagattgattaagaattaatagaccagaatttttggtgtaagagagaactcttacttcacccatttctgtgataatgaacaatgatctct

SEQ ID NO: 197129 - DNA, 410 bp, Glycine max
agcttcagaccaaagcaacccaaaagctatgtatttaaaacccctcaatctagtgggttttcaaggatcgagaactgaaaacgataatggggtaaacttggaccaaactctcatctcaaacaagactatatcatcaatcgaaactcgctccaactgtgtttacgacgaaaaccctaccgaatcaaaatttgactcctcaacacccaattttaccctacaaatggctcttgttttcacttcggtcactcatattcctcatttgcacagacaaagctttctcataagccctaaatgacattctaaactaggattaactcccttaaaccccaaataccactaaattcagatttggccttcaaactacaaagcctaacttcttttccactcataacatcacattctcactgtct

SEQ ID NO: 197130 - DNA, 490 bp, Glycine max
  unsure (1)..(490): unsure at all n locations
tactaagctntcatagtgaaatcaagagcatccatctccctaagagttctctcacgaggtggaggttgagccatgtgcttactatgaaaattagtagtggaatgctcaaaatcagaatattcagaatcactctcaacaatatgctcaaaatgcatagaatgaccaggatgcacactatgcctaactaatctatgaaaggttctatctatttcaggatcaaagggttgcaaatcacttggattgcccctagtcatgcactatatgtagcaaataatgtgtttctcaacaagaacctaacatgggggtaaaactacagctatactcaaacgatatcaaaataagctgaaattgtgtgaggaacaccctacaatcatgaaaagatagcacanaaaatttcagacaaaaattcaaagtctaactatgaaaactacctaagcaaagcttagaacaataggacagtaatatttgaaagataaaaaaaatagtaaat

SEQ ID NO: 197131 - DNA, 365 bp, Glycine max
agctttatcttgactcatcttctccttcatgaggttcctctgatcatctttcttctatctccattctgcttccattgatcttcaaaaagcaaaggactccattgatgaagaagatccaaggcctacaagctccacataggagctacatcaaattcatgtgaaagtttaatagaaattcaaaatttcctccaattttgtgtgacacttacgctataaatagaggccatgtgtgtgcattttttcaaatatgaacatttgagaattgcaaatcggagttcatacatcatttgatgcataaacattcatgctccttcactcccttctcctcaactaatgttctcctaccttcaagctcttatccatgg

SEQ ID NO: 197132 - DNA, 461 bp, Glycine max
tgaccggatgtaagttacatcttcttcaaccttagtcattcttgactccatttcattgaagcgcatatccacttgcagttccaaagtatcaaacctctcaccaacaatggtttgaagaccatcaaacctttccaaaatcttcaaaagaatagatgaatcttctccctcatgtccttcttcaccaacatttctagcacccttctttatccaagaccaatcatgctctttaacatatccaaaagatgttatgactaaagcgcctataaggaatgacctcttgattggaacataaggttcagaatcaagagggatgttgaagtgttgaaggaaaagggtaacaagatgaggataaggtaatgggcattcaatcgcaatgccttatgcatgcgatatctaacaaggtgtgcccaatcaatttgtaaacctttctgataggcccacatgacaatgagatcttcttc

SEQ ID NO: 197133 - DNA, 403 bp, Glycine max
  unsure (1)..(403): unsure at all n locations
agacttaagttatgtgccattatgttatttctcactgccattgncactgtttgggttcgaggtaagcttggtctctttttcatttgtaggatagtttactctttttcactgccattgtcactatgtgtaaaagtaatatagtttactaattcgccctgtacttttttgctcaatgttgtaaatagtggttagatatgaagcgactaattgggttagtgaaaatcgattgggcagggtctgagcagaaagctggtccatctattgtctgcgttgctttttctagtttcttcggcaattttcaggtatcccattccttcaacttttgaatctttgatactagcttacgcgtgtgaattgcaatgcatcgattgttggtcgtgctaccatgttcgaatgttttgat

SEQ ID NO: 197134 - DNA, 370 bp, Glycine max
  unsure (1)..(370): unsure at all n locations
ctaagcttgaaagtgtgttttaccttttgcaagccatctgtggcttacgagcgtccgtaagcgcacactcatgggctaagcgcgaggaagactctggaagaagatgagttgacaggtttgctaagcgcaccgcttagttcattcgctaagcgagaaagcacgcgctagccaaaattcactaatgtgcactaagcggttcataagtgcacaagcacgaataaaggcacctatttaagcacgaagcttnagggctcaccttttctcattctattgcaggagaaccaagagtggctcactcattaaaggcacagtctgaaatctgggaaaagttgtgaaagttctaaaaaatacttccagagtcagactgaaa

SEQ ID NO: 197135 - DNA, 414 bp, Glycine max
  unsure (1)..(414): unsure at all n locations
agctntttaaccgggataggctgatagcttttgggctcttgcacggcagcatctctggtgaagtggatcaccaaaggtttgggtttgcttaggctcttatcagccaaatgcatgcatacatctagctcccccttccttgtgccacaaacctcaaacaggcctttgcccatcaatccttgtaacaattcttctgccatagagcatgcctccacgtcatgtgatgcaccaggatgcatcaaacaagaattcccctagtgcccatcaaggcaaattatccctgcatcacacatcgcctccaatatgaacctctttgaggtcaacacatcctccatccacttcgggcctcgaggtttatactcctccaccgtattaactgccggtcccccatgactagcaagaggattcgtcctcaca

SEQ ID NO: 197136 - DNA, 413 bp, Glycine max
ggaccttaatcacctgagcatgcacttgattggaagtcacttttttatttttccgtaactcccttcgtaagcggaactaaaccatgggaaaaaaacattagttataacaaaagcatcccatctaaatcgaagcttaccgaaaataacgcttgaggccgagagtgtaaacaataacactttttggacaatatagggtttatggtcatgaaacctcttcacttgctaatctcccttcagcttcctctttttggaaaaatccttcaagaactttgcatacttaaggagctcaggtagcactttcaactccaaggaaggtggttgaacggtggaacgctagggaaggctgaccaccgatgaaaaaaaactggaggcatcacaatcgagtgaattgcgacaagattatgccaaatatc

SEQ ID NO: 197137 - DNA, 338 bp, Glycine max
  unsure (1)..(338): unsure at all n locations
agcttgcaagtgtaatcgaatttcttgtttttttctcgaaacacaaagaatatgttgcgctagaatcaaaaggtacagtcaaaagagtattcttcatgaaatatatctcgatgtgagtcatagaactatagagtatcanccttgcttagaatgagaaaccacagacaaccatactatctatgcagtatagatagagcaccatactacaagcatacttagaataataaggttcctataacaagtttataacgtacatctaagaagtgagaattaaatagtcactacggatgtatttaatgaatcacaagtctcaacaattcacgtttttatcacacaca

SEQ ID NO: 197138 - DNA, 428 bp, Glycine max
  unsure (1)..(428): unsure at all n locations
aactcagcttgaagaactattccgaaaatatatgaagttttttatatttgaaaaaaaaatgaagcttgtgaaggatgtcttcttggaacaaaacatattaccgttttcaactgataaagcatgaaagctaaaaacttgttggagttaatccacattgacatttgcaaccaataggcatcgcactcacaacaataggacttcatcctttcattgatgactttttagaatgacatgggttactttcttaaagaaaatacaagtctttaaatattcaaaagctaaagccttgcgagancaaaggggaacatataaagtgctcaagtgatcaagaaaaatacaactacatgattgatagtttataaatgaggctngacaccactacgtacatatctcatacaaaggggttgaagaaaattgatatctggaat

SEQ ID NO: 197139 - DNA, 398 bp, Glycine max
acttatatgagctcttttattttttttttaagttgatgtgggactatgcataatccttggagctctaatttagggccgccaacaaagaggctgctaataaggctggccatagatgaccacaattaaaggcagttttccaacaataaccctgttcgtctaaccccaggccagcccataacctgatgtaattaagtgggggataaaacagtcttataatccattgccacttgcattaatgtccagccatgccacccatatacttagcaagatgcttgcttgaatgtggaacgcattcacatttttaggaacctaaaccaacaagcttcccacaatgccttaatatgataccccaccaaggcctagaccatcacttacccacattgcacctccatcttaca

SEQ ID NO: 197140 - DNA, 430 bp, Glycine max
gcaccttacaaaccgattatgtatgtgtttatttaatagcaatcccaaattctaatatggtattaaagtctatcctagatctattgttaggtcacccgcattgccactctccaggtccatagccctatgagcaaaggggtgtgctgaaaagtctccttaattgcattcacccttggtcaccttaatttggcctctttgtgttgccttcgttgcagtttccaactcctacattgtgcaaggtgtgaggtggtgtgtttagtctcacattgactagagatatagccaatgtagttaggtcttataacccaatggcagtcctccccatacgaaccgattttttgagatggagttaggtcttactacccaaattataagaaggaatcttaattatatggaagaacttgatttcataatctaacatcatattctg

SEQ ID NO: 197141 - DNA, 401 bp, Glycine max
gcttgattcaccaaaatttattgatttgcagtgcgatggagactgttgtcgtgcggaggagccatggtggcacgtggtgcaacttgaggagaggagaggaggattctgagtgcgaaagagaggagtcgcggcatcaccctcatggtaattggctactggccattggctgcacaaggaaagatgactgcatggtggaggtggctgtattagtggtgaggtgattgcgccaaagggatttaggtttagtttactgtctgtgtgaaatagacttgtgccttatgttaaaggtattagatctgctaaaacaccaccattttttgctaaaccttacaccttattttttttaatagagattaaaatacccacgggacccgctggtaaatcctgtttaacccgcattt

SEQ ID NO: 197142 - DNA, 469 bp, Glycine max
  unsure (1)..(469): unsure at all n locations
gaactaagaatactaagctgattgtgaaataaacagagtgggtattattttatttatgttgaaagttttcgatctcaatttcgctaacacaatctaataggggactattgtgtaccaccgaaacttccacgatccctcaaaaccttattctgattcataacatttgcgagtaaggtagttgtggcacgtgaaaggttacataagtgcgacatttttatactttttattggttagggcattagcaaaagagaataagaaaacaaatggtttaagatgcgtacacagcgccagaaattgaacgcatttcacgcagaggaaagaaagagagaaacaaagggccagcaaatatctcccttttggtcttggtcggcttttgtatcagctacaatgggataagagatctgtcacccaagttctttgctagatatgaaaattggataanaacaatgtagcttatctcttgtcacac

SEQ ID NO: 197143 - DNA, 313 bp, Glycine max
acacgaggccacattctatttactgtgcaatccacgaccggacgctgcacgaagtgcggcggggagacgggtgcggatcacgaacacgagcatgaccacgaggacccagaccgggatgacgcagcccctagaatcaccaccccaacgatgcataatgttcgaccttcccctgccgaagagccacgtggaccacacccgaccaacccaagcgagaatacacgcggcccagctaatctcagaccaaacacaccaattcgcagggagcgcacctcgccagacaccgagggggaccccaaaaaggccaacagagcac

SEQ ID NO: 197144 - DNA, 437 bp, Glycine max
  unsure (1)..(437): unsure at all n locations
aagctggaggganaacttgatgccttggtcaacctagtaactcagctgcctattantaaaaatctgcatctgcacctgttactgttgcaagagtctgtggtctatgttcttctgttgatcaccatacagatctctgtctttctttgcagcaatctggagttaatgagcaacctgaaacctatgctgcaaacatttataatagaccccttcagcagcaaaaccaacaacagcagaataattatgatctttcaagcaacagatacaatccaagttggaggactcatccaaatctgggatgggcaaatcctccacaacaacagcagcaacaacaacagcctatccctcccttccagaatgttgttggtccaagcaagccatatgttcctccttcaatgcagtagcaactacaaagacaacaagcaactgaggcctcttct

SEQ ID NO: 197145 - DNA, 436 bp, Glycine max
  unsure (1)..(436): unsure at all n locations
cttaagncacctgcggcatgcaagcttgctgctgttgagatatttcttctttttatnctctagaaccctctgttgtgcagcgccattgtcaatcactcttgtccatctgttcatctgctctgcatattaccactgctttctattgatatctcctccattcattaggagggttttaggtgtttatatatattctttttaaatgccaccaggatactgttcatccattgcatttctctcttgggtctcaagttttaatatataaaaaaaagtcatctgctgatcctgttcatgttctgcttttgtccgcggcggttaagcattgatgactagcttctgccatggatgagtaaacattgctgtgttgctatctgcctttatggtgggaaagcattcaaaaattacgtattgctttcgtcttgagtggttataaaccatg

SEQ ID NO: 197146 - DNA, 310 bp, Glycine max
  unsure (1)..(310): unsure at all n locations
attactagtgtcattaattggacgggtggtctccactgcactacagctgtacttcaggtacttctatacaaagttatcacttaccaacaatttttccgaactaggtgtgaaacaattatgtaaataaaatgatgcaagagaaatatatatttcttgcaagttactgtcacattgatattcatatttaaatgaacaaggtaggtcatagtgcataccttcctaagtataggtgttcttctaataacaaggaactagcataagtcatgagcacaaggcanaaggggtagaaaatagatgcagacaatggacc

SEQ ID NO: 197147 - DNA, 399 bp, Glycine max
  unsure (1)..(399): unsure at all n locations
gtgttgttttcaccttctttctatgcttatctactggctaagcgagcatccactagagcgtaacgctcctgggctaagcatgaggaagaatccaaaagaagatgagctttacaagtttgctaagcgctccacttcatctcactaagcgcaccactttagtacatccgctaagcgtgaaaggcgcgcttagccaaaaatcactaacgtgcgctaagcgagccataagtgcgctaagcgcatcaacacaaacaaggccacctatttaagcctgaaatcagatttgtgaagagagtttggactaagatacatagctttgcatgtctagggtttctagagagagaaaggtccaagttccatagagtnctgagatattctgctgtgtgaaaatctgcaaagacc

SEQ ID NO: 197148 - DNA, 415 bp, Glycine max
aagctggttcgaggacttacccgttgaagatcgagaacgtttgttatcttcgaagaacggttgaaacctttgcgagattcctcacggaaaacgttacggaaacgtttcggaagcgcctcggcttagattttcttcacggaaacaatttttccaagcaaattcgaaagagagagaagtgcctaaggggctggacccctttcttcttcacttcctcccctatttatagcaaaataggggaggtggttgccgcccagctcgcccaggcgagctcagctcgcccaggcgagcagggttgcttccttcagatgcagccgccttctggaagaagcttctggagggcccagatgggcctgagcgctattcgcaccctcatttgtagtatatacacccccctctgttttgttttgggatcttt

SEQ ID NO: 197149 - DNA, 401 bp, Glycine max
  unsure (1)..(401): unsure at all n locations
agcttatccttaaacaagtattagcaactatcctctttacttgntnaatttttttctcaccatgacattggtgggagtatccaccgggtttgttgatggctaatctccaccgaaaaatttggttggtcatctatagtggaattttcccttccaaccacgtttgttccatccacaaagctaacactcaagaccttgcttactctgaccaacgacatgttagtaatacttgtttaatctagtattatgtgtacttaccaaggacgttgaaggttatccttgaaagcatgctttttgcaaacaatataattcttgagtaagagattaattctaaatttaagaattggagttaaaaattataaccagaggatctttatcaagtagaagacacagtatatgctttg

SEQ ID NO: 197150 - DNA, 462 bp, Glycine max
  unsure (1)..(462): unsure at all n locations
tccagggtatgccctctattcgtggacttcccttgttattgtatgaangattcatggngatcctccagtagagtattggaatgacttgaaaagtgcccttaggaagaggcatatcccctcctactatgaaagggagcttatgaacaagttccaaaggcttagaaaaaggagtatgaatgttgaaaagtataggcaacaaatggaaatactcctttagaaagttgacttagggaagaggaaagaacaagtattgctaggttccttagtggacttaatatggaagtgagggacaaggttaaactccttccatatagggacctagatgacctagtccaactntgcataagggtagagcaacaacttanaaggaagcctacttcaaaatcttatggctctaactcttatccaaagaaataccaaggtcaaggcaccttangggctgcaccttctaagcccaaagat

SEQ ID NO: 197151 - DNA, 411 bp, Glycine max
agcttagagttatgtctcatattgatttattcgttttcatgtagtatttaatcaattacacttgtgtttgagacaatgactgatttttttttttctgaagtctctgctttaatcgattactagggggattaatcaattacttctctctcatttataagtgcccagaggtgaataagaacactttaatcgattacttaggccatctaatcaactacattgttcttgaattgttttccagaagttgaatgaacactttaatcgattactttgttgaaataattgattaccttatagatttaatcgattacaggcgggtataactgcttttcctataaataaccaactggtgtcacatctaagcactctaaaatcaagagatcattgagaatatccatacatctcaaaaatact

SEQ ID NO: 197152 - DNA, 466 bp, Glycine max
  unsure (1)..(466): unsure at all n locations
tagctgaatgcagatcgaatcgaagatagctgagctctacttctgtcagcttagcggaccaaatcaacctcagatgcaagggttgggtgctaagcgctcaagactcgcagctttgcgcatgaacagagatgcgcttagcgcgaggctcgcgcttagcgaaaggactatttttcaaaaagagtttctaagttataacttagtcctttcccaagaaattgaagcccttaggttaaatatttaaaaattggctgatatactcctatgtacaacttacatagcaagttccaaatgatcaaatgaatgacaaacaaacacaacgaagattaaaactgggtttcctcccaagaagcgcttctttaacgtcattagctcgacgtttttacctctccgggcaatcttatgttttggttctcaccttaagaacctcttgaccttctcccattacctgcnagcaacattgtgttct

SEQ ID NO: 197153 - DNA, 408 bp, Glycine max
  unsure (1)..(408): unsure at all n locations
agctntgtccgcaaaaaatcacttttattttgtttaaggtccaacgccttagacggtcccttttgcttttatcggttaacatggaccgttcaaaagcataaaatcaacatgtaactttaccgcttttgcaagaactacgtaggtctgatttcctcatcgcaattgaggatacgtaggagcaaaagctcgacttttgtcaaccaccccaagagatcgttaatggtccaataccttaacgtttctctcctttcaaaaaaacaagagatcattaatggtccaacgccttaaatgacttttatttaatcaaaatctatcttttgattaaagataaaaacaacttaaccaacggtcagttttcaaagaactacgtaggtctgattttttatcacaattgaggaatacttagga

SEQ ID NO: 197154 - DNA, 407 bp, Glycine max
  unsure (1)..(407): unsure at all n locations
gacacaagaaactcagctgcatttgctatgaagaaataaatgaaatatgctangataaaaatgaaaacaaattcagcaaaatcatggtggctgcaaaaagtaaaaacaaaaagaagtttaatccacatgtgttgaagcaaaggaactacataagatttataaaagatattcgcatattcaagtgtcgtttgtgatatttctacacacagatataaaggaacaattacaaatatttgttatgttccatgcttcaatatttgattagatacataatagtatcaatcggtagagtttaagcttgaactaccctcacaatacaatttcaaagaaatggaataagagaagaacaacacatagaacaaaatacaacgtctaaatgtaaggaaatggagaaaccatccataaaa

SEQ ID NO: 197155 - DNA, 424 bp, Glycine max
  unsure (1)..(424): unsure at all n locations
ggatccttaagtcacctgcggcatgcaagcttttatgtgatgggaaaactcttaatttttctgntatgnaaaattgcttccccactcccatttttgagtgttttgatggctgtttccaatttcttaattcccattctttcagatttatcttctagatatttatgtgttttacacacttgtatcggctgtctacggattcttactgggggcaagagatcgactgggagaggtaagtacctttttgataatatgctgtgttatttttattatcttttacctgtatcggcttaactttttttgtggttgtatgtggtcaccacattaggtcattggaagcactgctcatactctttgagcagtttcctggacttttatggcacactttatgtccctacccacaggtgctgttgtgaatgtgcttttc

SEQ ID NO: 197156 - DNA, 400 bp, Glycine max
  unsure (1)..(400): unsure at all n locations
atagaaactcaagcttctttctcagcaagggctcgctgtagggtgtgtacccacctanatgttcnctctccttccatatgtatgccgacttcctcagatgtcaatccgtttggtctctggcatcaagaagatgacaaaaacaattgcaatgacagataccaccaaaagaatgataaaactctctccaagccctatggcgtcaaccactgaaaggaagctggtggacatgatgacactgcaaatccagttcacggttgctgacatgccaccacacaagcctctatactgttcagggtaaatctctgagttcacagtccatggcacaggacccataccgggagcaaagaaaagaatataccaagccaaacccaagatagcaatccatccaagtgtatgaccc

SEQ ID NO: 197157 - DNA, 421 bp, Glycine max
agcttattgccatagggatagatttatatatcatataagtaactaacgccagccaaaattttatgtatggatagaagactaagcagtgatagtgaatataaagaggctcgcaaaggtcgtgctcatcttgtcaagtatcaaatgatgtgaaagaaatgctattcaatggacaacaatatatatacgagatttgataaacatgaaagggaaaatgaaaaggaaaagaaagaaagcaatagataagttatgtaatgagaaaagacgaaatataaacaaaaagtatagaaaaaatgagtatatattttataactaacaatttgttttaaaaaaatagaatgaaagagatactctatcttaaatataaaagatttagaaagtcatataaaagaaatcagtatatattcatgtttacaatgtatcc

SEQ ID NO: 197158 - DNA, 482 bp, Glycine max
  unsure (1)..(482): unsure at all n locations
ctatgaaactcagcttgtgttcgataattgcctctatgcttaacttactttcttgcttaatgaacaaagggtaaatgggtgtatatgttgcttaatcacatattgacaaccctaaattgattttcgcttagtaaattaaaatagggttggattaagtggttaactgttatggacgaattcttcataatctaggacaagagaatggcttctgaatcagaggaaacaacacgtttttaatactattaatttcgtattccagttcgcttgttctttaattcacaaaacaaacaacccccccaattgttactattattatgaagcatattatgaacatttggttagtcattgcttgttgggaaatgacctatgatcacttcctagttactgcattctaatgtatatttgattcgggtacggcctcgatcagatttggcggtgttgccgaggagcagtgtccanaggttcataataactagtgattc

SEQ ID NO: 197159 - DNA, 384 bp, Glycine max
  unsure (1)..(384): unsure at all n locations
agctttctcttttgtgcaactatctcattctctntttcaggtgtagaatgaagcttgacaggttcaggcgcaggtgctgctactggtggaggcacttaaatttggttgccaaacctcaaggtgatggcactcacatttttcagattctgcacagtttgtgaaggcaatttgttagaatttttggattgagcttggtttaactgagtagccatttgccccatctgatttgttagactctgaatggaggctcttgtctcttgctgaaattgcatattctggatggtcatttgcctcactaactcttctaaggaaggttaaggagaggcctcagctgcttgttgtctttgttgttgttgctgttgtattggaggaggaacatatggc

SEQ ID NO: 197160 - DNA, 373 bp, Glycine max
  unsure (1)..(373): unsure at all n locations
tgtcgatgctaggcaggggttatgcatctntgggacactctntgntgaggntggtgtagtcagtgcacatgtgccatttcccattggcctttctcaccatgacaacattggctagccaggtcgagtatttgacctatctaataaattggacaacttgtcgatcttttcattgaccaccttacgtagtttttctcccatctttctcttcttttgtgagactnggctggccagtgggcagatagccaatttatggcatatgatctangatggatgattggcatatcaaatggatgcctagcatattggatggtttccaggcaaacaaatttgtgttcctatgttggacttcaactatatgtctatgttcgtgtat

SEQ ID NO: 197161 - DNA, 381 bp, Glycine max
agcttagaattcaaagcttatctataaattggaaaaataatgtcagataaggctacaaaaggaaataagagtgtcaggcggcttgtgtcccacaggcttgtatgtgatgaattttttgtgcatcagctttagtcctgcatacttaacatgataaagattggcataagtagcttactgccgcgattagtagcgggggcttaagcatctcaatcctttgatttggacttgttcaagctacaatactacattgttaagtgataattggggtgttaccaaatggtattaaggcatgattttatcatgatatgtgcagggttttaaatagcacgctatagtggcatagcagtgcagagcgacccccacctgctgcatgggatgcca

SEQ ID NO: 197162 - DNA, 448 bp, Glycine max
ttccgctagcatagggatcgcagaagaactatctttattatgcaagacgaagaccctgctgcagcccttcgactcctgctgaacaccagtcaagccaacacctcaagtgaaaagattcctggtgcttcgtcctcctctgatgctgacataacctcttcagtacgccaagattgcctgctcttgaagttatcaatggaatacgcacgggaagacgtacttaaatccattgaagagaacccctctgccgcttttggacacctgaattttttgaagaaattgcataacccccttacctctgatgagattctaggcaaagttatccaaatcgaggccatcatcgaccagtttgcaagtaccgtgcagaaaaaacgcgaaaatgacgccagactatatgcccagaaacaggcacatattcttctggtcgagaaagcccaaactgctcaacatg

SEQ ID NO: 197163 - DNA, 327 bp, Glycine max
agcttttcgtttaagatagcatagttttatacggataaccactcgggtatttccgcccgtcagcgtgactcaaaagtcagtatgacagatcttgtgagcgcggaagatgacgtaaatctccgcgtgtcaacgggcttgtcggccgcgattgacgaagggcgcaagagacgacgttagtctctgcgtgctatcaggcttttcgtcttacagatagcaaaaaggtttatacggataaccactcgggtatctccgcccgtcagcgtgactcacaagtcagtatgacagatcttgtgagcgcgtaagatgacgtgaatctccgcgtgtcaa

SEQ ID NO: 197164 - DNA, 392 bp, Glycine max
  unsure (1)..(392): unsure at all n locations
tagaactctggntattattgctctcgtgcatattgtgtcaatgnaacaatttttggtttctttcgaaagcaacattaactatgtccttatatattccttggaatagttagtcacgcacgggggagtagccacaatgtcatcaggatgatattatcggtttgcaattttccaatgcattctatcttttattttgtggtttggttaggggttattatgaaccaatttgcttaacttcaatcctctttttgtgtgacatcagtgagattgacttctatatgtttttcacttcatcaggctgaagattgaccagtaattcaattaggccaagaaaagctacttcaatgggatcactcaacagttcatcacaaaatactttttacctgcttagtgaa

SEQ ID NO: 197165 - DNA, 420 bp, Glycine max
agctggcataacttagtgaaaattatgctcagtttattgtcgctaagagaagcttaatcttggctaagcgcaaatccatgcgactaaccattggcttaccaggcttcttgccagctaaaccaacgttgtagacactgtaacctagcattttctattaagcggcattcctgtgtcgctatgcctagtgtgcgtttttgtaaagcccgctaagcgaatattgtctcgctaagcagccagtgtcttttctagttctatttttcggcttttaaaatttgaataaccgcgtcctgataaattgtttggttctctatatgcagatggcctttaagaaacataacaatagtgattctagaccacatgatcataatgataataggagatttcaatcaaaggaagcttggagaggatgcttcaatggac

SEQ ID NO: 197166 - DNA, 455 bp, Glycine max
  unsure (1)..(455): unsure at all n locations
ctcaagcccagactagtcttatgttgtaccccatctctactatctccccttttagcttggatgatgccaacttgaattgccatttgagtgcatttggagagtcttaaaggtaaaggcttttcttagacaaacctgaaagtttcttaacactaagagaagcatcaattcatatcatcatcatcattaagtagagttatatatgaatgtatattctaatccaatgctaatgcaatttcttttttttttttctttatccccctacataatgctaatgcaatacactatgctaatgcaatgcactatgctaatgcaatttttctcccccttttggcacaacaaggccaaaaagttattactattcatagaataaaaacaaacaagcatataatgtgaaaagggaaaatatcatggccttttattcatataagagccattacaacttaaacattanacta

SEQ ID NO: 197167 - DNA, 417 bp, Glycine max
  unsure (1)..(417): unsure at all n locations
agcttgtatagaagggcagcagngagtttttactatattgcccttctctctctctctcttgtattctaatatatatgtaaccttttgaatttaataaagctaagaggaaaaggagggtgtttttactccttcagtttcaagttggcattatagcgggtttgtccgccgtcgccgccggccgccgccatttccggtcagttttctccggcgagaccagggttaggattgccttaaaaagcgcgacccacccctggaagtcgcgcctccaaaggagccgccacccgccgccattctcacgtgcgttctcgggcgcgtgaagcccatgcgccgccaccagtctgctcgtcggcctcttttgagtccgttctaaccctcaatatcgagttttgttgcctgaaacatatcacccccctcttc

SEQ ID NO: 197168 - DNA, 431 bp, Glycine max
  unsure (1)..(431): unsure at all n locations
agctcgnntatgtgtcgtgcaagcgggcctgtctcgctattgcttttaactctntgttggagaataaggcttagtgagtaatgctcgcttagctactgtgcagtgtttagctaagcgagggtgtcttgcttagcctgagtctttgttttatgctgatgcactaagcgcgcccctgcacgctgagcgtaagtgttatttttcataaggcatgctaagcgagcaagtctcactaagcgcccagtctatttttcagttttaattttctactttcagttgaaataaaaacctgtctaacttgattcttatgaccatnnttgatgcagatggcctccagaaagaggaaagctatagcatccccgacccatgagccctatgataccaccagattcacttttgagggggcatgggaacgttattcacagaacattcac

SEQ ID NO: 197169 - DNA, 408 bp, Glycine max
  unsure (1)..(408): unsure at all n locations
agctttgcatgtttagagatttctagagagagaaaggtccaagttccagagagttcgagagattttgttgtgcgaagacctgcanagaccggagctngaagaggaagtcatcctaagagcttgagatgattttgtgagtgattgtgaggtcctagaggtggaggagacatccccactacttgtatttcttcgatccctcatttttctcttctctttgttggaaaggaagcttcccagttatggagagctaaatcctctgttgggtcttccttgtaggtacatgatgtaaatactcgtatatctatttaatgatgttttatgtgttctctgtgctatcagtacttcatttcagcatgcttttgccttgatcacgtagatgcatgctctgttaggatcattcaatagtgg

SEQ ID NO: 197170 - DNA, 478 bp, Glycine max
  unsure (1)..(478): unsure at all n locations
tgtacattcaataccctgatgaggatgtcccatatgttcttataactagactgatctacttgttgcccaagtttcatggtcttgtaggtgaagaccctcataaacatctaaaagaattccatattgtcaggtccaccgtgtaacctctagatgtccataagatcacatctttctgaaggtctttcctcattctatagagggagtggcaaaggactggctatattaccttgctccaaggtccatcacgagctgggatgacctcaagagagtattcttagaaaaaattttccctgcttccaggaccatgcccatcagaaaggatatttcaggcattatgcaactcagtggagagagcctatatgaatactgngagagatttaaaaagctatgcaccaatagccctcaccactagatntctgagcagcttcttctccaatatntttatgacgaactcagtaacatggagagaagtatgata

SEQ ID NO: 197171 - DNA, 406 bp, Glycine max
  unsure (1)..(406): unsure at all n locations
agcttgcttctacaatctcccccttttttatgatttttacgctgaaancaagaaacacatacgcattcttgttcctagtcgatcactcacttaattctacatattctccccctttggttttgaggttaagctctacttgaaattaagttatttagttatgtgagttcttgattcaatccctattttctctccccctttggcatcaacaaaaagccaaagtgcgtaacaaatataaaacatacaaaaatgattaatcatacacaagacattcattgaaaaatctaaaccaatcatgaagcataaacatgaataaaccaaattcaaatataaaccacatattcttataacataaatcatagatgttcagtcttacttaagcaaatagtaaaagaaatactaaatgttc

SEQ ID NO: 197172 - DNA, 484 bp, Glycine max
  unsure (1)..(484): unsure at all n locations
cttgaatgctctattcaatggagttgacaagaatatcttttgttattcaacacttgcacagtggccaaggatgcgtgggagatcctgaaaaccactcatgaaggaacctccaaggtaaagatgtccagactacaactattggctacaaagttcgaaaatctgaagatgaaggaggaagagtgtattcatgacttccacatgaacattcttgaaattgccaatgcttgcactgccttgggagagaagatgacagatgaaaagctggtgagaaagatcctcagatccttgcctaagagatttgacatgaaagtcactgcaatagaggaggcccaagacatttgcaacatgagagtagatgaactcattggttcccttcaaacctttgagctaggactctcggatagggctgaaaagaagagcaagaatctggcgttcgtgtcanatgatgaaggagaagaaggtgagtatgacctggatactgatg

SEQ ID NO: 197173 - DNA, 347 bp, Glycine max
agcttgtgcaggataatctctttttttttcttattgagaagctgaagttgggggatttgatggctgctactacaaattacagcggggagaatgtccttttcgcgacgaggaccgggactacgtataaggctgatctttcggatgggtccacactcccggagaaacggttgagtgctcgtaggatcggggagaaccactctgggatggagatgaatcggatggggcaggttatgcaccctaatctggcgccgctgtggggtactgtcttgtggaggaggagaagttgttggtttacaaacacatgtcgaacgggacattgttttcattgttgcataataatgggggcg

SEQ ID NO: 197174 - DNA, 417 bp, Glycine max
  unsure (1)..(417): unsure at all n locations
agcttgtggttcaggtcaatggatcatgtttgtacgataagtacaaggggaccctccttgtggcagttgcacaagatgacaacaataaaatccttccaatagcttttgttgttgtcgaaagtgaatcaacaagagcatgactcttctttctacaaaatttaaaaaggcatgttactccacaacatggtctatgtttgatttgaaagagaacaagtcaataaatagtggctactcaagacgtgatagtgggtggacgacacagaattctatgcatgtgttctgcatttgacacattgcacataattacatgaggagatacaagaacaatgccatcaaaaaatcaatatgagtgagtgtcaaacttctttctcttcctattagatatcacttcattntgtactattcacaatattaaaa

SEQ ID NO: 197175 - DNA, 480 bp, Glycine max
acttagaaactcaccttctgtatatgatcatgatgttactgtgctgaatgttttatattatagaagcattgatggtgaccttgttggtgttgtaggagattcatgggtgttggaaaccaatcctattcctgtgacatggaattctaacaaaggtgtggagaaagagtcttatggcgagattgtcatggcgcttgttaagcatgttcaagcgttgaattcttcagcaataggaacaaattcatcttatttctatgggaagcaggttggaagggctgtgaggttggcgttgatagcagaagaagtgtcttaccctaaagtgattccaaaggttaagaaatttctgaaggagactattgagccctggttggatggaactttcaaagggaatgcctttctctatgaaagaaaatgacgtggacttgttacttaacatggctctacagattcaactgctgatttggggttggaatttacaatgat

SEQ ID NO: 197176 - DNA, 411 bp, Glycine max
  unsure (1)..(411): unsure at all n locations
agctntgattgtngaaaggtatgttgcttattattgtatcgagttttgctcgcagtacattgaaggcggtaaatttgtcggggtttctgaaactcgtaatgtgcaaacaccaccggggggtaagggtacacgaggatacaatgttgtgacaatgactcgcgatgaggtctcacaagtgcatctatatatattgaataatacagtcgacgtcattccatacatagatgctcacaaaaaaaaaactcatcgcaatgaacccaaaaatgaacatgatgagggttttgcaagagcataatagaactttcattaagtggtttagagaaacaattcttgttgatgacggtgcttccaaaacattacgattattacctattgggccatgtcataccctaatattgtcccgggaccttt

SEQ ID NO: 197177 - DNA, 424 bp, Glycine max
agctctaacagctgtggtgtgccagaatcatatgagatattttctctcttaagaagcttcaaactagatgtctctcacacttaatttctgtcttttagtgtaagtagttcgtgagacagagtacagttgaaacctacaacattatatatttcttattatgtttttttatatttctatatatatttaatatatatcatgttgtactcgtatcctagtttttgagacaacttcctatgtctctaactctctattcaattaattaattagtttcaatttgctgattattgtctcccctaccttaattaagatcatcagatcttgtatgaccctttaatgtagtgatctttgtacaagtgaaagggcaaggaaagagttgacaaatctggtgaagatgtctttcattattggctgcctaggtgatgat

SEQ ID NO: 197178 - DNA, 338 bp, Glycine max
ctgcaagctagaagcaacaagggtttgattatttataccgagatgatgcgcaccatgagaggttggatcaaaaggtgaatccacatcataaatgaacaaaaacggaggataagagggaatgatggtgatcctacacaaaaccgatatagaaggtaaaaactcaacattcctccatttaaaggaaagaaagacccggaggcctacttggagtgggagatgaaaatagagcatgtttctttatgccacaactatgaggaggaccacaaggtgaaccttgccgccacggagtataccgactatgttcttgtgcgggggaacaagctaccaacggagagagc

SEQ ID NO: 197179 - DNA, 434 bp, Glycine max
  unsure (1)..(434): unsure at all n locations
atccttaagtgacctgaggcatgcaagctaactctggacaaaaaataacatttttttattttttaatatatataccagtgtactaatgtatatatacttgttttntttttttaatatgaatacgttagcaagttatacctagatattgtcttaaaatacaccaataatatacctagatattttaattaatatataattagagttatattattattattattattattattattattattattaccaaatactccaatatttctatgataaaagcaaatgcactttgacaattaaaaagttacctttcttataaaatatgatttttctatgagtctagcatattctgattaatatataggaaaaaataaaaaaatattagtcaattcaattgaaaactgatgaaaaccataattttattttttggaaaacacatg

SEQ ID NO: 197180 - DNA, 460 bp, Glycine max
  unsure (1)..(460): unsure at all n locations
ctataaaactcagctagcttcaaccanaaaacaacacatttctattttgttgtntaaaacatactgaaaattttgaaggataaattccaaacattntgatatttataagaacaaaaaatatattttagccttgtttttattgttaaaaaaaaaagagaaatgctactaacatactctttaacacactccttcatacacactttctcttatgtgttaaaatgtatttagttgaagaacaagttccacaaaatcttgaacctaccaagtgtgatggttgggattggtatgagtgggatcatttgccacaccctttggttgggcctcttgagaaaatggtcaaaggagctttcgacccatttccaatttgattctggtaattggtaatgattntttttgtgaggattcttggataatcgtacgtttgggttaggtttaatatgtttctgatggaaatttcgtt

SEQ ID NO: 197181 - DNA, 412 bp, Glycine max
  unsure (1)..(412): unsure at all n locations
agcttatcccatgacagccattgtatcttctttttactctcattacccttctcgaaagaaccttgcagttaaactcttaatttgtaagcataaagacttaggcaacatgaaacggctcatgacattgttaggatatgggacgtggttatgccttttttctatggaagcatatgttagaaatgtatgatagaaatgattggagtaggaagaggatgagttttcagaaaattgacaccttaacttgaattgtgcttattagcttcttgacttacatttcatggctggctacaacttatgtctntatataggttacataggtgatttctacacacttctatactacttagtcctagagtcttctagactcatctatcatctatcatccatctctataatgttctaggtgcttcta

SEQ ID NO: 197182 - DNA, 474 bp, Glycine max
  unsure (1)..(474): unsure at all n locations
aactcagcttaagaagatcaccttgtgggataaagcctatgtgattatattcattctctcatagggcttctcctattgaaacatggcaacttgggatggagagagaaaatgagaaccactactataaaaaaggatttcaaagatggttttataaggctttcagcgacgattttgaactgatgccgaaaccaccgttgttgaaagtcaaactctttcaacaacgattnttaaaacaatgtaaaaaacatctttctacatcggttatgccagaaactaatgtagaatgttngttaaaatgagtaaatcttccaatgttctatgtcagttctataaacaaccggcacaaaaagtacctaaacaactatgattnttcacatgatacgttgtgttaggtaccttttcatcngtntaattagatcgatgtnaaattgattatactaaaaatagattatagctttattaatagcctttatg

SEQ ID NO: 197183 - DNA, 356 bp, Glycine max
agcttgtaggcctacgatcttcttctttttggactccattacttcttggaaaatgaatgacagtggaatggacaacgaagagagatagacgacatgccccttctaggagaagaagagtctggaaggagctcaccacctttggaggccatggataagatcttggaggaagaagattactaatgaagggagaggaagagaagaacacgaatatttatgctttacaagagctctaaactctgaagtttaattttcacatgatcaaagtcctaaaaaatactcgcacatgacctctatttatagcctaagtgtcacacgaaattggaggaaaatttgaatttctattctaatttcactta

SEQ ID NO: 197184 - DNA, 210 bp, Glycine max
gggaactactacaatatcctgcactgaaatatggccaacatctacaaacaagggaggaatctgctgctacccgctaaacccctaactggcagggtagatgtctatataatgtcaatgatagatgctctctagctactataaaggcaaacaaattcttatgtactacaactctatggtactccatagggaatcacaatgaagatgctagaa

SEQ ID NO: 197185 - DNA, 403 bp, Glycine max
  unsure (1)..(403): unsure at all n locations
agcttgtaatcgannacacacattcttgtttctatnaccagaggagactttcagaaggatattctcaacagccacatcttttcaattggttcttgaatggccatcacaggcctatatttatctgacttgagacacgaatttactaagagtttttcacaacaacaagtgtttattctctcaaaaagcaacatcgttatatcctcttaagaattccttggccaattcaattgcaattcattaacgaatcattcgagtgctcagattgttaaatccatccctttcaagagagattcattcttcttctctttctaattcactaagggattaagagaccgagggactcttgttgtataagaattctaaacataaaggaaggactgtccttgtgtgtttaaacttgtaa

SEQ ID NO: 197186 - DNA, 205 bp, Glycine max
gcgcacggccccgcagcaagagcacacggaagaccccacagcaacgaaccaacgacaccaggaccgacccgacacgaaacgggcggaacccgggcacaaccaaaaagaagggaccgggccagcagggaagccgaccacaccgaacaggagaaaagagcgggcaaccaaggccaccgaaagaggcaccggggaacggagaacccag

SEQ ID NO: 197187 - DNA, 325 bp, Glycine max
  unsure (1)..(325): unsure at all n locations
gaattgaaatcaacttgaaattataatttacactctcattctttacacaatcataaaaaatttactattacaacctacaatnttaaaatcgaaattcctactcgcatcttaaatatttctaaaaaccagttttggcgaaacagtaaagtgaccatctgcaacataggcacatagtgctttattaaattctatctttgatctcatcaagaccctagaggcctaatgctggcacttaaaacattattatgaatagctgatgcaaatgccaaaaagctaataggtaatatagttcaatctattcttcaaaaatataatcttatcatta

SEQ ID NO: 197188 - DNA, 354 bp, Glycine max
ttcctctatgagaggcagtggtcattttaagattattgaccacatcccataacggatacttcactgaacctaaaggagaactagacgtagggcaaatttgagcaaattggtggatcaagaggcctcagaaaaattaagaaggggggttgaattaattattactagacctttactaattaataattaccctgattatgcttctacgataatgttaagaacataaagagcacagatagaaacttaaccaatagtttaagccgatattaaagtgcacaaccgagattccaagagtatggatgaagaagacaaacacaccctatttttatacctggtctgcaaccattcgtgcctaca

SEQ ID NO: 197189 - DNA, 488 bp, Glycine max
  unsure (1)..(488): unsure at all n locations
agcttacataggagctacatcaccaccccttctaaaattaattggattgnggttttcccaattcaattaaatntatttctcaacacacacatcatatattcactcaattcatgtgaaattacaaagctcaccccaaatacataaaactaagtctaataataatacaaggggcttgaaaaatcctacnatttcttagtggtaccctaccttatatttgtggaagccctaaatacaaggcccaaaaataatgaaaccttaatctaatatgtaccaagataagtgggctcatacttagcccatgggcccgaaatctatcctaaggctcattagaatcctagggccttctcttgaatctctggcccaatgttcttggagtcttctatccaatgcccttgaggggtaagattgcatcactccctccctcttgaaaaggatatgacctcatatccagaagttcttgaactcttggattctttcctcacacttga

SEQ ID NO: 197190 - DNA, 492 bp, Glycine max
  unsure (1)..(492): unsure at all n locations
tcaagaaaagggcanactcncttccaaaatctaatttcaggcttaaatatgtggctntgttcatgctcgtgcacttagcgcaattctgaaccgcttagtgcgcattggtgaatntcggcttagcgcgggcttttctcgctcagcgaatggactaaagcggtgcgcttagcgggatggcccttcgctcaacaaacacacacagctcatccttctttcagattcttcctcatgctcagctgaggtgtgttgcgctcagcggatgggtcgcaaagccgacaggttggcttatcgagagggtgaaaattagcactatacaaactcgcctaattaacctgaaattgggagaaaatgattattaaacacacaaaatggaagtactaagtatttattacctatctttacccaaaagtaattacaacactacaaaataaccataaattggaggagtttgatacaatntacacaagtttgatacacacaagttagtcgtat

SEQ ID NO: 197191 - DNA, 436 bp, Glycine max
  unsure (1)..(436): unsure at all n locations
gcggcatgcaagcttatcattaaaggtatgggtnncttaatattctgagcgaanagaaattttgagagaanaaattacgtaaaaataagataattttgctagttgtttaattagtacacaaaaatgaaagtaaagaagattattaattattttttgcatatttaggtaaacataaagtaaaagatgtatataaaatggcataaatattcttaataagaagagtataatgtaacttctatcttccaatttttgtaaatttatcattttagtttccctattttttaattgagaaatttagtatcttttttttttaaaaaaatcacgattttagttttcttatatctaaattgatatattttatctcttactttaaaaaaaattataatgttaatctgatgaatttaaacttgctgaaatgtatttttaatcaattaag

SEQ ID NO: 197192 - DNA, 407 bp, Glycine max
  unsure (1)..(407): unsure at all n locations
ttgagagctngaaatgagcagtcggcccatcgggtacacttataatttttatagcattttctatacacaggagcaaaaaattaagtacttgtaggggcatcttcccttgatatctaaaaggaaaaggcatgaatgtatcttaaaaacaatcttgagtatataaaatcagaatagattgaatcttgacatgaaagcagcacctacctggttccctacgattggtgtgaacaactataacagaggtgaagtccttcttctttgcatattctacaatctgcaatttaaaatgtaattagaaagaaatgctcacacaagttctaatgtnttatgtgcttccctcacatggagaagagacagagagaaacacaacacctttntcagatcatatgttcctctcttgaagtaat

SEQ ID NO: 197193 - DNA, 346 bp, Glycine max
  unsure (1)..(346): unsure at all n locations
agctgttgacctaccagattgtgctcctgttattcacagacgaagaaaggtggaccagatgtgntgagggtcactctcgcacgtggagtggtgaaagaggcaatatgagaagctgagctgcaagcatcgaagttggcctttgtaacctcctctacgttgtgtgtatttgatgcgtagttgaacactgcaaaacacaccaatgatttagtccaattgatcccaagcttttaaacaattcaagtagtttattttgtacgatgtgagacttaccaaggacgtctccaacccttgaagttttgccagaggcccaagctgtgtaaaaggaagcgttgccaggaacaatcaa

SEQ ID NO: 197194 - DNA, 349 bp, Glycine max
ctacctggatcacccaaggacctatgagagctcctattatgtcacattggctctctcatcagagttccacatacaatccaatgaaaccatcacctaaagacaatataaaacaaacctatactacataggacaaatataaggaccattaaacatcaacattacagttccgaccatcatggtaagtctctacacaaaatcacgctgacatttccttggaagaccaatcgcacctatataatgcaaaggtaaagtaaaaactatgaagacaactaatcatgtcggcacaataaatggctactaaaacaagatgagataaaatattacaaaattatgactgatttcaaaatga

SEQ ID NO: 197195 - DNA, 370 bp, Glycine max
  unsure (1)..(370): unsure at all n locations
agcttggatcaatgtggtttctgtacatctctagaatcttattggggcncacggccccaggatttgtgaagttccagatgcccctcaagtttcgctttgccattctcaattgaaatcggcagaagttcatccaaaatggtcatgctgtttggaatgttgactactttgttataacgagaaatcttggtgatgaaattgcgcggattgctcaagtcagatgaaattggcatgcgaaccctgagggtgcacacattgtcatattctatcaagagctcttcgacctcgataaaaaaaataacatcccaattataagatataattataatcataatggaaagggaataaagtaaataacatgtaagtaagctta

SEQ ID NO: 197196 - DNA, 384 bp, Glycine max
  unsure (1)..(384): unsure at all n locations
gcatccctctccaaaacctttttgaagctaaaggtattgctggtaatattgtgcatgctgttgcgactacaaatgctgtgattgctgggttgattgtcattgaagcaatcaaagtgctgaaaaatgacattaaaaattataggtatgatgtgatttctcctcctgtgtattctttattttggattggttttagtgacgaggaagtggtttcgttaaaaaacattgttaaattntaaccaagatgccttgggggaaatgcttcctactttcctctgacaaattttggcaaggttaaacataattcatagtataatcatgatctggtgctacatcagagcttacacccttgtcacatttttttataaaaatgcttgataaatatca

SEQ ID NO: 197197 - DNA, 425 bp, Glycine max
  unsure (1)..(425): unsure at all n locations
agcttgtagccaaatggacttacctngaattaattccttngntaacccttatgagccttgtttccctttccttgttcttatatgctttactttgcaatgaatatccaagaaatatgccttcatcagattttgcatcaaattttcctagattatctttaccattgatgtgccatcattgtcttctatttcttaaacccgttttgcaccattttaactactgattagtcttaattgtcaaattaattaggcagatttattatttgggctcatttagctaatttgatgttcttaatctaatttcaggaattaatgaaacattgngcttaatccggatttggttgtggacttgaagaggaaaataaacagtgctaccttattaattctaatacagattgaatttatttatgtgattagtgttattcatt

SEQ ID NO: 197198 - DNA, 464 bp, Glycine max
  unsure (1)..(464): unsure at all n locations
ngacgctaaagctgacccatcaattgccccaattctcgatatcttcaacctctaagcttttgattntgacttgataaaaccttttcttaagtagaggtgtttgatttgatcccatgtttactagaatgaaaagttttgtttgaattaatacttcgatatcctatcatggaggaaaacaggatgcattcatgaagggatgcttacgctaggcatgacacaaatgcattttacggacaagagagcccgaaagatcatcctttcttacttgcaacatttggcaacacggtgcccccatgtatgcatttaagaaggtgatacggaccttctgacttcctgcaatacagacataaatgcgtaanagtgcatggttgatagcacaaaagaggaacatacaagcatggaaatatcatcaaacaatcatacagtagagacacacatgagcattgacattgaaagatatgcat

SEQ ID NO: 197199 - DNA, 440 bp, Glycine max
  unsure (1)..(440): unsure at all n locations
agcttctaggtctcacctgtatgaaatgatttttggttttttcatgcacatcnctaatgacaataacactcatttctggcactaaattgctgggagttggaacccatcgactcaattaaacttctggcttcaacaggggtcatgtttgcaaaggctccaccactggcagcatctatcatacttctcttcatgttactgagtcctttcataaaatattgcataagaagctgctctgaaatttggtggtgagggcaacctgcacaacaattgtttgaatctttcccaagaactatacaagctttctccactaagtcgcctgatgcctgaaatgttctttctgatggcagtggtcctagatgccgggaagaatatctccagtacaccctcttacgcattcctactgaaatagattctggagcaaggaatatatccaatctttt

SEQ ID NO: 197200 - DNA, 447 bp, Glycine max
  unsure (1)..(447): unsure at all n locations
ctatanaccactcaagccttaagtttatgtgaagacacatgaatagtgntttttacatttctagnatctcttcatgccaagacccttatggcttgaagcgtggatagtgtgcaatcctaccaacctcgtgcttaaatgtaagtttttattacaaaaattggggtaacacattaaaatctagaacactaagtcatagaatatttgttaacatataatggacctattatcctaaaatcttgagctattaaattgaggatgcatgatgattctatattacccctataactcccataatatctaacaatttggcacttggatgaataaattatgttcgactttatattcttctgtgcttcgtgtgtaaatgtgatataacgaatgaaatgaatgtttgggatcttgaattgcaatacaccaatttgtcaacttcatattatatcactgtct

SEQ ID NO: 197201 - DNA, 316 bp, Glycine max
  unsure (1)..(316): unsure at all n locations
agtcacctgcggcatgcagctaacagtttacattttgtatnnttatcccncnggcgctctagattggggaaatgctcaaatatggcggcaattttggttttgtttctcgcttgattgagctgaattggggggttgaatgggatcgccctaagcctataatgcattttgaagcaatgggacatgccacattgtccccgttctctatctattaatgtctaaacgcgcgcccaccaagagttcggtgaaatgcctcaatggcattaacgcgtgggcttcgttggaacaactcgcgggcattttggatgcataattttct

SEQ ID NO: 197202 - DNA, 453 bp, Glycine max
  unsure (1)..(453): unsure at all n locations
ctaagcttattccaaggaagnnnattatcatgcattgtctgcaagtttgtctcacaanaggccaatcatataaatgaaacattttcttgagcaagtagtctggcctgaagctcaacttccattggtgagacccaacaaggctactgcacttgagcccacacctgtgcaggttaattcagtgccaactaacccacaatctctagtggtgaatccaccttcttcacctgagcttgaagcagtttctccatctcctcctctgattgtcatttctgacgcatcatcagatgaagcagttgctcctcctaattcaccaactgcagaaacaactgacccctctgtttccccattagaggagattatgatctttttgatttgtcatctggagaaagctgtgctctcaccgattccctagttaaacactttntgacatnngtaatcctggatgtccctttt

SEQ ID NO: 197203 - DNA, 413 bp, Glycine max
  unsure (1)..(413): unsure at all n locations
agctntataagcgcaggtgtgggagacaaatgtaaagtggtctcgatatacgaagatgacgttccaagtacatcggatttggtacgaccatgccctcctgatttccagctgggaaattggcgagtggaggaacgccccggcatttacgcaacgagcataatgtaaacctttacggttttaaaagctctatagttgggcctaggctttagagtttttcttttgttaaggctctgtgtcttttgtttttgaatttataatacaaggatctttcttcatctgttcctatgtctctacccattctcatccatttgcatgtttatntctttatttctgaaacggcagatctgatgacgagtcccccgaagtactaatacctgngacccgtctatcaacttcaagcaagaaatgaatca

SEQ ID NO: 197204 - DNA, 438 bp, Glycine max
  unsure (1)..(438): unsure at all n locations
actcacgcttgtgtgcatggttactttcgtgaaacatcaattattaactttntattgtttaaagacttataagagcaagggtagacaacatgcaaaccattntgaccttttattgaaatttaacttatgagtaattgaggaagcaaagatcaaacacttaattacttagccataaagattatattttctttttaataatcagtgaccaactctcctaaaatctctagttattagatgatgtcaggggaatgttatgagttttcagcatttattgaatctgttgagctgtaaatatgtaagtatttgctgtaaatataattattagaagaaaatttgctgaacatataattattatgatagtcaactcacaattccttaaatcaggggatttatttagataactaattggcaattatttcatttgttgagaaactgata

SEQ ID NO: 197205 - DNA, 439 bp, Glycine max
  unsure (1)..(439): unsure at all n locations
agcttgtaggattatggggtacccatcacattgtggactatttggcggncgggcgatggggcacaacaagttttccacatccacaaagcgcgcataaacccaccatcccctgttgcccacctccatctgagctcacgtactcccacgtagcccatatcctcgtttctctcaacaccgggtccccatcaatcctcccaagcttccacaacatccaagtaatacaacattcaaacagcacaagctatcacagccaagcaaaatagagcaaaggcataaaactctgccaaaacaccaaccaaatcacatgctttctcacttaaagaccccagtaacaattccttcattccggttcattaaccggtggatcgactcgaaaattttactagaagtctttagtacataagcctacattttgaccggtgggatctactaggaaaca

SEQ ID NO: 197206 - DNA, 394 bp, Glycine max
  unsure (1)..(394): unsure at all n locations
tctattnacaattgtttgttgcttgcttgaatcttgatttcacgtattgtattgtcatcatcaaaaagggggagattgtagatgcaattgcctttgatgttttgatgatgatcatgatgatgtgttgcaattgatgcaaatgagcttttcaagattaaattcaagacaatacttcaagattacaagtcataacatcaagatgatcactagaatattatgaagggaattcctaattgaattagcaaaggtttggccaagtgatataaattaaataagtggttctcacaggctttactctctggtaatcgattaccacaggatgtaatcgactaccattggccaaatacgctcttataacagctaccaaaatttgaatctgaaatttagactgtgt

SEQ ID NO: 197207 - DNA, 426 bp, Glycine max
  unsure (1)..(426): unsure at all n locations
tgttttttacttganagaattttacatagttaatgaagatctcggatagcaatattttgggcagtatacatcttaagtcaacccccaggttttgtataaacctgaaaacttagtgccgaggaatgtacgaagggtagtatggtttattctgcacaaagagtttacctgccatctgaaataaaatttatgctgattgcatatgctggatatgtcatttcttcgggtttttaataaaatggtcactagtctcatttattttttgcttgcttatagaaatgagctctaattgattaatttcttaagttaagacattcttaaggaagacagtnatcgtctttcgcttctcatgattggttttaattacaatgtgcactgctatgtangtttgcctatatacacattgttgagttataattgtctaatgca

SEQ ID NO: 197208 - DNA, 449 bp, Glycine max
  unsure (1)..(449): unsure at all n locations
aagacagaaaactatgaaactaagatcgtgcacgaattatcatanatgatatagtgtgtcgcgtcgaccatggctgatgttggcaaccccataacttggattccatatatgaacagcaaagactgttctcaaggattctgtagcttgtactgtccacaatggtgttacattgtgtatcctcctcctccaccctttgagtaccctgatgatgattcaagcccanatttctctcctcttgtcattgcaatcattgggatcttggccactgcttttcttgtggtgagttactacactctaatatccaagtactgtggtcccagagagtccgcacgcagagacccaaatgaagatcacttgcatgacaatcagatccacaatgacactctcccngagcatgattcagacacgggcctcgacgaggctctgatcaaatcattgcggtctcaata

SEQ ID NO: 197209 - DNA, 361 bp, Glycine max
  unsure (1)..(361): unsure at all n locations
agtcacctgcggcatgcaagctnttgagatattcaaagtggcatcacttttacctcggatgtcctanncaagcgcatcgcatatagagacgctggacattgaacaacctaagctcttgagaaatcanatggtcattactattcactcggaggaccgattcatgcgcatcacatatagagacgctcgaaattgaacaacggaagctctcgagatattcagatgggcctaacttttaactcggaggtccgattcatgcacataatatatcgagacgcccgaaatagaacaacggaagctcttgagaaaatcaaatatgtcctacttttaactcggaggtccgattcaagcacataatatatcg

SEQ ID NO: 197210 - DNA, 344 bp, Glycine max
  unsure (1)..(344): unsure at all n locations
aaactcagctgcctcnagaggtccannaaggacaaggcagcagaaggatctantnctgcttccgagtatgatagncaccgctttaggagcgctgtacaccagcagcgcttctaagccatcaaggggtggtcgtttctccgggagcgacgcgtccagctcagggacgacgagtatactgatttccaggaggaaatagggcgccggcggtgggcaccactggttactcccatggccaagtttgatccaaaaatagtccttgagttttatgccaatgcttggccaacagaggagggcgtgcgtgacatgagatcctgagttaggggtcagtggatcccgtcgatgcc

SEQ ID NO: 197211 - DNA, 405 bp, Glycine max
  unsure (1)..(405): unsure at all n locations
actctctagtcacctgcggcatgcaagacttccattgactatgagaaacaattcattgtcataggcttttgtnatgaaggcctgataacgctttanaacttgtatttttctcttgcttttccaacttacaagactccaattccacatttgaagatgaagcatgaacctgacgctgtatgttggttacagttgtagactcttcccctatacttaacatttcatcacagcaagaggcacattttgaaatacttatatcctttaacatacatccttgttgctcctttgatgggtcactttgcttaagcgtcaactctgcatcaattagtgaattacaatcttggacttcccttgcacctgatcaattgacattggattggtgtctttcacggaattatattggtgatt

SEQ ID NO: 197212 - DNA, 487 bp, Glycine max
  unsure (1)..(487): unsure at all n locations
actcaagcnttataagaaaacttncttgaaaagcttctttgagaaaacttccttgttaactagagcttacctacacacacccatctaataactaagctcacctccttgataaaatacatgtaaatacaaaaaaaaagtccctactacaaagactactcaaaatgccctgaaatacaaggctaaaaccctatactactagaatggccaaaatacaatgcccaaaagaaggaaaaacctattctaatatttacaaagaagagtggatccaaccttgacccatgggctcaaaaatctaccctaaggttcatgagaaccctatggccttctttagtagctctagcccaagcctcttggagtcttctatccaatacccttacggggtagtattgcatcaattgtatttacacacggggaaggtattagcatctaacgcgttcgtacaaaagacgacaacctttaataagcgtgcaacatgacttcatttgtt

SEQ ID NO: 197213 - DNA, 344 bp, Glycine max
  unsure (1)..(344): unsure at all n locations
nagctgtgaaagctgagcttgtttagacatttgttgcgaangtggcaatcactatggtcagganagaatgtgatgagctgaaagatgtcaacatgactacggttgaagcgctagagcgggaaacgaaaaaatctcgaaaggaggagtggagcaggaacaagttccgaggggctttatggggcaacagtaacgagctcaaacttaaataggccgaaagggacaaatcaaggatggaatgcatgatgttagaggataagttaaagagttgccagaggttgaagagaagtttgacagagcatttgagcaaaatggaagagaatatgttgataatcattgatcaatat

SEQ ID NO: 197214 - DNA, 454 bp, Glycine max
  unsure (1)..(454): unsure at all n locations
cactaagcttttgtgaagaatccgcacctcatgtccattttgattctcagaactccaatcaatccccaacttctcaattgcattgtaaatgtcttgagcctctgatacttttgcatcaagcgttcttgaaagaatacgatggtccatgaatgcttgaagagcttgtactgaaaaggttgaaatctatagaggcaccacataaacgcaaggttatttcagcaacctattaatgaatgatctgaactttaagctttntcacaccaacattaatccatattagcccacatggccatccagtcaagggtaataaataaagaaaccgatataacttactgtatctcgtccaataacagcaataacattaaacgtgtcagggggagatggatntttcacatattgtgaagcccacattaacctctgcttcttggccctctattcttcaagcgttcccatc

SEQ ID NO: 197215 - DNA, 454 bp, Glycine max
  unsure (1)..(454): unsure at all n locations
agcttgcatataacattattctcttctctttcaagntaaaatttaggcaattactttttgagttttcaactccattaaagagtatttattttgatattctgcattagtttataaaaacacatatgaagtctctgagggttacttgtgtttgtaagacatattattatgaagacttactatttgattaatttagttccttacatgatatcacaccatattgttattaattacctaataaagcacatctaactttatatgttacttattttctgatctagataagcttcctttgtttctttaaaatagtgtgttatgcaagaataacttattgggtgtcattcccaaagaacttggagattacccaagctagagttattggattaggggaaataacttgtaggaaacattcaatagaattgcaagatgtcttactaacacttgtagtaacttctat

SEQ ID NO: 197216 - DNA, 493 bp, Glycine max
  unsure (1)..(493): unsure at all n locations
atacacaactcaagccttgcggngctgagactatcaagcaagagatttatcacattatcacccaccttatacccatatttcttcatcagatcaaagatcccaactgcctttttcctttgctttgcttcagcaaaggctttgatagcaatggagaaagtctccattgtcaaaaggcccttctcacccatttcctcaagcattgccaccatggtctcaaactgtctagtcctcccaagaacacacatcatgaagttataagtcctataatcatgagcaaacccaggcctcttcccagcccaacaaaagaaccgaaaggccggcttcctagcatgcttgaacctttgcagcacatccacaaccaaatcatgtgacaaccgaaccccacattcatcaagaacaacctncatgttcctatccaacgcacacaattcatcaatcaccctgcataccctctcaaccctcacaggatctgcacatgattcaccactaacac

SEQ ID NO: 197217 - DNA, 425 bp, Glycine max
  unsure (1)..(425): unsure at all n locations
ccttagacactcagcttccatgatgatcttggtcttctttgggctctanaattgtgtatatgcccaagnctatggggcaattttggctatgtttcatgctcgattggtgtgagttaggggtttgtataggatggccctaggcctatgttgcattctggagtaatgggggatgccacattgcccccattctcttgctattcatgccaaaacatgcgcccaccaagtgctcagtgaaatgcctcaatgacatatgggcatggttatgtaagcttgggattgtgggactgttttatatgtatagggacagcatgaaggatttaaaatgagtgcccgaatgcgattctatgcctatgaacccaagcttttaatttcaatacaaggaagcatgacttacgcgtatgaatctaaaatcttgttttgaatgt

SEQ ID NO: 197218 - DNA, 414 bp, Glycine max
  unsure (1)..(414): unsure at all n locations
taagtcacctgcggcatgcaagctgtgttcttttataaatgagaagttttttactcattatgttatctaacaaaccctggggtggatccgagtgctccgatcattcattngcatattcatgttntgatggcatactcaccattgcttatttctttaggaatttcatcataactaagaaaacaccaaagcacccctataacactcgatccagaaaaatggataatgaagaaggcgtgcaggaacagatgaaggccgatctatcgactttaaaagatcaaatggcttccatctcggaggtcatgttaaaactccagaaaactatagaggataaagccacggacaccgcctccagtacagttagggaagcggagccggtgctgcagccctgcttatatcctggccgagacagaaaca

SEQ ID NO: 197219 - DNA, 472 bp, Glycine max
  unsure (1)..(472): unsure at all n locations
nnttggagtagaaacatgggaccaactcattntatttcatttttgaagtcatatctagtcaacgtctgagagaccatacaagtttcctaacgatttctaattatgtgggccattaagtctatcatatgctgacaatagccgagaagcccatgaatctcttcgggggcggagtaggtgtctgccatcgccttggccttggctaacaatcggggaagttcttgactcccgttcaaggtaagggcaaaccgatccatccacatggttgcctcttggtgtaaagagtcgatcacccttcctctagcctctntttccgcgtatacttgggcatactcatccgcgattctatgctcgtgggccgtggctagacctaactcttcttggtacttggcgatgatagctagcatggtggtctccgtctcgcataaacgctgagacaagcttcttttggaccttgaacaggcaactaactcct

SEQ ID NO: 197220 - DNA, 377 bp, Glycine max
  unsure (1)..(377): unsure at all n locations
agcttgtgtatggctgcattatactaatatatggaatcgtccactgctcngcctgagaataacaattgcttggccacaacaacgctggaggcggcaagggacaatggtctttcaaataaacctgttgtacatgaacaaacattatatcatgcgctgaccgtgccaaatgaaccagcgaagtcattccataatggttatactaactatattcaatgtacctgaacaaaatgatttccaaacacgtgaccgacacatatgatgcggtggccagaagaatcangtggtggttgacttctaagagggaaaaatgccatgctttgttgtggaacaacgatacaaggattacgttatacctgtaagcaatcacatattcccat

SEQ ID NO: 197221 - DNA, 396 bp, Glycine max
  unsure (1)..(396): unsure at all n locations
tgacaagattacggggttgaagtttggcaatgaatacaactttcattttgaactcctccaatccttgaattgacttcttggaaagacttttcacagtaaactcttggccatcattcaatcttcccttccctgcaaaccaacaactacatttgttagaaatattntgagtgtggaaaacaaagatcatatagagaacactactactaataatatcaccggtcaagtcaacaaaacaattttttcaactttggtagaaaaggaaattaaatttatagtggtcaagtaggtaaaatgtctaaacactaggtatcattgacaagacaaaattgtttatttggaacatcaaatcgagaggcaacaccaactttatctcacattacctcttaaaacttatct

SEQ ID NO: 197222 - DNA, 413 bp, Glycine max
agcttcaaatgttcttatgtggtttgaaattatctagtaggcaatggtctgtcagattataatcttttctgatttcacatggatacaaacaatgtacttctgaccattctttgtttattaagcatggttccaacacaattgttgttttactagtttatgttgatgacattgtcttgtcaggcaatgatttgtctaaaattcaaagaattacacatctattggatagtgctttcaaaataaaggacttaggagatttaaggtactttttgggtttcgaggtagctagaagctctacaggtataaatctttgtcaaaaaacagatccactagagattctcaatgatgctggcatgcttggctctaagccgatgtctaccccttgtaattacacaacacaagttgcatcaacactc

SEQ ID NO: 197223 - DNA, 459 bp, Glycine max
  unsure (1)..(459): unsure at all n locations
tgtcaattctcttgtgcagctctggatcataangnggagctactctgtggcggagcangagcagaatcataaaacggagatggaacaagaggaggaggataatgcgaagggtatgcangtggtccttggtgctgctgctgctgctgctgaagtanaagatgaggcggnggaggggcatgagggtgtaattgtggaagtggctgttgctgctgctgcagggcaggatgataagggaattgttgcatatgggggtgtgcaggaccaggacctgtggggataaaaggagaaccgtgcattgacgaaggaaactgctgatgctggggatgaaatccaaactgctgctgttgttgcatattancagcttgtcgtgttgctgagcatatgccatagcagatgcagttgcataatcatgaccctggcgctccataaccctcacagcacttcagaagtagtattatc

SEQ ID NO: 197224 - DNA, 389 bp, Glycine max
  unsure (1)..(389): unsure at all n locations
agcttatctgctcgctagtttttgtgaggttgctctaaatcngcactgtatgtgaacttcaacacctgattaattaattggaacaaacaaaccaatgaaacagtgcattgcaaaattgaaactcttaactgctttgcttaattaattgccttgccttaccttgcaagaagtagctctgtttatagaaagtgctggtggagcatgtatcacaataaacagctcctaccacactgatacgggagataattggacttggagattgagcaatgagcagaaatgggcaactgaggagagatgtgacaaataanagacgaataggaaattgatccatcagaagagtgaaggttctacaaaattaaagcatttgtaattgatgatgattggtagtg

SEQ ID NO: 197225 - DNA, 264 bp, Glycine max
  unsure (1)..(264): unsure at all n locations
acacctttccaaactgtattaaatctagataatatttgatggatcaattctaatatccaaatctaatttttaggttctactaaaaatgaagttcatttcctatgcaataaacatacttatcacacacacacacaaaaatacttatggaaaccacaattcttttttttcgaaattaanaaccacgaatattctttaatctattgaattaaaaattaatctcatttgcaatccataactgtgcttagtttaccctgttaaattatc

SEQ ID NO: 197226 - DNA, 305 bp, Glycine max
ggcttctacaggcccaactcctttgagcggcatttgtactcggtcgtatccagactaatgcatcttactacattcgaaatatgttttgcattgcgcatcatcatagcgtgtcgtgaaaacatttcctaagatataaaaatttcttcataggccataacttctttgttctaatcgattaaagagttgttataatctattacaacaagttgtctgaagcttaaaatgctaatacctgtctctgtttaatcgactaccgatatactttaattgtatactctgttttcttgacacaatgattgatttat

SEQ ID NO: 197227 - DNA, 325 bp, Glycine max
  unsure (1)..(325): unsure at all n locations
agaattaattntggaacatattgatattactgccgtgcacaaaatatcatgtaaagttattcataatatattttttattgctttaaatttaaaatcaattctaattacaactaatgatattaaaaagaaagattaaatatacacacgaagattgaacaacaaagtcttgtctcattaggtgagtgataaacttgntcttgttggatgagattgagaggttctcgtgtccaaacgaacaatataatcctatctttaataagggatatgtttagctggattgggtcttgcattatcttcatattctcagtgagggctntcatgctac

SEQ ID NO: 197228 - DNA, 455 bp, Glycine max
  unsure (1)..(455): unsure at all n locations
agctntaaatagactctaaattcgcgacgttgttcttagcactcaccctcgtgcttagcgcgagtaagtggattcgggcttagcgccagtcgtgcgttgagcctggctgaagacacctgttgcgcttagtgcactaatctcgtgcttagtgcatgaccttgatgctaatgccctaccagattcttctatcgcgctaagcacactgaagctgcgcttagcggtggatgcatagttagcccactgatgagctaagctcaactgtcactttttgcacttcatgacttagcctctttttcacctaaaattgcacatatttcatcattaaatccaatggacatattctagagacaactttatccataaaacaaaatttatttacaaaaatcactaaaaataaccataaattgggaaactatatcaagttttggaanatggattctattacaaacgtagtc

SEQ ID NO: 197229 - DNA, 453 bp, Glycine max
  unsure (1)..(453): unsure at all n locations
ntgatctaccaccaccaccgccaccatcatcttagatgttttaatatttttaatattactagcactttgttttctagccatgtattttgctatattattatgacatttgaacaatttagtatttcttttatttgcatggtatgtttgaaaaatcatgaattatgttatatgactatgtggtttttatatatttgatctattcatgtttcttgcttcatgattggttttatattcttcaatgaatgtcttgtgaatgattaatagtgtatgtatgttttatacttgttatgcactctggctttttattgatgccaaagggggagagaaatatggattaaatcaagaactcacataagtaattaacttaattttcagtgaagcatatacctcaaaacacaaggggagaatgtgcaaataagtgagtgatcgactatgaataagtgtgtgtatgtg

SEQ ID NO: 197230 - DNA, 335 bp, Glycine max
tgacctcccactaacacaccaattcaatgcattattgaatgcttatggtaagttgtttcaacattatattatcattcttgaatagtctatttggcgatgcaaagtactactactaatattcgtgtcctcttgcctctcggtctgatattcatacatttcttatatgctatttggatctcatcactctcatgcaaccatttctattacacatgtggaatatgcagtgttgactatattgttaatcaaagccctccatattgacgaaactatatttggaaaatgcataactaataaattcaacggtgagatacttcaagttttcttttagaaaacct

SEQ ID NO: 197231 - DNA, 293 bp, Glycine max
ggagccaatgcggagatattcttaaaaaacccaaggtaaatcaagaacagaatatatccctgctaatgtcgtttcaccattgtcaaggcatattgcatagcacttcattcattgaaccactacagtactctgtgtgtaccttggacgagctaacttggcagagattcttctcctttaggcaaaacaatatgacaataaatgcttttagggacaggtataatggaacaactaaaagaagtggtatcaaccataattcttatgacttcgggaatcttaagattggagtgacactg

SEQ ID NO: 197232 - DNA, 476 bp, Glycine max
  unsure (1)..(476): unsure at all n locations
agcttgtgatacgatccttggaagaaaatgtttttcanaactcttttttttaaagtagatttgattaagaaaccaattcacccccccttggtttgaattccatcatcttttttcagatntgtgtaaatataaattgagtttgttcatggaataaatttatttgtatatgaaacaggttttgggcatgctcaaatccactttttaggtaagctaggaaacacgaatcattggatggatntaagcatgctctagaagtgccattgtaaagcaaaaaccccaatttgctttaacaccaaataggggccatagtatcttgcagccgtgaatgcatggaaatatgacattgtagtctacattgaatgtggtttgagagatgatcgaacgcaaacacattaggtgactatttatacctgtgtagataaatcatcttcaactgtagatatattgtttcatttattattataataaaataattc

SEQ ID NO: 197233 - DNA, 409 bp, Glycine max
caccagaaactcagcttgacagacagacacactgctgtcttcttcaacaagatttaatatgtatatctactctaaagatacatcctataatacccataattataacaatcttctttgcattcaggaaactaaaaaggaatccatagataaagctttctgtcaatacttatggggagatgctaatgtttcttgggaggctgctccttctaatagtgcagctggtggtctttcgtgcttatggaataatgattcctttgtggcggatagaagggtagtaggtatgggctatatatggctggaaggagtgtggactaaagaaaacaagaggatctgcattaccaatctgtatgctccctgcgacttacatggaaagagacagcagtgggaatagattatactccttatacct

SEQ ID NO: 197234 - DNA, 471 bp, Glycine max
  unsure (1)..(471): unsure at all n locations
agcttaccttcggtacatgagcagctaaactatttaaaactttttcaacatatccacgaacttcttgtgacatccatcggagttcttcctcaggatcagcaggtcttcgagccattgtgttctgaggcaggatatatgaaaataaaataatacacagtcaataaccacattntcaggaataacaaattattctttatttatgtatttttgtaattttggtatgcatatcctcagcttatactgactcaatcaagaaactttaatggacttaacagaaattatacaagtttcgtgaattgcttgagtgagcatttagcatccctgacatttataaacacaagaagtatatgaactatacatttttaccagaacaaaaaataaagtatactatttcctgtgactaaaccactccagtgatacatttacggatatacaccaaggatatgttatcattatcacatttccaacata

SEQ ID NO: 197235 - DNA, 349 bp, Glycine max
  unsure (1)..(349): unsure at all n locations
aactaactgagccttatatcctgaggtgccaagaaccagtgtactttttagngaatattcggctatttgaatagaagggagcatagcataatgtgccaaggtcctgaaataacatagtaggaagttagcatataaaatctcaaaagtgactgctttcaaagggcctagggtctgtcataaaaaaactgcgtctacatatcccccaaatttatgggaatagattgaaacacagcacgaccagataaaaaatggagcgttccttctcaaaccgtttgtgtggccttccacggaaattgtgtagacccttcttgaaaaaatctaaagaagcttttgatgcaactgaccctta

SEQ ID NO: 197236 - DNA, 470 bp, Glycine max
  unsure (1)..(470): unsure at all n locations
gatccttnagtcacctgcggcatgcagcttaggttgggagtttatggtncttacatcncgcgacaggagacaaaaggtggaatagtacatattctcttttttggcacactttaacagttattaacttatgattagtctctcttattgctattattattattcatctaatttcggggaagtttatacatatggcaaaataaagatgtttntggttttttgtgactatggtactgcttagcaggcgattctgccttttgttagttgttactgcctcctgttagaccttgattctggttaatactgtctttcttgtccagaaccgttgagattatatatcttgatttgtttgtctgaaaggtttataattatgagaccgaagttcttcagaaatagtgaatgatcctcctttaatgatgcatggtttgtgtgcttggattgatcacaattctctaacatttattcgaattgaa

SEQ ID NO: 197237 - DNA, 372 bp, Glycine max
  unsure (1)..(372): unsure at all n locations
cacatanaccactcaagctntctctatnagccaacctaagagcgagggtgtacttgatctttagcactgttgcagaagcgtactccattagcttctctaaattctcaaaatgaacagattttcaaccaagtgaaccacaaatacccacataaatgtatcacatagtcttcttgtttttcatatattcatttttggtttagggtacactcctacaggctatttacagacaagatcacaaagacttataagcctattatatattgatagaaaaacaatcaaaattagacatttgagaagttatcatgacattctacgctgtttaataaaataaaatggaatccacaatcaaaattgaggttgaagatatgttta

SEQ ID NO: 197238 - DNA, 431 bp, Glycine max
  unsure (1)..(431): unsure at all n locations
agctgtccaacctaaacttcaagatattttatggaagcattaattntcttttggtttatgatggacatctgcataagctgagttagagtatcttccatctttgacattctattcggttgagcatgttgttgttgttgttatggacccctatttgaaggacctgcaaaataagtgttagtcggaccaaaatatgcattattattttgtggtctctagctataaggcttatttgaacctgagccacctctataaccttggtagtttccttggaagttatattaaggtctaccttgattttgcaaataataggccttctcttcctattggcaatacacatatttgttctgagctagaatngcattttgagtatccaactccattgtacctttcctttgaattggagctctatcatggtgactctgataatcact

SEQ ID NO: 197239 - DNA, 471 bp, Glycine max
  unsure (1)..(471): unsure at all n locations
cttggagaatgtgggtgatatatatcaagaggttatttctttagctcctattctcacttgttgaaaatnttgccatggtattaggaagaaagtcaaatcattctttaggtgttggtactgcaccactaacaaagaagttttcacacaaataaattattcaaaatcaacttaaaaatgcataaaattgagcaaataatttggagttgaaagtgcaaaagttgacaaatattaccaatgcacgtttaactctatgcagttatttcagttacttcatttccctcactctatctattataactgttttccttctctgtgtagtggtgcagctgtcaagtcaaactaactgccatgccatgcacataaaccactgcactatatgtatatgggtatgcatctcgaattctccatttcctacttctattaaatataactcctctttaaacaatacctaaattctgtacaaaaaaatac

SEQ ID NO: 197240 - DNA, 376 bp, Glycine max
cttactatcgtccaaccaccaccacctgccattgaaccattcctctcgtcctctatttctagcttcgttgaacaaacatctgcaccatatacctcaagttcaagtgtgactatgatgtcctatcatattctccttggtcttccttattaatgaaaatgtggtctttgggagaatctagtatgaattgtttatcttgttgttgttgtgtgtgcgtgtgagtgtgttttttcgcctaatcagtcttcattctcatctcatcatcatgcattaaagttgtaaaactcagggggagtttatacatgctttacatatatacctgcactcttactaactcataataggccttactattccttttacttgatatggttatgat

SEQ ID NO: 197241 - DNA, 486 bp, Glycine max
  unsure (1)..(486): unsure at all n locations
ntcataagtgacatcaggtgcagccatctcccttagagttttctcacgaggtggagggtgagccatattatcaatatgaaaattagtagcggaatgttataaatcagaatattcagaatcaccctcaatagaatgctcaaaatgcacagaatgaccaggatgcacactatgcccctagtcatgcactatatgcaacaaataatatgtttctcaacaagcacctaacaagggggtaaagctacagctatactcaaatgatatcaaaatgagctgaaatcttgtgaggaacacccctaaattatgaaaagatagcacaacaaatttcaagcaaaaattctaagtctaactatgataactacctaagcaaaagttatacaaatacgacaatactacttgaaatataaaaataaaaccttataaacggatgattcttggagtttgggagaccccaccccgcttaacaagttaccacagtatgggaaattt

SEQ ID NO: 197242 - DNA, 334 bp, Glycine max
  unsure (1)..(334): unsure at all n locations
agctagtagggatccttgtatgtgnnctattttcatggnnnctaaancctnggtttcctcgaatgtcacaacaatgtgctcaaatttatgatctaacgagcatagtatcttctccataattcttacatcctctaacttcctaccatatccttttagttgaattgaaacagcgagaattcttgaaaaataattagaaatggactttgactctttcatatgtaaggattcaaactcacctcttagagtttggagacacacctttactttgtcttctcctttgtgagaggttngaagcttatcccatgcctccttagcagatgttatatcataaatc

SEQ ID NO: 197243 - DNA, 462 bp, Glycine max
  unsure (1)..(462): unsure at all n locations
tgtcgatgtntttggtntcttgttgggaggtgtataagtttttatattaagggtttagtgaagttggaatgttctaacttgttgtggaattgttgacttgccctaagaaagtcatgtttgaatgtatgcgtataggatttcaagaaaaataactttaaatgataagggttactcgtttgattattagcattttaattggttgtgcttgtacatttatggcgaacatcgtattagcatgaaagtttaccaggtccgtattcttcatgtatgcgaaatgtcgggctcataatttatgtactgcaacccgaaatgactgcgcctactggtggtttgattccataaatggcgtaaattaataggcattagagaatatcataaatgggtttgattccagacctcatagcaacatanggaatgctttaagttttaagtgttcattagacaaataataatgattatatt

SEQ ID NO: 197244 - DNA, 343 bp, Glycine max
tatggacaaagtcaccatcagttgtaatcagaggaatcttgggaattatcttgataaaccatacaagccttgctggggcttgtctatttctctgaggtcttgttgatactgcttcatcatgaacaacattgccttttgctcctacatcagtgtttagaccttcaattctggttctcaattaagatgtgccctgcttatcacctccattccaggattgaccctcatcgaacttcacatctctactcaacactagtttctgagttcgaggattaaaaaccctgtatgcaccactagaatggtagccgagaaatacaagtttctcactcttgccatccaattttct

SEQ ID NO: 197245 - DNA, 432 bp, Glycine max
  unsure (1)..(432): unsure at all n locations
ccttagaaactcaagcttgcttactgttatatataacttgtgatatgactttcataaagngagnaggagtaaagtcttggtgcatgagcttgcttctagtacccttgatggaatgtaatgtgccatgcaatctttttacgtattatttattcaaatttttttttgagaattaattattttgaaattcaagagcttataaaanaaatccaatttttaatgtgacaaattttgatgagacttgatcacaaaaatcatgagatttccttcttatttatntgaatttctcttttgtctttaaatgcttttattaccttatcaaattatcaattatgttaatttccctttaattccttcttatttatgtaagtttccccttttgtcttaagcatattattccctggttcctaaattttgttaatgatcccaataact

SEQ ID NO: 197246 - DNA, 414 bp, Glycine max
  unsure (1)..(414): unsure at all n locations
tgcacaacaagattctaaatatgttattgttctanangatttaactaactaactaactaactaaatgcactaatatatacaatgactagtccgaaggaagggatgagacttgattatgcccatctaatctacctaattcaactaattacacaaagcaaatcccaaatttgcagcccaatcattcaagtgcagattttctaacttccaaggccaatttaaccctctaaatggaagatntggccatcgcttttatgtgacaaaattgaagctctctttcttagctctcgagggactaatcacactcttcattaggagttctgtagcgttctatgggccctgcacaaggcatatatgtcaagttaacactaaatccgaaaataagcaacaattatcaattatactcatttatttcct

SEQ ID NO: 197247 - DNA, 341 bp, Glycine max
  unsure (1)..(341): unsure at all n locations
agcttatccaaacatgccctagattaaacttgttaaaccatattatattttccttattttcttggcaacaatccaatttactctaaaacattaaaaaatctctaaacttaaacaaagaattttaattaacatttcaagtgtatgcactctcaagattttaaattcgccattgaacattagaaaagcacttntgagcttgagtatacaaaagggacaaaatgtagatgccgctctttagatactcttagcattgttctccaatcaacaatggagtttcactttggtaacttgcgaaataatgtttattataggttaccatatgattcgtaataaacacttct

SEQ ID NO: 197248 - DNA, 339 bp, Glycine max
ttctaagagtccatcctgatgtaaaatttcaagttagtaattttaatatataagcctttctcatagaatgaagctattctagtatatttgttgtgactctagtgtaccaaaaatgataacctatactcactttccagttgtataacagcaatgataaccttttgtttatgatttttctttttaattttgtcaatctagtgctaatattttctgtcttctaaagctaatggtcgtttctaaattataatggttactcacatagcgaggcttatgctgtttggtttggtctatacaaccaagcgtcttctctctcgtcttttaattttcttcacactcatg

SEQ ID NO: 197249 - DNA, 335 bp, Glycine max
  unsure (1)..(335): unsure at all n locations
gaacctnctagaaccttatgaaaaagtatggtagggagtacagtggaataacttctagaatgtgtggagcatcttactagacttgatctccaccctaagatacaagtaatcctccaccattcattagtggagggtggagtagcactaacataaaggggtggagcgctctatctctatgattcaagacacacgagtgaatccacttctatagtgagaaagagcctctttgagagagaagataaatagcttgggaagactttattctcaagcttgagtgagccaccataaagtgagtctattttgtcaacacatccttgtaaccctactatactttt

SEQ ID NO: 197250 - DNA, 474 bp, Glycine max
  unsure (1)..(474): unsure at all n locations
agcttannaccttggtgatccatttcaccattgacattaccactcatataccccgagttntccaaccccctatagcaaagactccagcacccttcctttacaagagtgacaaggcaataccatggaaatatggcgtacaagggcccaacagaaggcagaatgcgtctgtcatatgtgtcgagaatggcatgctggctgctaagatcacaaatatttttggtactagcggcatgactcgtagtggatgcattttcgctcctcccaaactaccggcaaggtcgaaagacaaggggaaggcaaaggcatatatatgcgagagggagaagacgggtccgaccgagaatgacgaggcccctattggaaagcttgcaggggaaggggatgactntatcaagagagagatatcatctgaggaggcgattgaattatgagaatcattcacatagtgattcaagtgattgtcaattgataaac

SEQ ID NO: 197251 - DNA, 457 bp, Glycine max
  unsure (1)..(457): unsure at all n locations
ctgcttgtggggattctatggaggctggatcttgagctttttgatgtccttcaatggtgattttacactatggagatgcagcggaaggcaaaggagaagaggagaggggaggcaccatccactatggaataagccaaggaagaagggagcttaccaccaagaattgccttggataagaagcttgaagaggatgctttaatggaggaaaagaaagagagaaggggggagcacgaaattgaaggaataaaagagggagagaagtggaactttgaagtgtatctcataagactttcattcatcanagttacaacaagtgttacatatgcttctatttatagactangtaagcttcttgagaagncttcttgagaaaactctcttgagaagcttctntgagaaaacatccatgagaagctagagcttatctacgcacacncctctaataactaagctcacc

SEQ ID NO: 197252 - DNA, 411 bp, Glycine max
  unsure (1)..(411): unsure at all n locations
agcttgaagcaaccctctctgacaaaagatttgtnattntattcattggtattagaaatagaaacccttttgtgatattattacacttatacagtttctgttgtgaaatttactgcaagattgtacaaaaggtgttgcattattgacaatgaaaatattcctattttcagtagttagtaaataaatgaaacagaatcataaaattagagagcaaaaagtaaggttctgagtagtctccaaaaactgaaagttctacactgaaatcagttttcccagttccatttgagaacttccactggtgctgaagtcatatatttctggaaaatagaagcgagtaggattctattttactcaattgatagtttgtgaaaccaatttgaagcaaaaatcatagcccttggaagttgacaa

SEQ ID NO: 197253 - DNA, 410 bp, Glycine max
  unsure (1)..(410): unsure at all n locations
tgannacactttgtgggcgccctctctgaagattattattctaaggtccacagctacagaagtgctaaacaaaaatgggacaaattagctttgacatatgaaggatcaccacaagtaaaatgcaacaagctcaacttgttgacatataagtatgaactcttcactatggaagatggtgaagatatacaagccatatttggacgcttccagactattttaattgaattatgttgtcttaacaagaattttgttaactatgataacattgacaaaattctaagaagtttatccagaaagtggagaccacaagtgatacccttaaaaactatgaagaatctggactccatgtccattgaagaacttgatggaaccttaaagattcatgagcaggaacttcaacaagatgaaag

SEQ ID NO: 197254 - DNA, 451 bp, Glycine max
  unsure (1)..(451): unsure at all n locations
agcttgtgataatgacactacctgngagaacaacaaatattaggctcaagaaacaatcaatcgacaaatgtaagacagaattcattgatactacaatatatcattgacaanttgaattaaactaacatcacccagtttcaactacatgttgatgacacagtcacaaacactaaacactcaaaggagaagcacttctcttaaaaaattaaagcaaattcttctcagagaaacatcaacctaaaaaacttcagtcaattaattatcaatgatcgaaaacttgtcaatcttaacacaaattcaaaatcaaccacaacattgtcaaagacctgttaactgtgtttggaattgcctatatatcgacattttaaatgaaatgcataaactgtagatgtatgcaaagctacaatgtactctactgcgccattgatgctaaaaggaacacacatgaata

SEQ ID NO: 197255 - DNA, 477 bp, Glycine max
  unsure (1)..(477): unsure at all n locations
ngcccagagaaggagtccacggaggaaatgcttaccacctcataagactgtttaacggtttctaatgactcctctgcggcttccacataaggcatagaggatgggcagctcaccaagatgtcttcctcgcctgatacgatgaccagatgcccttccactacgaatttcaacttttggtggagtgtagagggaacaactcccactgagtggatccacgggcgccccaatagacagctgtagggggggttaatatccattatttggaaagtaacttgacaggtgtgagggcctatctgtactgggagatcgatctctcccctaacctctcngcgggtgccgtcgaaggcacgaaccaccattgaacttggctntaagtgggaggcattgaatggtaatttctccanagtgctcttaggcatcatcgttatactggaaccattatcgatgagcaccttggctacgatatggtccatacac

SEQ ID NO: 197256 - DNA, 394 bp, Glycine max
  unsure (1)..(394): unsure at all n locations
agctgtgagccanaatcctgtattaccatattccttgacccagggtgagaatgccaatccttaccctcggaagcaaaanaaaggagagagagagagagagaagagaaggaaaatttccgatcaaaggaaaaaggagaaggaaaatttccaatcaaaggaaaaaggaaaggaaattcccaatcaaagagtgggggaaagcaaaaagaaaagaaagaaatatcccaatcaaagaatgggagaaagaaaaanagagagaagttaaaaagaagaaatctcctggtcagagaaaccagaagaaatgtgccgagaggtccttggaccatacaatatctgaacaatacagaattgtcaccaaatgaataaaaaaaatgaaaggaaaccacgnacctaaatg

SEQ ID NO: 197257 - DNA, 475 bp, Glycine max
  unsure (1)..(475): unsure at all n locations
ctcagctttcacaagttccttcacaaataatcattacacagcagattactaacaaaaccacccatcatatctcccagaaccccatacccacgaaatttaagagagaaagaagtccacccaaacctgaattttcgaagtcccactcgtagccacgcacttcacgactccgaaaatgctctcctttcgcgatttggagcagaaatgagcaccaaaggttgaagctttgttgggcaacaatggtggatgggagaaaagaagaagaaggctgcgtgagagagagggagagctgtctgaaattttgtggggctgagtgaggagagagaaaagctntttggtcttaaataaaaaggggtttccctttttccattatnttattcaagctctgccacatgtcccttattgattggagcanaaagggcccactctctcttttngactgtgacccatactcattcacaanagtgagaaaaatctg

SEQ ID NO: 197258 - DNA, 425 bp, Glycine max
  unsure (1)..(425): unsure at all n locations
agcttagatacanaaatattttatctttgtctataaaataacagannananaattaagtatgagaaattatattatgttcgctgacattatataatattgtttctaataaacagcaaagaagaaagaaaatgatgaaattaaataaacaatatattaaaaagggataacaagataattataaaaaattatttcgtaatagaaattaatcgattgagtataatctctaatcttgaccatagatgtactaagtgccactacttatgagcatcccatgctccactcttgcttcttttaaatttgttctctccataagcatggcagatttttttttccttttctgtactacattctttttattttttttactattagagcgtgcggttctctaatttacaagaatatgttgcggctcctatattttctc

SEQ ID NO: 197259 - DNA, 342 bp, Glycine max
  unsure (1)..(342): unsure at all n locations
tctagccaaatggacttaccttgaattaattctcttgattttcctttngagccttggttccctttccttgttttgaagctcactacaagccttaagtgaaaaaccatgatattaccatatccttaaggaatattggagctttggaattgttttgggaataagtgtggggagtttttgtttcattggacaacttgttttgttggctatgcttcatgatgtattttgggccatacttgatgtacattgtatattggttaaatgttggacatgctgaatgaaatgttgtttctcacaggcttaataaaaaaaaagaaaagaaaaattccacatagaaaattttga

SEQ ID NO: 197260 - DNA, 357 bp, Glycine max
agcttgtgtttacacattcaataacgggttatttattatcattatctagggcataatattcaaaatgagtgtatctcccttttcgcccatagttgtagaagtttcatcataaagatcattaaagaagcataatattttttgataattccttgattgcacccctgatgtgagtcataaaaaacaaatgactctaacagtacaatgtgaaaatatgttacataataaaataaaaatggaagagtactttttagaatttctaaaagtggatgatgtagaagcaaagacattttgatgttttgattatgccaaaggatcacgcgcttctcaaagtctaattcaagacaagaattcaaaaaa

SEQ ID NO: 197261 - DNA, 370 bp, Glycine max
  unsure (1)..(370): unsure at all n locations
tagaacaataaactgggccttctcttaattgtctttgggttttgcgaccacgatcaacaaagtactttcggcacctactatatgttgacttcaccaacgttgttattggaatgctgcgacaatctttcaacaccttattcacacattctgataggttggttgtcatgtgaccatatcgtcgtccagatgtatcgtaagccatgttcctttcttcctttgaaatgcgatcaatccatcttgctatggctggactcagttgacgaaatttttctaagttntgatcaaacacatgcttgcaaggagtgtacgctgcatcaaatctgttatcatcaaaagttgtacgtagacatctaactcagattatattaat

SEQ ID NO: 197262 - DNA, 380 bp, Glycine max
  unsure (1)..(380): unsure at all n locations
cttctcgctaagccaanctgctggcttagcaagcgtccgctaagcgcaacactcatgggctaagcgcgaggaagactctggaagaagatgagctgtacaggttcgctaagcgcaccgcttcatctcactaagcgcaccgcttcagtccatccgctaagtgagaaaggcatgcgcctaaccaaaattcactaatgtgcgctaagcggtccataattgcgctagcgcacgagcatgaacaaggccacctatttaagccaaaaatcaaattttgtgaagggagtttgtgctgggatncacaagcttgcatgtctagagattctagagagaganaggtnctacgtcaagagagtcttgagagatacttgtgtgtgaagatctgc

SEQ ID NO: 197263 - DNA, 338 bp, Glycine max
  unsure (1)..(338): unsure at all n locations
tatacggatgctgactatgtatgatcaataactggaaggagttccacttccgaatattggacctttctaggaagaaacttggtaacttggagaagtaaaaaacaagatgttgtagcgtgatctagtgttgaagctgaatttcgggctacgacacaaggtattnttgaattgctttggttaaatatcatcttatatgacttgaagattaaataagaggcacatatgaagctttattgtgataataagtcagcaatcagcatagcctataatcttgtacaacatgaatcgaacaaacacattgaagtggatagacattttatcaaggaaaagttggatag

SEQ ID NO: 197264 - DNA, 459 bp, Glycine max
  unsure (1)..(459): unsure at all n locations
agcttggngattactagagagctataaagctttgattntgctatacttgatagatgtgacggttcatgtggattgcaagaaccattgatagattgaagggtgaaaagaaggatctaattgaggctggtcatattattggagaatgtaaaacattgttagcatataactcatccttttatataggatttatcaaagaagcaacctaatagaatgtctcatgaattagtaaaggtagtcctggtttgctctagtctnttcattttttatcatatagtttcatgtactgaaaatttgatttataataaaacgaattaagtattattgactaaaagaaatgtcatgaattaatattcatgtactaataatataaaacagntctatatcatcgattaattataattgatataacttctcaagtaattattataaaagttaataattctcttacatatatattgg

SEQ ID NO: 197265 - DNA, 262 bp, Glycine max
cacataaagcgctttgctcttatttagacatttttccaacaaaacaagatatctcctgaataaattttatgcgcacactatagaccctgctccatgaccgagatatacacacataattgagaatatactgctagctatgacaacatgaccccttataatgatgaggatataagtggatatagaactgaagcgatcataatcttgccagatgacagacgcctacaggacgacggtgactttgtgcgtccgaaaattgacctac

SEQ ID NO: 197266 - DNA, 438 bp, Glycine max
  unsure (1)..(438): unsure at all n locations
agcttgtcaagcccacaagtgtagacaaatgttgcctgngcttcttctgttacgttgatcggggtgaacatgcttttgattttgtaggcgaagtctgacgtgtcaggtgagggaaattcatgtattttacaactctacccttttctaaccattggagagtacattgaagatagatgttacatttcatcctttggtacaagcatgtgcaacgcacgcgcaatactcgtgcatacatgtcactcgtggagtaggtacgtactggagatgtgttgcgtgggtgagtggggttacctcgtggtgcaaaaaattatgacaccactttagctcccaccagttaccgaagagtctatcttctctttaaatggagtggacatttgatttggaccatgatcactataaatttctatctctttcctctcagaatatcttttccttcat

SEQ ID NO: 197267 - DNA, 445 bp, Glycine max
  unsure (1)..(445): unsure at all n locations
actcaagcctgggggctttatggacataatggtattgtatggtgggtattatatcttctgtggcgcaggaacgcngcgctcaaactcttatgaggagtatacttgttgaagtttaattgaatcttacgcctatgtatatttaatatggngaataaatcaagcacaaggaaacaaaattggactaggtaaccaatataataaaggtcaacccgtctaaaatcatataggtgtgcaccccacgaggtttgtttcgataatgtcaatcttgttcaagtcgttggctattgcattcgaggaattaagtgtgtatgtaccacacattgcttcctcctgtgtgtgaaaagggccctgctcatgacatataattgacaaaatttacatataaaattatatcttattggtattaattacttttcaagcgagtcatcatgccaactgttaactt

SEQ ID NO: 197268 - DNA, 395 bp, Glycine max
  unsure (1)..(395): unsure at all n locations
agctntagccntaggatgatccatgtagcgtgagttgctacttcctctatctctaaaatccatcgtatatttccttttacatgtctaaccgccatattgagttatgaatgacaattatgaaaagggttgatcctatcaaacaaagatgcaaaatatctacttattccaggaaacaagatcaagatcatcaatgattatattatctaatactgaagacactttccttaattatgagactctctatattagacatcaacgatgtgaagaaatttgatgaacaagtgtacaaaagacaaagtcgtgaatcaagatatgaaagaaaagaaaaacaatcgctgagaaacacactaacctttagagagtctatcctcggttatatacaaagttttcattga

SEQ ID NO: 197269 - DNA, 354 bp, Glycine max
tgatgatagaggatgcacgaacagagcttggcagccaatttcttgggtttccggactcaacggtggaggatggatgaacgactatcaattcgtggggctccgaataagatttgatgatggacgatgcatgaacagcgctatgcattcaattcatggggcaccgtactcaatggctgaggatgcatgaacgacaatcaattcaaggggcttcgaataagctttgatgatataggatgcaccaacagagtttgccaatcaattcttggggctacggactgaatggtggatgatgcatgaacgacaatcaattcatggggctgcgaataaaacggtggaggatgcacatacaacatt

SEQ ID NO: 197270 - DNA, 337 bp, Glycine max
  unsure (1)..(337): unsure at all n locations
cagcttcagagcctagcagtttcataatcatttatccaanacccctcaagttaatggactttcaagggttgagaagtgcaaatgacaatggggtaaatttggagcatactctctcctcacactagtctataacatcaatctaaacttgctcaaactggttatacgcctaatattctgccgaatcaaaatttgactcctcaacacccatattaccctagaaatggctcttgccttcactttggtcatatgatttctctctagacagcccaaactttctcataaagttctaaatgacatntcaagctaggattaactccctntaaccttcaaataccac

SEQ ID NO: 197271 - DNA, 463 bp, Glycine max
  unsure (1)..(463): unsure at all n locations
gggctcagcgnntatgcgagacggagaccaacttgctagctantatcgccaagnaccaagaagagntagggctatccgcggcccacgagcataggattgcggacgaatatgcccaagtatacgcggaaaaagaggctagaggaagggtgatcgactctttacaccaagaggcaaccatgtggatggatcggtttgctcttaccttgaacgggagtcaagaacttccccgatggttagccaaggccaaggcgatggcagacacctactccgcccccgaagagattcatgggcttctcggctattggcagcatatgatagacttaatggcccacataattagacatcgttaggaaacttgtatggtctctcagaccttgactagatacgacttccttattagnataaaatgagatggtcccatgttctaactcaaaagcttgtgcaataaatgactcctacattt

SEQ ID NO: 197272 - DNA, 453 bp, Glycine max
  unsure (1)..(453): unsure at all n locations
agctagagcatgcttacattttcttgcaagttgactcttcttcaatanctgctgtngatccaaagctctactcgaagaggtttcgtgattttgctgggagaatattcattgaagagaggtagcatatgggtcaacaatgaggctgatatatttctcttcctgaaagtgaagatgcctgattgttcaaaacattcaagataaaatgcttcatatttgaaacccttggcaaaggtcttggagttaaaatgccacgccacggtcaagtggctgacagaagctccctggatttcgggttttttatggcttaattttataaacacagccattgtgaatggtgtgctgaatgatgggaaaacttgtacatggaagattgggatgaacgtccgaattttttttcttctttcctttgtttaagaaatgcggggggctnggtgaatttttctggtactacta

SEQ ID NO: 197273 - DNA, 371 bp, Glycine max
agcttgctcgaccctaattgtccttcctatttgtggccaagctttcccttagggatcttttctggcttcacctcagactcgcgacactaggttgccagaatgaaaggctccaagttgaacctttgtattgtatctccttgatgctcggagctcggtttcctcttctttgattatggaaatctcttggacgtcatccttggtctctagttccaccctcatgttctctttgttgtgttagtcttggaacaacaacctccttgtgacagttccccaactttgatggggattatggcatctctgttgtatgtgagtcacaaagtaatttcgttggttgttggctggggtgaacagtgatatgccaagagtatact

SEQ ID NO: 197274 - DNA, 413 bp, Glycine max
  unsure (1)..(413): unsure at all n locations
ngaaatgaggaagngagaaggggagactctttgttnatttcttgaccacagagnggtacctggagatatgtcgtgggggtcaagagaccttgtggacgtcaggtggggtgctattgcccaaaaccaagcttgaccaatctcgacccaacccgggcatagtcattcattgagaacctgtgatgtacctaaacagacgagctcctggcagtcaacagataaaaggaacaaagaccacaaagcacggaggcttgtgtggtggctggccagctgtgaactntgattgatatatgggatatggcctctggtaatcgattaccacagggtgtaatcgattacaaggcttaataatgaagacagaagactaagaaggtctctggtaatcgattaccaacgggtgnaatcgattaccatgc

SEQ ID NO: 197275 - DNA, 452 bp, Glycine max
  unsure (1)..(452): unsure at all n locations
agcttaaccctngaccttgttgtgccttnattatntatattcaaacctagcgggttaccctcttactccttcaattaataaaatatgcacaggactatacgaggagtatttatgattctactctgttaggggtgaagatcaattcatgaatgtagatatttttgatctaataataaagacctgaaagaaataaaaaaaaagatgctaaaactcttactttgttattaactgcgtatgaaaagtcggcactttatacggtccagcgttgggggcgaaagtacaattatacaatgaaagactaataaatttcatatcttaaaggctaaaaggcgttggaaatataaactttccctcaagcaaagatgtgtacgcctatttgttaaataacatcctgtagagtagtaattttgataacatatataattgatcttgattaaattatacacaaatac

SEQ ID NO: 197276 - DNA, 305 bp, Glycine max
taatagcccaaaacatattttattggcactattgtgtaactagagcagcattatttgatgaatctattttaatgtccaaggttctaagacaactaatttgtcacacacatatcacatgcttatctagcacacaggaagagaatttgaactggattctccagaaatgtatttcttgtaatatttaggaagcgggctcctcaattaacggtttagttaggacgaagatgaacaagagaagggacaagttcaagtctccagggccaccgctgcataaaatgcaacacaggttttgtattgtcattggt

SEQ ID NO: 197277 - DNA, 445 bp, Glycine max
  unsure (1)..(445): unsure at all n locations
agctgtaggaacccagatatttaaagcattgtctatttaagtgagtttttaacgtgttaatctacgcttctgggttatattgaanataatgttttcacgggacacaaaaccatatcatcctgtacagtgtacatgctaatacctactatgcaaaaaggttttcgtaatatatacttaaatataacttttggtttattgtatttcgtaattgatttgttttaatatattaagttttaaaagtttgattctaatctttttttaaatgtattattttaattattctattaaaaatattaatgttttattaacttttaaaatttaaaaaatattaaaacaatatatttcataaatataaatgatcataatanaacttattatacctaaacaacataatcacgaaacataatatatataaaataacattataccctttaaatcatgatca

SEQ ID NO: 197278 - DNA, 437 bp, Glycine max
  unsure (1)..(437): unsure at all n locations
tggctggactttacttttaaccctgtgtcctnctagttatatctatgcagaaaaaaaacattgtttccctagctgagagatttgtcttatagtaaaacattctatacttcatgatatggttttgaagttctaaggggatattttcctgtggtggtttgcatcttttgcaagtatcatataacactccttcatggggatgggagtgtatggttctgtcctgcgtttggctctcttattcaagcatttggcatcttagcaacccaatactgatgaattctttgtgtctgagttcttgaagaagatgggtttagcatcttgccaaggctacaacttctctgcttttgtctgtcttggcaaggggtttcttgtgatgccactggaaacatatggttgactgaatctctttggtatggacctttctggcactatgcctgaca

SEQ ID NO: 197279 - DNA, 428 bp, Glycine max
  unsure (1)..(428): unsure at all n locations
agcttgctttctagtctggaccttgcccttctgttcctngagaatcacttttacctatttaacaaggccaaaggtttctcgaaccttgtcttaatcagcaacagtcttggccatcttctcctagtttttctgttggatgtcatcttggtccactaaaggaataggcatgttcctcctgatgtctaccttcattgcttttatgttgataacaataaagtgtagttgnttggcgatgaaaagacctttacttatgattgattgcttggagtcctcatccattctttcaagacatgaaagacctagtattccaagatgaatntgttgatgagggcgacatantagatgtcatcctcttctcccagtgtattcatgtttctcaaaatattgatgtaaatagtgtgtggaacggtgaaaggaatatcatccat

SEQ ID NO: 197280 - DNA, 358 bp, Glycine max
  unsure (1)..(358): unsure at all n locations
tgtaaaaagggaacaagttttaattctttcaanattattgttgnttctacttcaaaacctcttgaactacttcatattgacttatttggtccctctagaactatgagtttgggtggtaattactatggcttaattatagtagatgattactcaaggttcacatggactttgtttttgaaaaccaaaaataaagcttttgatgcttttcgcaaacttgccaaggtgattcataatgaaaaaaggtcttaatattgtttcacttagaagtgatcatggaggtgtatttcaaaacgagtctcttgaaagcttttgtaagaaaatggaattagcacaattttcttgccaaaacaccccacaa

SEQ ID NO: 197281 - DNA, 343 bp, Glycine max
  unsure (1)..(343): unsure at all n locations
agctnttactgtcatgtgatgctatggctcttgattnannnnncctattaaagtcaacccagtgtttccaaaatatgttcttttatcagttggtgcattcatccgagtctatttcgggtgttcgggaaaattntcatagcattcacccttcaggtgtatacacattnttttcaaaaaactggttatgatcagtgaaatcttttcaaagaaaagctggaagttatctcttttcaaaagcatgtcggttcttagctagaccacttattattatttctcttttttttctcttttttttttcttcttttttaagctattatcaattggtcatttcctctctcctttc

SEQ ID NO: 197282 - DNA, 445 bp, Glycine max
  unsure (1)..(445): unsure at all n locations
tctcaaggaggggagcttagttattagatgggtgcgcgtttctaaactctagcttctcaaggagagttgtttaaagaagcttctcaaggaagctacctagtctataaatagaaacatgtgaacacttgttgaactttgatgaatgagagtcttgtgagacatacttcaaagtttcacttctctccctactgtattccttcaatatcgtgctgccccctctctctttctctccctctttcttttccttcattgaagcatccttccaagcttcttatccaaggctcatcttggtggtgaagctccttcttcatggcttattcctagtgatggcgcctccttcanctctctcctttgtttcgctgctctcatggtggaaataccatataggactcatgagctcaagatcagcctctagagcccacagcagcttgctatcccgttagat

SEQ ID NO: 197283 - DNA, 477 bp, Glycine max
  unsure (1)..(477): unsure at all n locations
ttcctctctaagcaacttatccaagacactttctnaggggtttatcttctccttccatgtcttattctctagngggtggcgcctcctctcaccttttctcctttatcttccactgcaactccatggctaaatatcaccattgaaggaccttattaaaacttaaagatttaacctccatagaagcttctcaaacaacattccatcacttgggctagtaccagctggatgcaaacattaaccaagttcactacttacagtaaacaggccatactaatagtaaaaaacgtgtgcacattccatgaaggtacaaagttaaaggcaaaaatgaaaagggacacacaaaccttctatggcanggtgacatggtcacggtacgatatgagtcaaggcacgaagctgtgacagcatggccacgatctcaaatgacacacacgaangtatcagagaaataacccttctaatgatgtacctactgta

SEQ ID NO: 197284 - DNA, 398 bp, Glycine max
agcttacctacaagtcctaatgacattcttactagaatcttttcactttacactccaatttacactaaccgccaaattagctgttcaaaccctcaaaatctcacacttttccactcacatcactaccattctcacatttaaccctaggttaactctccccatcatcgctaccaatattctaccaacaatttcaccatacaaatatcacaaagcatcatcataaaaccctaaaatataatgggtagctttactcacatcaaacatgtcaagtttagcatgatttcaacaaattccttcacaaataactaccctaaggtaataacctagtagaactacccatcatatctcctcaaaacccaatacccacgaaattcatgtgagaaaagttcacccacacc

SEQ ID NO: 197285 - DNA, 364 bp, Glycine max
  unsure (1)..(364): unsure at all n locations
actcaagcttgacacatcctgacccaacccgggcataggcagacagtgttatcctgtgatgtacctaaacaggcgagctcttggcagncaatagatgaaagaaacaaagaccactatgccaggaggcttgtggtggctggccagctgagaatcttgtgtgatatatgcgctatggcctctggtaatcgattaccaagggtgggtaatcgattacaaagcttaaaaatgaagaccggaggctaagatggactctggtaatcgattaccaaggggtgtagtcgattaccaggctcgtaaacgacgtcaggatactaggagagcttctggtaatcgattaccacgggggtgtaatcgattaccaggc

SEQ ID NO: 197286 - DNA, 430 bp, Glycine max
  unsure (1)..(430): unsure at all n locations
ctcatagtcacccgcggcatgcaagctttgagcctattcagacgacaataacggtgntttcggatgtctgantttgtcccgccatatatcgagacgctcgaaattgaatgctgaagctctgagccaattcatgcgaacaatatcttttactcggatgtctgattgagttctctaatattacgagacgctcgaaattgattgttgaaccttcggagcatattcaaacaacattacttttttctcggatgtctgattgagtcctgtcatatctcgagacgctcgaaattgaatgttgaagctctgagccaattcaaacgacaataactctatactcggatgtctgaatgagtcccgacatatatcgagacgctcgacattgatgttgagctttgaaccgattcaacgacaataacttttactcggatgttga

SEQ ID NO: 197287 - DNA, 309 bp, Glycine max
aaccacctggttcgaagacaaccttctttctgcctttgtaggctggtctatcatagcatttatttttcctctcaattagagctttgactctctcatgaagcttcttcaataatccgcctatgcttgaccttctttatgcttaacaacagatacattaggcatatgcaaaagatcaagaggagttagtgggttaaaaccatatacacacttaagaggataaccattagtggtgctatgaacagctctattgtaagcaaattcacaatggggaaacaagcttccacaagttttaagttatatctcaaaact

SEQ ID NO: 197288 - DNA, 462 bp, Glycine max
  unsure (1)..(462): unsure at all n locations
agcttctggtgggacatcttgacttgctattcttctgacattcaccacagattctgccttcttctattttcagattgggaatgcctctaacagcacctttgtcaatgaatttcttcatacctcttaagtgcaaatgtccaaatctttgatgccatattttgacttcatcttctttggagaatagacatgtggaggagtaactggtttcttgaggtgtccataggtaacagttgtcctttgatctgctgcccttcattagaacttcactcttctcatttgtcaccaagcattctgactntgtgaagtttacattgaatccttcatcacacagctgactgatgctgatcaagtttgcagtcagtcccttcaccagcagtactttgtccagactangaagtccatcatggactagctttcccattccagtgatctttcctttagagccatctnccaatgtcacat

SEQ ID NO: 197289 - DNA, 427 bp, Glycine max
  unsure (1)..(427): unsure at all n locations
ctcaagcttcctttcccttccaccacagcattcttgcccacaaagctttctaatctttttcaccatgcttggcacaccctcacccttggccttggaaccaagaagtccaaggtggttctctttgtgtttgaaactgaggccatgaaggcctcagtggacagaatttggccaccagagatagcacttggtgatgtcaacaagaggctcataaggtgcctcaatggatgtgagatggcaaggttcaagttcataacagggtgcataactttctatgtctatgctgttacgcaacttgtaagctttggcttttcctgtgctgaggatctaagaaccattcttcagtctgtggtggagcttaaggatttcttggatcacacttgcatgcttttcatgccanaccatagaagcattagtttctcacagtcac

SEQ ID NO: 197290 - DNA, 475 bp, Glycine max
  unsure (1)..(475): unsure at all n locations
agtcacctgcngctgcaagctatccctactactagatgactgtttacactgtctatagnngncatcaaaatatcacactttggataatgtgaaaatgcttacttgcaccatgttttcctctccaggttatacaaccaatgatatgcagattcattgatgtccttaatctattgcatgtttttatttccacaaatgttcataagtagctttagcagctcccatcatcagatctttcagcatcaccccaccaccaaattgtttcttaaaattgttataaagatctttcagctcccatcatcaaatctttcagctctatcggnggtggaaattccaaaaaacttgttgaatccctgcaataaataactcataaaaataatgaaaataaactttacaaatagaagtctatccaagagtataattttttacttttgttgacactaatgacacccattgttggttcacactccatatctaa

SEQ ID NO: 197291 - DNA, 345 bp, Glycine max
gacctatcttagatcttttctcgagaccttagcctctgcttgaaatattgctttcttgattctcgaatgagatttataattccttggcatcatcaaaataattcttggagctatgcttctacactcgggggcttatgcactgtccatggtccacaaaatgcatgtggcatcctaggtggcacttcaagacatgcgacaaccctccatgtctgccctggcttaagagtaaaaacattcggcccctaagagttgggctcctcaaccaacaagttatctctaacaccttaatattggatatgttgcacctcactatctttggagatattaattatctacagacacaca

SEQ ID NO: 197292 - DNA, 337 bp, Glycine max
cggatgttcttatcaggccgaataatatattcgagacacgccgagattgactaatggaagttgtcgagaaaatctatatggttacaacctttcactccgatttccgattgaagcgcataatttatcgacacgctcgaatttgaacaacggaagctctcaagaaatctaaatggtgataactatttactccgatgtccaattccggcatataatatttctagacgctcgaaattgaataactgaagctctcgggaaattcaaatggtcataacatttccgaccgatgtctgattcacgcgcataatatatcgagacgcttgaatattacaacggaagc

SEQ ID NO: 197293 - DNA, 401 bp, Glycine max
cgctccggagcatgacaggcaccgctttaagagcgccgtacaccatcagcgtctttaggccatcaagggatggtcgtttcttcgggagcgacgcgtccagcttaagacgataaagaagcgctactaggaggcaacctagtaccttttaaatatctgcctgctatgtgatcactttttatagtaggacgcacctagttgctcatgatcctgggaatttaaataaaacaagcgcaagctcggaaggtagtcataccttacataacatatatatgtatgtttacgtagtgataataccttagatatacatgtatgttacacacaaaatcactctacaaataatatattatggtatgttagggtagaaaataccctatatatgcatggttggaacgaaaaacact

SEQ ID NO: 197294 - DNA, 385 bp, Glycine max
cacctgagctgcagctcggaaaagggattttagtcaaaattctcttctttgtaaaaacatcgtgtccacatcaatatcccttgaactacttcacattgatttattttgtcctaccagaactatgagtttaggtggaaattactatggcttagtaatagtagatgattactcaaggttcacttggatattggtatgaaaaccataaatggagctcttgattcttttcgcaaacttgccaaggtgattcaaaatgaaaaaggtctcagcattgtttcaattactagtgatcatggaggtgaatttcacaatgagtattctgaaaacttttgtgaaaaatatggaattcaccacaattttcttaccccatgatcaccttagtagaatg

SEQ ID NO: 197295 - DNA, 396 bp, Glycine max
  unsure (1)..(396): unsure at all n locations
actcagcttatgatgatgactcaagtatgaatcaagaagtttcgattttttcaacatttcaacagaacgancgcaagactgagtcaacaagttcaagatcaagattaatttcaagattcaagagaagatatcacgataacctcacaagggaagtattgaaaaggatttttcaaaaaccaaacatagcacagttttgtcttacataagagttttctcaaatatttctaagttaccagagtattctactctttggtgatcgattaccaatttactataatcgattaccagtgataaaatntgatttcaaaaagcttataactgaatttgcaatgtttcaaatgcatcttaaatggtgtaatcgactaccatatattggtaatcgattaccagtgtatc

SEQ ID NO: 197296 - DNA, 445 bp, Glycine max
  unsure (1)..(445): unsure at all n locations
gcttatatccaggcgatacgttggggtgtagctccttcttccttggcttattccctagtggatggagcctcccctctcctcttctcctttgccttccgctgcatccctatggtgaaaaatcaccattgaaggacttcattgaagctcagagatccagcttccatagaagctccacaagcaagcttccatcatgtatatacatatattgcctaattgttgctctatttttcaaatgctttcaaatatgctactgttcacgttaaaanaaaaccagaataatgaacaaaataaatgaagtcgaataaatgacgtcttggtttaagacttggattggttgacgacttgttgattttgttatgcgttacttcttatgctaaattttaattctggtttcgagtttactactatctctttgtaccacttatacccattgctccttattcct

SEQ ID NO: 197297 - DNA, 465 bp, Glycine max
  unsure (1)..(465): unsure at all n locations
cgaagctcaaggaanagctagaagaagtttggctttacttgcccaactcctttgagtgacatttgtattggctgttatcttggttgttgcatcttagtacaattgatttttgttttgcattgtgcgtcatcatagtgtgtgtgaagaaaagtttctaagttagaaaaatttctttagaggcaaaaactctttgttttaatcgattacagagttgtcataatgcaaaagactttctctcaaatctgaagcttaaagagttatgtctcatatcggtttaatcgattacatctatctcataatcgattacaatggtgtttgatacaatgattgatttattcaggagtctctactctaatcgattaccaagtagattaatcgattacttgtctcttcgttaagttgtcagaggtgaacaagaacactttaatcgattacttaggtcatctaatccgatacattggtctt

SEQ ID NO: 197298 - DNA, 394 bp, Glycine max
  unsure (1)..(394): unsure at all n locations
agcttgtgcattcaatatgtttatgnagggttttcatatgttctcaagactggactaatagattttctgcccaagtttcatggtcttgcaagtgaagatcctcataagcatcttaaggagttccatattatttgttccaccatgaagccttctgatgtccaagaagatcatatctttctaaaggcttttcctcattctttggagagaggggcacaagattggctatactaccttgctcccaggtccattttcagttgggatgaccttaagagggtgttcttggagaaattaatccctacatctatgtccactgccatcagataagacattttatgcatcaagaaacttagtggagagagcttgtttgattacttggaaaactcaagataatgtg

SEQ ID NO: 197299 - DNA, 203 bp, Glycine max
gcggcacccaggagatatgcccgtggaggtcacgagacctcggggacgccaagtggggtgctatagcccaacaccaagcttgaccaatcccgacccaaccccggcatagactgccactgaaaacctgtgaagcacctaagcaagcgagctcctggcagtcaacagataaaaggaaaacaagaccacacagcacggaggcttgt

SEQ ID NO: 197300 - DNA, 449 bp, Glycine max
  unsure (1)..(449): unsure at all n locations
agctctaacataaaactttatttattcatttctcaccttattcaggggcttgagtgcattattcatgagagaaattacaggtgccaaaagggagagacataaaaacaaaaaaggtattgtgaaagggagagatggagataattcaatgtgagaaagaagtggagagacatggattagtttatcttctttntaaggtcttttctaaaagttaatttccttttaatggatgcgatgacatgtcaatatagaataaattcattggatgtttatgtaaatagattttataatgtcaatgcatatatattatgagttaatggtcatgcacaagcataaagtaaatntatcttatcatctaattacaaattattgcttagatgaattttaagataattattggtaaagtcaatanacttatcggacatgatcatntgtaattaaataactatgta

SEQ ID NO: 197301 - DNA, 469 bp, Glycine max
  unsure (1)..(469): unsure at all n locations
ntgtgtantaagagattccctcaggaagagcctcatagatttgcttatcttggnctctgttnttccatgtactttggagtagctatcttatgtagccatgctggtggcctgcaaagaaagcaaggatggtcctttgagatgggggataccctcctactagatgtgtgacttcccccttaataagtttaatctcaggaaatgagacatcctttgcaggcttgaatccttcagatacatttgcgttgcatagaacccttatagcattgctgtagaagtgatccacgtaactagatacaagcggaccctgtccattgcccaaatagtattattagaaaaagggtctcatcagcaaacattctgtcacattcttaacattgatggccgcacgaatgaaatntatgtgttctggcttctttatatgaaagcaattggttccttcaatatcttaaatgactaatcaatgtcatta

SEQ ID NO: 197302 - DNA, 475 bp, Glycine max
  unsure (1)..(475): unsure at all n locations
ggatcttaagcacctgngctgcagcngattatctgggaattttcttcttctacngagacagcgggttatatgaagctgaatattacatttaaaagttattataaaattgttaatgcttgtgattttgactcaggaatattatatcactatatacaataattatatcacaataattttatatacatgaacaataattattttgaagctccaaatacttagttttcataatctcaattattttgctccaaataattattttgcctactggagaacaatgaaaacaatgcattgagtgttaagtctgcacaactacccttaatggtagtctttcgttttgtatacaggaacttgcctacccttaatgcattgcttattcttacctgttcagagaatagaacttgtttaataatctgnttttgacacataaaagattctgcccttcccttgttttgacataagtattccatgtgaacat

SEQ ID NO: 197303 - DNA, 326 bp, Glycine max
cctgacattgtctttacctagataattcatggaaaccaagttctgaaggagagtacattgttttgcctcatcgctttttgcaaagcgctattgaatttcaacaaggaattctttggcgctacatatataatctgatacagtgcccctaaagacctcacgaatgtcatgcttaatgatcataagactcatgcaatttgagtgatctcacctctcatgaagtttcctctggtcagaggtactcgaattcgtatgagaagggggtttctcaatcctaatgtaatgtctagatccatgcagcccagaacacattgcatgttctctttcta

SEQ ID NO: 197304 - DNA, 416 bp, Glycine max
  unsure (1)..(416): unsure at all n locations
agctcgacatattatnttcgtattttacgttcttaaccccaaatattagcttcccgtagagcactaataaattcttgatcattacctacaaagacttttgcaaaacatggttccctaaatgtaggatataccacaccattgactgttctaatgtcatagtaagactgtgcacctttggcagtggatagcatcattcttaggtaaancagttcaccagctgaaggtgggacccatatgagtctgcctattggattcccttggtttcttggttgccagcatcttttgcgggcgacataaacaaattcttgagatatattgatgatatgtaagatctcgtccataataacatactttcggtagaatgcattcaggctgtgaacatggattctttgattgtgttttcgaaggacttcacc

SEQ ID NO: 197305 - DNA, 402 bp, Glycine max
  unsure (1)..(402): unsure at all n locations
gacacttgaaactaagctgaactcactcagcattctctatatttcatngaatttgttacgaaatcagcatatcataacgaatataattagtagtcaacaaataaggaatttacttacatcattcacaattgtagtatagatatgttcaaacatttgtcacttgatattatttcatttacatcagcatatgttaggaagatgaaaccctctacatctggaatcccaaatttagtcccatcgaacaacaattcaataggctcgtcataaatatcataaaggctcctaatcagcctacacaagggatcatttgtagcaacattatttgacctttgaacaagtgtaacccagtttgtttggagtaataacctgaattctatatggttaatgaaaacaacaattaaa

SEQ ID NO: 197306 - DNA, 472 bp, Glycine max
  unsure (1)..(472): unsure at all n locations
ctctcagtcacctgcggcatgcaagctngagtgactatatattacgaataatattcactcagatgcttcttgaaagaggcaattccatttctctttgctgtttccacaacactgatcagtgatatatagtccttaagttaagctacaagacacatcacaaatcatacagatggtccatgcagctaactaacatgtgcgataaggtgatgctacatgctactttattatccatttgcatgtaataattgtatctagtctctaataaaaaaatgattagttggctgctgtgaccttatatggacaaattaatatatagcgagttcaaaatagttgaatttctgaatccttcagtacacatcaatagaatttacaatttagtactgaatntacgagatactggatgttgatacgttcttcaagcataggatactatacaaaatctccctctttgatcatatnnttgagcttaatc

SEQ ID NO: 197307 - DNA, 489 bp, Glycine max
  unsure (1)..(489): unsure at all n locations
actagctcattctatgctgatgctatgatactgttggttcttacccgtgctcttgatgcttttctcanaaaaggtagtgtcgtatctttctcctctgaccctcgacacaaatggaagcatgttgcatttacaatcgcttcgtgtttttgatgatggcccttcgtttctctggtctgactggaacagttcagtttgatattgaaaggaatagaaatcatccagcatatgatatcttgaatattggtggatctggaatgcgcagaattggttattggtctaattactcangtctctagttgtcactccagaaattntgtataagaaaccacctagcacttcaacaaagcagccagcataatcatcaacggaaaagtcacaagagaatatatctcaattattactccttannatatcttaattaatctattaccatcatgttcactcttatcattatgaacatcatttacattatcatcataatcatcgccg

SEQ ID NO: 197308 - DNA, 313 bp, Glycine max
ccaacgctgccaacctagacactaacattgtagggaccatctatatcctcgcccttctcagaggatatctatccgattcttacctctgcagtttctgtaccatgcacataattggttacgatgaatcttccgatactttctctattctactcattcaattacctttattcactatgtgacaaccttccacaaattatacaaataaaatatgtgacacggttctattgtttctgccatctctagtcctaattaagccccctctgaaatcaacataggaaacgtctcaaacaagggcatagaccatgatatcttc

SEQ ID NO: 197309 - DNA, 445 bp, Glycine max
  unsure (1)..(445): unsure at all n locations
gcttggctntgaggactagcgccaagggttcatcatgncttctatngttccttnccncataggcttgaagagaacccatcaattggtctacggtcattgagtctaaatccttatactcttcaatagcacaaaccacataatcaaatctaacgattaaggagcgaaggatcttttccaccacacgaacatcttccattatttcttcataacgcttcatttggttcacaatagccaacaccttgttgccaaaatctgagatagattcagattccttcatatgcgatgattcaaactctctacgtatagtttgtatgcgcaccttttttaccttatcaacactcttaagggaggttttcancatctcctatgctctttggatgtggtgcatttgacaccactcgacattacttcatccaaccttgaagatgaaagtagtgttgttgat

SEQ ID NO: 197310 - DNA, 273 bp, Glycine max
  unsure (1)..(273): unsure at all n locations
gctgatactacacatcagctgtttttttttnggtttttttcaaaatatgactctcaactacaacactagtgcacaggaggtctaatatgttgcagtcaatcaactggatcttatgaagtgggataatttcagttggctggctatagcgatagtgattggagagggttcttatatgatagaaagagtacatcagatcttgtattcagacttggcttgggagccatcacgtatagctccaataatcaatacacagatgctttagcatcatctata

SEQ ID NO: 197311 - DNA, 482 bp, Glycine max
  unsure (1)..(482): unsure at all n locations
agtcacctgcggcatgcaagcttctccccatttttggctataaaaggtgtctgtaaggttatggaaagaggccagcaccctgngagctcaggaatcacttaaaattagtgaggagaagaagaaagaaggaaaaaaaaatccaagccaagacgcttccgtaacgcttctgagacattttcatcatcaattccgtggacattcttcgccattcttcgttcgttcatcatcgttctccgagcttcaactggttagttttcgatttcaaagctttcaattcattctatacacccttagtggtccattccttctttgtttgctttcctcttcatatcagtatcctctntcttccgttttaatgagcttcaaccgatcatttaagccattgtctcgcctaataaatgataaaatgaatttcaaccgatcatttgtgtcgaatctcgtttaacactggtaaataaaatcaaccgatcgtcacactataa

SEQ ID NO: 197312 - DNA, 401 bp, Glycine max
  unsure (1)..(401): unsure at all n locations
ctcaagctntgaaggtggtgagcccacctctatgatagaagaagactgttaatgtgtttactatcattgccatcgctatttcatctttgatgtgccactttgagctgccaagctctccacctttgggtgtattctttgaaagatttgtgccccccctcttgcacatgttctgtagttgcatcctatccgaagacattatactgacactgcctaacgaaggccaccactaggtccttccaagaatggactcgggaaggatccaagttagtgtaccaagtaacagctacccagtaagactatcttggaacgaatgtatcaagtaattcttatcttttgcgcatgcccccattctccgatgatacatctttagatggatcttgttgcaagtagttcccctgtac

SEQ ID NO: 197313 - DNA, 484 bp, Glycine max
  unsure (1)..(484): unsure at all n locations
acctgaggcatgcaacgcttgtctctgctgttgcacaancaggatgtttgtgtctaatggctcatcnngaaatcctttgtggtatatatgtttgagctacatgagtgaaaaaggtctagatattatgagcaagcgaggcttatttggaaatcataaggtgaaacctcttcatatttatgagcattgtgtctatgggaagcatcatcatacaaagtttccaaaggttatgcacacaacanaggccatgctggattatgtccattctaattgctaggggccttcgagagttccatcaccgggaggggcaaggtatttcctctccatcatcgatgattactctaggatgacatgggcatccatgatgaaccaaaaatattanactttcaaattttcaagcattacacgattcttatgaataatcagacatgaaagataatattgtgtcttaggactgaccacgacttgaaattccttctactaattc

SEQ ID NO: 197314 - DNA, 369 bp, Glycine max
  unsure (1)..(369): unsure at all n locations
ctatgaaatcggcgagtgttgttaaattctgagtcaaatgtgtgattcatgtgaaatgtaattgctgattgaaaatgtattttaaatgataaagcggtgaagtgatgcggattgtattaagctgaactatgttataaatatctctataatttattttgctcatgcctctgttatatgattttatttaaaatgtgaaactcactccctattgttgttgtgttgaatcctatgatatctcgaccttgtgttcggaacagatgacttatagacctcntctagagacctgaacacatgctctatggagggacttggcgccacgtctgtcaatagctgatgtccaacatgcctttactctatcatctggggcac

SEQ ID NO: 197315 - DNA, 397 bp, Glycine max
  unsure (1)..(397): unsure at all n locations
cttcctagntctacatatattctaattgtttccattatgaaactcaaacaaaacaaaattagttgcatgacgaaagtaagatatcatgcatacgtatatctttaagttaacccatgcaaccatgcatgaccacttgttctattatatgctatatgcaatgtataacagcaaagattcgcgttactaccctactatgagtcattttctactttgtctcgtgtgcctattctttaatcttaggtgctaccctactagagtttctatcattctcggcgtatctccatagcaacttcacttggcgtactgatttataaaactatcaaatcatattattatattactattaatactcaaaatgacatgagtgtatgctaagatttgaagacaatcatacact

SEQ ID NO: 197316 - DNA, 364 bp, Glycine max
tttggcatatcactgcacatatgtaccctagtatttttcaccttttttaccttacgttgtttacatcacgatagtttcgtaactctttttcttaccaaaattaatgagacattatgaaacctacttctttataaataaacttaaaacatttttttaacggttaccttaagtgatgtcaaacaataaaatatttatcattttgatcttgaaggataataatacattgatgtttactcaattcaagttaataaacctatctagtcaaaaatcaatactatctgatcttttttaaatatgaaaacacacgcacacatatatatatcgatatatagtattatatatatatacattatatatctatata

SEQ ID NO: 197317 - DNA, 335 bp, Glycine max
ggaagaactcccttatgtgattaaacgcacgcaagcaaggctaattatgtggctgatgcactttagaggagatatggtctaatatctgtgcttgaaacaaagatgtttggattcgatcacataaaagattcgtattctcaagaccgcgacttctctaaaatctttcagttgtgtgaaaatgggtctcatcaaggttcctttaggcatgaaggatactctgttaaaaataacagaatatgttcgcctcaagttccttgcccgactcatgattctgaagctcataaaggtggtaattggacatttggaatgaaagaattaacattctttggctaaat

SEQ ID NO: 197318 - DNA, 326 bp, Glycine max
  unsure (1)..(326): unsure at all n locations
tctctaatagctaagcataccttcttgagatgagaagctagaacttatctacccaccccctataatagctaagctcacccccatgacgagaaacatgagaatacaaaaaagaaagtccttactacaaagactactcaaaatgccctgaaatacaaggctaaaaccctatactactagaatggccaaaatacaaggcccaaacgaaggaaaaacttattctaatatttacaaagataagcgtgctcatacttagcccattgggctcgaaatctaccctaagggtcatgagaaccctatgagctttctttggatgtctagcncaatct

SEQ ID NO: 197319 - DNA, 402 bp, Glycine max
  unsure (1)..(402): unsure at all n locations
agctcgtcattgttccttgatatatttgatgtactcatggncactatgaatgacaaattccttgggataaaggtagtgttgccatgttttcacggcccgcactaaggaatacaactccttatcataagttgaatagttaagagtaggaccaattaacttttcactaaaataagcaattggatggccttcttgcaacaacacagccttaatcacaacatttgaagcatcacactcaatnttaaaagattttngaaagtttggcaacacaagtatggggggcattattaagcttttgcttaagaacattgaaagcttctttcttgttctcttccccatatgaaaccaacatttttcttgagcacttcattgagaggtgctgccaatgtgctaaaaatccttcac

SEQ ID NO: 197320 - DNA, 328 bp, Glycine max
aatgcatgtatgcatcattgtgctgatgtacatgtacaatcttgctaagcttattcaaaggataagcattctcttctacaatagttcttgattgcttcaacaaactaagccttgtttgaggattcactatagaccaatccttgccttagaacatactgctttcaagacatacaatgcctctggtatatattaccactaagtgtattcgattaccagaagacacggttgagaaatagctgttgaaaaatgtttggaattcgacataacaacatgtcagtcgataccatatgtctgtagtcgattaccagcaacggaactttggatattc

SEQ ID NO: 197321 - DNA, 347 bp, Glycine max
  unsure (1)..(347): unsure at all n locations
agcttagtggttagttccaactatanttggtttgttgagattcttttnnttatttttttgcatattccacttgcacattggaagtatctttgttagttttggttgctagaattcaaggtgccgtagtttttttttttgtaacgttgcacgtaacaagattgtggggatgaggctatatatatctctctcctcctttagcccaaaagacagaagcagaaaaaacaatttgtcttttttctctaaatatcttttcttccttttcttataaaaaaatattttttgagaggagagcattggtgtttagaaggtttggggatcctttctctgctcacgatcggaaccaatgg

SEQ ID NO: 197322 - DNA, 340 bp, Glycine max
tataaaactaagcttctttattgcgtacattaataccgtatctcaggttttggagcctttgatggtactcggcgggaagttatgggggaaatcgatattcccattcagataggcccccacacttgtaatgtgctgtttcaagtgatggatataaatcccgcctatagctgcctcttgggaaggccttggattcatgccctgtgagtagtcccttcaacgcttcaccagaaattgaagttcgcagtgggtggactcttagtgatagtgtcgggtgaagaggatatgttagtgagctgcccctcctccgcaccatacgtagaagcagcggaagaatcattga

SEQ ID NO: 197323 - DNA, 371 bp, Glycine max
  unsure (1)..(371): unsure at all n locations
agcttctcgggaccttggcaaaccttcatctcatccttcatgatcaaactgtctactcgtgattggtccctttcctctctccggagcttaagctcgctgttattgccccacagagcccctcagaatttgttctggctgtgtttatcacttttggtctcttgttccaaggccttggtggtagctatatttacgtctctcagttcgacattctctttntggatcttaagagatgctgatttgaacctttctttgactgttggggcttgctcgagttctgccctaagggcccgcacctcttcgtcttccttcggtgcttcaacttccacccattntgtggttctcaaactcaggagccaatccaaaccttgcat

SEQ ID NO: 197324 - DNA, 393 bp, Glycine max
  unsure (1)..(393): unsure at all n locations
actggatgcattggttaacttggtaacccaactggcctttgtccagaaatctgtacctgtcgcaagggtctgtggtttgtgctcctctgctgaccaccatacagacctttgcccttccatgcagcaaccgggagcaattgagcagcccgaagcttatgctgcaaacatttacaatagacttcctcaacctcagcagcaaaatcaaccacagcagaacaattatgacctctccagcaacagatacaaccctggatggaggaatcaccctaatctcagatggtctagccctcagaaacatcagcagaagcctgctccttccttccaaaatgctgctggcccaagcagaccatacattcctccaccaatccaacaacagcaatagccncagaaaca

SEQ ID NO: 197325 - DNA, 442 bp, Glycine max
  unsure (1)..(442): unsure at all n locations
agctntagattaaattaagagacatgaggtattaaagatatattaagactagattaagacacataagttattgcgcctcaccctaactgggattattctaactccccaatttttcccgcttaagtaatttaaattgtctgattattttaagaaatttaattatttcttaaattgagatttgattggaagaaatttaacgtacgacagtatgcagttaactccttgggtaatntaatgtcaggtttgatatctcttttgtcatgaaacataggacattatgcgtgattaaatattatgagccttgattgagttgttttgaattgatttgattttatttggattgaattgcttaactcggtgattttagtgtgatgtttgaaattagttcaattagcaatttgactcaattaagagtatgaatttaaatatttgacatggtcta

SEQ ID NO: 197326 - DNA, 433 bp, Glycine max
  unsure (1)..(433): unsure at all n locations
aactcaagcttgagaaagtccttctgattctatntatacatcttgtgtactttatggctttatatgaagtacaaagattggagcttttgcaaatctttattaatgaatagcttaaacactgtggtttaagctactttccttgatatttgtcttatgcctaacttcatctaattgtacaggttacattttattcttctctttggataactgcatgccttgtaaaagacaagtgaagagggcacttttgcttcattctcttatgatgcaatcagtaacttttgttgcatacaccttttgtacatagtcacagcatgttattgtcacttggggaccagtgaactgttctttatttgcttaaggacaagcanaactgtacatttgggggagttgttagtcgatgaatacgactaactcttgtgtataaaacttgtgt

SEQ ID NO: 197327 - DNA, 434 bp, Glycine max
  unsure (1)..(434): unsure at all n locations
agctngtagattggccagacattatacatgtcanggtttggtttggttcaagggtaaaagggatgccccacattatttccatgacacaaatgcaaaaatgatgatttggaaactttatgcaaaactggtcatgcatgcacctatgtggacactcaagtgtcaaatttttatggtcatgtgatgctagggctcangattcattccctctattttagtcaacccaatgtttccaaaatatgttctcttatccatatgtgcattcatccgagatccatttgggcgtccggggaaatttcacagcgttcacccttcgggtgacacactatttttaaaaaccagctatgatcggcgaatttccaaagagaagtggaagtatctctcttcatagcatgtcagttttagctaacaacctaatttctttcttttcctctctt

SEQ ID NO: 197328 - DNA, 409 bp, Glycine max
  unsure (1)..(409): unsure at all n locations
ctttacatgcctaactcctttgagtggcatttatattggttgttaacttgattgctgcatcttagtacatttgatatttgtttgcattgtgaatcatcatagtctgagtgaagaacattttcaaagatggaaaattttcttccgaggaaaaaactctntgtttaattgattacatagttgtcgtaatcgattacaacaagctttttgaagcttaaagatttaagtctcatatttggttaatcaagtataggtctactttaatcgattacacttttcgttgagacaatgactgacttttcaagagtctctgctttaattgataccacgtggatcaatcgattacttctttcttgttaaattgttcaaggcgaacaagaacctttaattgatactacgtcattaatcgata

SEQ ID NO: 197329 - DNA, 463 bp, Glycine max
  unsure (1)..(463): unsure at all n locations
agcttctggtgggacatcttgacttgctttctaatctgacattccccacagattctgccttcttctattttcagattgggaatgcctctaacagcacctttgtcaatgattttcttcatgcctcttaagtgcagatgtccaaatctttgatgccatatgttgacttcatcttctttggaggatagacacgtggaggagtaactggtttcttgaggtgtccataggtaacagttgtcctttgatctgctgcccttcattagaacttcactcctctcatttgtcaccaagcattctgacttcgtgaagtttacattgaatccttcatcacacaactgactgatgctgatcaagtttgcagtcagtccctttaccagcagtactttgttcagactangaagtccatcatggactagttttcccattccagtgatctttccttagagcctctccaaatgtacatagc

SEQ ID NO: 197330 - DNA, 368 bp, Glycine max
aagggttcacgcacccttggtttcgcaacttcacttaaagatagtgaaagacagaacgagaaaatcaaggtcgaggcgcttccgtgatcaattctgtggacgttcttcgccgttctttttcgttcttcgatcttcaaccggttagttctctatttcgaagctttgaattcattctattcaccctcaggggtcctagctcgctttgtgtgttttcatcattatctcgtctacttacggcatttcttttctgcgttattagcgacgtttaaccgatcatttaagccgcattctcaccatatcgatctttaaatgaagttctaccattcgtatgcgttggatctcgctcaattccccataaataaaatcca

SEQ ID NO: 197331 - DNA, 380 bp, Glycine max
  unsure (1)..(380): unsure at all n locations
agcttccatagagtatttatagggcattaattatttcttatgaatttctttttcctattccaagaataaaaacacaattaggtgtccatgttgtaaatgcaacgctatntactataagacaagagacgaagtgattggtgatttattgaaatctagatttcaacaaaattatgagcattgggaatctcatggagagagctcaagtgattcanaatgtcacaatgatgatgattntgaagatgatgctaatgtcttaggtgctaatgttgaaacgggtgatgatgcttaaacatacttcatgcttcatggcatgcattagtcactttatatggatggagatgatgttttgataatatatgcctagtcatgctaatatcaat

SEQ ID NO: 197332 - DNA, 468 bp, Glycine max
  unsure (1)..(468): unsure at all n locations
gacactataaaactaagcttgaacttagtcgnntgggttttctggattacatgctctttcttntaggttttggtgataaatggacgaaattgatttatgttattgtctcatctagcttcacgttagcgttagtaaatagaggcccaataggtgaattcaaggcatagaggggactaaaataaggggaccttttctcttcctgttagtggttgaaggtttgtttggcctttttagaaatgttgtangggttggcctgattgaagaagtaaaagtggctgaagagatacaattcccaaatttatagtatgtggatgactcaatcaccatgtgagatgtttcatttcagaaactgttgcccttgaagggtattttgcacagttttgagatggcaccagccttataggtgaattttcataagagcaaaatatacaagatcactgtcgaggttcattttatggaagcattctt

SEQ ID NO: 197333 - DNA, 426 bp, Glycine max
agcttaaactagagggggtattgtgaaaattataatataatatctggattctattaataatagcagtttataggcacataatcttgatttagaggaaacaaaatatcctctatttatgtataattaatgtaatcaacctaaataaacatgcatccgctgtgcattcaaacacacggttttcaggtaattatccctttgtatttcttattttaacagtagcactatctttaaattgcaacaagatatgacatggaacttggaagcacagaaagttaaaattgttatgaatgattgaacagctatatagctgatatctatatatggccaggatctgccttgaaatatagggcagttggaggtctgttttctgctacaagactgaaacatacttcaattaaaatgaactacttttattttataagaaaa

SEQ ID NO: 197334 - DNA, 305 bp, Glycine max
  unsure (1)..(305): unsure at all n locations
tatccaatatggcaatgagcctactcgtaggatctgttttatcaaccaaagaacagataatattaaaagggtataagagatacccaaagaagatacaaagattaaaaagcaactaagttacgaaaagaaagaataatcagaagcagttactcggagatactaatactagcacttgccaacaatgagaacccacgaggaacagttgaacaatcccttacgagaaatgcaagccaataatgttgcataattgaatatacctttgtttcacatatntttttctctctcttccctatacttaccccccc

SEQ ID NO: 197335 - DNA, 462 bp, Glycine max
  unsure (1)..(462): unsure at all n locations
agtcacctgcggcatgcaagctgtaggctaagtgtttgtgtggctctctctatctttatacaganccccttttttggctttgatgatgccaaacttgaatattccattgagtgcatttgtagagtcttgaaagtagagactctgctttttgtagttaacctgaaagtttcttaacactaagataagtatcaatttcatatcatcatcatcattaggttgagttatatataaatgtatgatgcaatgctaatgcaatatattctcccattttgcataatgctaaggcaatatacaaaacaaatgctaatgcaatgaattatgctatgctaatacatcttctccctgttttggtattaacaacgtcataaagttatatgtttcatagaatcaaagcaaactatgatctggagagaaggagccttgcatttatttatataaactttacaactaatatcaactcta

SEQ ID NO: 197336 - DNA, 423 bp, Glycine max
  unsure (1)..(423): unsure at all n locations
actcagctatcctttctctatacttaagttgtgagattggcnctangttgcttgttaatgaacatnnggtgaaaaagcagagtttaagcatttgatgttttgagttttggaattgcggtttttgattatttgatgaatattgatgaaaaattctaatttgtaagtaattttgatgtggtttatgtattggaatcgatagaaaatggtctggatttgttttgagatgatctggaaaccgtcaaagataattcttagaatttcaaattctacatacttcgcgtccaatgaccaaggtcacgcccaatgatcaagtttgtgtccaatgaccagtctcgcatccattggtcaagggattgattaatggttgttttccttgcttaaattaaatatcttgagatgtaatgaatgatgatatgagatgtg

SEQ ID NO: 197337 - DNA, 385 bp, Glycine max
agcttctcaatgaggtgagcttatttatgataggggtgtgtgtagctaagctctagcttctcaaggaagttttctcaaagaagcttctcaaggaagttttctcaagacaacttctcaaggaagctacctagtctataaatagaagcatgtgtaacacttgtggtaactttgatgaatgaaagtcttatgagacacacttcaaagttctacttctccccctcttttattccttcaatttcgtgctcccccctctctctttctctccctctatcttttcctacattgaagcatccttccaagcttcttatccaaggctcatcttggaggtgaagctccttcttccatggcttattccctagaggatggcgcctcccttctcctcttc

SEQ ID NO: 197338 - DNA, 192 bp, Glycine max
cttttggaacatttttttcgtttagacgagtatgcgcgtatggggctattgtgcaacctaggagactctttattgcatgaagcttgaaatggagcggaatgtactgccttatgtattgaggacttgttgtaagctatgagatgcctctttagagtaggaccatgtggttgcacgggttggtgaggaatgtgt

SEQ ID NO: 197339 - DNA, 288 bp, Glycine max
  unsure (1)..(288): unsure at all n locations
tctgaaagatctttggatatnnggatactntgtgggcattgaaggtcgttctctgtccactgggtcattgatgatgactctgtcaacatatattatggatcttttatttttttttgcacaacaataatcaatattgcattataagtaacattcagtactacgtgtactgtaattcagatcatgaagttacacaggcctatgatttgtctaacccaacttctgaagacaaatgccatgagctgacacaataagtaaaataacccttctaaataaatctgtatggataca

SEQ ID NO: 197340 - DNA, 395 bp, Glycine max
agcttcatgatgttgaatcaagttgattctattagttttgataatgacaaagatgatgacaaaaagcccaaagaatgatttcaagattaaatcaagaacaattcaagaatcaagagaaatttgatttcaagattcaagaaaagatgaattcaagtttcaagagaagaatcaatcaagataagtattaaaaagtttttcaaaacattgagtagcacatgaagttttcacaaaatcttttaccaaagagttttactctctggtattcgattactaccagattaccataagggagtaatcgattaccagtagccagcattgggtttcaaactaatttacaaagctggtatcgattaccataacatgtaatcgattactagtgtttaacacattaagat

SEQ ID NO: 197341 - DNA, 375 bp, Glycine max
  unsure (1)..(375): unsure at all n locations
tgtagaactataggagtaatgatgctcattttaatnctgtttctataacaatagcaangaacttacttgatagaacttacttctgctggcggcatgggttggcaacattagatgatatacgatgtctatattcttcactgtataataaactattcttcaccctatactctcaaattgacaaatggaaagagacaccccatgtttggtcaagacgaaaaaatgaaacataaaagaaaattttaatatctaaattaaaggaaaaattcaaaatgaaatggttaaatttgtgtctcgtgaagccacataattctatatttccttacacttctattcactcaacaaagaaaaacttgtgacctaattttctcttattct

SEQ ID NO: 197342 - DNA, 280 bp, Glycine max
ttcacctagggtctttctttgcaccaaataaaaaccttgcttattgatacttctatcctcacagttatttgtatggaaattataaatttaattaggagctaggcttttcatcttaattactcagataaattagataatccaacaaaaaatctctaattaagttaaacaaatgttatgttgcttcggaaaattgttgtgggaataaaaaacctatattacatattcggttttgttcaaaaaataaatgtacgctccaagtaaaaatttgtaaaaaaaatta

SEQ ID NO: 197343 - DNA, 432 bp, Glycine max
gatatcttaagttggtgaacgagcccatgagttctgggatatgactcccttcaaaaaaattatcgctgagatcccaagtgtcaatattctcaagggcaatcaatgaggagatattgattgcacctatcaaatattgtgtatgaccacggagatgaagcatctcaacatgaccagtttgattgttgcattgaatgcctttccatttgcaacagtctctattattgccatcgtccctccatgtagacagcatgccagagtcatctatgaggccatgtttgaagttgaggagtgcttgtctctcagtctcaatgcacttaaattctgcgctattgggaaggtagttgaatccaagaatggatcctgcagcatgcaataaaagcagcacaagtgcatataatagtttcagagaataacaactcattatgaaatgac

SEQ ID NO: 197344 - DNA, 365 bp, Glycine max
  unsure (1)..(365): unsure at all n locations
aaaaatgaaaataaattgtgacttaggataatagggtagcgaagttcacgaccagcctatgaatttcatgttgcccgtgaaataatttcaaacagggcaacaaagatcacatccagcccgtgaaacactttcagacatgacaacaaagatcacaaccaacctgtgaattctctattgcccgtgaaccaatgtagaactcccaaaattcaaagatcacaaccagctcgtgaattccccgcttcttgtngaataaacttggtgctctctgacactagtcactaaagtncataggtagcccatgaaattgagtttactcatgacacacctacaataattgttattttgctagggtctagacttatatt

SEQ ID NO: 197345 - DNA, 410 bp, Glycine max
  unsure (1)..(410): unsure at all n locations
ttcagaacttgtgcccacaactcaccttgatgatgaaacaaggttcaacaccattttccaagtaaagcataattgaactttctcaaatccctgatacccaagccctctgtcttctttggcatacatgttgttccccaactcacccaggaaatcttcttctgatctgggtttcctccccacaagaaccacatctgtagctctaccaacctgtctaccatcttctttggcaccctgaaaaaagaaaagtagaaaattgggatccagttcaagactgactntatcaaaatcactcttccctcgaaagagagatattattttccactttgacaatgntctctcacattnttttaactactgcatcccatgtctcactacaccttgggtttgccccaatagggatacccaaataa

SEQ ID NO: 197346 - DNA, 405 bp, Glycine max
gcttcataagggtatcagagccattatctcttttttgtgctccttaaacctccattaattttttgctttaccttctcttccattggtgtttcttcatttttctccatgtatctcctcacatgtcttgtgataaatgttgttaacatgattctttagagtttccaccgattaaacttgctatagaagctagatttgattttatatggttcaaatttcttgttcttgttcttgaaccatgaattgtgttgagtttaagttcctttgagttttgtcttgctattttttgtggctgaaacctataccataaaattcttacaaaaatattaaagtagatgaaaacctcaaaaatctagagtgacttgttcacctattggagtttctgtcatagatgtcatgtttagtcat

SEQ ID NO: 197347 - DNA, 497 bp, Glycine max
  unsure (1)..(497): unsure at all n locations
tactcaagcttagctctcagtcaanactctcttcacagaatctgattgcatgctttaatatgtggccttgttcgtgctcgtgcacttagcgtaattctggacggcttagcgcacattagtgacatttggcttagcgcgtgcctttctcgcttagcggatggactgaagcggtgcgcttagtgagatgaagcggtgcgcttagcgaacctgtacagctcatcttcttccagattcttccttgcgcttagccaatgagtgttgtacttagcaaacgctcgctaagccagtggattggcttagcgagaaggtgaaaaacaacacttcanaacttgcctaattaacctgaaattgagagaaaatgattattanacatacaaaaataattactaagtatttattacctatctttaactaagagaacttttaacactacacaataaccataaattggaagaggttaatatacattacacaagttttatacacgaaagttagtt

SEQ ID NO: 197348 - DNA, 383 bp, Glycine max
agcttaataaatatatatatggtgtaaaactttccttctcatcagtggaccttaagtttcatgggataatttcttcatttggttttgataaaaaccccatggagcaatgcatataccataaggtcaatgggagtaaaatatgttttcttgttttatatatagatgatattttacatgcatctaatgatcgaggtttgctacaagaggtgaaacaatttctctctaagaattttgacatgaaggatatgggtggtgcattttatgtcattggcattaagattcatagagatagacctctaggtattttaggtctatcacaagaaacctatattaacaaagttttagagagaatttggatgaaagatttgttcaccaagtatcgc

SEQ ID NO: 197349 - DNA, 490 bp, Glycine max
  unsure (1)..(490): unsure at all n locations
tactaggctggttaccccatacccagggatgacaatgtgatcgcttatacttaacaacacttcatggcgatganagactcgggaatacgcatgctatgcatgcaaaatgtaattatgagattgagatgccctgtcgcaacctacccttcggcgggagggcgacgcgagactcgcgggatgcgtgttccacgaaaggaatacgcgcggagtcgccaccaacgtttatttgaggaaaacgtcgggaaaactggaaaagacgcgatctacgaacttttaagtgaaaggttcgggagttgtatttacgcatggngaaggtattagcaccccacacgtccgtcccaagggacggcagcctttaatcgaatgtgcaaacatgactntgatttntatgttcccttnttatgtctttatatccatgtataccctctttatattattctctttttgtggtcgacaangggggttcccttcgctcctacgtattcctcaa

SEQ ID NO: 197350 - DNA, 460 bp, Glycine max
  unsure (1)..(460): unsure at all n locations
atgtaggttacccataccanaaaatgttgttctcatttgtatgttgtatttaaatagactagcaactctggagaatcttaagtagagaaatgttgtcgttaataattatgaggttgtttgttatttttgtaatggggagggcaatagcataacacacattttccttatgtgtaacttttctttatagttatggaataaatgttatgaatgccttgacactctcacaacttaacattcagaaatcaaaaactacttttaccaacatgattgttacttattgaaaagggaaaaggcattggcatggtaaactatgggacaaaagaggtggtcggacaacactatatggatcatccagtctagtcctctaaactagaactttgactgttgtattatcatccagatgatatattggtggagcgtctaatcacatctaacgagtgggctatctagtacatttagt

SEQ ID NO: 197351 - DNA, 344 bp, Glycine max
gacatggtccatgcatctgacagacacatgtagagctttgtagtgccctctcccctcaactggaatcttctctttctcaaatgcaaggcagttattggttggaatgttattaagcatgccttcaaaatctccactgacatgtcatgtcttattggccttattgaggaccttaactatagtgcacaataggcttgagcttatgacattcgagaaggaatccttgtgaagtttattcattgctcagcactgtaactacttgttggagaaacaagacttacgacccctccaagacaataccttacttggaactttttttttaattctttccaacgtaattacttttt

SEQ ID NO: 197352 - DNA, 486 bp, Glycine max
  unsure (1)..(486): unsure at all n locations
ntatatagactgtagagctntaatctgtgaagagatctcttctagtcgctgtctaatagctctagcgcttgacacaaggctgccactgtgtatagagagagtgggaaacacaaatgtttttagcaacatttcttcaaagaagtacagttttccagtgtcacctagtgctcagagctgactttcatctatgaattgaaggaaacattaacaacataaaacaaaaggaattaagaatattaagacaatacaatttaaatcttcctttgtgtgcgctatggagcgagttccttactgagcctatgggcgttactatcttgagaatgttattagtacttgaggatcaagtaattgttccattgcttttgtactggtagccaagtgctaaagcacttgtcttcttaaggctagacgctgaagcagtatcatccaatgaccgatactttgtttttcgtcaaagcctttccagttcatgctcttttgcttata

SEQ ID NO: 197353 - DNA, 397 bp, Glycine max
  unsure (1)..(397): unsure at all n locations
tctcacggngnggaggctgtgccctgttctcaaaatgttcacaatcagaatgcttacaatcacaatgctcaaaattgtaatgctcaaaatcaggatgttcaaaatcaccaataacagaatgcacagattcaccaataatggaatgctcaggatgatcaaaaggtataaaatgatgcctaactaatctatgaaatgtcctatctatcttatgatcaaagggttgtaagtcagatggattgcctntattcatacactacattcagcatgcacaactagttgctttgtcatgaaataaaggtgcaggtttgaactacagctacccctcaatgatatccaaatgacttgaaattgtgggagcaaccttataaaatgatgagaagatagctcaataaatctc

SEQ ID NO: 197354 - DNA, 478 bp, Glycine max
  unsure (1)..(478): unsure at all n locations
actcagcttcaaacnttgacaagaatgaagctctgataccacttgttatacaagtggcctcagatatcttaagaagggggggttgaattaagatattccaaacttttctcctaattaaaaatctatcttactttttacttaagttatgaattcccttaatgacaatcttcttaaatattaattcaaatgaagcaacttgaattatgaatatacagcaataataaataaaggagattaagggaagagaaaatgcaaactcagttttatactgggtcggccacacccttgtgcctacgtccagtccccaagcaacccgcttgagagttccactaacttggaaattccttttacaagttctaaacacacaaggacaacccttcctttgtngttagagaatctntacacaagagactcacagtctcctaatcccttagagaatgagaagaagaagaggaacaaatctctcttganagagatg

SEQ ID NO: 197355 - DNA, 403 bp, Glycine max
  unsure (1)..(403): unsure at all n locations
agcttattacattgaaaatggatgattcctccatggtttgcaatggctgcttgtttaatctggtgtagttccaaggtctaagtgtgacacattatgctgcatttatggcactctaagttttgatcttcatcggttatttttattttttatcaataaatataaatttattagttntattagatatgtcaaaactagtggagagcaaattcattgtattgttcaactagcactttgtaagggcaatattgcgcaatccagcacatgttcaccatgtctattcatagatgccaaacaaatttttaattcgggtatggggtattttgatcaggtcagcctatttgatcacccactaactactactactcgcggggagtggcttanggtttgtgtccggttcttaact

SEQ ID NO: 197356 - DNA, 478 bp, Glycine max
  unsure (1)..(478): unsure at all n locations
tgagggaatcacagaaatggctaaagatgttgctatcactattggaatacacacgtgagcccgcttataggtaagggatgagtttattgcaattgagattagaatgaacatgtggaaggatccttagaggattaaattgnggtttattttgggatatttattaaattacaatttttcctttatgattataaatacaatattgttgtgttctacggaccaattgatgttctgatgataattgattgataaacttgagtgctcttgatgtttttgtgttttgacccatgattntgattaattgattttgatataattgtgagaaactatttgaggggttttactccccatgttgtgataaatcttttatataaattgttatgttgagattatgaaatgatgattcaaattgtgagtatgtgataaattgaacatgtgatgaatgatgaaatacatgtgtattgagatgagatgtatgtat

SEQ ID NO: 197357 - DNA, 258 bp, Glycine max
agcttgccacccagctcgcccttgcgagtttggttgtttcctccagaaggctgttgcttctggaggaatcttctagagggcccaagtgggcctggttgctatttgcacccccatttttactaaatacacccctgtcctttgttggtgattcttttttcgtaatgttacggaaacttatggatttccgaacgatacttgttttcttcccgtaatgatacggaacttcgcagatacataactatgtcctattttgactta

SEQ ID NO: 197358 - DNA, 417 bp, Glycine max
ttttatgaatgatgctctcctacaacctatgaaaaggtagaaggagataaactgtacaggctcaaggttcaatcaaacaatcatactttcagctcaaaatgggtgcaagggataaatcaatcatgcataaggtaagctatctagctaagtgactatcttcaatcaaaacatagccttcatcatcttcaatttcatgcattcattccatactcagagattcatgcaaaaatagatactcaatgttagtcgttctctcacaattaaagatcacactctcaccgggttgtgcctaatgagtacactcacaatcaatctgtcaactgactaacattttagtcatgatcctaatcatgttctttctcttctatcactgacactaattaaaacatatgattacgcattccattcactcaaata

SEQ ID NO: 197359 - DNA, 367 bp, Glycine max
  unsure (1)..(367): unsure at all n locations
agcttcagataaaaactgctnttttttcgtcatcttcagctnttaagggctttctgttcttgaaggctcgcttagcgccattttcgtgctaagcgcgagttagtgaatttctgttgagcgagctgggcgcacttagcgcgagagaagacaagcgaatcgctgagcaagctgatgacgcgctgagcacgcatatgcttggcagattctcctccagattttcccaactcgctaagcgggatgagtgcctcgcttagcagatgattctcgctaatcgcacaagcctcgcttagcgagacaccagccacaacaaccttcttattcttcatcttttcacctgaaactaaagttgaaaacgcattaattcaca

SEQ ID NO: 197360 - DNA, 446 bp, Glycine max
  unsure (1)..(446): unsure at all n locations
tgtcaaaggtccatattcaacaatgacgttcaatactttattgaacaaaacatatagatgtacctcatctaaacataaaattctgcaactttgaaccaataaaccaatatagctcggtaacattttgtttttcataaaataaataaaaagaattttatttaaaaattaatagagttttagaaatttaataaatgtgaaaaaataattttgttaattaaaataaggtcttcatagtattaaaaaataaatagagtaaaataatattttagaaaataaagggatgttttaattagttatttatttaatgaaatagtaaaatatagttatttttataaaataataaaataaagaanaaagagtaaataataggctcagagtaccctagttctaaatagaaatatattatgtcagttnttataatcagtgatatgttctacactctctct

SEQ ID NO: 197361 - DNA, 379 bp, Glycine max
agctttagtcacaatttcatctctaattctatttccactcaaattttagaagccccagccacagaaaatatattcttaccatgtctctttcaaccaaataccaaagccaagccaatggtaaaagacgcttacggtacaccattcttgaaaaaatccaacttcacaatatcaatattaactcataattatattcaattatcaagtaaaatgtccgcctaccattataaaagatcattttatctatatactataaactataagtttcatgcttcaattggttcaacttttcacatcaacacaagcccaaaaccacaccagcaattctttacagctaatcacagtcttcagaaattacattggacgtcaacctgccatgttg

SEQ ID NO: 197362 - DNA, 459 bp, Glycine max
  unsure (1)..(459): unsure at all n locations
tgtgcatgggaaaatagttggtgtgaaagatgataaaatggaagaactgaaatgggagaggtagtgaaagtggctggtggggcangaatgatagtacttaatgctgaaaatcaaggagaagaaatttatgctgatcttcatattttgccagccacttctttatgggcctcagaaggtaagacgattgaaacctatattcaatctgataaaaaaccaacagcttcaatttcctttatgggaacaaagtttggtgaccctgcaccagtaatgggagcattttcttctagaggaccaagtatagtggggccagatgtgatcaagccagatgtaactgcacctggtgtgaacatcttggctgcttggccacctaaaactagcccaagttttatcatgaatgacaaaagagaagtactatntaacatactttggggtacctcaatgtcttgtcctcatgttagt

SEQ ID NO: 197363 - DNA, 397 bp, Glycine max
  unsure (1)..(397): unsure at all n locations
agctngcatccactagattagaaagaacattttattaggactttgactgaaaatgttagtcagtttgtcagattgattgtgaagcttttgatttgttggcagcccaacctcattacaaacctagaaagtccttcggattcattttgtgtgtttatttctgtatggtatgagatgatatgcaaaagttgggacttctgttagttgtttataatggaatgatcctaaacacttgagcttgagtgaaacaacgactgtgaggctttggttgatgattctttccttgatatctgccattctcactaacttattttagttgtgactctaatgcatatgttcctatcattgaaaagctgcatgtttgcgaaaagcaatngattgaagtattccatgatattca

SEQ ID NO: 197364 - DNA, 375 bp, Glycine max
ggcttctacattaaaaacagaacctcagagagagttacgctttatccttagagggaaacaacactagaaatttagtcttccataagttcaacaaaagcagaaaacgtaaatgaaactaggagcagaaacgttaatgaagcttaaggccgaaaacgttaatgaagtttaaagccttagaagggaccccaaccaaattgcgattgaatgcgcagaatggagaaatgcattcacgtgaacagtaatgcgaagcttaaaacgctaaactctattcactcagcttgggtattttctcctgaataatggaatcccttttcacgaattccaaggcttttatttataagggtcactctaagtcactgggcctaattacattat

SEQ ID NO: 197365 - DNA, 451 bp, Glycine max
  unsure (1)..(451): unsure at all n locations
gcttagactaaataggctaaacggcgcgttatctgttttgatctgagncnacncntacaagagggacccgcgcacgaaactcatattaagacagtctaaacctaagacggttgcctaaactgagcctaggccaacaagagggacctgacgatgaagcttggattgattcggtctgacgagggatcgaggcttagtaatttaggttacaacatagaacacaagagcctgattgattagagaaatatatttatatgcattagcttgcgcgttagaaagacgccacttttgacctactactgtcactatcacttaccttgcattttatagcttttagcataaaggtttagtttaaattatgtttgaaattatcaatcatacatgttctctcaacaatgcttcatttctaaactaacccaggctaacatagttcctgtgttcgtactcggatcat

SEQ ID NO: 197366 - DNA, 478 bp, Glycine max
  unsure (1)..(478): unsure at all n locations
ctaagctgtgcattcatatcctgatgaggatgttctatgggttctttatactggactaaaacattngatgcccaagattcatggtcttgcaggtgaagatcctcataagcatcttaaagagttccatattgtctgttccaccatgaagacccttgatgtccaggaagatcatgtttttctaaaggcttttccttaatctctagagggagtggcanaagattggttgtactaccttgctcccagatccattaccagctgggatgaccttaagagggtgttcttggagaaattcttccctacatctaggaccactgccatcagaaaagacattttaggcatcaggcaacttagtggagagagcttgtatgagtactgtgaaagatcaagaaattgtgtgcagctgtctcaccaccagtttctgagcactcttcatattttatgaggattacaacatggaagagatgatgagctgcatggg

SEQ ID NO: 197367 - DNA, 450 bp, Glycine max
  unsure (1)..(450): unsure at all n locations
taagtcacctgaggcatgcaagctngnggagatacctcaagataccatcttggagctaattgtcctaannaagggggntaccaaaagataaataaccttttacttaatcaagcttaaataaccttttagttcttataaaataggacatttttatttatttttattttaatcatttatagtttttttgtaatcctttaaagattttaattttttgatttagtgactgcatgttatcaaataataacgttaactgatgacataataatgatgttgatcacagtctattgacttgtcatcatatcaaggagtctaacaaagtagtcatgtctactttttttttagtaaactttatttntaaatctctcatcaactagtatgatattatcaactattttgaacaaataaaaatttaataacataatttaccagaaagaaagtacatatgacaaa

SEQ ID NO: 197368 - DNA, 328 bp, Glycine max
  unsure (1)..(328): unsure at all n locations
ggaataagccatggaagaaagagcttcacttgcaagatagtaccttggataagaagccttaagaggaagctttattggtggaatagaaagagagagagtaacgagagaagctggagcacgaaattaaggaggaatagaatgagtgaagttgaactttgaaagttgtctcacaagactcccattcatcaaagttacacatgtgttacacatgcttttatttatagcctaggtagcttccttgacaaacttccttgaaaagctntcttgagacacttccttaagaatctagaacttagctatacacactcctntaataaactagctcacc

SEQ ID NO: 197369 - DNA, 450 bp, Glycine max
  unsure (1)..(450): unsure at all n locations
agcttggttatctccttcttcactacatcatgatatcattcgtttgagncnncnctgnggctggcttactggtttagctccatcctctaaatttattcgatgcatacatgtggatgggctaataccaggaatgtctgccagggtccagcctatagccttcttatgcttcttgagaactgacaacaacttctcctcttgctcatcagcaagggaggcagatataatcactggaaaactcttgctatcatccaagtaagcgtattttaaatttgatggcagaggcttcaattctggtgtggtcggctggacagtggtagaaggagatggtttctcagcctttacctcataaagaaagtcagaggtatgtgtacttcctgaaacatgggtagtcctatctgactctataaaatcaatctcgagaggtaaaacaccaccaccagacatgcattc

SEQ ID NO: 197370 - DNA, 344 bp, Glycine max
  unsure (1)..(344): unsure at all n locations
tatgatgaatcaagattgattcanagaagttttgatgatatcatatgtgatgacaaaaagctcaaaggtcaagaacacttcatgataacaaagatgatgatctcaagaatcaaagaatgagttccagatattccagattggatcaagaacacttcaaggttcaagaggaaatttgatttccagaatcaagaatcaaggttcaaggttcaaggcttctctaatccagatccagattctcgaatctcgagaagactttatctcgatatgtgttgaaaagttttttcaaaaactgagtatcacatgggtttttctctcaatctgtgtaccccagagagtttactctc

SEQ ID NO: 197371 - DNA, 387 bp, Glycine max
  unsure (1)..(387): unsure at all n locations
gcaaattngaaagattttgactttaacctcgcattttttaatttttgttaaccaacaagctaatgcatgcgaattttggaagatttttactttaaccgtccatttttaatttttgttaaccaacaagctaatgcatatgaaagacttttgtccctctaaacattttatattttatacattacttataaatactcccaagtcccaactgtacattacatatcaaacttcaactgtttaacgtatagataaagttatttatgtcgtatataatcatttgaatatcaaataatgccaataattacgttgccagctatgttatcaacattatcatgcacgtctccagatatatccatttaaaattcaaacacgaagctaaaaatagaaagt

SEQ ID NO: 197372 - DNA, 481 bp, Glycine max
  unsure (1)..(481): unsure at all n locations
tgcaagtctgcaacagtgatttggcccacatgcattgtattgttcccttgtgcaaaatctgattcttttaggctgacccaagtagatattagtccaaaatgaatttttttatttttaactaaaaaaaaatcacacgtgaatattcctccccaactatttattttatatttaataatcaattaagattcaaatcttaaactactttattgagagacacaaattttccacttatgtcaatcgttattaaattcccaagtgctgcatatcaatccacataaacctacatggactacgggttaggtgaactgcaggagtataccaacttaatggagtaaggacctaaccaaaatctattaattntaggaaagttatcaacgtacaccctattnttggaagaaagtttaatagatttaagattattatcccaactctaattntattaactcttctttatanaataacatttntaattatatgtcat

SEQ ID NO: 197373 - DNA, 266 bp, Glycine max
aaaacggcggaggaagctgaggggaaggggtttaacacccttggcaagcatatgtcacttaaaattagcgaagagaagaagaaagaaggagaaaatcaatgtcgaggcgcttctgtaacacttccctaaagtttccgagatcaaatccatggacgttcttcgccattcttcgtttgttcttcaatcgtcatcattctttgactggttaggtttcaattttgaagctctgaattcattttatgcacccttaggtgtccattcttgct

SEQ ID NO: 197374 - DNA, 459 bp, Glycine max
  unsure (1)..(459): unsure at all n locations
tggattctgacataggagacatctgccagagccaattgtctcgactcttanacctccatgnttgnttcaccggagatacatccctcataaagtcaaaaacagaattcatgatgcaaggttgttctgttaaaactgagattgaactaacttgtctgtgtgaatgacaataacatggaaactcttttgtagaggccaaaaagctgtgatgacgagtacatcttggttcgaagatgataattttgaaatttgaaacttcaatcaggcgcgtcaattgcatgagaattgatcaatatctactaactaactcttgttcanaaaaaattgnnnnnntctnctaactaactacctgngtttcacgtaaagacactaaaaatctaaccaaatattataatagcatgaatgataaaacttgaatggataccaaccacattctcttcactaaacacggttggagaaaag

SEQ ID NO: 197375 - DNA, 260 bp, Glycine max
gatggcaactaaaaaaaatctgagtcttttttgccatctcttacatgagcttaaaacccctttgttcattactagcaagctgcaaataatcacaatctaagccttatctaaactaatgcagagataaaatgaaataaaaaggaagaaagttgggttgcccccagaagcgctctttaacgcactactagagctctcatgttcttgggaaagtgaaacagtttaattttcatactcaccatgaatgctaactttgctttcac

SEQ ID NO: 197376 - DNA, 417 bp, Glycine max
  unsure (1)..(417): unsure at all n locations
tatctgactatacactggtctttttgttctatacaatataaccactatgaaaaaagcgacttgtgctaagcaagntatacttcacaccttcaacatataagacattgactatgaacgctagagagggaataccaattttttacccataccaaaaatcttccctttgcctatgcctncaaaggaaactactcctctctcacgtggctttaggtctaggagcatatatctttccctagtcatatgttgagagcatncattgtccatgtaccaactcaaatccccacctatttgagattttggtacccatatctttntgggtccaacagagttaggacccttagacattttttcttctcatggatgcacctaaacttagactgtctagatttaccatacaagtcacatctgtctaagtta

SEQ ID NO: 197377 - DNA, 389 bp, Glycine max
gaccttaagcaccgcggctgcagcttatatggctcacccaattttatttttaaaggcctctccatgcttcacctcagtattctctaggcctctaaaagtaccacccaagttttctttcaaaaagcctctctaggcttcacccacaatagcacttgctactggacacacatagctacttaatgtgttaccacaaaactttggaagtagtaatcacctaattactcttctgagctctctcattaaaacttgctactagacacacacaacaacctgttgtgtttccattgaactttagaaacaatagtcccctgactacctttctaagttctttccctctaaacctagggggtggacaaacactcttttggatttggatttactagctccac

SEQ ID NO: 197378 - DNA, 483 bp, Glycine max
  unsure (1)..(483): unsure at all n locations
aacgtgatggactgcgattaaagatcttacagaattttctgaccacactcgctcagacatggagtgttttttccttttctaacctggtccgtacctctcacacctcggatatcacattagacagggacaggttgatttatagaatcattcagaagatggatataaacctgggttatattatttcagctcaaatttctctgatcgcccaacatgactcttctaggcttgggtttcctgccttaatcactgatttatgcaaggccaggggagtcatttttgattcattgacattggagagcctcgatccagctattaatgtggcttatgtaaagaaaaactgctacaacctagatgatgtctcagttaccttgtgagggccgcacaaggccaaggggaagaggtgtaaggctccnccatcttctgagattcctccttcctcagctccagcaccaattgcatctgccccatctgcatctacatctg

SEQ ID NO: 197379 - DNA, 377 bp, Glycine max
  unsure (1)..(377): unsure at all n locations
agcttgtcaattagggaagcatgtttaaaatccttttctaagcaaaaatgttgtttctacttcaaaaccccttgaactacttcacattgatttatttggtccctctagaactatgagtttaggtggaaattactatggcttggtaactgtggatgattactcaaggtttacttggaccttgtttttgaaaaccaaaaatgaagcttttgatgcttttcgcaaacttgccgaggtgattcaaaatgaaaaaggtctcaacattgtttcagttagaagtgatcatggaggtgaatttcaaaatgagtcttttgaaaacttttgtgaagaanatggaattcaccataatttctcagccccaagaacacctcagcaaaatg

SEQ ID NO: 197380 - DNA, 484 bp, Glycine max
  unsure (1)..(484): unsure at all n locations
taaagntaaaggactaaaagagaaaagattaaatattaattgaactaaaattgaaaaactgcaagtttacaatgactaaaaatgaaaaaaaaaacttatagaacaaaaaaaacacaaacttaagtgaactaaaattgaacaaaaagttttcaaaaatcaaaattaaaaaaaatgcaaacttacatacgaaaaaaataattaagccattttttaatatgctgtttttcatatcttttttatattttcttatgaaaaagtttaggcaatttggttaatatcttctatctccaactttttttttctctttntgaggaaaaaaatctctttttttaattggtaatattttaaataagagagatctttttttgattcaagaacatgttttttggaaataattagtattttcattctaggaaaaatacttaagtagtaaatatttttcttttataatttgctattagtagcttataaatgattatataat

SEQ ID NO: 197381 - DNA, 334 bp, Glycine max
tttttactgggtcgggcacttcccgtgcctacgttcaatgcttaagcaacccacttgagaatttcaactctctttggaaaacttcttttacaaaggctgaaccacacagggacaacctttcccttatgttcaggaatcctctacaacaagagacccacggtctcttaatcccttttcagaaataagaagaagagaagaagaaatctctcttaaaagaggtagattgtgccatgaagatcaatcaaaattccttattgaatatgcaagtggttgaccaaggaatctttttgagaggataagacattttagtacagaaaaactcttaatcttttga

SEQ ID NO: 197382 - DNA, 484 bp, Glycine max
tgcccagagaaggaatccatggaggaaatgcttaccacctctaaagactggaaagcggtttctaatgactcctctgcggcctccacataaggcatagaggatgggcagctcaccaagatgtcttcctcacctgatacgatgaccagatgcccttccactacgaatttcaacttttggtggagtgtagagggaacaagtcccaccgagtggatccacggacgccccaacagatagctgtagggggggttaatatccattatttggaaggtaacttgacaggtgtaagggcctatctgtactaggaggtcgatctctcccctaacctctcggcgggtgccgtcgaaggcacgaaccaccattgaactcggctttaggtgggaagcattgaatggaaatttcccaaagtgctcttaggcatcacgtttaaactggaaccattatcgatgagcaccttggccacgatgtggtccatacacttgactga

SEQ ID NO: 197383 - DNA, 368 bp, Glycine max
  unsure (1)..(368): unsure at all n locations
tagcatgaaaaagcccttcgataatatgtatgtatgtaaatatgtagcataaaataccttgcaaaatgttgagtaaaatgccttgcaaaatatgaatatatatagcatgaaaatgccttgaataatatgaatatatatagaatgaagtgtcttacaaagtgtttgaatggttagcgtaaaagtgtttttcaaatatgtgtatttatgagtaggtaggaaaagaagccttccgaaaaaatgtgtgtatatatatatatatatataatggagcatgaaaaggttcgtaaaanaaaatatatgtgtacatgggtgtctatcgtanagtgcctttcaccaaatttttatgtgtgcaaatgcatatgtgtcat

SEQ ID NO: 197384 - DNA, 346 bp, Glycine max
  unsure (1)..(346): unsure at all n locations
tgatgatgatcataatgatatgatgcaattgatgcanatgggcttttcaagaataaattcaagacaatacttcaagattacaagtcacaacatctagatgatcactagtatatcaggaagggaattcctaattgaattgcaaaggtttggccaagtaatttaaattaaaaagtgtctttcaaagaatttattctctggtaatcgaataccagaggatgtaatcgattaccagtggccaaatatgttntataacagctactaaaatttgaattcgacattctagactgtgtaatcgattacacaatnttggtaatcgattaccagcagntaatataggttntaattc

SEQ ID NO: 197385 - DNA, 442 bp, Glycine max
  unsure (1)..(442): unsure at all n locations
agcttctacataatgggttagttcttaagtgataaaggnccaagttctagagagtttgagagaatttgttgtgtgaaaattggtagagaccagagctggaagaggaagccgtcctcagagcttgagatgagtttgtgagtgattgggaggtcctagaggtggaggagacatccccactacttgtatttctgcaatctttcatctttctcttctcttcgttgtaaaggaagtttcccagttatggaaagctaaatcctttgttggatcttccttgtaggtacttgatgtaaatatctttttatctatttaatgatgttttgtgtgttcactgtgctatcanaacttcattctaccatgcntttgccttgatcacgtagatgcatgtgtttntaggatcattcaacagtggaaactagtctgattcgtagaacttgtaggatag

SEQ ID NO: 197386 - DNA, 358 bp, Glycine max
  unsure (1)..(358): unsure at all n locations
actaacttttcaaatggttgtccccgcaggaaatggctccgagaaagctttccgcgaaaagatctatgagggaccccgcggttgaagggaccagtgccgcccccgagtttgataaccaccgttttaggagcgccgagcaccagcagcgtttcgaggccatcaaaggatggtcgttccaccaagagagacgcatccagctcagggacaatgagtacatcgactntcaggaagagatagctctccggcgctggatgtcgctggtcactcccatggctaagtttgacccagatatagtcctagaattttatgctaatgctttggccacagaagagggagtgcgggacatgcgatcatgggt

SEQ ID NO: 197387 - DNA, 400 bp, Glycine max
aaaagagggcaattatcacctcattcagccaaaaaaagaggcacaatatcacctttctcctcttttcccccttattcaatccttttccccttcccaacctaatggaaaagaattaaaataatacaatgttcttaactttgttaagttctctaaacttaatcaactttcatatataagaatttctaagatattgattgagggagattttttcgacatttatataaaatcattagatatgttactcttttatataatctttaacacttgaaatttaatttgtatagaggtgtcaaaataaattatgtgatccatcttgacagttcatactcaaaacatgaacatggctgacttaaattccttatgcattcgcattttttttgtttgccccgaactggttgtt

SEQ ID NO: 197388 - DNA, 410 bp, Glycine max
gagatgggtcagacatgtctctggcgtaaatgcttaaacgtgagtcggccttcaagggagagttggctaggacgatgtacaaccctccaaggatgaagctgtgtggcgtaaatgcttatggatgagttggttttctgaggagagtcggccaagatgatgtataaccctccatgcattaagccttgtggtgtaaatgcttatgagtgagtcggttctttgggaagagtcggtcaggatggtgtacaagcctccaagcccttctggcgtaaatgcttatgggtgagtcggctctctaaggagagttggctaggatggtgtacaacccttcaagcaataatccttgtggtgtaaatctcatgggtaagttggttctctggggagagttgcgcaatacagtgtacaaatataaa

SEQ ID NO: 197389 - DNA, 395 bp, Glycine max
  unsure (1)..(395): unsure at all n locations
gctggttttagctttttttgattatattggggaaggggcagaggagaatgaacatattttgtcttgaacaatttaacttttgagataatattatgttaatgtttgtccatcttattnttatttgcatatagcatgcttttttatacatatttaattggtatatatattctatttcaaccgctatgcggcttccgctatttggtcacgacgctatccgctatattctatagtggattttcagctttttgcaattttccatgatccgctattgacaacactggtttacnagtgattccccatagagggacaccaaagaggcacatcttgttatagtaaatgattccgttctgaacgatgagaaagagcgaagtggaattttgaattctacaatgtgt

SEQ ID NO: 197390 - DNA, 434 bp, Glycine max
  unsure (1)..(434): unsure at all n locations
gtagccctaagccaccatttttgtgtttttgcttccatactgatactcttgttcactccctacaggtaagtgcacttctcctttgctttttggctcactattgttgcgctttaatgtcttatttgctcatccttgcaaaaatctgagaagcactttattcttgaattcatgcttgtttggttgaatcgggggttgtacgggatggccttaggcttatgttgtgttctgaaaaaattaggcatgtcgcattgcccctattcctcactttgttgtgcctaaacgtgcgcccaccaagtgctcggtgaaatgcctcgatggcatttgtgcatggttntgtgaatttcgttgttgggactgacttgtgcatatgtggttgccattgttgagtttatggacagcttgtacgaactagaatgactgcccatanatgcctt

SEQ ID NO: 197391 - DNA, 433 bp, Glycine max
  unsure (1)..(433): unsure at all n locations
agcttcccagaatcaagaacaagagncaagatcncattatnctttaancaagagaagaattaatcaagataagtatgaaaaagttttttcaaaaactaagtatcacatggatttttctcaaaacctgtttaccaaagagtttttactctctggtaatcgattactagattattgtaatcgattaccagtagcaaaatggttttcgaaaagctttcaactaaatttacaacattccaattgatttcaaaaagctgtaatcgattacaatgttttggtaatcgattaccagtgtgtttgaacgatgaaattcaaattcaaatgtgaagagtcacatcctttcacaaaaaaactttgcgtaatcgattacattgatttggtaatcgattaccagtgatagtttctgaacaaatcanaagatgtaactcttcaaata

SEQ ID NO: 197392 - DNA, 477 bp, Glycine max
  unsure (1)..(477): unsure at all n locations
tctatggaggctggatctttgagcttcaatgatgtcctttaatggtgattttccaccatggagatgtagcggaagacaaaggagaagaggtgagaggaggcgccatccactatggaataagccatggaagaaggagcttcaccaccaagatgagccttggataagaagcttggagaggatgcttcaatggaggaaaagaaagagggagagaaagagagaggggggagaacgaaattgaaggaagaagaagggagagaagttgaactttgagttgtgtttcacaagactctcattcatcaaagttgcaacaagtgttacacatgcttctatntatagactaagtagcttccttgagaagctttcttgtgaaaacttccttgagaagcttctttgagaatacttccttgagaagctagagcttagctacacacacccctctcataactaagctcacctccttgagaaacttccttaaga

SEQ ID NO: 197393 - DNA, 435 bp, Glycine max
  unsure (1)..(435): unsure at all n locations
agctttaaaatttaaattcaaatgtgtatttgttgttacatatagnttaaacttctggtaatcaattacataccttgtgtaatcgattacaggcttttaaattcaaattcaaaattttcaaattgtttcataaatcaatttagccactggtaaccgattaccagagaggaaatatcatatttttgagaagataattgttcttaaaaaacttttgtaaaatattttctttagccaaacctaggtagcatcaattaaggaattctttctaagatcctaactaagtacatcgttcttcttgcatttctgaattcttgacttgaatcgcgctcatctttggcatcatcaaaacttcatatcatatatgcttctacaacatcaaatagtgcacttaatgcatgtgaaatacaaaactacccctaatacaaaaactagtct

SEQ ID NO: 197394 - DNA, 490 bp, Glycine max
  unsure (1)..(490): unsure at all n locations
ntaacttttatgttgtggaatgtagtgatatttttggcatttgtctctgttcatgaaacttggactactgtgattattgttttctgttttggatgccaaaattgagttccttgacccccaaaacctatgaaagcctataaagtttgttgaatttgaatttgtgtagtgaaagttatgttaaaatcaagttttaaacccttttagactgatatttgcattatttggggaaaggtgaaattggggttgaaattggaacttttggacttcaaaaatggatttttcatgcttgaaaactttgagaaatatatagagttttcaaaaattggacttctatgtcaatggaaaaaattatgtctaagttatgtttctattatgaaattgcttctaagctatgcttctatcatgagaatacttctaaattatgtatcttttatgcaattatgaatttctagattaagagtgcatggtatgaatttaatacattaatcat

SEQ ID NO: 197395 - DNA, 459 bp, Glycine max
  unsure (1)..(459): unsure at all n locations
tagaaatcaagagatcattaattccaaaacatagggggagtatgttatgtgtgaacgtaacgntatatcttgcatatactttgtcttgtatcttgatttcacgaattaaattgtcatcatcaaaaagggggagattgtagaaacaatagcaaagactttgaatttgatgttttgatgatgccatgtggtcatgcacttctcaagtttaattcaagacaaaaatccaagagatacaagatacatcatcaagaagatctctagtgatttaggaagggaattccaagttgaaacaataagaggttcggccaatggatttaagctaaaatgttgtctcatgagatttactctctggtaatcgattaccagtgatcaaaatgaattataacaaccattagnaagttgaatntaaagtttacactgtgtaatcgattacacatggatggtaatcgattaccaaca

SEQ ID NO: 197396 - DNA, 322 bp, Glycine max
ttggaaaaaatgttttgtgaaaaaatccagccgggcgctttgaacgttttcgtaacgttccgtgagggaatttcgcgaaagagttcgacccgttcttcgacgttcttcattcgttctttatccgtcttcgatcttcaacggggaaatacctctaaccaagcttttcgattcattctatggacccgtggtggtccacattgtgttccgggatttttatctcggtgcatttactttttatcccccctttgcgtgcttagccattttatttaagctttctcgctaacctaaaataaataaatttccccgatcgttgattgttttt

SEQ ID NO: 197397 - DNA, 410 bp, Glycine max
  unsure (1)..(410): unsure at all n locations
tgaccattggtcttccttcccgcgatgcttcttttcatgtctgcctgagtgggcttatagcctaaaccatacttcccacgattaccttgggtatttatcaagctagttatgccgccggttgtttttcctacacccatcccgggctcataaccgttcccaacataactcgggccatcattaccgctgcatctgacagactatgcttgccaaagagggagtccacggaggaaatgctgaccacctcaaaagactggaaagcagtttctaacgattcttctgcggcttccacataaggcatggaggatgggcagcttaccaagatatcttcctcgcctgacacgatgaccaagtgcccttctactacgaanttcagcttttggtggagcgatgatggacgacttccactgagt

SEQ ID NO: 197398 - DNA, 424 bp, Glycine max
  unsure (1)..(424): unsure at all n locations
agcttgaatcttgcgagaaatctatcttccaggaggntggnctttgactacatgaatcaccctgaggtatgcatcaatgacatcttctatacgaactgattcttttctgaccttcatcacccatgtccttattccattgttggagtttgcttcatctgcaacaacccttctatttacatctttgaggaaggcttgaatgctttctagttcatctttaatgtctgaaatatgtttgtggatgtgtcattgcagctttgtttcttcttttaggatttggagcagttcctccaaggcaaaagatactacaatttctaccatatcattgtaatctcatattggtgtcatatgtatctagcataagaattttagaaaatatggtgtgtctaccctatttgagaaattcatgttgctaagaaaaaaaatc

SEQ ID NO: 197399 - DNA, 486 bp, Glycine max
  unsure (1)..(486): unsure at all n locations
ntaggttgtatgcactcctattccaaccattatgatctatttatgcatctagagtaggggtggggagaaaatcttgtttctgcacaaaataagttgtctcctaccttttctcttacatacattttgtagttgtcctatgttcttttataggcctcacatgttaaactagtcattatctagctgttatgacacgactcctttntgaccaatccattatgatgttatcattctaatgatcaaattccaagaagctntctaaaggtataccagaactacattctaatgttgttgagaaaggacctattctgatataggttccttctaatgaagatagcgtgatatgacattgtagatagtccagctctatcaatcaaaacacttcatcacaacatagataattntgaagtaacatacttcaacataggtaacatgtgaagggtgttgttgtgttagtattatgtncattggtcagacttcacanagtct

SEQ ID NO: 197400 - DNA, 385 bp, Glycine max
  unsure (1)..(385): unsure at all n locations
agcntttaactaaatttgcgacgttccaattgatttttaaatagngtaatcgattacaatatattggtaatcgattaccagtgtatctgaatgttgaaattcaaatcaattgtgaagagtcacatcttttcataaaaagctttgtgtaatcgattaccagtgacaagttttgaacaaaaatcaaaagatgtaactcttccaatggttttcaggtttttctcaaggtcataactcttccaatagttttcttgaccagacatgaagagtctataaaagcaagaccatgattngcattntgatatctgattacaaaacttctacatcttttacacacatcctttggacatccttttgaatttcttcttcttcttcctttgccaaaagc

SEQ ID NO: 197401 - DNA, 487 bp, Glycine max
  unsure (1)..(487): unsure at all n locations
ntgacaacatcagntntttaaaaattaatatattgagattttctcttaacattggntgtataagctctgacaacatcagttttttaaaaattaatatattgagatttcctcttaacattggttttaaaaattaatattgattttaaaaaaatcgatgttctgcttgcttagaaaatatcaattaaaaaaattgatattgatgtttttaaatatctatttctcaatccccctgccccttgccccttgaaagcctcttaacattggttttaaaaattaatattgattttaaaaaaatcgatgttctgcttgcttagaaaatatcaattaaaaaaattgatattgatgtttgtaaatatctatttttaaatatctatttctcaatcccctgccccttgaaagcctcgtctctcttgaaaccctcaatttctctattctgtcagtgtatctcgagaaatcttggtgttcacttgtcgcaacctacctcacg

SEQ ID NO: 197402 - DNA, 265 bp, Glycine max
ctaggggtgaaactttaatcatgattaaagaataccatctaaaacatttgaagaactgtgtttaattattgttcctttcctaatagaaggagacgcggaaaacaaaggggatcttgagacactgctaaaagtcataggattttttctttgctcgcttcgtaataggaatgtaatatatcatttgacttgagcctgaaatgagggacacccacggacacattattttatctgtattaagcgtatatataataatctatattctttt

SEQ ID NO: 197403 - DNA, 490 bp, Glycine max
ctcagcttaagaaaaaccttgaaaagatggtgattagcgtttttcttcatattcagcacattcagcatttaaatgtgatatttaatgttatgcttttttatgccatgataattggtggaatgaatattatttatttgtcaaggtttcatgatatcgaatattgatacctaaaaagggtaatatttcaagttgtgtgattagtgttattttgagatgaaacaccaactatatgtaatcttatctttgcattatcaagttggtattaaaaatttgtaatctattcgttggatatgatagtagtagggactcataaggatttacttagtaagaggcttaacctaaagtaagattttgtttttctgagacaaaactgcagagatcatctgcttttattattatgtccaagtgggagaaagatatttgatctgcatttgataaataagaaagatttaaaagattgcacgttcgtaggacaaaagtagatatcaat

SEQ ID NO: 197404 - DNA, 382 bp, Glycine max
  unsure (1)..(382): unsure at all n locations
agctttgaaatgcanaanaactaatgacttgatacactnggctgntgngngacacattaaatcaggaaggtaaaataagaattgcacccacctaaatgtattcgaatggtaaaaatcggaaaatgttattgaagtacagcttgtagtggtaaaaagtttatacatgatgagtgtagttagctagctgtaatcttttttgaaatagaaagaatacaatacgtacaaggaatcaagttggaccaaaagttctaagttaaattttttaaactctttacatatgaataatgctagaaaaatgaatcatggcaggagaggcttaaactcaacttcaattcattcaatgtcttcaatcttctaggaaaaccgatcacatctaaaggtc

SEQ ID NO: 197405 - DNA, 366 bp, Glycine max
  unsure (1)..(366): unsure at all n locations
tganatgaggaagtgtggaagggtgagactttctacntttattcgttgaccacagagtggtacctggagatatgtcgcggnggtcaggagaccttggggacgtcaggtggggtgctattgcccaaaaccaagcttgaccaatcccgacccaacccggccatagtcagtcagtgagaacctgtgatgtacctaaacaggcgagctcctggcagtcaaccgataaaagaacaaagaccacaaagcagggaggcttgtgtggtggctggccagctatgaatcttgagtgatatctgtgatatggcctctggtaatcgattaccaagggtgggtaatcgattacaaggcttaaaagtgaagccaggaagc

SEQ ID NO: 197406 - DNA, 440 bp, Glycine max
  unsure (1)..(440): unsure at all n locations
gatcttaagcacctgcaggctgcagcttgaaantatttattggacngagggtgtctgttctctttttgttctaangnctttagagggtacttcctcgttgacatcttttgtcttgaatggaattgccatgacaggtttattgttactgtctttgatattcggtagttgatattgtgttgcgggagggaattccaattggataaactcaccatccttcacttgccaatttgttatgacgtttgttgttggatcacctatgatgtcttgtttccaagggtaatctatatcctttctgatggcataagcatgaaaccaatcaaagaaaaggacattaattttgactccttcgacanattcgaagaacttgtcttggatttttcttttctgtatgtacccttganatgctggaaaaaccatctcctctgaggatcattctccgg

SEQ ID NO: 197407 - DNA, 479 bp, Glycine max
  unsure (1)..(479): unsure at all n locations
tagaggttcaagagacatggtagtaagatctctttattctgcaattgcaggtacctttggctgtcattcccagcttaaacatcttagtactttgttaacgagatcctcgttaggaaatatctttccaaatgatgcaaaatgattaactatatgtgtgaatctcttttgcatatcctgtatggtttcattttgattcattataaaatattcatattcatgtgttagggtgtttattctagaactctttacatcagttgttccttcatgggttacatgcaatgtatcccacatttcttttgcattcttataatttgagactctaaagtattcatccattcctgatgcagaggtaattatatttttagctnttaagttatattgtacccttctgtggaagcaatgtcttccaaggggtttttgatgatgtcaaagaatcaagagtcaagaaaaatccanagattcaagaatcaagattcaag

SEQ ID NO: 197408 - DNA, 428 bp, Glycine max
  unsure (1)..(428): unsure at all n locations
agctntattattatnttctttcactcgtatatggattatgtcattaaggggnnnncgaactcctgtgatgaagtaattaagacagtgcatccggcatcgcccttttcaaacatggtgcgttatggcttttattcaatgtttggtctattaagagtagacttggcggtgcattttagaaaggtgagtgaaattgtcgttaccaaatgcacacgtctattttcaacattcttagttgtcttctatacatgacatttaactagttgactgaaaccatctctatcttattgcttaatatcatgtctatttgaaaatattattaattaaaaatagatcattaataaagagagagggttataattttttgagcagagtacactaacaaccctttgtggtatcacttataaactctataccctcatgtttgatct

SEQ ID NO: 197409 - DNA, 442 bp, Glycine max
gtcttctagaaccgattcaattatcatcggtacatcttctgctttttatgttccattctagatctaaatacatggattgcccatgggcttcatgtcgcaaagtgttggccaaagtatcgagaagcatattgggaaattccttgagtacgatgtgaaaaataattcgagctattggatgtcatacatgagacttcatgtattgcttgatgttaagaagtcattgatgaaaccctcgaaaattaggaagccatgagaagagctctctgaagtttatctcaagtatgaaaggttaggtcccttttgttatctttgtgtcctaatgggacacaatgatgatagttgcagaatattactaagccttgttgaagataatggaacaacgaaatagggtccataattgtatgtagaacccagatactctatgtcagccacctcattacac

SEQ ID NO: 197410 - DNA, 443 bp, Glycine max
  unsure (1)..(443): unsure at all n locations
agctngccttaatctaatctctgttatgtatgtagatagctttattttcatatctagcccataatcaaatagttcccagcagaaaaaatttagactcgctttaggttcctccaacaaattgtcttcagtttggaaggtcacatcagacttagaatgatcccatggaagaacaacattgaaggtacccatcagctgttgtaaacccaatgtcatcttctctacttcttctgatgctggcttaaagaggataaacctttctatctgtgggcggatgctcgaagatcaaactattagaattgggagcaatagtctgtcgtggagggaatgtcttgatgagtgatttgttttcaccataggcaaccagagtgtgtttttcttcttcaggtaaggtgtccactactagaaaattgacatttaacataagtttttttggacatttacat

SEQ ID NO: 197411 - DNA, 478 bp, Glycine max
  unsure (1)..(478): unsure at all n locations
atactaagcttgggttctanngcctagaatgcattcgggcactcattttatattcttcatgctgtccctatacatataaaacagtcccacaacccanagctcacaaaaccatgctcatatgtcgttgaggcatttcaccgagcacttggtgggcgcatgtttaggcacgaatatcaagagaatggggacaatgtggcatgcgccattacttcagaatacaccctaggccaaggccatcccttacaacccctcaattcaacaaaaacaagcaacaatttgaggataaatccctcatgtttcttagcaaacacatgcaatttagagcaccaaaatacatcaatggaaagctagaaagcccaagaatgaggtacttacttgttggagacgaataatagagcanaacggaatcaaaaacgcaacaaatggtgacctaagggctgcaaaatccgtgagtcccgtgagctttcttttttgaatg

SEQ ID NO: 197412 - DNA, 485 bp, Glycine max
  unsure (1)..(485): unsure at all n locations
ntgctcacatttctcattccagacaaacttctcattcttaccagttagtttatttaggggtagtgctaatttagaaaatccctcaatgaatttcctataatagccggccaaccccaaaaaacttcgaacttctattggagttgtcagttgttgccactccataaccgattccactntaaccgggtccaccgcaaccccatctttagaaatcacgtgccaggaactgcactttctctaaccaaaatccacatttcgacagtttggcgaacaatntcctatccctcaggatatgcaacacaattctcaagttgccataccctaatttcgtcaggggattattatttgatgatatacaacctttgattggccgcttcgagatacttggcatcctttgttgacaatatgtgaagtcccgagacgtgccgaaaatcaaaaggaagaaggcttacgcgattcgtgaaaattccgtaatgtgacggaaatcg

SEQ ID NO: 197413 - DNA, 376 bp, Glycine max
  unsure (1)..(376): unsure at all n locations
gcgacctgcagcatgcagcttaaacatcctgcgggaggttgnattatctttgagaanataagcacgggtataagttctttattttcctttctgagcgaactgcttacttatcttgtaaggggattgcatgagtttaattcgaaactttctgactttggtttagctaaggcgggtcctactggcgatagaactcatgtgtccactcaagtaatgggtactcaaggatatgcaccacctgaatatgttgcaactggtaggctttagcttcacctatatcatgagttgggggattaatttcggctcatcatactgatcactgcggtctgggttttcatgattttccttatgagtcttagccctcattttcgtttcaacc

SEQ ID NO: 197414 - DNA, 439 bp, Glycine max
  unsure (1)..(439): unsure at all n locations
agcttatccttatggcctgccttctgacttcaccccccgtgccaccccggaagatttaagccaagcccctacttttgaggggcaactcccactttatgaagactatcccgggcaagacgatggggaaggagatacccatcttggccccctgctccacctcaaagatccatccccgcatgaactaccccagccgaacatagtccgccatatcccggcctcacccacgcccgtaaaagaatcttttcccttcgcggaagataggggaaagattgaggcgcttgaagaaaggttgagggcagtcgagggcctcggcaattacccattctcggatttggcagatttatgtcttgtgcccaacatcgtcatccctcccaagttcaaagtaccagactttgataagacaaagggacgacatgntcaaggggcatctcggatgtat

SEQ ID NO: 197415 - DNA, 397 bp, Glycine max
  unsure (1)..(397): unsure at all n locations
taagacccanattacaactntaagaaaacttattctatctataattaatccttatattgcaataaaaattggtccaaaaaacacttaaataaaataaaataaaaatttggttgcagacccatgttgttgtggtattaggttgtacttcttccacatgcaccaccatggactctcttcttccattttaggttgaccatgtaatgtgttgataacctctaaattctccttcaatctctntactcttccactctttggtatttccagaccaaccttggggtcgtcacttagagatcttcctttcacaagttcttttagtctagttaagggattctttctcttacgtatttcttatcttttaggagaccttccttgatctctatcattctctccttcttta

SEQ ID NO: 197416 - DNA, 420 bp, Glycine max
  unsure (1)..(420): unsure at all n locations
agcttgatccttgaatcttgattcttgattcttgaaatcaactttcctcttgaatcttgaagtgttcttgattctatcttgaacatcttgaactcattctttgattgacctttgagatttttgtcatcacctttgttatcatcaaaacatctttgaatcaatcttgattcatcatgaagctttgcttctacaatttgatgttctagaataattgattatcaaatgtggtaatcgattatttcgtcacagagagcttctaaattttccaagcgcaatctaatcgattactaaatgtggtaattgattatctagagccacaaagccttccttcttctaaaatgggttatattatcgattactaaaactggtaatcaattaattcaatgactttagtcaaatntcaaaaagaanngtagtttg

SEQ ID NO: 197417 - DNA, 427 bp, Glycine max
agcttgcttgaagggctattatggaggctttatctttgagcttcaatgagggcctttaatggtgattatccaccatggagatgcggcggaagacaaaggataagaggtgagaggaggcgccatccactagggaataagccatggaagaaggagctttaccaccaagatgagccttggataagaagcttggagaggatgcttcaatggaggaaaagaaagagggagataaagagaaaggggggagcacgaaattgaatgaagaaaaagggagacgagctgaactttgaattggtctcacaagactctgattcatcaaagttacaacaagtgttacacatgcttctatttatagactaggcaggcttcttgagacgcattcttgagagaacttacttgagaagcttctttgagaaacttccttgagaag

SEQ ID NO: 197418 - DNA, 462 bp, Glycine max
  unsure (1)..(462): unsure at all n locations
actcagcttagctctaggcanactccttacaaaagctgatttatgcatatatatgtggccctattcgtgctcgtgcgcttagcgcaattctgaaccgcttagcgcacattagtgaatnttggcttagcacgtgcttttcttgctcatcggatggactaaagcggcgcgctcaacgaacctgtacaactcatcttcttccagattcttcctcgcgcttaggcaatgagtgttgcgcttagcggacgctcgcttagctagcagattggcttagcgagaaggtgaaaaataatactttataaagtcgtctaattaacttgaaatctgagatatacatgattattaaacacacacaatggaagtactaagtatttagtacctatacttaacagaaagtacttataacactacagaataaccataaattgcgaaagtttgatacaatctacacacggtttatacaca

SEQ ID NO: 197419 - DNA, 400 bp, Glycine max
agcttgtccaaggaaccctatcttgtttttgttctagcactgagtgtggacaaattttcttatcaagaatttgatgaggatgaggaactggccttcatcttaagaaagatttgaaagatgtggaagaacaagagtgggttaagaccgaactcctccaaaaaggtgttcaaagagaataaaaacaaggaaaagagcttcataatatgatatgagtgtaagaagcttgtacacttcaaatcaaaatgcctaaaactagagaagtccaaggacaagtacaagcattacaagtccaaaagtctcatgaagcagtgggaggacatggacaacaccccctttaatgtaaaagtagaaggggaagccaacctatgtctgatggatgatacaacttcttgagagtcag

SEQ ID NO: 197420 - DNA, 480 bp, Glycine max
tagggttaaaactcatccaaactctgttgtaaaacaagcatcaaagtttgtttgatacacaatattaaaatagtcttcgtccttacaaagatctttttaactaattgaaattctttaaaaaatttgattaattcagttaatgacatcttgtattgttcttcacacttatacttttaaattaatcatctctttatccacttagctgattaacgattaactaagaaataagtggcttaatgaagctactaagttaagcttctggattattttaattcaaagacgttgatttcgtaaaggataaacatcattgtatactaccatacatgggatccataattgggacttacaactccaacgactctcaattcacttatcacattaaaataatgcctaaagcaaaaatgatctctgatccaagtcggatgagaaaaaacagaatttgtagaatgagttaaaagtctaactcaactttacaaaatc

SEQ ID NO: 197421 - DNA, 424 bp, Glycine max
atcctgactcaccataaacctttacccagtgtgagaatgtcaatccttaccctcggaagcgaaaaaaggaagagaaggaaaatttccaagctaaaaaaaggagagaaggagaatttccaatcaaaggaaaaaaagatgatagaaaatttccaatcaaaggaaaaaagagaggaaaggaaaattcccaatcaaagaatgggagagagaaaaaaaaaagagagatggagaagaaggaaagaaagctcttgatcaaggatcgaaagaaaacagaaaaattgtgcaaaaaaccattccggatttgtcaccaattgaccaaaaaaaagaaagggaattcttaccttaaagtgggtcttctccctgtgattaccaatcaaaatcctgtgcgtcggtgacttgttcgcctcgcgtcaaacaaaaacagaaa

SEQ ID NO: 197422 - DNA, 431 bp, Glycine max
  unsure (1)..(431): unsure at all n locations
agctttagcaaatatattaaatacaaaaataaattaaaggntcggngggagagagagagagagagagagaagagtggacaaaaggaaagacagaggttgattcaaatgacaagtccgaccattacttacatccaattcgctcagcttccaccatacgaagatctaatggaatttcttgaaactgtgcagcaatttgacgttctccaagagataaattgttagacacgtatgctttaatcgtacccgctccatttgtaaatcctgtatcaacagtcaagtgtatgggattgggcacttctcgagaataaaactcgtggattaatgcactaccaccagttactccaagaccggttgaatacctacnaaaataatcaaaagttaaaatgcttttttctcctagaaaacaagaaagaaacacagggacccttatg

SEQ ID NO: 197423 - DNA, 486 bp, Glycine max
  unsure (1)..(486): unsure at all n locations
actaagctttagaaanaaatcacttgtgaagactgtctttcctactttcttctgccatgtggnagtcatataaccaggagcttaatttcatagcatcaatctttagttttgtgaataaaaaatgctaaaagtctgttatctcattaaattgttttatcttattcaacccccttattcaatagaaaaaaatgttaaaataattttatcttattcaactctagttaattagaattcaatgcaactgaggaataataatgatgccaaaaaatatcttctatgattaacgggttgataaattattattagtagtagtagttttgttgtttatatcgtgagtctttgtaattcttaaaaagttcaacaatgttctgcacttctgctaataatatatatttcttaaaatggattgacttatggtntatagttactttacgttacgtacgttctcttataaataactattaacatattntattcttaaaatat

SEQ ID NO: 197424 - DNA, 473 bp, Glycine max
cgcttcttcttatctttcctccatgagagaatatattctctcaccacgctcttcttgaaatctcttactccatccatgtcaagcccacccaagtcaaactcttccctcttggatagtcctctatcattctctccttcttgggaagaattcatcctctaattgatgtcaaaggtacttacatcacacagagtcaagtccgtaatattaaaagtggtgctcacaccatagtcaaatggtaaatcaattttgtacgcgttattatttatgcgctccaatactttaaaaggaacatctcccctttcttgaagtttagatttccttttggaaggaaacctattcttcctcaagtgaatccaaaccaaatcacccggtttaaaaaccatcttctttctgcccttattggcatatctagcatattgttcaacctttttctcaatttgtgctttcaccttctcatgcaaactcttaacaaa

SEQ ID NO: 197425 - DNA, 394 bp, Glycine max
agcttcaacattcaatgtcgagcggctcttatatgtcggtactcaatcagacatccgagtaaaaagttattgtcgtttaaattcgctcaaagcttcaacattcaatttcgagcgtctcgatatatgacgggactcaatcagacatccgagtaaaaagttattgtcgtttgaattggctcagagcttcaacattcaacttcgagcgtctagatatattacgggactcaatcagacatccgagtaaaacgttactgtcgtttgaaaatgctcagaggttcaacattcaatttcgagcgtctcgatatattacgggactcaataagacatccgagaaaaaaattattgtcgtttgcattgctcagagcgtcacaatcaatttcgagcgctcgatata

SEQ ID NO: 197426 - DNA, 484 bp, Glycine max
  unsure (1)..(484): unsure at all n locations
acggaccttgatactcagcttcacatcagaccacttncaggtgctggaactacttcacatggttttgatggggcctatgcaagttgaaagccttggaggaaagaggtatgcctatgtttgtgtggatgatttctccagatttacctgggtaaactttatcagagagaaatcagaaacctttgaagtattcaaagagttgagtctaagacttcaaagagagaaagactgtgtcatcaagagaatcaggagtgaccatggcagagaatttgaaaacagcaggttcactgaattctgcacatctgaaggcatcactcatgagttctctgcagccattacaccacaacagaatgggatagttgagaggaaaaacaggaccttgcaagaggctgctcgggtcatgcttcatgccaaagaacttccctataatctctgggctgaagccatgaacacagcatggtacatccacaacagagtcacactgaga

SEQ ID NO: 197427 - DNA, 356 bp, Glycine max
tccgggaaattaaaccaaacccctacttttgagggcaactcccgccttatgacgactatcccgggcaagacgatgaagaaagggatacccatctcggccccctgctccacctcaaagatcccgtcccacatgaattaccccaaccgatcatagtcccgcatattccggcctcacccacactcgtaatagaatctgttcccttcgcggaagataagggaaagattgaggcgctcgaagagaggttaagagcagtcaagggccttggcaattacccattctcggatttagcggatttatgtctcgtgcccaatatcgtcattcctcccaagttcaaagtaccggactctgataagtac

SEQ ID NO: 197428 - DNA, 425 bp, Glycine max
  unsure (1)..(425): unsure at all n locations
aacttcattnatatatattcttctgtcttaagagaacaaataaggaacacaaggggtagaaagaactaagaagtaaaactaaccaattgtagggtctgtaacttaccaaccaacaaaataatcacgggctcgttgagatgctaccctgtctttttctgtatttgtttgaggaaaaatcccaaacgtgtaaatagagataccaacaaatccatgttgtttgtcctgcaaagccacttaagttacttataaaatgggaacattctttgctatcagtgtccgtatgagaagaataaatgtcaaaaatattaagattgagaagcagataaggatcctaagtttataagtttaaattttatgcgtgcataaaacctattacattgtccgctaatagaaaaattataacatcacttttaagctagtcggag

SEQ ID NO: 197429 - DNA, 268 bp, Glycine max
  unsure (1)..(268): unsure at all n locations
agctntatgaccacaaacaaagggaccattgtcattttctttttgaagaacaaactatatgacatctgttagacaaaccatttcctacactcggccaaaccatttggtcagtatttgtagtcgtactctcgacggaaacacacttatgagagaacctcttattgccggtatcagtgaaagactttgtctaggacggggataccaatagacggaagcttcgacgaccgtataaggtcaataagatgagcccactgagcatggacggctc

SEQ ID NO: 197430 - DNA, 355 bp, Glycine max
  unsure (1)..(355): unsure at all n locations
tatgcgcatatntggtgacaaacgttctgatgttcgaggatctgtattgactcacagaatgcacctctgttcaatcaacgcatcgtcgacacctgaaccatttacacgctactagacacttgaggtatctgttgacttacatggacacacatcgtgcatgagtggcttacacacatgcatacgtcttgacgccatgtgatgatcaaagatatgcacaatgcgcgcacatgagcatgtctcttacctatacatacgcacgcatattggcgaatctggactatgatcccaatcggggagttcattccatgcattgatgactggaacgctacataaatccctctggatcaactatact

SEQ ID NO: 197431 - DNA, 258 bp, Glycine max
cctacattcttcatgggctttgccttttattttatttttcacttttccactccaaaattgtcttttgcagctctagacactttgctatatgctctgctgggggaccaacatatcaagcatgtgttcctccaccaccatttactagtgatggacttgactcttcttcaaatgcaattgctctgacccctctagcatagacatctaagcttgatctcgacgtggaatccaaaaagttttaggctatatggacaaagctat

SEQ ID NO: 197432 - DNA, 421 bp, Glycine max
  unsure (1)..(421): unsure at all n locations
agcttaccttcaagaacagaactattgcattttgtgttaacacttaanagggcacgatgaccctatgttgcgatggtgtgaacaacacgcgacatataggtagcgaaggcatgacaatgtaggcttccttttgcgaagctgacggtggtgtgagggagattgagccaaataggagacgtcggctgataacataattntcagaaagtgatttcgaggtatgcatattcaattagcacgcaagggggagatatatgaaagcaggttaatgacggtgtatttgtaaacccgtctttgataagctccagcctaatctacaaagacgatgttaacacaaaacgttcgtgtagactgtacgcacatgctctctaaaaatgacatatatttacaaaaataccattggtcaccctattacaattggatt

SEQ ID NO: 197433 - DNA, 368 bp, Glycine max
  unsure (1)..(368): unsure at all n locations
atgaactcgctataattttgggaagatgtagctncaatccttgtttattctttggctccctacacagagatccccatgtgtgttacttgggagggatcgaccagtgtcatgatcaacaaacttaacttccaaatatgggaggatgaaccccactgagtttctatgagtacttcccaatcctttttgtgcataagtgagggtgatgcaactatgctcagttagtccatatgcctaacaaagaaaaactaacacttaacgaagatacaccatgctaaatatgcacattatgtgtcatacaagatacataattaaaaatatctgattgaattattgtctctacaaatattacaattctttcatgtattctc

SEQ ID NO: 197434 - DNA, 440 bp, Glycine max
  unsure (1)..(440): unsure at all n locations
agcttgcttctacagctctggtatacttgttactcgctgcgggngccacgtactggagacctaatggtgtgttcttgcatacgtgtcacttgccgggggtggcacgtactatagacataatgacatggtcttggatacatatcattcgtcgtggatgacacgtactggagctatagtggtgttgctcaatctccgcaatgcggttttggagttattggggagtatcagtttttggcatgggtgtaagttcctgtgctgctcctcttaatgtcttccgggtcttgcttatacttggcgattgtctggtctcttaacaaactgagctacgtagctagcctgtataacttcttctattctatcctataagggcctgtagtctttgatgttatgaccaataccacagtgatatctgcagtatttggttgggtcttcaaagctat

SEQ ID NO: 197435 - DNA, 428 bp, Glycine max
accttaagcacctgagctgcaagctgaccgagcgacagggttggagttttctctttaaacagcgcgaccctgattggcctccctatgtgcggtgagagtgaccgggcatacccattgggcggtgtgtcctgttatgtactcctaagtgccccagtatgatttttcactaacatgggaccacattgcatatatgtatgagtcttagtataattgtcgcattacgcttgtgcttgacttgcattgagaaacaatcatggtgtgatattattttctggaatgcgtgaacttgaatggatgcgaataatgagtgtgagtctgttaagtgatgttgcctttaagtattatatgtttgacatgttttgatgtattattatatatgaatgtgatactcaatcccgaatgtgttgtgttggactgatagcattttg

SEQ ID NO: 197436 - DNA, 319 bp, Glycine max
agcttgaacatctaaagagatagttatgtgttattaattactagctaatcctttccatctaatttcaaaactctaacccaaatctcactttaccaatcaccgacgttgatgctactcacacccttcccaaaaagagcgtcaacatccccatgttttgaagaagtggcttgtgtggaagccttaaagttcattcccccaaacccatattgttgcaccacaagcactgaagagcaataaccaaagctatttgatgccagcatgtcccctatgaccccaaggtcagggcaatcagtccagtccatcaaattcgacaacacca

SEQ ID NO: 197437 - DNA, 326 bp, Glycine max
  unsure (1)..(326): unsure at all n locations
tgtcagcaacctcctcaccggaacaataccctctgcccttgttaacctcactatgttaaaacaccttcaatttataaaaattatgtgaagtaaaaccgcaagagtaatttttattaaaattcatcttaattattaattttaatctaagattattatttacttaaatttttattataaattaagggaatccattcccctagacctggttgaatgtccaggcgttgaaatataataaaatgtggacttgaacaagtgcgatgagtcatttttttttctttttatttcactttattttaagataaaatatttngaaatgtaaaatatat

SEQ ID NO: 197438 - DNA, 450 bp, Glycine max
  unsure (1)..(450): unsure at all n locations
gaccttaagtcacctgcggcatgcagcttggcttgatgtttcgatttttttttcaccttagaaaaatatacttgtccttcatttaattgtctttgggcttgccgaccatgatcaacaaagtactttcgacatctactatatgttgatttcaccaacgctgttatgggtatttngcgacaatccttcaataccttatttacacattctgagaggttggttgttatgtgaccatatctacgtccttctttatcataagcaatggtctatttttcctttgaaatgcgatgaatccatgttgctatgcttagacttaattgacgaaatttttctaaatcttgatcaaatgtatgcttgccaggagtgtagcctgcataaaattatttagcaacatcatttttaagtatatatgatacttaaattaacttcatattataaattaaaacttaccca

SEQ ID NO: 197439 - DNA, 430 bp, Glycine max
  unsure (1)..(430): unsure at all n locations
tcaaaatttaatagtaatcgttaaaatcatcatgtcacgttacttaacaaagggtaaaataacttcaccttgacaacattctgatataagatatgntaatctaccaaagctttatatagggaatttcatctcattgtcacgatttccccctgttgacaattaaaaccaacttgccaaccttttcctaactttcctagaggtatatttaataaggatgttaagatgaggacaactcagaattaagaagaaaccttcttatctagccagacaagatattgcacgactgctgcaccatcccaaatatgtgcctntnttaacccatccaactccactaacttctaacagtattggagtaataacaaaataagccaagtttcatgtcattaaaatggggaaaattcaaagatatatattggtttctactggttga

SEQ ID NO: 197440 - DNA, 320 bp, Glycine max
ctagctatcatcgccaagtaccaagaagagttaggtctaaccacggtccacgagcatagaatcgcggatgagtatgctcaagtgtatgcggaaaaagaggctaaaggaagggtgatcgactctttacaccaagaagcaaccatgtggatggaccggtttgctcttaccttgaacgggagtcaagaacttccccgcttgttagccaaagccaaggcaatggcagatacctactccgcccccaaagagattcatgggcttctcggctattgtcagcatatgatagacttaatggcccacataattagaaattcgtaggaaac

SEQ ID NO: 197441 - DNA, 466 bp, Glycine max
  unsure (1)..(466): unsure at all n locations
tatcattaanataaatctatatggttgatgatgctctgatctatatctttcaatgggtgtatgattaattgtatgatatgtttagaagtattcggttgattgttcatgttttccaaaaccattatattatataaaattattttcaatatattaaaactttctatgttcatcttggtaagtgttgatttttgttgttgttgttttagaagaagtgtttggtaatctattatcttcttatgtaatcgattacaggcagttaggctaagtgtaatcgattacaaaattcctgtaatcgattacagagcgtctgtgtctataaatttgaaatttcagaaaccgcgagaacatgaattttgcagcaaactcgaccccaaatccctaanacttcagaactcgatttctccctcaattctcaaccaaatcacattccacagagccccaaaatcatcatttttcattcttttca

SEQ ID NO: 197442 - DNA, 398 bp, Glycine max
  unsure (1)..(398): unsure at all n locations
agcttgagatgaggaagtgtagaagggtgatactttctgcttttattcgnngaccacagagtggtacctgtagatatgtcgcgggggtcaggagaccttggggacgtcaagtcgggtgctattgcccaaaaccaagcttgaccaatcccgacccaacccgggcatagtcagtcagtgagaacctgtgatgtacctaagcaggcgagctcctgacagtcaacagataaaaggaacaaagaccacaaagcaaggaggcttgtgtggtggctggccagctgtgaactttgattgatatatgggatatggcctctggtaatcgattaccaagggtgggtaatcgattacaaggcttataaatgaagacaggaggctaagatggtctctggtaatcgattacc

SEQ ID NO: 197443 - DNA, 486 bp, Glycine max
  unsure (1)..(486): unsure at all n locations
tctggtgggacatcttganctgctntccaatctgacattcaccacagattctgccttcttctattttcagattgggaatgcctctaacagcacctttgtcaatgattttcttcatgcctcttaagtgcagatgtccaaatctttgatgccatattctgacttcatcttctttggaggatagacatgtggaggagtaactggtttcttgaggtgtccataggtagcagttgtcctttgatctgctgcccttcattagaacttcacacttctcatttgtcactaagcattctgactntgtgaagtttacattgaatccttcatcacacagctgactgatgctgatcaagttngcagtcagtcccttcaccagcagtacttttgccagactatgaagtccatcatggactagctttcccattccagctgatctttctttagagccatctccaaatgtcacatagctagtggagcagggtctatgttcac

SEQ ID NO: 197444 - DNA, 454 bp, Glycine max
  unsure (1)..(454): unsure at all n locations
agcttataagaacaaaattgccttaatcatttccaattatgcatgngaattaggatgcatcaacaagaatcaagccaaggctattgtgcaagcaatcaatggggcaaaacacaccaaatgattataatgatggatggctcaaattctcacaaaggtaaaatcatcactttcaaattgagctttcaaaactatcatgacatgtagagaagaatcaaggatttcaagtcacaaaatgtcaagaacttttattttcaaaacaattacccatttcttgaacatatcctataattcaaagaaaaacatgcaaagtcgtacgtgcacacaaaattgacccataatattaaactgaaaatccgacgaaactaacaacattaacaaattaacacaactaacatattaacataaccaacaaaactatgcaaaccaaagaacacttcccncccctcccccccat

SEQ ID NO: 197445 - DNA, 445 bp, Glycine max
  unsure (1)..(445): unsure at all n locations
gtgatggngcaagtcaactctccacatccacaattcacacataaacccaccatccccagatgcccaccttcactgagctcacgtactcccacgtagcccttatactcggtcctctcaacgccggggccccatcaatcctctcaagctttcacaacatgcaaggaatacaacatccaaccatcgtgaactatcaaaaccaagaaaatagggcaaaggcagaatactctggccaaaaacacaaaccactatcacagcttttctcacttaaataccccagtaacattctcttcggtccaattacgtaaccgctggatcgaccttgaaaccttactggaaggtcctagcacataaatatacattatgaaccgtgggatctgctagaaaacgtncagaaccaaatctggtctacttgtttcacaaccagcaaatacacaacactttctgg

SEQ ID NO: 197446 - DNA, 375 bp, Glycine max
agcttcaccaccaagagagtgtgtgggatattaatattatagaggaatcttcaatgaaggaagagaatgagagagagagagagagagagaagggggtgggaggcgttgaaattgaaggagaagagggagataagttgaactttgaagtgtgtctcacaagtttctctttcatcaaagttatgacaagtgttacacatgtttttatttatagcctaccacataggaagcttccttgggaagctagaggaagaaagcttccttgagaagcaagaggggggatactcacacccctctaatagctaagctcatcccatgccaaaatacatgaaaatacaatgggaaacttccttgagaagcaatgaagatgatgcaagc

SEQ ID NO: 197447 - DNA, 486 bp, Glycine max
ttaagagatcatcccattgacaacattattggtgatatctcttatggggtaacaactagacactctctcaaagatttatgcaataacatggcttttgtatctatgattgaacctaaaaatttaaatgaagccataatagatgaaaattggataatagctatacaagaagaactaaaccaatttgaaagaaataatgtttgggagttagttgagaaacctgaaaactacccaatcattggaacaaaatgggtgtttagaaataaattagatgaaaatggcatagttattagaaataaggctaggttagtcgccaaaggatataatcaagaagaggggatagattatgaggaaacatatgctccagttgctagattagaagccatcagaatgttattagcctatgcatccataatgaactttaagcttcttcaaatggatgtagaaagtgcattcttacatggctgtattcaagaggaagtatatgta

SEQ ID NO: 197448 - DNA, 470 bp, Glycine max
  unsure (1)..(470): unsure at all n locations
ggcctcanagaggtctaggaaggacaaggcagccgaaggaactatttccgctccggagtatgacagtcaccgctntaagagcgccgtacaccagcagcgcttcgaggccatcaagggatggtcgtttctccgggagcgacgcgtccagctcaagacgttaaagaagcgctactaggaggcaacctagtaccttttaaatttctgcctgctatttgatcactttttatagtaggacgcacctagttgctcatgatcctgggaatttaaataaaacaagcgcaagctcggaaggtagtcataccttacaaaacatatatatgtatgtttaggtagtgaaaataccttagatatacatgtatgtaaacaaaaaaacacttcacaaaatatatatatgtatgtttaggtagaaaaataccttagatatgcatgtatgtaaacaaaaaacacttcacaaaatatatatatgtatg

SEQ ID NO: 197449 - DNA, 294 bp, Glycine max
caacatacggatttaatgtctacttgattacctatgtcaacatgatactatgatatgccaagctcattgtatccaaattcaagctgaatcaaagaaagcgttctaaaaattcgaatttgtgagaattttctctttggttcttcatagaactcttttaacttttcaaggattggccatccttgaaccgtctcaaatatcttggattcttgtgtctatactcaatcgttaagtagatcaccaaacccgaccaatactttcttgcgatggcataattcagtgacatgtggttacata

SEQ ID NO: 197450 - DNA, 417 bp, Glycine max
agctttgatggtgttgagaaaaaatcacatttttgtcatcatcaaaaagggggagaatgtgaatgtatgtatacatgattttgatgatgtcaaaagaagaatcaaacaaggctcattttgcttcaagattaatacaagattgtttcaacaaacaaatccttgattcaatatttcttcaagatcaagccttgcctcaaaatgcagagatttcaagtcatccaaggcacatgtaatcgattaccaatggtaatcgattaccaaggcacatgaaagtgtgtaatcgattacacatcatatgtaatcgattaccagagactctgaacgttgggaattcaaattataactgtgtaatcgattacacaaacattgtaatcgattaccagtggaaagttttcagaaaatctggcaacagtcaca

SEQ ID NO: 197451 - DNA, 479 bp, Glycine max
  unsure (1)..(479): unsure at all n locations
ntggagaaccaagccaatcagaatgctagacgaaatatttatgggaatagaggtaacaatggcggtaatgacggaccgaggcagaaccgggttgagggagtaaagctcaatgttcctcccttcaaaggtagaagtgatccagatgcctacctggactgggaaatgaagactgagcacgtatttgcctgcaatgactacactgatgcgcagaaagtcaagctagcagcagctgaattctccgactatgcccttgtttggtggcataaataccaaagagaaatgttgagagaggaacggcgagaggtagatacatggactgagatgaaaagggtgatgagaaaaaggtatgtgcccactagctataacaaaaccatgcgacagatactccaagggctgtcccaagggaatttaaccgtggaagaatnatataaagagatggaaatggcgttagtgatggccaacatctaagaggactccga

SEQ ID NO: 197452 - DNA, 345 bp, Glycine max
gatccttaagtcacctgcggcagcaagcttcttggaggaccaaattgtttgattctattctcgaactaaatgcttcagatgaaaggtacatttttgtaatttctcaattcagttttcaattctggacgatttcctgttaatttatcctttcacttttggttatagatgacttgctccacggttgaactcactgttcaataggtggagaagttgagggaaatgagtccactttatgaaattgtcaaggaaggtatcaacatcaaggacattcaatgggcacagcactgattattatcaagctctcaaattgcaatgcaagtgatgggaagcaattgtgattgaact

SEQ ID NO: 197453 - DNA, 421 bp, Glycine max
  unsure (1)..(421): unsure at all n locations
cttaccccactattacccacaccatacacgcaaacctatttatgttaagaaaatgacatcggcagaaatgcagttgagaagggaaaggggcctaagctttacttgtgatgacaagttttcccctagccatcgttgtcctaataagcaacattttgttctacagtgggaagaagaggatgatcctgcattacaaccagatccactagacgaggttgagacagttggtgaccccagtttgcaaaatcatcatttgtcttataatgctttaaaaggctcatcangtcttggaataatgaagtttcaaggatcaataaatggattgggagtgcagattctagtagatagtgggagttcagataacttcctccagcctagactagctcaatgcctgaagttacctgtagaaccaattcctaatttg

SEQ ID NO: 197454 - DNA, 326 bp, Glycine max
  unsure (1)..(326): unsure at all n locations
agcttgccacccagctcgcccattcgagtctattgtgtcttcctccagaagcaaccgccttctggaggaatcttctggagggcccatgtgggtctggttgctatttgcacccccatttttactaaatacaccccctgcctttntttggtgcttcttttttcgtaaagttacggaaacttacgaatttcgtaacgatacttgttttctttccgtaatgttacggaaccttgcggattacataatcatcccttttttgacttacggaacgttacggaacctcacgaattgtgcaacgatgctttctttttgatttccgatatgtcacg

SEQ ID NO: 197455 - DNA, 446 bp, Glycine max
  unsure (1)..(446): unsure at all n locations
tctccccctatttcctataatagggggagaagtgaattgtataattgtttanccctcctggtaatttgagattacttgaaattagtgaacaagattgttttcctgaagaaaatccaagccgatgtgcttccgtaacgtttccgcgggtaatttcgcgaagagtttcaactgttcttcgacgttcttcgttcgttcttcggacttcaatcggtaagttcccaaaatctaacttttcaattcattctatgtacccttattggtcctcatttgcttcgcgcacttttattttcgtttcatttactttccgtacccccttttgacgtgctttagtcatttacttaagtcattttctcgcctaatcaagaaatataataaatttccaccgatcatttgaattataacatccgttaatttctgttaagatgacatccgaccgatcggtcatg

SEQ ID NO: 197456 - DNA, 250 bp, Glycine max
  unsure (1)..(250): unsure at all n locations
ttaagcgactgggctgcagctanggaaatccacccatattgcttataattcaacattaagctcggctaatttaaattgacaggacagagcatccgctgctttgttctctgggccaagtctgtaaatcacctcaaattgaaaccccatcaattcagaaagctagtattgttgatccgagggtgtaatccactgctgcaacaaatgttttaggctgctatggtcggtgtaaaccttgaagcttctactgaaa

SEQ ID NO: 197457 - DNA, 450 bp, Glycine max
tcttggagctggaatgatatatgtcatttctgatagttcatatgttttcctcatgcaagtaatccccaaaaaaggtggaataatagtaataaagaatgacaagaatgagctgattcccataaggattgtgatcaattggagaatgtgtatcggttaccgccttctcaacaaggcaagaaggaaaaaccactttaatctttcctttagggatcaaatgcttgagaggttattcaatcaagccttctattgctttctagatggatactcagggtataatcaagttcagtttaatctcgaggatcaagagaaaccaaccttcatttgcccatttggagtctttgcctatcaaagaatgccctttgtctttgcaatgactagccacattccaaaggtgtatgaatgccttcttttctgacatggtagaaaaatgcatagaggtatttatggatg

SEQ ID NO: 197458 - DNA, 434 bp, Glycine max
  unsure (1)..(434): unsure at all n locations
agcttgaatgaccaatgtattatttttatatcttctgaaagnatgttttttaaaaaaatgtaattcaatatatttgattctttaaaaggcaattcaatatatttgataaaacttacaaaagngtaattcattatttttgtattttaaaaatgtagtataaaatgaaattagaaagtaggctatgtattgacaatgtaaaacaatttatatgaatttttattgttaaacttgtcatcattgtgagttatgattacatgacactataaaatcattttatactatcaatgtatatgatcattaaacttacatgcataaaattttctgatttttaacaaattttaataaaaaaagtatttcaaagaagagtttaatgatgatataataattatctgccaaccacaaatcacgatcgatataattnttaaaacaatttt

SEQ ID NO: 197459 - DNA, 410 bp, Glycine max
  unsure (1)..(410): unsure at all n locations
tgagatgaggaagtgtagaaggggaaactttctgcntttattgttgaccacagagtggtacctggagatatgtcgcggnggtcaggagaccttgaggacgtcaggtggggtgctattgcccaaaaccaagcttgaccaatcccgacccaacccgggcatagtcggtcagtgagaacctgtgatgtacctaaacagacgagctcctggcagtcaacagataaaaggaacaaagaccacaaagcaagaaggcttgtggtggctggccagctgtgaatattgtgtgatatgtggattatggcctctggtaatcgattaccaagggtgagtaatcaattacaaggcgttataatgaagacaggaggctaagatggtctctggtaatcgattaccacggngtgtaatcgattacc

SEQ ID NO: 197460 - DNA, 380 bp, Glycine max
  unsure (1)..(380): unsure at all n locations
agcttagcacagcagctaagcttatcctttgtctacaatttncgaaacagaagagagtttgagcttagtgcagcatggcgcgcttagctcagcctcatcagaataacactcaggcttagcgcagagggcgcgcttagcctaactacaaaaacttaaaaaacagtcagagagttgagcttagtgtagcaaggcacttagctcaacacataacaagggcttagcgtagcagttgcgcttagccttattctaaggaaaacttacagaagcatagtggcgcttagcctaacatgtcaggcttaagcactgaacaaaaatctaaaaatcttaatgtctgaacactagtcccgcttagcacatagacgcacttagcaggcttatca

SEQ ID NO: 197461 - DNA, 420 bp, Glycine max
  unsure (1)..(420): unsure at all n locations
tgagatgaggaagtgttgaagggtgaaactttctgctnttattgttgaccacagagtggtacctggagatatgtcgcgggggtcaggagaccttgtggacgtcaggtggggtgctattgcccaaaaccaagcttgaccaatcccgacccaacccgggcatagtcggtcagtgagaacctgtgatgtacctaagcaggcgagctcctggcagtcaacagataaaaggaacaaagaccacaaagcaaggaggcttgtggtggctggccagctgtgaaacttgactgatatgtgagatatgatctctggtaatcgattaccaagggtgggtaatcgattacaaggcttaaaaatgaagacaggaggctaagatggtctctggtaatcgattaccaaggggtgtaatcgaataccacgcttgaa

SEQ ID NO: 197462 - DNA, 400 bp, Glycine max
  unsure (1)..(400): unsure at all n locations
agcttataaaagctcggnnttagaatgaattatcatcagcattagcatncaatctggtctttttctttntctgctacatagcattcaatcagttttattgtggatatttagtgacaatgtcacaaacagggaggtttttacttcgttntttttatgcacaatacacagtataaccacgacatgtggacaaacgcgtagattaaaaaatgagaataaacaaaaagatcagaaaacgccgctgcaattaaggaaatgatatcttccgcttcaatacttatttttcttcctccgcaactgaacttagcttctgcccccaagcaaaaatgctatataatacagttttccttttctattttatcatctcttgggacgaacaataacagaagagtaaagaagatta

SEQ ID NO: 197463 - DNA, 441 bp, Glycine max
  unsure (1)..(441): unsure at all n locations
ctaagctagcaagcccaaatctgatatcttcgggcgataagctgtatccttaatgatgttatgnggcttaatgtcgaaatgcagaatccgagtgttgcatcctttgtgcaggtactctagtcctcgagctatgcctattgcaatctggtgcaatctctcccaactcaaggatggggtagtagtttttgtttcagctgtcttctcgtgaatgtatttttcaagtgaaccattggacatgaactcatatattagagcttttctgcttccatctagacaaaatccaaggagagagacaatgttaacatgggatgttctgcttatgctagcaacctcattgataaactcttcgccattctcttttgactcgttcagtatcttcactgccaccgagcaaccattngagtaatttctttgtagacagaaccataccaccttctccag

SEQ ID NO: 197464 - DNA, 454 bp, Glycine max
agcttaaatagggggctttgtttgtgctcttatgcttattgcaactctgatccgcttagcgcacattagtgaatatcggcttagcgcatgcttttctcgctcagtggatggactgaagcggtgcgcttagcgggatgaccctttgctcagcaaacatgcatagctcatccttcttccagattcatcctcacgcttagccgaggaatgttgcgctcaacagatggctcggtaagccagcagattggcttagcgagtgtgtgaaaatcagcacttcacaaacttgcctagttaacctgaaattgagagaaaatgattattaaacacacaaaatagaattactaagtatttattacctatctttaactaagagaacttataacactacaaaataaccataatgtggaggagttggatacaattcacaccagttttatacacacaaggtagtcgtatt

SEQ ID NO: 197465 - DNA, 336 bp, Glycine max
  unsure (1)..(336): unsure at all n locations
tcggactctcagccacttatgatagccgccgatgatcccattactggcttccctaagctctctgtcctttcttcacgccgcattccatgtcttgcgaactccttggagacccctcgcgtgggtcactgaaacctcgtgcgatgaaaagcgtgatgctntcgtctgatggccctcctctcatgagacatccttcgcatgaagatagaattctgattcttcctttcttctagcaagggaaccatttaacagacgccccttcatgctaaccaagagttggtgacaacaaacaattcttgcgccgctcttttcacaatccccgtcgaacgtgtcatacat

SEQ ID NO: 197466 - DNA, 392 bp, Glycine max
acataaacaaaaggcgacaaggagttctttgaatgatgattgccttcaaatggatgtacattacatctctccttacccaaatatttgtgacctcaacccaatagaacacttccatctcaacttccacttcttcaaacaccatcattcaccgcataacaccgctcaccaatctgtcaacctgctttatcgcaacagaacacatctctgatacatccaatcttccttttccatacaatcccatccaataccacaatggcaatccagcacaacaaaccatacttacagttatcacagccgaaattcaacatcgccaccccatatatcaaactcgtcattcaatcagattccgacgcagaatacccaaaagaaatgacacgtacaaaccaacctca

SEQ ID NO: 197467 - DNA, 327 bp, Glycine max
ttctataagccactagttctggaagccgagtcgatggtatactccacttgtacaacgaagcttgactaccactctctctccttcgcactatctgccaacgagacgatgggattgcactttcttgagcatgtcgagaacattccctactacaaagtctccaccaaggggctcgctgaagaagtcctcactcattcctccttcattgacgagcacaacgaactcgctagaaacaccctcactccatgacagaggactgaatgcttattctaaaagctacttgacttggacactgtattagagtatattctcgacttgctccacgaatac

SEQ ID NO: 197468 - DNA, 471 bp, Glycine max
  unsure (1)..(471): unsure at all n locations
taatacattacgcacgggtgcgtcttccagaggtggaaaatgcttgtagtctccaccaacgattatttgcggaaaacgtcagaaaaactcgaaggaaactggtcatgaagaatatttcagattcgggagatgtatttacgtttgaggaaggtattaacacctctcacgtttgtcccaaaggacaacagccttaaatttggattgtgtgacatattgcacctaaacttttatttcttttttattttagaggtcgacaaaagcggagctcttgctcctacgtacccttcatcgaagaggaaataagacctacgtagttctttcaaaagggcgaatcaagcgattctttcttacttggaaggtggtccttataaggtggtggaccttaaaatgatccattnttacttggtgagaanactgatgtatcgaacctttagaatccttattagtgatttttgcggacgagcttgactt

SEQ ID NO: 197469 - DNA, 387 bp, Glycine max
ttaatttcttttataacacactcattccctccaaatttctgtaccgtgaggtcggcactcgagatgatcgcaaactcttgttcgtgggagcaaaatgacaaccgtagagtactagaagggagattctttcgtggagctgccgatccgacctgatgactttgggattatattgggagagaagtgtgttttgtaaatcaactcctacatagctagttctataactcttttgctgaattgaagatgaaatcacaaatttattctccttatgtgactgatgtgtcctgggctactacacctatataaatatataaatatatatatccattaacttatgtaagggcgcggtgtttgtgcatggatattgagacgaaaatacttgctttttct

SEQ ID NO: 197470 - DNA, 243 bp, Glycine max
  unsure (1)..(243): unsure at all n locations
aaaaccacngaagagaagagagggagaggcgctttttcgcggcccagagaggacccgcagaatgaaagacgggacaggacacctaggcgacgccacgaggggtgctatcgcccaacaacaagcgagaccaagcccgacccacaccgggcaaagccagtgagtgagaaccagtgacgcacctaaacaagagagcgcctggcagtcaacacagaaagcgaacaaagaccacacagcaaggaggcg

SEQ ID NO: 197471 - DNA, 420 bp, Glycine max
  unsure (1)..(420): unsure at all n locations
agctngaccctcctagaggaggattgatgtttacattgaataacttggaaatataactcgaagctcaagaaatgtagctntaagcccaataacttggtttggaggctccaaggagatgccgggaaggatagctcacaaggaaagctctcaccaaactgagaaggcccattccgcatcaccgagtccatgcaaaacgatgcgtataggcttgaagatgtcacaggaaaggtcatccctaggacctgaaatacgactcatttaagaccatattacagttaaaatcgggtagtggactctttttcctacttcatattttctcccacttgtaaaaaaataaggggttttgctaagagaattaacgagtcacacccgagtactcatgtaaaagaggagtgcttcatgaatcacattatctataca

SEQ ID NO: 197472 - DNA, 422 bp, Glycine max
tgtcacctacaacgagatgaattaatgttcaaatattctcttgtagttctccatatctagtatccgattatgtctggaggatggttaccttcgaaggagaagactctggggaaaccaaaaaataaatggctacacattaacattagattatacattttttacattcaatgtataattaactaaaattatatttctaaattatacatttgttaaatatatgactgtttctttgtcaccataacattgatatagagtaactacaaactaaccacaaaattctaacaaccacgtcatgaatatttcattgtattttacctcataattggaccaagctccaaattcataagccataacacaatattgaacatatatttttcatatatcaactacaaactagcaaacaatctcctccactctaacat

SEQ ID NO: 197473 - DNA, 355 bp, Glycine max
  unsure (1)..(355): unsure at all n locations
agcttgcagtcattagaagagttatatcatttgattaaaattatagatgaaaatgttggtcagtttgtcagattgattgtgaaggaatgcattaaccgtaacccggtgagagtgtgatccttatttttgagagaaagcgattatcatttagtactaatgactaaattcatgaaattgaggatgatgaaggccatgtttgattgtgatagtcacttanccaaaaagctgaccatgtgcatgaatgatttatcccttgcacccagttttgagctgaatgaatggttgattgatggaacattaagcctatngcagtttatctcctgctaccttgtcttaggttgtaggagaacatcat

SEQ ID NO: 197474 - DNA, 483 bp, Glycine max
  unsure (1)..(483): unsure at all n locations
cttgcggatntggtcttcgctggcgaaatgatcgaagttnngttattaagaggcaaatctgatcatcatgctttgataaatgcaaaaaaaactggggcaagtgaagagggtgagaatgagggagaaacccatgctatgactaccattcctatacaaccaagtttcccaccaacccaacaatgtcattacacaacaaataacaaaccttctccttacccaccacccagttatccacaaaggccatccctaaatcaaccacaaagcctatctaccacacttccaatgacgaacaccacctttagcacaaaccaaaacgccaaccaagaaatgaattttgcagcgaaaaagcttgtagaattcaccccaatttcaatgtcctatgctgacttgctcccacatctacttgataattcaatggtagccataaccctagccaaggtcatcaacctccatttctccaagaatacaacttgaacgcaacgt

SEQ ID NO: 197475 - DNA, 324 bp, Glycine max
  unsure (1)..(324): unsure at all n locations
agcttcctcggggccattgcctgtataggtaaacattnggaaagntagttntaccaagaaatgctactcttaaaacaaaaatggcatacaacctcctccaataaacacaaacatcaatgtaaatttagagtaaactcatgcacatacttccttacgaacattcactcacacaagatattcttctaactaagaaaaatgcacccatgcacaatcaaggcaccttcgttacctagatcacttatatgtacttccaaggcgtatttgctacctacatcacatgcatttcctttgctaaatttacatacatgcatactcaaagcactt

SEQ ID NO: 197476 - DNA, 473 bp, Glycine max
  unsure (1)..(473): unsure at all n locations
ntgagggtgtgtagcccaccatcttttcatagtagagtatttgtttgtgtntaccatcacgattatcgtctccctttccatcattgggggtaccacctgngccgccagatccctccaccttttgggcgtgttctttgaaagatccgtccccctttttgcacatgttctgtagttgcatcctatccggaaccatatcaaaattgtactgatactgcctaacaaaggcaaccattaggtccttccaagaatggactcgggaaagttccaagttagtgtactaggtaacagctaccccagtaagacattcttggaaggaatgtatcagcaattcctcatcttntgcgtattcccccatcttctgacaatacatctttagatggttcttgggacaagtagtccccttgtacttgtcaaagtccagcactttgaacttgggaggggtgatgatattgggttctaagaacaactctttt

SEQ ID NO: 197477 - DNA, 409 bp, Glycine max
  unsure (1)..(409): unsure at all n locations
ctatagaaactcagcttgcagncggcacgacaagtagagagtattgtaatttttataccaacaccaagaataacactaataataatactataactattatctatatcatttttatggcattatgaatgacaggatgaaatgacataaagtgcttagaaagttcacttgcatgtggaatgttattctaaaaaaaaaactcaagttagaaggataatcgaaccagattaatactctcaaagaaaaaaatgttctgtgaagacattcttagacaatttaaatacttgtattcggctatattagtataaatcatctctaatccacatacatactaataacacgttcttctttctttcattttctcttgatatactcttgcgtttaataacttgaattaaacatgatgtcggta

SEQ ID NO: 197478 - DNA, 424 bp, Glycine max
  unsure (1)..(424): unsure at all n locations
agcntttgatcattgaagcatttaatgcttgcattaaangnacgcctcattcatgctagaaaaccactctctttagcttttgtgttgaacacttcagtagaaaatcactttctttgtgtcaaactaggtttgttactatagagcatgtgttttgatgttgcatggtaacctcaaagagattccacttcatttattcttcataggatttgacagatcctaggagaatatcttataagacatttcctgtgaaatgaatctcagatgcagaacattaaatgaagtcttaaatgtattctttaatgttggatcagatcatgaaatacatctactttcgtttggaatttagacgtagagcatgaagcatggtctaatattgcataagacgtaacttttaacctttgtatttattgatctaataaaataa

SEQ ID NO: 197479 - DNA, 477 bp, Glycine max
  unsure (1)..(477): unsure at all n locations
ctcagctgagcttaattatgttgagtcaattaataattgaatcatattgagggtcattttttnttttttgcacagcacaaattagtattatatattatgaataatgcagtactagatgtactacagataggagaaaaagtacaaggcaaaaatgcctaacccaactgaaataacagaataacaatagataggccaaaaggaaatcatcccctaagacaactcctccctcaaactagtggaccattgattaaaatgaatatggaaatctttgtccatatattttaaccatgcccaagtgtggaataaagcttcatccatgacttttccggagtcgaaaatctggttattaaaaaccattgtaattctatgcttccaaatagtcatggatatagctatccaaagcactgcccatctattatctatacatctattgctactccagcttggaaattgaatanagtggtctttgggatcagt

SEQ ID NO: 197480 - DNA, 390 bp, Glycine max
ttaattggaatatatatatatatatatatataagggcaaacacatcattatgcatgttcacacatgcaagaggaagatatgtcatttcatttagtttgctaaaataagaagtcagaaaccatgaggcccggaaataccacctggattccactcactcacagttgccactcaccacaactcacgggttcaattatcatttttttaaagggtaatctacaacttttttttttttcagttgagatgtccctcaaattattagcttgcgtcaaggaaatttgttctcttatttcctgctccatactttgaggcattttatttattattctcgtctttattttagattaagtacacgaagagcattaaaataataaatctcccacacatatgaat

SEQ ID NO: 197481 - DNA, 340 bp, Glycine max
  unsure (1)..(340): unsure at all n locations
gcgcctgagctatcanaagacttgcttagtcgaggagtgtcttttttttctaccccacagattagtcagattaagatctcttataactgttagaaggagaaacggcctctcaatgagctcatttcatactgtgtgcaagacgatgagaggctgatgcatgaatagactgaaagtgctcatgttgtgagtacctctaaagacgcggaccaaagataacgaactaaagagcccatgaatgaatcttgtaagggtccaacacaaatgatacaaaatcaacgtgacaactgtttcttttgcaatatgcctggacatgtaaacaagaaaggcaccaattatcatg

SEQ ID NO: 197482 - DNA, 278 bp, Glycine max
agcttaagtgctcatatgggacaccttatgtttgtatactttttgataggaattatcagcatgaaaatacaaaaaaaaaaaaggtatgttttattgcattactttccttaattttttaaaataaagattaaggggttctcacagaccctgagaagaataaaggcctttcttagtaacccattcccctaagtataaaaaaaatttggggcttccacgacttaacaaacttttaaaaagatttgctcatactttttatacttgaacaccactcattgagt

SEQ ID NO: 197483 - DNA, 473 bp, Glycine max
  unsure (1)..(473): unsure at all n locations
ntgtccttaaatccctcttgtggactagaattagaccaaacatcattattataacaacatatttaaaaccaaaacttaatccgcagatccctcatttaagactaagtttcaatcctgcttcattcaagttcaaaggcaacagtacatttcccaatgctaaagtcacctaactatgcatacaaatgggtgatcagaccaagagcatacaaaatttaagcactgaaagaagcattgaacacaaaaaacacaatcaattagattataaagtaattacatcagttgttctttagaaatccccaacaagggtgtttagccagccattacagaaaaaccctaacaataatgagattaagagtagagaataactgctccttacacaagaagatggatccctcctnctcttctcagcatctcataatcactctgcaactcactaatctctttctaattacaaaacctttggtctctctaca

SEQ ID NO: 197484 - DNA, 450 bp, Glycine max
agcttccatcacatcctctcgtaattacattgtttgcttctactcgaatgagggcgcgagccattggtgtgttttcttaagcgacatgcgctcctgagtttggactcccaaaaccgttcaatcagaaattactcgtgctgcacatttggtgaggatgccgtaaaacgatgagtaaagaaaaaaaagggttcaagaaaaaagcatttgattgactgtgttttcaaataaaaatgtagacattcatgtgagctcattttatcattcctgaaagtttgtctttttgagagagaagtgagttatcaagaataggagtcatttgacttaatccgtcaattgaaaaaatccttcaactattccttgtccattgaaaattctttttgcgagaatcaaaccgcctctttcattctttcttgctacaagggtgtgaaaacaaaacaatgatggatacct

SEQ ID NO: 197485 - DNA, 406 bp, Glycine max
  unsure (1)..(406): unsure at all n locations
cccggactctcagccacttatgatagccgccgatgctcccattactgcttcgcctaagctctctgtcctttcttcacaccgcatcacatgccttgcgaactccttggagaacctttgcattggggtcattgaaaccccgtgtaatgaaaggcatgatgctntcgtctaatggcgctcctcgcatggggtagccaagctgtcttatggcgaggacaggattataatttatacaaccccttgttcccattaagggaacatttggaaatccttcgcatgaagatagaatcctgattcttccttccttctagcgagggaaccaattaacagacgcccctctatgctagccaagaagtggtcccaattcgcggtgaccttgtagcggatagacgggcctaccttcttgaag

SEQ ID NO: 197486 - DNA, 376 bp, Glycine max
  unsure (1)..(376): unsure at all n locations
agctngaaggtangagaagatgagtggagtatagagttatanatagggcacgaaattctgtgcctcaaatgaggtctgaactttgaagtgtaattcttaaatgataaaatttgaaaaatgcacatacatggcctctatttatagcctaagtgtcacacaaaattggagggagatttgaanttttattcaaatttcacttgaatttgaaattgaatttgtggagctaaattttggagccaaaatttcactaattatgattagtgaattttagctatggttcagcccactaatccaagatcaactccaagattctccactaagtgtacttaggtgtcatgaggcatgtaaaacatgaaggacatgcacaaagtgtgac

SEQ ID NO: 197487 - DNA, 473 bp, Glycine max
  unsure (1)..(473): unsure at all n locations
ctaagcttacgctgttcaattgcttcnaattgttgcacagaagggctatttgttgtgtggtggtcggcagaggagcataaaccatagagtctggcgacaggtgtagatatttgattcatggccagttgggttaccaggtttaccaaggcatctaggttaccttcgagcttcttattctcagctgatgaatatgaatacttggctacttcatgcactcctctaatgacaatagcatcacttctggcactaaatcgttgggagtttgaacccatcttctcaattaaattgctggcttcagcacgggtcatgtatccaagggctacaccactggtagcatctatcatacatgtctccatgctactgagaccgtcataaaaatattcgatgagaagctgctcataaatgtggtggcaagggcaactggcacatattttgttaaatatcttccactattcatataagctctctccact

SEQ ID NO: 197488 - DNA, 359 bp, Glycine max
  unsure (1)..(359): unsure at all n locations
agcttatgctacaaacatagacagaggaccttcctatcnctatcagcaaaaccaaccacaacagaacaattatgacctctccagcaacagatacaaccctggatggaggaatcaccctaatctcagatggtctagccctcaacaacaacaacaacagcctactccttccttccaaaatgttgctggcccaagcagaccatacattccttcaccaatccaacaacagcaacaaccccagaaacagaaaacagttgaggctcctccataaccttccctcgaagaacttgtgaggcaaatgactatgcataacatgcagtttcaacaagagaccagagcctccattcagagcttatctaatc

SEQ ID NO: 197489 - DNA, 333 bp, Glycine max
tgaacaacaatgactattggatcaactgaaaatctatatggggtgggagatgagggttcatctcatgaatctacatctttatcaatacaatcattagtcacacttggatgaccctttgaaattgatcatattatgatactcaaactatcatataaacttcgataagctctttcttcatcacatttgatgatcacaacatgtgaatatctacctctttattgtcctcgcataacacatcctataccaatctgattatacaaagtcatgttagagggaaagatactctccatggcttattaccttgtggatggatgtatgacctacctctatttc

SEQ ID NO: 197490 - DNA, 398 bp, Glycine max
  unsure (1)..(398): unsure at all n locations
agctgcctaagtaacctaaaattttgtatttatgatnatnaaacacacacaatggaagtactaagtatttattacctatacttaacagaaaatacttataacactactaaataaccataaattggaagagtttgatacaatttacacaagttttatacataaaagttagttgtattcaccgactaacagctaccttcagcccaaatgccttgttttgctataaatagatgtgggaaggctgaagtaaggggtccctgagttcccagaggtccagaggtacagaaagaagaagaaagaatatataagaagatcatagaagagaagacaaggttgatatgcttctgaatctgatccgtgatcgatatctacactggtcgtagatcgcttatagtcattct

SEQ ID NO: 197491 - DNA, 249 bp, Glycine max
catgttcttctacgcgcccgaagagacttttaactgtcatggaaccacattgcatataggactgagtctcaccatatctggaaaagtaacgctgtgtatcaatctgagagcgacttgatatagagatatcgtgctgtgatcattgaatgcctggatgatgtgaaaaccaatcgcactgtcggtgaagggatcagatgtagcgccataaagtggtgatataacgcgggctattcctaacttagatggatg

SEQ ID NO: 197492 - DNA, 445 bp, Glycine max
agctttcttgagaaaacttccttgagaagtttctttgagaaaacttccttgggaagctagagcttagctacacacacccctctcataactaagctcacctccttgagaagcttccttaagaagattcctaaagaagctaaagcttagctacacacacctttctaatagctaagttcacctccttgagatgagaagctagagcttagctacacaccccctataatagctaagctcacccccatgacaaaaaacatgaaaatacaaaaaaaaagtccttactacaaagactactcaaaatgccccgaaatacaaggctaaaaccctatactactagaatggccaaaatacaaggcccaaacgaaggaaaaacgtattctaatatttacaaagaagagtggatccaaccttgacccatggggctcaaaatctaccctaagggtcatga

SEQ ID NO: 197493 - DNA, 258 bp, Glycine max
  unsure (1)..(258): unsure at all n locations
actttccgcgtgtagcgaaactttacggattacacaacaatacttgtttccacttctggagtgctgcacaactttaccgattacacaataatacttgtgttgacctccggagtgagcaaaataagatcgcaagctgatcgcaagtgtacccagacaaaatatggtatgacagaagaatggaaaatntgataccaatacttgacactctccctacaggaatctgatgaatgaatctggcatgatatgctagcttgacaa

SEQ ID NO: 197494 - DNA, 389 bp, Glycine max
  unsure (1)..(389): unsure at all n locations
agcttagtaaagctaagcactaacaggattcattntacttaatctgtcaattgaaaaaaaaaattcttcaaatgtttcttgtccttgaaaattcattnttgagaacctgcacagtttcttccttgctacaaggttgtgaaaacaaaacaacgatggatacctcagagccctacaatggggcaatgaaaggtaccatgcataaacctcaagcaaacctaggggcatattagaagttctcacccaataggttcccagctacaaggtcatgacgaaagataacaattggtacctcaaagtcttacactgnggcaatgaggggcaccgtgcatgagcctcaagcgaatctaggggcaaatcaaaatttctcacccatcgatgttntaaacaaa

SEQ ID NO: 197495 - DNA, 445 bp, Glycine max
  unsure (1)..(445): unsure at all n locations
gcttctaaggaggtgagcttagttattagatgggtgtgtgtatcttatctctagcatctcaaggaagttttctcaaagaagcttctcaaggaagttttcttaaggaagcttctcaaggaagctaccttgtttataaatagaagcatgtgtaacacttgttgtaactttgatgaatgaaagtcttatgagacacaactcanagttcaacttctctacctttntcttccttcaattntgtgctcccccctctctctttctctccctctttcttttcctccattgaagcatcgtctccaagcttcttatccaaggctcatcttggtggtgaagctccttttccatggcttattcccttgtggatggcgtctcctctcacctcttctcctttgtcttccgctgcatctccatggtggaaaatcaccattaaaggacctcattgaagctc

SEQ ID NO: 197496 - DNA, 301 bp, Glycine max
  unsure (1)..(301): unsure at all n locations
agcnngagaacagcagaacctgtgttttggtttgacccaacggaatcagaaagaaggatggtgtgacactctaacgaacgttggtagatgttaagacaaagatactcatgaggcaagaaggagcttctataccggataagacaatggctttctctcttgctcacaaggtaactatacatctgcttgcctgtgttgtcattgggtgaccgcttttgctgaacttaaaattaattttgaagctcgacgagctttaactcacaatcaattctacattcacttaatcttgtcgacattgacctaa

SEQ ID NO: 197497 - DNA, 311 bp, Glycine max
  unsure (1)..(311): unsure at all n locations
ttttttttcnncncagncatgcgcgtaaacactagactctgacctctctgggaccgttaaggaactgagaggatcatgacattgcacgtactcgtcctattaggactctgatagatatacagcggcagaacattggaaatattaagcgcttggagcattctataatcatgttggaacatgcgagctcctgattgtaaaccactaacttcctaatgcataggctccgatctcatcacgaaatcggttatcagtcatgcggaatatcttccgttctacaaaacatgtgatatcatcctacggatcttaacatg

SEQ ID NO: 197498 - DNA, 286 bp, Glycine max
gaagacaaaacaagccaaggaggccccccaaaaaggggcaaaccactcaacagccgaaaaaaccttagcagggaccaaatcggagaaaacaacaaaaggagcaaccctcagggaaggacagaagaacccaaggactggagccagaacaccaaaaagaacctcccttggaaaaaaaggcccaaggaaaagaaaaaaagaaaccctcaagaaaaaaaccaaaagcaccccgaggccgggaaacctgggaaacgataaaaagggcggaaaaaaccaaccggccaaaacc

SEQ ID NO: 197499 - DNA, 432 bp, Glycine max
tagttggaggtacttacccgttgaagactgaagataacgtataacgatcgatgaatcttgaagaacggctgaggatcttcgcgtaatttctcacggaaacgttacggaagagcctcagcttggattttctttacggaaacaattttcctaagcaaattcgaaagagagagaagtgcctaaggggctgaacccttttcttcttcacttctccccctatttatagcaaaataggggagaagcttgccgcccagctcgcccaggcgagccaggttgcttcctccagaagcaacagccttctggaggaatcttctggaaggcccaagtgggcctgattgctatttacacacccctttctactaaatgcaccccttttctatattttgtaattctttatccgaacgttacaagacttacgaattcgaacgatactat

SEQ ID NO: 197500 - DNA, 382 bp, Glycine max
  unsure (1)..(382): unsure at all n locations
agcttagactatcaattacgttgtttgttttgtcttacaagnataggttgaacaccctgaaatttacttcttaatttattttcctccacatgtaaaattatattgttaaggactaaacagtggacatttttgcactgtgtaattttattatatgcttatgtgatttagtttattctttgtaaaatattaattgtataattttcatgttagtcatatttattttagtgtcataatttatttatttagttgacaaaaatttggaaactgccaaaacaaaatttccatttgtagcaaaattgcaacacacattgaacgataaggtaattaaactctgtgtaagagtgatctctatgtgaggtttactatgggtacatgtgttcct

SEQ ID NO: 197501 - DNA, 481 bp, Glycine max
  unsure (1)..(481): unsure at all n locations
tatctaanacagagaacaacactnttcttcaatgcaatgcttgcaactattcatatttctaatgaacatatcagtgaaacataaataacaacaatgaaaggctccaaatgacaaaagccccaaattttccctaatttgtaaccctaaaaacctatttgaaacataaatagaagtgaaaatatgaagatggaggagaaggagaagagggcataagttctgtttaagggttatgttaaagaagaagaagaggaggaggaggaggagaagagggcataggttctgtttaagggttatgttaaagaagaagaagaagaggaggaggatatatgagggttttttactttcgttttggtccctcatttcattaaaataaacgaaattagaaataaaaaatccacataatcatgtctatgtggcacttaacgagccacatcggcaataactgacggcgttaactactccattcacggcagggactaac

SEQ ID NO: 197502 - DNA, 315 bp, Glycine max
  unsure (1)..(315): unsure at all n locations
ncaagcttgcattaatatcaatagaaaatattcagntatgggagncatggcatcactagctgtcttttcatagagtccttacctgtaggctggaaggaatagaatagaagaaaaaccaataccctcaaataatagatgagaaactcacctaatgcttgtgctgcagtcattggtttccttggatctttattttgaagtctcttaaaaagggattacaaaagaaaattttaaatttttttgatttatgtatcaaatttatttagtaggaaaaaacatgattctattgtgataagataaaactcttaagttgaaaag

SEQ ID NO: 197503 - DNA, 378 bp, Glycine max
  unsure (1)..(378): unsure at all n locations
tcttgatattgtcagagatcagcactctatatctcctagcttaatattngagtatgtcaacagtacagattttaaagttttgtatccaaccttgactgattatgacatacgctattacatatatgagcttcttaaggtaacattacccttcaatctctcatggtataccttgactgatgctctgtgtcctatccataatgtatatatttctcctttacagtaattggagcatctttgtcttggacaaggcttatatcaattttgcatctggttcatgtgtataggcttttgcttatgcatcatgaaaattacttcacattagcacaaacatgtgttgatgaccttttcttgttacttgaatgctttagttttgaatgt

SEQ ID NO: 197504 - DNA, 259 bp, Glycine max
cgaaatatttccttcagaggagacgccggcaacaaccattcaacatgtaaacgcctacgaaataactacctcttctttgacacagtatgcatctccttgtcaagattgccccaccttgaccaaaccacaaaaaaaacttttgtcttttccccctttttcttcacatcctcatatatgcccacaagtgaggattgctttttgacaaccatatttaatcttaattagaaccaggaacaaaacccaattaatcttcatttat

SEQ ID NO: 197505 - DNA, 435 bp, Glycine max
  unsure (1)..(435): unsure at all n locations
tactcaactttagaagagacaaccganggtgttgctgctgtttttgttttctatgacgaatctccttggacaagacatctttaaattcctgcaataagggttgaacactacgagaaacataaatagctaactgattacaatatcactctctctcttttgtgtatcactcttttcctcgggtgtatcactcttctttttcatattcctttgtggagcctcactattctcttactcttgttctctctattctctcattctgatatggtcatcacatgcttctctacgggatagaggtttaagagtaaacgacgaagaattgactatccgtctgcacggctcttctntgttacggttcaacatacgctgcatttgtatagtccacgcgttcagaaataaacgctgagattcgtcctagtgatgatatacaccaccatt

SEQ ID NO: 197506 - DNA, 426 bp, Glycine max
actcaagcttgccacccagctcgcccaggcgagcagggtggcttcctttattttatcagctctctggaggaatctcctggagggcccaagagggcctggttgctatttgcacccacatttttactaaatacaccccctgctattttttggtgattcttttttcgtatagttaccgaaacttacgaatttctcaacgatacttgttttctttccgtaatgttacggaaccttgtggattacataatcatcccctctctgacttaccgaatgttactgaacctcactaattgtgcgacgatgcttccatttgattaccggtgtgtctcggaaccttgcggattgcgcatcaatatattctttatgttttccgcacatccctgaagtcacacattgtccaatgatgggtgctaatcaccttacaatgac

SEQ ID NO: 197507 - DNA, 385 bp, Glycine max
  unsure (1)..(385): unsure at all n locations
agcttncaagacacatgaagtcgagcacattctttttttattggatcaaagagccctcggacacttccaagaacacttttatgaaccacgcaatcgattaaagcagagacttatgaaaaaaaaagacatgggctcaaactgaactgcgtactcaattatagataactgataatcgatcaaacctcacgaggatctctctacacgctccaaaccactggtgaaatcgactacaaataccttggtacttgattgaaacagaaagttctatgccccacagaagttctctactttagaaacaaatcttcttacccctcacacgatgatgcatgaaggacatatcgatagattaagactaagatgccgcaatccagacaaataccaccca

SEQ ID NO: 197508 - DNA, 439 bp, Glycine max
  unsure (1)..(439): unsure at all n locations
cgattgaacagtgaatggattgaacattgtatgcagtgtctngtttgnttggcatgagtgtttgaaagtgattgattgagaaaatgtatgaattgaatggattgggatgattggatgattgtttcgatcaagcttgtcgtcattataagagaatgagcatatgattggaattatgtctgaaaatgttagtcggccgtcagattgattgtgaatgaatgcattaaccgtatcccgttgagagtgtgatctttaaaatcttgagataaacgactatcatttactgctgattcttgcgtgaatcactaaacgttggattggatgcgtgaacttgaagatgatgaacgccatgatcgattatgaatagctacttatcctatgatgctaccttcggtatgatgaattatccttgctcccacttgatctaatgattgattgttga

SEQ ID NO: 197509 - DNA, 391 bp, Glycine max
  unsure (1)..(391): unsure at all n locations
agctttcctttcttgtaaaagataaaaaagtgcatcttatattattcttncatccatgcgggaaacaagtaaaataatccaactaagcataaactaatacaagtagaaggataagaaaaaccagtaaatgatcaaaccaaactgggatttattcatattccatgtagtcttagatacatggaaatttgatcacatgaaccccattattctagtccctttttttgacacaagtaaattaacaagaaacaacattgagtgacactacttatatataacaaacaaatttacggaataagtgatgactagtactacttattaggtggactatgttcctcgggttttgaaccagcgcatgtatatttaaattcctttctcatacatctggactttg

SEQ ID NO: 197510 - DNA, 483 bp, Glycine max
  unsure (1)..(483): unsure at all n locations
tgtactctccataaatagatatgcaaatcaaagagcgatttgtatcttcattngagccatttcagaaaaacagacactttctctccctcactttttctttctatttcattcacttgccattactttctcaagaatctctggatattaataaagaataacaggaataataataaactattctatgacactaatctttgcaatgatacattaactcccacaatttccaatgacatactaattgctattaccatttccaacactattatatgagttgaattggttagattataaatgaccatctactagtagttgcaaattctttaacaccttcttgtttattatcttctctgttagcttaatatgtgcgatgactataaaaaaggataaataaattatacgatgtatgtatatcacaagcttttataacattctgctttaagcttctaactgttattcttaatatgcacgcactatcttcatatg

SEQ ID NO: 197511 - DNA, 355 bp, Glycine max
atgtttatatgctgaaattgctgatggaaatctgttaaagatgaatggtacaactaacccaacgttcgaaagtgagaatgtgatgttatgagtggaaaaagagtgagactcttagagttggaacgctaagtctgaattctgtggcaaatggaggttaaagtgagttaatactaacttgaaatgtcatttatgacatgtgagaaaggttaagctgagctacagagaaaaacaaatgaccaaagtgacccacgagccaattctatggcacattgtgtgttgaagagccaaattttgatttggtgacatttcggtgaaatcacgttgagcaactatatcgatgtatgactatgtgacg

SEQ ID NO: 197512 - DNA, 319 bp, Glycine max
cgcttgcacagaccaacccccttctacacccttacaccaccaaccattcaaacaccaccagctcatttaaccccagccaccaagccacacacatgtccacccctgtggctgtcacttcacccaaccctaaccacaaattacctatcaagcgcctctcccctgaagcattggttgtccgccgtgaccggggtctttgttaccattgcgatgaacagtggaccaggggtcatcgctgcaaccctcgtctccatttgctaattgctgacgacgacgaggacagtaccaacccctcgcaggaactccaacccaatactccctc

SEQ ID NO: 197513 - DNA, 312 bp, Glycine max
  unsure (1)..(312): unsure at all n locations
aaagggaggcgnaaaagaccncgaagagagcnctccgaagcaatgcggagaagtttgagttccaagcggaagtgtcgtggctagcttatggattgtgttctgccccaaaaaccctaatcaaaagcccattcagagcctcaagggccatcatgggcgacagtaactatatctgtaggttccagataaataataattcaagaccctcatttgtattgcacatctatatgttaaagttcggatttttattttccttttatgaatatattaattattctgacactctttcgttaaagggcatcgctttctagttct

SEQ ID NO: 197514 - DNA, 403 bp, Glycine max
  unsure (1)..(403): unsure at all n locations
gcaagcttgccgctggagctgacccatcaactttcttgtctttttagactagnganncctaggctcttgaccttgacttgataaaacctctttttaagagaaggcgtttgacttgatcccatgttttactaaagtgaaacagaatctagtgcgaatcaaaactccgacatctatcatgggtggaatggatgaatgcatgaanaaatgcatatgacatagatgcaatttatgaatacaggagcccgggaaattgtctccttcttagatacaacgtcttgtggtagcacagtgcccgacgtatgtatttaaaaaggtgacatggaccctccgttggtttgccaaagagaggggatcaagacggaacccgccatgatgcatttgcgaaggacaacatgggatgtca

SEQ ID NO: 197515 - DNA, 129 bp, Glycine max
  unsure (1)..(129): unsure at all n locations
cccaaaaccaagaccgaccaancccgaccgaacccgggcanagacggncagggagaaccngngaagnacccaaacaggcgagcccccggcagncaacagacaaaaggaacaaagaccacacagcaagga

SEQ ID NO: 197516 - DNA, 425 bp, Glycine max
  unsure (1)..(425): unsure at all n locations
gtcacctgcggcatgcaagctntctagcttttcattggggtatnattatcttcttttggcgctctaaattgngggagtgtgctcaaatatatggggcaattttggtttgttttcttgcttgattaggttgaattaggggtgtgtatgggatggccctaggcctataatgcattttggaacaatgggacatgccacattgtccccgttctcttgctattgacgcctaaacgcgcgcccaccaagtgttcggtgaaatgcctcaatggcattagcgcgtgacttttgtaaggaaacaacccatggggcattttggtttgtacacattttctatttttggaatatgtattcattcccgaaaaaggctagagtaattgccccacatatatcctangcctaggaactaaaattttatgcaaaaagaacac

SEQ ID NO: 197517 - DNA, 493 bp, Glycine max
  unsure (1)..(493): unsure at all n locations
actcagcttcggtntcaatttcgagtgtctcgatatattacgagacttaatcagacatccgagtaaaaagttattgtcgtttgaatttgcaacgaccatcaacattcaatttcgagcctctcgatatattacgcgactcaatcagacatcagagtaaaaagttattgtcgtttgaatttgcaacgaccatcaacattcaatttcgagcgtgtcgatatattacgggactcaatcagacatcagagtaaaaagttattgtcgtttcaatttgcaacgaccatcaacattcaattttgagcgtctcgatatattacgggactcaatcagacatccaagttaaaagtaattgttgtttgaatttgctcaaagcttcggtattcaatttcgagcgtctccatatattacgggactcaatcagacatccgagttaaaagttattgtcgtttgaattttcttagagcttcggtattcaatttcgagcgtctcgatatat

SEQ ID NO: 197518 - DNA, 387 bp, Glycine max
agctgcattgagatggagtgtacatccaccttttatgtatttgacgaagagaaatattctcaaatagaaacaaacttatacaaataattgattcccagatttctaaagatgtagaaaaaagtattaaaaaaaacaaaaaacattgtttagattttttaacgtgtacattattttatatatcattggtttaagaaattttatacttgtattatttgggtcatttttttgtattaaataggtaaaaaattctactaatgtaaaacacaaacttttgtaagttttgttatttgaaaaaaaaaaattattgggtcgcatatctcatttaatgttgggctcttgatattggagtttacaaaaaaaaatcatccggttttggataattacttg

SEQ ID NO: 197519 - DNA, 411 bp, Glycine max
attggctggaggtggattctcttttagtgctcaaggctgttagtgttatcaatatggctcattaggatttaagaaatgtctggatgaatactttattctattgtggcccgaatggagtttcgtgtctcccatattttctgagatagtaatgtatgcgctaactatggtgtataattactctattatgttggaagataaactgtgaatttggatgacgtgtacaaggggagatacttggtattgcaaggacagaaaaataaaggtaacctttgttatttggatggacaagccttgaagagaaaccatgattgcatagtgaagaagaatatgaagctttctaatattgtataagtgttgggagatacttccggtggaggaggagattgctcactttcacatcgatcgaacgat

SEQ ID NO: 197520 - DNA, 435 bp, Glycine max
  unsure (1)..(435): unsure at all n locations
gcttgggtgatgttgcgcgtactgttggttactatgaggtgtttgctggggtttgacccatgcgggtgttgaagagatggcatgggcatctccttccttcctttntgcccctgttgccccgattcttttggcgttcacgtttgtggaggaaacgtaatcaaactttcctctcttcaatccaacctcgattctttccccggcaaacaccagatccgcaaagctggacggcatgtaacccactagcttctcatagtagaacactggcagagtgtctaccatcatggtgatcatctctctctcaaccatgggaggagctacttgtgccgccaaatccctccatcgctgcgcatattctttaaaggtttcaccctcttttttaaacatattctgcagttgagtacggtcaggagccatatcaaaatttactgatactgc

SEQ ID NO: 197521 - DNA, 465 bp, Glycine max
  unsure (1)..(465): unsure at all n locations
nttccaagtgttcttganaccttcttccatcaatcttttgttaatgaccttcgttttcacttctaagcttgattttcactttattaccttggtttattctcacttgtagtttcaaatcttatttttgcactcttgaaggttggaaattggaatttaaactccctcattcttccttctaaatttcgcggagactgcaagaggtagcgaggtctctccaactcttgaactctaagcttgttgttaaacttccttgaacatgttgtcttgaaattttagtgcttgctgccttgttctagatctgtgtgatgagcaattttccttgagtattatatgcagaaaatgagttctttgagtgttaaaacatanggtcagccttaaatttcacttatatcagagctttctagcacaagttaagaataaaacaacgtttataacattgtactggataaaatctatcatgataat

SEQ ID NO: 197522 - DNA, 465 bp, Glycine max
  unsure (1)..(465): unsure at all n locations
actcagctatgccaaccagnggagctaggagagaancatcttggattttatttctgccagggcatcagttctaatttagactattccaatgctggggaaattacgagtgtcctgtgtaaagtgtatgggtatacccggctttatgtattgaagactgagtacttcatgtaatcttcatccatcattgagttatgctctgtctgattcaacctggacgtggacttatggccctacatggggtaatcatattgaatactttgtctattcctctacttattcgttgctcagcatctgattaatagagagttagcccctctatatctgtaataacaaatgttctgatcagaatgagtgtcgtttaaaacttattgtatcacgttcctcttcttgccgctcctggacaataaaatgttcaaatctttggggaatggccaattaaatttaataacgacataatgatcatca

SEQ ID NO: 197523 - DNA, 380 bp, Glycine max
  unsure (1)..(380): unsure at all n locations
agctngtnagactctaatatgaactaaactttttatttaacaaatatngatataagtgtgatttctgaacagtgatgtatgaacttttgcttgtttaacctttaaagctttgacaatgcttgctggtaacttttaaaattgtgagttctgaaatgttgcctacagaaacagatatcagaaattagaggttgcaaataaaaaatgtggtttcaatcacatcaattaattggctagctagaggaaaataatggtcaattaatggatgttgttccttcaatcacccaagataaagctcgagcagtattcacatcccactttacttgcaaccgaaatcaagattaaagttgttgaactatgtgttgactcttactttatggcat

SEQ ID NO: 197524 - DNA, 470 bp, Glycine max
gtgatcttcatgttgctccgctatctctaacgtgtcaattttggtggagcaaataatgcttctataaatgttttaaaggccgtttcacattcttccgtctagctgaacctcttgtccttttcaaaattttgaagaaaggtaaagctctctcagccgacatagccatgaaccttgtgaataatgtcaatcatccattcgacttttgaatatctttgacaacatttggggttcacgtttccactatagtcaacatttattgtgatgtaattcgatccttctttctgataacatgtagccaacgaactttcctatggacaccccaaaagcacattctttatgatttaagaacatgttatacttttcgtagtgagaaaagggttcctccacatctactatgtctgttcagagagttgctattgactatcatgtcatatacatagactcttaggttccaacctatatggttttca

SEQ ID NO: 197525 - DNA, 305 bp, Glycine max
ctccaaagaaggagggcctgaaacgattcgtggaatatttattcgtgcccctgcaattcttgaagcagggccagaagttcaagtgctggctgattatcttgtaccttctagcagatggttgagttccgattcctctattgaagacaaaatggtcagttaatagcatatctgtctataaaaagctttcagcttgccttgttatgaatataagattcaaagagcgctatgtatgtgattttctaacttgtctcctctttgagtaaattggaaatttgtcagactcatattttagagtgggatcattt

SEQ ID NO: 197526 - DNA, 466 bp, Glycine max
  unsure (1)..(466): unsure at all n locations
tcaaaccacagcaacacanaanctttgtgttttttaccttctatnnnaanggaggctcaaggtttgaaaagtgaaattgagaaatatgtaaatttgaagcaaactctcacctcacacaagtacataacatcaatctaaacttgctcaaactgaatttacacctaaaattccaccgaatcaaaatttgactcttcaacacccaattttgccctagaaatggctctttgttcactttggtcatttgtttttccctctagcacagcctaacctttctcacatgtcctaaatgacatttcaagctaggattaactcattttaacctccatttaccacagaattcagacttaaccttccaactctcaaagcctcactctttntccactcataacaccacattctcactttccaaccgtaggttaactctacatttcatctctagcaggtttccataggcaatttcagcata

SEQ ID NO: 197527 - DNA, 333 bp, Glycine max
ttcatttcaaacacaaacattcatttcatacaaaacaaaccattgaatatcatattcaatcaattcactggtcaatcatgcttttgtacaagctactactacaaacaaaataattgaaatttaaagactgaaatttaaataactgaaacataaagcataaactaaataaattgataaaaataaactcttcaaaatgcaaaaagataaagatcctgtcaatcctcctattggtgatcctctgcatgctcattaagatccaacactggagcagctggtggatcctgaacaataggctactctcgctccaatgcttgtgtggatggcaaggaatca

SEQ ID NO: 197528 - DNA, 470 bp, Glycine max
tgaatatgttcatgttaagagtgtcaaatcataagagataatctgagacaaaataaacaagtgttgtaacactgtcagtcttattggacgaaggaaacttgagcaaattgagtgaatcttaactttgctaaattagcgagtttcattgtattcaagcttattgtgtaaatactctttgagtgattaagaatacattttctatcaaacatatattgtttgtgaaagccagaagtggcttagatacaaagaatatttgggtcttaatcttaaggggagattaagtgtagtgccaagagtggcctaaagagtatttgttataaccaaacgtggcatagagaatatttggttgtaatcaaagaattgattagtggaacccttcaaggtttgaaggagaactggatgtagtccaagagttagggtgaaccaatcaacaaaaacctttgtgtgtgtcttactgcttctctataact

SEQ ID NO: 197529 - DNA, 411 bp, Glycine max
  unsure (1)..(411): unsure at all n locations
tgcagctttgaaaacatcacatcaggtccatttgttatgagcagctggtgtgtttctcaggtttctgcattcatctccctctaatattttaacttgtctattaccatcttatcaccagaataagatgtgctcatgcttaaaatttgctatattggtaggttcttgtgtctgacatcaatattggatatgaggagatagttaacactcacgtaagagaatattatgtagatattaactttttgtatgactgaagtgtccatctaagtttgttctctgtatgtgtctagggtcttgctttcaacgataaacctgtgaagaatctgaagagctcggccaacatagttgagagctgtgatgatgattatcntaaagttgatctggagtaccaacacgtttactctcattgaccta

SEQ ID NO: 197530 - DNA, 490 bp, Glycine max
  unsure (1)..(490): unsure at all n locations
agaaactacgcttctttggaccttgncaggcaataactccttntcattactttgtcatgtgctcgcgactggtccctttcttcccttcgcaacttgagttcactattgctaccccatagagctccgcgaaatttgttccggccatactcttccttgcgagccctcttggtctcttgttcaagggctcttgcggtaattgcattcccgtaacccggcgcactccttccgaacgtgtgtagcagccaacttgaacttctccttggcgagttttgcctttcctaactcgcttttgagagcttggacttcttcgtcctcttccggtgcttcaaaattctctttgctgacgacttttaacttggcgagccaatctaaacctcgtatgcgaaccttcagccattcgtggtacccaccaatgatgccattacgaatgcctctaagctcttgatctttccttaacggggtttcccatgccttatggattctttgtata

SEQ ID NO: 197531 - DNA, 352 bp, Glycine max
  unsure (1)..(352): unsure at all n locations
ctcataagtggtagatcgcgcttaaccgtttctattaagccaatagccaacatgctattatagaactcgcatccactattggtgaaaactagggtttttacactgagtttcttttgttactcatccaacctatntgacactttttgcacacgagtttttcattatttgttntcacataaaacctattttattaagcagcggacgacaatttcatttgtctaagtaaaacatgtatctatcagtggacaaaaggtgcaaaacctggttaaacttacataacaacatcttgtgaaaaatgttatattttatctaacacactattcaaccctcttctaatgggagtttagttatc

SEQ ID NO: 197532 - DNA, 362 bp, Glycine max
ataagtggatgtcttcaattggttaggcttggtcatagaaccaagactttaagtttttaactctaggaacacttatccaattcatgtagctcttatttcatagtaatatgtatctgtattatgcctaggcatctaggaaatttagatttaactgtcttattgtattttgtgattttgtctagactcattcatgattaggttaaataattttttgtcaccaccagcttttcaacaaggtgagaaaaaagaatctcacctgaagttcctttcccaatgatattcatttcattcagatggttagtggccacatacacttccgtaatatgaactctgcgaaatgtacgtttccttaacatgtctcc

SEQ ID NO: 197533 - DNA, 367 bp, Glycine max
tgtgtgtgggctggatctgctaacgtcactcacgctcctctttgtttttctttactcgagtggtgacccctcacgcaccttgaatctaagattgaagatactgcttttgctgtgcagttagtgaaggacagagatgcataacttccaccatatgtggatgcactataagctttctttggaaactttcgtgcacgagtataataccaccttgagaggaggaccatgctcgctggttgaatttgaaactcacggatagtcagcgtaaaatctgatgccgtatcaactgtttggtcgaacacgtttttgatccattgacactaccacttgcatctattatcctctcagagacccattgagctgatttaat

SEQ ID NO: 197534 - DNA, 397 bp, Glycine max
  unsure (1)..(397): unsure at all n locations
tgtcatagcatgacatgtgcagatgaagaagattaggagttctgtttccacccgcacaanatgagtcattacgacaatgagttatgatcaaatcatgaagaggtgagagactctagtaagcatgttctacaatatatagaaatggatgtcaaattcttacaagttgaaattgtaagacttttaagcacagagaaacaacctatggtgaaggaagtcagtgaataacatctattaaatattgccaaactctctaatgatgtgtaattgtgtaaggattcataatggaggaactccaatttctcacaattaagttgagtaagagaatgcaatgcattcagcacaccatctcttaaggatgctagggaattagtgccacagatagctaagtctaggatga

SEQ ID NO: 197535 - DNA, 410 bp, Glycine max
  unsure (1)..(410): unsure at all n locations
cctgcggcatgcaagctntggcctatccttacactgattatttttcttcttagcacatggcttcacattagggctttggtttatggttttaattgttagcctggcagttcattgtgatgaccagctgtattctgtgtgttttgtcttgttagtcttgtacagtctttcattggccaagttggttaacataaaatgagtttgaagagttgcgccttattttgtgttcgtacttgagaattgtaacccactattcctgagtacaagccagcatcagtagaagcctagccacacactgtctctactttaanagtaaaggtaagccttgtaacctacaatctttaattgaaattttgagctttatattttgataatagatcatgttatattcgtatacatcagtagaatatgtc

SEQ ID NO: 197536 - DNA, 201 bp, Glycine max
  unsure (1)..(201): unsure at all n locations
tgtccgcacagagcangaacaaataaggagacatatggttcccttgacgaagacccctagtaggagagaaactatcgagcttttcaccgttccattccacggccaaattagaacaaaagactccactcatacgcacattacatagtgcgaacacgaaacctacggtaccacgggccacaccgatcccgctcacccccccac

SEQ ID NO: 197537 - DNA, 470 bp, Glycine max
  unsure (1)..(470): unsure at all n locations
tcccattcatcaaagcaggataatcaaatttccctcttctcatacccacttcaatccttttaccagcgaacactaaatcgacaaagcttgaaggcatgtaacccgccatcttcttgtagtagaacaccggcaacgtgtctactatcattgttatcatcttcctctccatcattgggggcactacttgagctgccagatccctccacctttgggcatattctttgaaagattcatgctccctcttacacttgttctatagctgcattctatttggagccatatcagaattgtactgatactgcctaatgaaggcaaccattaggtctttccaagaatggactcgggaagactccagattggtgtaccaagtgacgactgccttagtaagactttcctggaacaaatgcatncaataattttcatcttttgtggtattccccattttcctacagtacatcttcaagtgattc

SEQ ID NO: 197538 - DNA, 356 bp, Glycine max
ttttagctttaccttctcctccattgatgtgtcttcatttttcttcatgtatctcctcacatgtcttgttttgaatattgttaacatgaatttttttagaatttccaccaattaaacttgctatagaagctagatttgattttctatggttcaaatttcttgttcttgttcttgaaccatgaattgtgttgagtttaggttcctttgagtattgtctttctatttttgtggctgaaacataaaccataaaattcttacaaaaagattaaagtggaagaaaaccttcaaaatctagagtgacatgttcactcattgtagtttgtataagagtcatgtttagccataaacttgcacat

SEQ ID NO: 197539 - DNA, 465 bp, Glycine max
tgtttaccccatgttgaatatgcttacaataaagttgtttatagcaccactaattgttctccttttgaagttgtttatggttttaacccactaactcctcttgatcttttgcctatgcctaatgtttctgtttttaagcataaagaaggtcaagcaaaggcggactatgtgaagaagcttcatgagagagtcaaagatcaaattgagaggaaaaataaaagctatgctaaacaagccaacaaagggagaaagaaggttgtcttcgaacccgtagattgtgtttgggtgcacatgagaaatgaaaggtttccggaacaaaggaaatcaaagcttcaaccaagaggagatggaccatttcaagtgcttgaaagaatcaatgacaatgcttacaaagttgagctgcccggtgagtataatgttagttccaccttcaatgtctctgacttatctctttttgatgcagat

SEQ ID NO: 197540 - DNA, 447 bp, Glycine max
  unsure (1)..(447): unsure at all n locations
gcttgaacagcccttggtcatgacatgtgttattgaagctctgaattnggagaaaatgatcaatttcacttattgagtaatcatttatatatgtagtgtctggagtatctcggatgatgtacacttgttgtataggaacgaaactcagctaatagaagaaactaactcaaattagtgactaactgtaatgtttgttgctgtgttttatttgtttttgcatgttttggtgattgagggatagagacgtgtgattctgtgcttttttttttatcgcttatgtataatggntctgttgacatggataattcacattagtgctcagactgcttctgctttatcttgcgccttttctaattggtggtttttagttttcagaattaatggtgaaatggccatcataccatggattggatatttgtgaattcaagtcataggtggacttttgat

SEQ ID NO: 197541 - DNA, 449 bp, Glycine max
  unsure (1)..(449): unsure at all n locations
ggacctataaaactaagctttctatatgaacagcccttattatcacacactttttttagttatacttcatctgcgcaagagggcatgggagaattccctgaaaacaaaacacactacactcaactcctcacccatcaatcaaaaactccaaagagaatggcaattcgtcacctttaattaattcgaggcatttaaagaattaaaaaataaataaaaaataagaataaattacctcttcgaaagaacttcaacctgtcggcaaacattttgaaaagttggagactttttacacagacgcagcaacctgagtgaacagcttgtgtgaccaaacaaatctacaagtgcagagtatctgccaaaaagaaaaattaacttacaaaaactaaaaagcaaaaaaattctacaaaattnttaagaaaatacaacgagttgaattaaggcacgcactt

SEQ ID NO: 197542 - DNA, 363 bp, Glycine max
  unsure (1)..(363): unsure at all n locations
agccaatagccaacatgctattatagaactcgcatccactatttgtgaaaactaggtgcttttacactgagtttcttttgttactcatccaacctattagacactctttgcacacgagttgttcattatttggtttcacataaaacctattttattaagcagcggacgacaatttcatttgtctaagtaaaacatgtatctatcagtggacaaaaggtgcgaaacctggttaaacttacataacaacatcttgtgaaanatgttatattttatctaacacactattcaaccctcttctaatgtgattttagatatctgtctaaaaaatctctccttcagttcttggaagcatttgacataatg

SEQ ID NO: 197543 - DNA, 306 bp, Glycine max
gaccaaagcgttactctagaacactaccaatcatgaactctttctcatacaaatgtatctgtttatgcctggatctagaagatacatgaactgtcttatgattttgtgatctgctaactcacctgataggccaatatttttgtcccacactttcacagggagaaaaaatccaccgagtcctttcaagattcattattcgaggtggggcaaaccttcgataaaactctggacgtacttctaacagctcaagtgcgaaaaaaaaatatgacagactgaaactatgagaacattactagtaaaaatgga

SEQ ID NO: 197544 - DNA, 305 bp, Glycine max
atgatatccactcgacaaggcttgaagtagaggagaccttccatcctatgatgcaacgtgacacacaaaagtgggtagttaactcgaatggccattattgtcaatgcggaaggtattccgcgcttaactatccatgttcacacattattgcagcttgaggtcacgtaagcatgaactactaccaatatataaatgttgtttacacaaatgagcacatgttagaagcttactacccacagggtggcctattgaaacgaagcggcaatcctcctctgatgatgatggacactatccctgcccaacta

SEQ ID NO: 197545 - DNA, 434 bp, Glycine max
  unsure (1)..(434): unsure at all n locations
tatagttattggagggagaataaaataatccanaagcatttgttcttttcatgttacgaagaattctttttgcggcttttagatgaggagaggtangagcctccgtaaagcgacacacaactcccaccgcatatagaatatcgggccttgtattggttagataccttaaactccccacaagactcttgaagatcgtggagtctaccttctctccttcatcaaactttgataacttcaagccaccttccataggtgtgttcacgggattgcaatcaagcatattaaatttcttcaacacttctagtgtgtagctttcttgtgagacagagatatcattctccatttgcttcacttccattcccaagtaatatgacatgagtcccatatctgtcatatcaaattcacgagacatggactccttgaagtcttcaaac

SEQ ID NO: 197546 - DNA, 393 bp, Glycine max
  unsure (1)..(393): unsure at all n locations
gagctttgccacctaaacatttgtcaaccttctctgtatcctacatataagaaacccgaaaccctaccctcaacattcagctatacatttcttgtgtttctctgagttttcttgattctaaaagattgctctgattttcagttcattaaccatgcagaactctgagttagtcatgaagatcgacgccaccatcatggccactgcttcttctcccattcaagggtctcatggagtgggagagaaggcactttgcctctcaccacagttggaaattaacagtggnggtgatgatgcagttgtggcgcctaaaggggacggaaaagtggatcacaaacccacctttgttgtgattgatcccacgagaaaggctgtaccgganatcgatccgttttg

SEQ ID NO: 197547 - DNA, 454 bp, Glycine max
  unsure (1)..(454): unsure at all n locations
ntgatatcacattagattccatcttacaaccaattggtgtcatctttaatcacccaatagatatataacctgcatgcatgataggaaatgagacaggcgatatgggacttccagcagtttcatcatatcaataacatttctaatattgtaaaatacaaatctggcaggcgaattagctattagcattcttccgtggcaggagtgaaccataagaaattagtgcaccattaagcttccaaataatgtgtcttcccttggcagaatatgccgggacataaacctaagaaggttttttgtagcataagtgaagtttttcttaaatatgtaaaacaaaacctaccaccatgatgtctcttacgagcaaggactttcttggccatcctcccttgattgaattcaaaaaagtgtaataagcctcccatacagacagagggcctactanaagactctcatg

SEQ ID NO: 197548 - DNA, 435 bp, Glycine max
  unsure (1)..(435): unsure at all n locations
agcttgggtgatgttgcgcgtactgatggttaccatgatgtgtttgctggggnttgacccatgcgggtgttgaagagacggcatgggcatctccttccttcctttttgcccctgttgccccgattcttttggcgttcacgtttgtggaggaaacgtgatcaaactttcctctcttcaatccaacctcgattctttccccggcaaacaccagatccgcaaagctggacggcatgtaacccactagcttctcatagtaaaacactggcagagtgtctaccatcatggtgatcatctctctctcaaccatgggaggagctacttgtgcccccaaatccctccatcgctgcgcgtattctatataggtttcaccctctttcttgaacatattctgcagttgagtacgggccggagccatatcaaaattgtactgatact

SEQ ID NO: 197549 - DNA, 122 bp, Glycine max
  unsure (1)..(122): unsure at all n locations
ctcaccttatttgagattatactanatcttctgcacaannattatttatattttatataaanggtttaacttgcctacgcgagtgcatgtctagagtaaaaataaaaagggagggggggggg

SEQ ID NO: 197550 - DNA, 418 bp, Glycine max
  unsure (1)..(418): unsure at all n locations
gggatccttaagtgaccgcggctgcagctnttaacacaaacaaaaattatttttttagctttttgaaaacaaagaatatgacatatgttaataaaaaccatttcatacactctgcaaaaccatttcatacagtatttgtagtgtactctcaatggaaatacacttatgagataacctctaatatttttttatcagtgaaaaactctataaaaaaaggtaaaaccaaaagacagaaactccaaggaccttataagtccaatcagctgagcccactgagcatcaacagtactccattgatccccctcaataaccaaaaaaatatgaaatacggcatgtgagaatagggtcagagaggataacattagcacagaccatgatatcaaagatggttgacagacacgaaatcttgtttgcaaac

SEQ ID NO: 197551 - DNA, 450 bp, Glycine max
  unsure (1)..(450): unsure at all n locations
tctagggcattttagagaatcaactnttgatctttgatgttcagttcagagtctcagaatgtaacttgaataaaaaagttcattgtaaacagttgaaccatttgttgctagagaacttgattatctttgattcactggattcactcgggcagagttggctttaacaatttacaaagtcttcaagccattattgacaatgaaattaatatccggtacatgatcaagtctctcaacattttatctgtacaaatattggcttcacgtgaagatgatccgattcgaagatatcaatcaaaacatggatgactggaacattccagaaatccctcaggatcaactatacgttcctgaaacaataaaagacaaacacaactttgattacataatcaaaacagtagaaaacaatattcctctaggacaagatgtaggggaagaatntcatttactttc

SEQ ID NO: 197552 - DNA, 421 bp, Glycine max
  unsure (1)..(421): unsure at all n locations
agcttccacatcaagcaagttcatcttaatatctcttatgcaaacaatagaattcaaaagttggagaatntgcttgaaaaccttgttgttgtccttaaagtgcattttgcagaagatccacaaattaatcaagtcttagaagctatagatcaagaggtatcaatatataatccaacttattcaaagatttaactatgatatgatactttacaaagaaaaaacattgttctaatttaggtacttacaaatggttctactagtaaaaatcatcaaactacaaacgatctgaactagaggtgagttgaaatttaataattaatatattgacaatatcattnttgttagcatatggtatagcttggaatgtatcccgactatctatgtatantaataagtgacatttaataattaacatgttgaa

SEQ ID NO: 197553 - DNA, 469 bp, Glycine max
  unsure (1)..(469): unsure at all n locations
ctatgaaactaagctttaagcaattcatctatgccacccatgtgagtgcatatatgcaagagcacaccaccatgtctccagtgggtgccacccacgacaagtagcgtgtatgcaacagcacgacgcccaaaacccaggtcaaacaattccttggatgatcctccaaaggtctcacaaaacccaaggcctacccttggtgagtcccacttatttacaccactatgtctccagtatgtgtcatttcataagtgacacgtatgcaagagcccgccaatgcatctccagcacatgccacccgcgacaagtgtcatgtatgcaagagcataacacatgcattgcacataagactcgtcaaacccaagctctgcgcttggtaatcctcaaatgttcacaaaatccaaggctcgttcttggtaatcttcgacacagctgcacgagcttgacaaaacccacggcanacacatcacca

SEQ ID NO: 197554 - DNA, 226 bp, Glycine max
tttactccaaaaagcagtgcgaattaaatcacttctgcattttatctgtagcatgcattcattattttttacctactcctcacgtttggttttttaagcaaaataccctaactaaatgcccccctagggatgcctatcgcacccgaatccaatctaaaatgatgggtgatcaagacgagacacaggaacagatgaaagccgacatgtcggctttgaaaaaacaaat

SEQ ID NO: 197555 - DNA, 448 bp, Glycine max
  unsure (1)..(448): unsure at all n locations
tatcaaggaagctatctagtctataaatagaagcatgtgtaacacttgttgtaactntgatgaatgagagtcttgtgagacacaactcaaagttcaacttctctccctttttcttccttcaatttcgtgctccaccctctctctttctctccctctttcttttcctccattgaagcatcttctccaagcttcttatccaaggctcatcttggtggtgaagctccttcttccatggcttattccctagtggatgacgcctcctctcacctcttctcctttgtcttccgctgcatctcaatggtggaaaatcaccattaaaggacctcattgaagctcaaagatccagcctccatagaagctccacaagccaagcttcatcaaagaccttatcttctctagggagttacccacccatatattctataagtccaacgttagccaccacgac

SEQ ID NO: 197556 - DNA, 222 bp, Glycine max
  unsure (1)..(222): unsure at all n locations
gatcataatgaaaaaaaaaggaggagaatagggaatgatggtgttcctatacnaaaccgaattgatggtattaaactcaaccttcctccatttaaaggaaagaatgatccggaggcctacttggagtgggagatgaaaatagagcatgttttttcatgcaacacctatgaggaggaccaaaaggtgaaacttgccgccacggagttttttgactatgctctt

SEQ ID NO: 197557 - DNA, 431 bp, Glycine max
tcgaagggaagagagagaccaatcacaagtacatagcatggccttaaaggaggagttagctgcttgctcaagatccaagaggagtctggcccaacatttagaagccatggagcaaagcatgctggctataataaggcagtacaaagaggagctaaaccaatctttggctcatgagcaaaagctagtagaggactttgcacaagcatacgccgagaaggaggcaagagggagggtgattgatgcattgcatcaagaagcgaccatgtggatggataggttcgccttgaccttaaatggaagtcaagacctcccacgactactagccaaagcatgggccaaggccgaagtgtgttcagccccagaggaaattcacgggctaatcaattattgtcaacacatgatagatttaatggcccatataaatagaaacc

SEQ ID NO: 197558 - DNA, 299 bp, Glycine max
atcctctcttcattatcataactcatatttctcatttgatcaccaagtttaaccatctctgtcatgaaccttgccgttgttggagatggtggagaaacatctccacttgttgaagccatacctacgaggaacgttggtgcataaataataaatagaataggacctcaccactcaaacttaatgtttcactcaagttcactcgggtatcactctctcaagggtttgtcttgataatatgcactctttccttataccactcttgctctttcttcagtttgtaaggataaccccccagccca

SEQ ID NO: 197559 - DNA, 482 bp, Glycine max
ggcccagagaaggagtccatggaggaaatgctgaccatctcttaagactggaaagcggtttctaacgattcttctgcggcttccacataaggcatagaggatgggcagctcaccaagatgtcttcctcgcctgacacgatgaccaaatgcccctccactacgaatttcaacttttggtggagcgtagagggcacaactcccactgagtggatccacgggcgccccaacagacagctgtagggggggttaatatccattatttggaaggtgacttgacaggtgtgagggcctatttgtactgggagatcgatctctccctaacctctcggcgagtgccgtcgaaggcacgaaccaccattgaactcggctttaagtgggaagcattgaatggtaatttctccaaagttctcttaggcattacgtttaaactggaaccattatcgatgagcactttggctacgacatggtccatacacttgact

SEQ ID NO: 197560 - DNA, 313 bp, Glycine max
agcttgtacacatggtaaggtgtctcctgtttttcaaatccagctgctcgcatcacataaaccttttcatttataaatccattcagaaacacactctttataatagaaagagagtggtccaaaattaccatgaatgtaggccaaagggaattgttcgtcagttaatggctctctaggagctgcccttttgaacttataaaggtgtaatggaaagggaggtggatgcggttgtggagttggtgcacacttgcaaagtggtgtgtgaggagtgtcatcaatggattcatcttcaaatgaggaaaaggctagatct

SEQ ID NO: 197561 - DNA, 354 bp, Glycine max
agccttctctagggctgtctgattggactatagtcttcttccatcattatcttgtgcatacagtaggcagggctgattccttttagatcagatatgtgccaccctaatgccttcttgtgtcttttgaggacattcaccaacatgttcttttcctttgctgttagctcattgctgaacaccacaggcttggtctcgttcttctctaagaacacatactttaagtggttgggtaggatcttcagctccaccttggtcttctcgaatggactctcgcttttcaattctttcaaaatggcgccctctacaggaataatttcctccttttcctgtgtagacaatctacaacattgatca

SEQ ID NO: 197562 - DNA, 403 bp, Glycine max
  unsure (1)..(403): unsure at all n locations
ggcagnagtctatacatattctccaccttgtgactgttcatgtagggatgagatcattcttctcattacagacaacaatcatacttctttntttgggcaccacttggattggacttacccagacattgtcaaagatcgaatagataagccctacttcaagcaacttgaggacttcttttttgcacttcctccttcatggatgggttgagtctcctctatggttgtctcactggtctatagtcaacttccatcatgattttgtgcatccccttgagatcggatatgtgccatcttatggttgccttatacatctngagtacttccactaaccgtgcttcctcattangagacaagtcattattgatgactattggcttgacatcatttgccctaaaagaacata

SEQ ID NO: 197563 - DNA, 447 bp, Glycine max
ttaaagatgctgcgtccaatctctaataaagaggtttggtctattcggtcttaactcttaattatatgagctagccatgagctccctaaatatttatataacttaataaacaattctatgtctttggataaatagacaattttttttcaaatcatgtctgctattgactaattaataaacatattttataatggatcagaacagatattttatttcattacaaatttacaaatgatatataaatgtttaattctctactattttattttaaatatattatccatcataaatcgatgatttggctaaaatttcgaaagatgaaataattattgtataatctaaaaactttatttcatgtagtgcacctcatattatggaagaagaaatcaggacttatgctttactcccactgtgtcaatatcgatgcactgtgtacaatgctccaca

SEQ ID NO: 197564 - DNA, 375 bp, Glycine max
  unsure (1)..(375): unsure at all n locations
ctgcagctaaccttaggacaagattagtttttttttttgattnctgntaagttagtgtttaggttatcgtagtaaggtagttaaggtttacaatgtagttttaggtaggttttaggccccttagggaaatgcctgaaaagggtaaaacccctatgttttgctaaaatcgaatgaatgtgtaagcccacctgctggcttacctgttattgagctgaaattatttgatcttaatgatcgcctaaccaccgtgtcggctaaccattatcctgtgagaaataacgagatacctaacatgttggcctaaactactattttaacattaaatatttttaaatttgatacgctaactgctgcagtaaccccttttttgttaac

SEQ ID NO: 197565 - DNA, 500 bp, Glycine max
  unsure (1)..(500): unsure at all n locations
ggaccttaaatactcagcttgatagtttcccattctgggtattttggagtaaattttgtttattaatcttgctntatgggtaacgctgtctctagaagatttccattggatttaatgatgaaatctgtgcattttcaagtgaaaaaaaaggctaagttttgaattgcaaaaagtagcagttgggctaagctcagcagttgggctaagcgcaacttcagcgcgcttagcgcaaaggagaatttggtagagcatcagcatcaaagttgcgcgctaagcgcgagattagtgcgctaagcgtagtaggtgccttcagccaggctaagcgcgaaactggtgctaagctcaattccacttacccgcgctaagcgcgaaggtggcgcttagcgcagcgtcgcaattttagagcctatttaaagcctgtcttgtgcagaattaaggtacaacttctacaacatctttacagactataagttgacgattggcacaaatttgcacagcac

SEQ ID NO: 197566 - DNA, 274 bp, Glycine max
  unsure (1)..(274): unsure at all n locations
ttcttgactccatttcattgaagcgcatatcacttcaattccaggtatcaaaccttctcccaacaaagggttgaagaccatcaaacctttccataattctttaaaaaagagaagaatcttctccttcatgtccttattcaccaacatttctagcaccctacttcacccaaaagccatcatgcttctttatataaccaaaggacgctattacttgaacccctataaaaaatgatctcttgattggaacataaagttcantttcaaaacggatgtt

SEQ ID NO: 197567 - DNA, 328 bp, Glycine max
  unsure (1)..(328): unsure at all n locations
gctnggatattcaacctgatgagggatcaagggattagatattttgtctcaacatagaacacaagagcatgattgattagagaaatatatttctatgcattagcttgtatggtagaaagacccaacatatctacctactgctgtcattttatttaccttgcattatatagtttttagcatacaagtctagcttaaattctgcttgaaaatatcacttatatgaggttgctgaacaatacttcaattctgaacttaattcacgcgtacattagttccctgtgttcaatacttagattcatccactttaattttaaatacttgacaaccc

SEQ ID NO: 197568 - DNA, 350 bp, Glycine max
tcctaatctaacatttttctatgcaggtattcatctctcaaaacattaatcttacaaacttatcagacaattttttttcttctctacatgtgagcagtttggactctccatacctcctatactcctcatatagcattactcccatggtttgatacgtggtcagcactttcatccaccgaccaaagctgaagaaaaagggatctcttgcattagtcttttccttttccttatcaaagatatgccccttgaaattaaatacattaataattcctcatcttccttatattggaagcaactgcacacaatacaccatgccgcaattctatttcttgcatgttccacgaatatag

SEQ ID NO: 197569 - DNA, 482 bp, Glycine max
  unsure (1)..(482): unsure at all n locations
ggacctataaaactaagcttggaagtgttgtttaccttctcactaagtaatctgctgtttancgagcgtccgctaagcgcaacactcctgagctaagcgcaacactcctgtgctaagcgcaaggaagaatctagaagaagatgagttatataggttcgctaagtgcactacttcatctcactaagtgcactgcttcagttcattcgctaagcgagaaatgcgtgctaagccaaaaatcactaacgtgcactaagcggtccataagtgcgctaagcgcacgagcacaaacaaggccacctatttaagcctgaaatcagaatttgtgaagagagtttggactacgattcacagctttgcatgtctagggtttctagagagagaaaggtccaagctctagagagttctgagagattttcgtgtgtgaagatttgcagagaccaaagcttgaagcatgagccagtttgagagcttgagatgagttt

SEQ ID NO: 197570 - DNA, 436 bp, Glycine max
  unsure (1)..(436): unsure at all n locations
ctaagcttggaacccaacttnnagctcaatgcaggaaacattctctttgtttgaacccaacaacngatcttacaattagtaaagcgtgaccactacgacttgcttgcgagagcttttactctaatttgttctgccccatgattgatactttgcacctacgtaacgtgggaaatgctcttcaatgggatctagatatgtgcgtctatctcaggggcatgaaattccttgcccagcgtgaatgattatgtttctaaatggatgtatgatagcatggaaatctcttttgaatgcacgcgtgtgcaggatgtaattacctttccaatatgcatattcataaatgggagacaaacaatacaatctgcatgatatatattctctatgtgtgtaagcacgatgtgatattcaacgtctctgatataattaantgtgaactttg

SEQ ID NO: 197571 - DNA, 392 bp, Glycine max
  unsure (1)..(392): unsure at all n locations
agctngnggttatatagcaanctcttttattcttattattagatcaaacttttggatttgatggtctattaaatgatataggtaggtatcaaaggtgatatacaaatatcaaattggtacgacgactctggtagattttatctattagcagtaagcctcttttttctttgtagtattatataatttaattgcacaggattactagtaatgtntatttagcaatacatatgcaacatgttagtgtctatggttgcatcgcaacaacattattttccaaggatctgcatattaaggagtgtaattcggcgttgatacatataaagacaatctcgtggtcttggatctgcataaaggcggtctgtcttatggtgtaactttggttcatggacaac

SEQ ID NO: 197572 - DNA, 148 bp, Glycine max
gctgattaaatgcggtatcttgtcgaataatctacgctaaaaagtgcattacacttatttaattgagttaattcttctattgtgaaagaatagtaaggacttagctttagtagatgcatgaatatatatgacgggcactatgttcaaa

SEQ ID NO: 197573 - DNA, 432 bp, Glycine max
ctggatctcactagtgaaagcggtctgattgatcatttctccattttttaccgaatggagaatcttcacagcgccaactagacctgtaggcaacactgccttgttaacacatccttgccctccaaccgcaatgagatgcttgctgtcaaagttttctgtggcttcaataatattctcgtatatcattttgccatcaaaactccatattgcaaatatgtcaggagaaagtaaatgtgtagacagctcttcttttttcgtcgaagctaggcataaacaatacgagactcctacaacagataatgccattattagaatgccctaagtcatggtgaaacatactgtgatgactatcgttctcatatgatgatgagaattccacttgatgttgggaacgctccagccacagaatttcacacaagccttattattctc

SEQ ID NO: 197574 - DNA, 422 bp, Glycine max
agcttgtgagggtctatgataatgtctttttacatcattacaaagttttgccactataaacattgtgcatggcagttgtgagtctttttgcctaaacaagaatgtgcttaaagagttcttttggtactggaaggaaagcttttgttgtttttcttacccataatgtttaccaaaaatctttattttgttattgctgaagatattgttttagctgcttttgattagaagaacaagggccggcaaccatatactattagttttggcctaaatatacaggaagacacgcaaatagttttaattgtcttccttgagtatatggttactgacaaaggttacaaatttatttatgccttcggcatttttatgattactgacaccctatttatcttttaaaaatgcgcgatctcgattttgaaaaccaa

SEQ ID NO: 197575 - DNA, 422 bp, Glycine max
  unsure (1)..(422): unsure at all n locations
tatgctacttctcaatcccaagctatgtgtttttattctatttggttagagnagaggccatcctgctacctgttatagcattctataattctgtgccaacaaatatattcaaatttggtgggggttgtgacaccaaatatgatcattgaactgttctctcttgggattgacaactatgctttctatgctcactgtcagtgtgtgtcctgacaagtaatatgaatatatctgtcatttattatttacaaacaacaggaagatatttggttaattattagaaaacccattaagaaagagaaccattatcctcgctgttttacttttccattacttgatggctcatcaatattaagatcagnttatgccggacttatacatgttaccttgtacgaaattctagtaactctctgtgagtatggaat

SEQ ID NO: 197576 - DNA, 422 bp, Glycine max
aactttatggaacctcctcttattttatattgttgccattcgaaaaaaaacacaacaatcacatttggttttcttctctcaggctgatattatctattaatattcagatattttttaaccacttgcatgtatggggagacatcatgtatcccccaaaattcggtcattcggattcaagaacttaggtcatctccacatgaaagatgctttcatgagtttcttattaaaaataatattgttggagtaagtctaattggcattggcgggatttaaatttaacatgggtatcttacaagcacgtttcttaagctttgtcattggagatgtctatccacattgaaaaaaactcaaattcttttttttttatttaactcacctttggtatcacctgatacatttggtatttgtaatgagaataaatt

SEQ ID NO: 197577 - DNA, 469 bp, Glycine max
  unsure (1)..(469): unsure at all n locations
tattcaaggtctaaaattttcatagtgcagttcactcatgtcatgcaatcaatttatttcagatcaagatatcaagacaaacaaaatttactaaaatgttcaaaacgtagctaccataaaagcgctaaaccaaaaccactgttaaaccaaaaaccaacaaaataaataaaagttgtctgaaaagagggagaattaaatgaaatcctggtcaatcatcaatcttgtgctggtgtgggccatgggtcccaagtcccctgtgttgcggtgacatctactacataattagtgtccatgcctgccttcgctgcacctgtgtcctcttcaacctcttgtgctggatcctgggtctctggagtgtcctcagcatcctgagcctgtgcatcctgtgcctcaagagcttcaccctctcaagacaggaatggtggactccgagccaagccacctgagccagataatnctgtaataaata

SEQ ID NO: 197578 - DNA, 485 bp, Glycine max
tataataagaaagtgaagtcaacaactgttagcggtggtgatttgcttggaaggttatcctgcccatagatagtaaggatcgagccttgggcaaatggtccccaaattgggaaggaccgtttaaaataattcagatctattcgaatggtgcttatgagttagaggagctaacccctcagaaacgtactttgagcataaatggtaagtatttgaaaaaatataaaccaacactgctcgaagttaaaataagcatagaataagagaaatacgggaaacataaaaatggcgataacagtaaattgccacgaaagggcatgtgtcaatattacatcgaaaagtagaatcgaaatacagaattcgaaatatagaaatcataagttctactaagtcatgaccaaatcctcatacagctgtctcaaggtggtcatctctttagttaagacttggtcagcactctccataatccttgcctcatctgctacagc

SEQ ID NO: 197579 - DNA, 370 bp, Glycine max
tcacaaaattcacacagctccagtgttcagagttcagaattcagtttcattctgggcctatctttttgtttcgcttagattgtactatgaaagcctctatcgaccagagagacttcaacaaaccggcaaatgctctctctctttctccgatgcgttaccgagaattttcagattcacagatctgtgttatatctggcttcgatcgatctgcattcttcatccgataaacgattgctggttctgagaatgattgcatgttcgtgtttggtattgaatgctcgcgtgcgtggtgttcgaacgaacatgtggtgtgcgaattgccgatcgatggcgtgcgattagggggttgaattcacgatcctgtacccat

SEQ ID NO: 197580 - DNA, 271 bp, Glycine max
ttctccatggcttataccctacagaatggtgtcacctctcacctcttctcctttatcttccgctacatctccatggaggaaaatcaccattgaaggacctcattgaagctcaaagatctaccctccatagaagctccagaagcaagcttccatcataatatgccaccttttgctttgaaaacacaaaaccaaatcattgttgcttgcatggcaatacataactcccttcaagaaatgacaagagtgacagagaatctgattcccttgatga

SEQ ID NO: 197581 - DNA, 479 bp, Glycine max
  unsure (1)..(479): unsure at all n locations
tgataaagctttgtataaatcatagacacactccacatattanatgtatattactgatgttcaaaactctcattcttgtgaattaaataaattatctttttaagcataaaattaaaatggcatatatagtacttgtaagtggtattgtccaaacaattgatgttgtcaacaaatatttttaggtaaattttgtatacactactataaaaacaaattnttataacagttttttatatcaattctccttttacattgattctatgaaaatcaatgtaaaataaaaatgtgctagcaactttgtaaataagtatatattatttacactagttgccggccaaacatgttaagaaactaaaagtaaagataataatatggaattcaccaggacaaataatatttatagactaaaataagacatttataaaaatttaggactaacgaataaacctaagaaataagagtcactacccaaatctgtt

SEQ ID NO: 197582 - DNA, 371 bp, Glycine max
ctctaagtcacctgcggcatgcaagcttgtgcaaatcaaatcactcctacatttcatttctatcatgcattttttctttacccactcctcacgttgggttttttagggaaaaacaccataactaaacgcgccacaaggcatccctatcgcaccagatccaaatctagaacgatgggtgatcaagaggagacacaggaaccgatgaaagccgacatgtcgactctgaaagaacaaatggcctccatgatggaggccatgttaagtatgaagcagctcatagagaagaacgcggccaccgctgccgctgtcagttcggctgccgaaacaaacccgactctcttggcaactgcgcaccatcctcctttaaacat

SEQ ID NO: 197583 - DNA, 488 bp, Glycine max
  unsure (1)..(488): unsure at all n locations
tgtgcatccaataccctgatgagggtgtcccatatgttcttaattctggactgattcatttgcttccaaagtttcatggccttgcaggtgaagaccctcacaaacatttgaaggaatttcatattgtctgctccaccatgaaacccccagatgtccaagagaatcatatatttctgaaggcttttcctcattctttagagggagtggcaaaggactggttgtattaccttgctccacggtccatcacgagctaggatgaccttaagagagtattcttagaaaacattttccttgcttctaggaccacaaccatcatgaaggatatctcaggtattagacaactcagtggagagagcctgtatgagtactgngagatatttaaaaaactatgtgccagttgccctcaccatcagaattcggagcagcttcttctccaatatttttatagagtcagataggactaaccatgtttcaggaagtacacatac

SEQ ID NO: 197584 - DNA, 246 bp, Glycine max
aaacatgctctattttcatctgccactccaagtcggactctggatcattctttcctttagatggaggaatgttgagtttaataccctcaatgtcggtttgctacgaacaccataattccctcttatacttgttgattattgattatgaactctattctgcatttgatccaacctgtcatggagcgcatcgtcttgttggagcatgaacctctccaaatgttgcgtaaaaagatgcttttggaattg

SEQ ID NO: 197585 - DNA, 474 bp, Glycine max
  unsure (1)..(474): unsure at all n locations
tgtcggattcagtttcaattaagcgcttgcggcatcctatgtattgagcgaaaaggctcgggtcattaaagactatgcatcttttaaggcacaaagcgaggatcgaaaccccaatcctacattcttttaaatgactgtgatgagaaaattacagaggacagaaatccctaggggaaaccacagaaaaataaaagcatgcagcgacttccttaattgccccagaacttaagcatagtatcgcttgacaacatcggagttcaccggcgaaggtagttcctcgtcatgcatgttggcaagcacaagggcccctctaaagaaagccttttttacgacgaaaggaccttcatagttcggtgcccactttcccctattgtctttcatggtttgggagactatcttcagtaccaagtccccttcgctgacctgcgcgagcgtaccttactgtcaaaagcgttcattactcgtntctgatat

SEQ ID NO: 197586 - DNA, 333 bp, Glycine max
  unsure (1)..(333): unsure at all n locations
tntatggtatattcacacacatcgtgaacaggcttagatgntttctgtttagaaanncaaccccccagcttacatgattacctagatgatagacgacatcccatatgatgattttattcagtcacatctctataaattgtgtacagcactgtatcatgtgcaaaagacagcatgcttttttactaaatagacacttacatcaatttggattattcatcaatatcacctgatctaaatttcgtaatagaaaagaggttgatgacacgttctagaatttgtcgagtaacaaaattatactatattatctgatcgaaagaatgtgaccttaatctt

SEQ ID NO: 197587 - DNA, 339 bp, Glycine max
  unsure (1)..(339): unsure at all n locations
ttaaccttagtttcactttagttattaagcaattcaattaaaaatgagaaatcccagagaggaaacgtccgattgattttccgctttattttactaaaagatgctttctttattattatattattattttacctcttttttgatttccaacggggttacgacacgaccgaacggtcggaattcattntaaccgaagttaacagataatacaattcaaacgatcgggggaaaattattatatttttaggttaagcgagaaatgacttaaataaaatggctttagcccgtcaaagggggtttaaaagtaatgaattgaaattaaataccgaacacaatgtg

SEQ ID NO: 197588 - DNA, 423 bp, Glycine max
  unsure (1)..(423): unsure at all n locations
ntntgatctgcannaatgcataccattngnnttcatgtttgctcatccttgcgttttcctctacaaaacaaaaacaaaaaagggggaagcgtgaaacttcacactacattcttagtttcatgtgttaggcaccacgagccaaccatgttgggatcataaacccgtttcacttaaaaaacaaaataattgaacatggtacctaatgcatggttaactaggaaatggtgtttcttcgggcatctcaatttcataattactttttccgtgcataagcttaaagtatgcccgagtcattcatccctatgagatgttgttgaagtattggcgatcagaattgccattccttgaattatagggttgaaccaagctcacgcttttacaaaaaggttcatcaagtcaagttgaaatatggaagtaaccgtc

SEQ ID NO: 197589 - DNA, 450 bp, Glycine max
  unsure (1)..(450): unsure at all n locations
ttatatggacgaaagggcaaaactgcgannagttggtatgatgatttatattcagnactccttggacctgagatgctacaacagattaacgaacaagtgaagttgattcgagagaagataaaagtatctcaggataggcagaagagctattatgatagaaggaggaagccactagattttcaggaaggagaacatgtgtttatgaaggtttctcccgtaaccggagtcggaagagctcttaatgctaggaagttgacacccaagtatctaggtccgtatcagattctgaagaagattgggcctgtagcttatcatatcgccttaccttcgagtttatcgaatttgcatcctgtgtttcatgtctctcaactgagacggtacaacccagatccatcacatatacttgtagtggatgaggtacaggtgaaggattacctctcctatagagca

SEQ ID NO: 197590 - DNA, 413 bp, Glycine max
gtcacctgcggcatgcaagctttaccagatcatataagattatgttttctgcaatctgcagatatatcctcccaaacgtcaaattctccgcctatatattcaacctttccatcactggcacgtggagtgaatcttcctccatggtgcaatactaaagttatattttcattcattctacacaatcagaaaccacaaacattgtcatatattaggaaataaaaaacctacctcaaactcaaacatagacacatcacacaacaacatgcaatgtcatctataaaaatagagaatcataaacgaaaataataaaggatcataaacctccctacgaagcaggaagacaatgcaaatgaaaccccttgaacatataaaaccccacatcaaaccacccaaacaatgcaaacaaaatgaac

SEQ ID NO: 197591 - DNA, 435 bp, Glycine max
ggtaggaactagttcagtagagaccaattatgagtatttagcagtttgttgagaaggtggcctggccaggagcccccgaccttcttttgtgggggataatgaaagttttacagcccaggcacctcaacagcatgagccagaaccagaaaatgatcactcatctgaaaccaccatctttggagctgttgattggtaaaaagaagattagagacgagatccaatgaggctgctcatcatgaaccagtgctagcgtcaactgatgcaccatttccaagagtggatccatcttcacctctgcacgcagtagactcttccattcctgtcttagagatacatgagggccagaccataccagttctacctttggacacttctcctccagctactccagtatggcatctaacagataagaaaaatgtcagatacaggacaatc

SEQ ID NO: 197592 - DNA, 434 bp, Glycine max
  unsure (1)..(434): unsure at all n locations
ntgacgtaatgaatgtgcgtattatctgattttacatttttatcaaagggatggcaagagtatatgaaaataacaataagttcgcagaaacttgcaatctgggattatggtatcaattcaaagaaagtttatagtgagaggccatcatattagttataaaaaaaagaatattacctgaagagtagagacaacgagttggagctgccacagtgaacaatgacgtttgacgctgaatctgcgaaagtccattatccttaacctctcacaaactatatgccattacaaccacctcttcttgggttgatccactattctctataactgcagacaacgaatacacaatgcactattatataatctttatcgaagaaatttgacattgtaggacgagattctagttaccacaaaatgtcaaaaccattcaaaatcatccc

SEQ ID NO: 197593 - DNA, 185 bp, Glycine max
aactggtgaactatacaatctaaattacttttcacaaataagccactaaccaatgcacagtgaaaaaaaatacaactgtttatttataagggatgtacacacttggatcaagtttatagtatcccacttggtgacctaatctgaatgcatgtggcaaaaaagaccctatttaaagagtttgaatg

SEQ ID NO: 197594 - DNA, 486 bp, Glycine max
  unsure (1)..(486): unsure at all n locations
acacatgaatactcaagctaacagattctattagaattatacgttttgcaatatacttatatattnngataagttaattggagtactctatgagtgaatatggatgcaatagtttctgtatgcacatgattttactattctaacaatccaataagtgatgatccattgcttgagtgattatatttgtttgtttaataatttttatggatattgaatttgatcaatctaatgaataattaatagaatatttattaaatgaataattaatagaaaatttattaaatgaataattaatagaaaatttattaaatgaataataattttgcatacaatttaaaagtaattattgatagtaattcgtaagggtaagagtaaaactaactaacagtaggcttgttgaagtaagccacaagaaatcatcttcgcgggtcctccaaccacaacccttgttagaatgttaggattggggatttcttatttgaatat

SEQ ID NO: 197595 - DNA, 343 bp, Glycine max
atgctgagcacgataacatcagcaagttaatcccagggtgtgaacaagctgctaaaacttgcggtacaagtttccccttttcacttacgcacacccctttattgttaatgtatttggtttcactttgtcatattctttgggtttgattttttagaaaaacaaggtggacaaagttgcgcgactgcgttatatatttgcaaaacatatttagtcttatcctggattatgctggcaacattaatgtaagtaataatgaaagaacaacacattctcttattcctacttattaagcgtgggataaaaatggtgaagttcagtttacaattgcactgtgctgatcaca

SEQ ID NO: 197596 - DNA, 491 bp, Glycine max
  unsure (1)..(491): unsure at all n locations
ctcagcttgcttctacaatctcccnctttttgatgatgacaacttctgatatcaagaaacactcacacactntttcctagtcgatcactcacataaattctccccctttgtttttgaatttatgcttatcttaaaaataagttgattactcatgtgaattcttgatttaatcccatttctctccccctttggcatcaacaaaaagccaaagtgcgtatcaaacttaaggtatacaaatataacttaaacatccataaaatgttcatgaaaaaatatcaaccaaatcatgaagcaagaagcaagaaccacgaaatccatgaagcaaacaaccatgaatagattaattataaactccacatggtcaaataacatacttaatattggtccaaacataccatgcaaataaggaaatagtaaattgttcanataccataataatatagccaaaatacaaggctgaaaatcanagtagtaataatattaanatatga

SEQ ID NO: 197597 - DNA, 386 bp, Glycine max
aattgatagcatagtaccattatgagacgagctgcttcagagcttctgaccaccatccactgtccttcttcagaatagaaaagccattcacgtgcacgagtctgagatttaacacttaatcatgaaattcaaacagaattactgcataatttgatgccctaagtgtaaactgcagatagatataaaaaaggaaatctgaaatcctgtggaatcagcctcataaatgcatattgatgcacattgcaatccaaaaaattaataaacaaaatcagatgaaaaaaaattaaagaagacctgagaaatactgaaactcaatctgccagtcacaaacatacaatacctttttcattttagttgaacaggttggactctagaatagaattaaa

SEQ ID NO: 197598 - DNA, 464 bp, Glycine max
  unsure (1)..(464): unsure at all n locations
tctaaaattaccaacaatgcatctcattaacgacgttatttncatantttatgacaatgactattttgtaatacttatacaaacatagagactattttntacatttcaataagatagagactaatttataaaatgagtgcaaagatgggatcaaaatacctattcactcattaaataaatgaacacttagaaaaggtgtcaacatcgatccaaccgatcacgtaataccaagtgtaaatagaaggtcctagcacaattatatttaaagcatacgcattgttgaggtcaagtaacaggtccccttcaatcagttggagaattaatcatgcaggcaagagaggatgggttcacactgaggcaaaaataactaaaggaaaaagacagtacagcacctagtaaaaataaatcacaaatggcataacatatacttatatgcagaacacgtaatgaatccgagatataaa

SEQ ID NO: 197599 - DNA, 467 bp, Glycine max
  unsure (1)..(467): unsure at all n locations
gctatagagtatttaacctcatacaaggaagattctgattttcttggacgcgtttcttatggagaatgagaaanggagctggaatgatactgaaaagatgctgatagctgatcctttgaaaaatcaagatgagttaattgatgatgcacccgtgagaggcactatattgctctcagatatttatgaacgttgcaacgtagcagttctagaacctgtaggatattgggatgcaaaggaagatccaatatggagtgctgcaatgcacgaggagcttgtcatgattgattaaaatcagacttggaaacattcttgaccaaagctcttccgagaagcagatttgatgtactaagagagatacttggacttgtcaaccactgatacaatgacgagtgttgaatgtgtgtatcaacagttgcctataatgagtgcctaagactggttatattcagttacaattatactttatg

SEQ ID NO: 197600 - DNA, 234 bp, Glycine max
cctgcggcatgcaagcttgaaaaaatagcttgagatactaattgttttaaggggaatggacagctgcagctgcttaattattaatttcagcacttcaattatgcttttggatttaacaaggacaattgggtatgtttcactctggtatacacctgctacaggaagtaagcataatcaggagcaacagacatgtagttcaaactttcattatgattatgatgaaggggggggggg

SEQ ID NO: 197601 - DNA, 475 bp, Glycine max
tgatgttccagcagggttatattcagtccattgctttctcttatgtcggctggcgctgagggatcaccaatactgtgcattctgattaaaaattagggtatgtgtggataacttggatttacattttttggttctcttttgtctggaacctatgaagcacgaacactccagtcccttgtcatgtctggtatctgacaccgacacgatactcatactacattctatattttgaacattacaggtgtccacatgtctgtgttcggtgtccgcgtcggtgtcggtgcttcataggctggaactgataaattggcatgggggtgtggtgtccttatggagcaagataacttcaatgctgtgcaacaactattgtagcttatgtttacacttacttataacatgcctaagctcttcataaaatcattttgaataggaaactatcgatatatacgattaattgacatttcattatcactcc

SEQ ID NO: 197602 - DNA, 422 bp, Glycine max
  unsure (1)..(422): unsure at all n locations
ggaccttaagncgaccgaggcatgcaagctggtattgagggaaaaatttttgttttttcttatcnacncncaaactcattaagagatgatttgcagagtaaatgaccggttgaaaatttattttacaatgattagccaagattacggcacaaacgatcagttaaaattttattttacagcgacaaagtgagattacagcataaacgatcggttgaaactttgttttacagtgataaagtgagattacggcacaaatgatcggtcaaaactcgctttacacaaagaaatgagatcactgatggtagaagaatgaagatgaatatgtgaaaagcaagaggggacccctaagggtgcatagagcgaattcaaaacttcaaaattaaattaaccaattgatgaatgaaaacagacgaaaacgatgt

SEQ ID NO: 197603 - DNA, 439 bp, Glycine max
  unsure (1)..(439): unsure at all n locations
ggacctataaaactcagcttgagcacactccgacatcttctgcagatcttctctttttatcatggacaattgtcttgtgaagctgcagaccaaatttagagaagatccaacggttaacgaaggctgggcagcgtttttatcgaggtagctttatgtagcttcctcaagaagcttcattaagaggcttcttcaagaagcttccccgtggcttctttgagaagctttctcaagaggcttctttgagaagttagatccttatctacccacactcttctattaactaagttaacctccttgaaaataattacggataaaaataacgcaataaataatcaaacatcaaacataattactaattatatatagatatatatatcacggtgttacagtttgaggatgcaacacanatctaatgccaagatgggtgagggtaatctca

SEQ ID NO: 197604 - DNA, 386 bp, Glycine max
agcttgatgcaacatttggagatttaattaatcttcgagatgatgcgctccatgagaggttggatcaaatgtagaatagagatcataatgaagaagaaaggaggagaagagggaatgatggtgttcctagacaaaaccgaattgatggtattaaactcaacattcctccatttaaaggaaagaatgatccggaggcctacgttgagtgggagatgaaaatagagcatgttttctcatgcaacaactatgaggaggaccagaaggtgaagcttgccgccacggagttttccgactatgctcttgtgtggtggaacaagctacaaaaggagagagcaagaaatgaagagccaatggttgatacatggacggagatgaaaaagatcatg

SEQ ID NO: 197605 - DNA, 465 bp, Glycine max
  unsure (1)..(465): unsure at all n locations
ntatatagactntagagctttgatccgttgagagattctttctatatgttgnctaatagctntggcgcttgactcgaggccgttactgtgcaaagagagagagagaaaaaaaagggaccacaaacactttctacatcatatctttagagaagtacatcctgttagtgttgcttagtgcccgaggctaactttcagcatacaaattgaaagaaacgttagcagcataagacaaaaggagtttagaatgttaagacaagacaatttacctcttctcttttgtgcgctatgggaaaagttccttactgaacatatggacgttactttctcatgatttttttcatcacttgaggatcgagtaactgtttcattgcttttgtactacaagccaagtgctaaagcacttgtcttctcatcattgaacgcagaagcagtatcatccaatggttgatactttgcctttcgtct

SEQ ID NO: 197606 - DNA, 445 bp, Glycine max
  unsure (1)..(445): unsure at all n locations
aacactcaagctttaaattgaattaaacgttcagaactactggtattgtattctatatatgcgnaatcgattacacagtgcaaatcttgaattcaacatttaatagctggtgtaaatcagttttggccactggtaatcgattacatcctctggtaatcgattaccagagagtaaatttgttgaaaaaaactttttaacttaaatatcttggccaaaccttttgctacttaaattggaattcccttccttcttaatataccctctctaagactctagagactgtcttgatcatccatcttgaatatttttaatttctttgtcttgaataaaactctgagacgcatgtgaaactntggcatcatcaaaacattcagcttgatcctttgtctactaaatgatggctggtatatttntgaatgagcaaaatagtttacaggctatgagt

SEQ ID NO: 197607 - DNA, 349 bp, Glycine max
agataccattttctataggagactactgtgatgaagttttatgtgatataatccctatggaagcaaggcacattttgttgatagaccatggaaatttgacaagaaagtaattcaaaatggtctcaccaacgaaataaccctcaaccatggaagcaaaaagttcaaacttgttcccatgaaggttacaagtggctgcgggatcaagtacaaataaaactcaaatgggatgaggaaaagaattgaataagagaagagggattccttttaatgtttaaggaggagtgtaaagaagtaagtgtcttctccacaagttagttaaaaaagaaagtcttttttaataaagacaaac

SEQ ID NO: 197608 - DNA, 446 bp, Glycine max
  unsure (1)..(446): unsure at all n locations
taaagtatgcccgagtcattcatctctattttatgttgttgaagtattggcgatcagaattgccattccttggattatagggttgaaccaagctcacgcttttacaaaaaggttcatcaagtcaagttgaaatatggaagtaaccgtcttgcaaaattggggcaaaagatgaatcgagtcacatcactgcttcgtctattgccaaacatatttaggattattgatgtccttgttacttccagtttcaccttgacaaagatgtcatggaccatgttgaaaatctaaattgattcaaccccatatcttgcgtaaaaattcgcaatacttcaactgtacatcattcgcatgcatccatgcttttcattggttgcattgctcgttgcattctttncttgaaaaataaaataaaatgaacttaatcattggttataaaaagaaagggacac

SEQ ID NO: 197609 - DNA, 333 bp, Glycine max
aaattaatgatgaaaattgtgcatttttaggtgaaacaaaggctaatgtttgaattgcaaaaagcaaccgttgggctaaacgcatatccactgctaagcgttgcttcaacgcgcttagtgcttaggagaatctggcaaagcctcaacatcaatgccgcgtgctaagcacgagatcaatgccgctagcgcagtatgtgccttcagccaaacctaactcgagattgttgctgaacccaattcacttactcccactaagtgcagtgtcgcaattccagagctatttaatgcctggcttgcgtgaattaaggtaagctctaccacctttatgaaact

SEQ ID NO: 197610 - DNA, 435 bp, Glycine max
  unsure (1)..(435): unsure at all n locations
anaaccccttgttcattactaaatatgcttatattaatcgcaatcacaagcaaggtatcctaattacatgcaagagataagaatgaaaaaatagaaaagggaaagaaaagctaggttgcctctcaataagcgttcttttaacatgactggcttgatgcatcatcctgttatctaggatcaaatatagttcctacttcaaggaccttcttctcaggtctcctttcctccatcacatgcactttaagacagacattctggctaggtggatctttgtcctcatgaaacaaatcanagctgatcttctgatcttctatgcccatctgcagcatcttctttcccatgtctaccatgcaacttgcagtaaacatgaatgggaggccaagaatgagaggaatgtcagcatcctcttctatatctatgacaacaaaatcaact

SEQ ID NO: 197611 - DNA, 439 bp, Glycine max
  unsure (1)..(439): unsure at all n locations
caagcaccgcagctgcagctggtatctcctcttactcatattaattattgtttgagncttctttgtggctgtcttactggtttaactccatcctctaaatttattcgatgcatacatgtggatgggctaataccaggaatgtccgccagggtccaacctatagccttcttatgcttcttgagaactgacaacaacttctcctcttgctcatcagcaagggaggcagatataatcactggaaaactcttgctatcatccaagtaagcatattttaaatttgatggcacaggctccaattctggtgtggtcggctggacagtgtgtgaaagagatggtttctcaccctttacctcataaagaaagtcagaggtatgtgtacttcctgaaacatggatagtcctatctgactctataaatcaatcttaagaggtaaacacct

SEQ ID NO: 197612 - DNA, 291 bp, Glycine max
ctcttgctcccgctgaagttacctggatccagacgtagctattctgaattaccggccacacacactacaccatgtgtcttttgttctttgccggagaccaaactcctggcgaacaaaactaaagtgaatcatgtccctgcatttgaccaatatgcagacatcctcaccaaatctcttacccactctaattgtactctgtgtagggacaagctcatagtggcaaacaaagattatgtcaacccctcatgaactaggcgggatactatagtagtgagtagaattactactttc

SEQ ID NO: 197613 - DNA, 482 bp, Glycine max
  unsure (1)..(482): unsure at all n locations
tcgtcctcagatccctcttgttggactaggcccaatttatactgtcctcttaggtttagactaacttaaactgagtttcattcgcagatccctcttgtaagactagactcagctcaagcagctagcttcatccgcagatccctcttgtaagacaaggcctagactaaacaacattattgtaacaacataattaaaaccaaaacttaatccgcagatccctcttgtaagactaagtttcgatcctacttcaatcaagttctaaggcaacagtacatttcccaatgctaaagtcacctaactatgcacacaaacgggtgatcagacaaaaagcatacaaacattaagcattgaaggaagcattgaacacagaanacataatcaattagatattaagtatttacatcggctgttcattagaaatccncaactagggtggttagctagccattatagaagaaaccctaacnaacataataagctta

SEQ ID NO: 197614 - DNA, 383 bp, Glycine max
agctttgatggtgtcgagaacaaatcacatgtttgttcttttcaaaaagggggagaatgtgaatgtatgtatacatgattttgatgatgtcaaagaagaatctaacaaggctgcttcaaatgataagcatttgcttcaagaataattcaagattgcctcaacaaacaaagccttgttttaagattcactaaataccaagccttgccttaaaacaaagtgctttcaagacatgcaaggctctggtaatcgattaccaggaagtgtaatcgattaccagaagacagggttgaaaaatagctgttgaaaaaggttttgaatttgacatttcaacatgtaatccattaccatatgtctgtaatcgattaccagcaatgaaactttgg

SEQ ID NO: 197615 - DNA, 429 bp, Glycine max
  unsure (1)..(429): unsure at all n locations
tcctttacatcaatntcaataaagagaggaattatattttaattcttatataagacttatttatctaattcacacttgttaataaaattatttattaataattttgtttataatattaaatttaaggtaaaattataaatttgatctccctatttatctttgtatttcattttggttttaattttgggattaaggactgaaatatctaaacggtaaaaaattaaaagattaaatttataaattaaattataaagggatcaaaattatattctaaaataaatagatgaaccaaatttataattttatctaaatttaaacactgttttagtttcttaaatttatgctatattattttttatccttaattttaaagttatttttttagtaacttaatcttgaaaaatattctttttagtcttgacatgataa

SEQ ID NO: 197616 - DNA, 205 bp, Glycine max
agatacagcaagagttacacatgctcatatttatagactaggtagctttcttgagaagttaattgacaaaactttcctgagaaactttttgaaaaaacttccttgagaagctatgagcgtagctactcacacccctctcataactaagctcacctgtctgagaacctgccttaagaagagacttaaagaagctagagcttatcct

SEQ ID NO: 197617 - DNA, 491 bp, Glycine max
  unsure (1)..(491): unsure at all n locations
acctaagaaactaagctagaagcagaaaagcacntaggttccagctcattgttttattaaagataacaattggtacctcaaagccttacactggggcaatgaggggcatcgtgcatgagccttaagtgaacataggggcagatcaaaagttcacacccatcgatgtttttaaacaagaaaaaaaagggggagacatgccctggaatttcaatagattgattaaacatcaaacggctccattcccgtcactcaaaaacggtcaagtgactaaatcaaacagaacatacactctgagggagttcccggagagattttcaaaaagataggatgaggttgcatgaattatcacctctttcaaaaggatagtcaatctgtgttttccaacaaaattaaatcaaaatcaaaatcaccaaatatggaaagaatgtcatgaacgttgtacaactctccattacattgcattggttcatatgaagtctgcatttaccgca

SEQ ID NO: 197618 - DNA, 325 bp, Glycine max
tcaaacgttaaaaaccagaatacacaatacccttaagctaaccgacaagcaatttttggatgaaatttactaccgacagtctttcacgtatgcaggtaatcaatttcggtttcaatgtatgcaactgaaaaatgatgctgatgttaacacaatgttaatgtgtaatcatgaattttcgtttgttggtccgattgagttattatatagcattgctagaaccccagatggtattttaaacttacttgaaactactatgacccctactcatgatgccctgctatattacaatgggaggtggaacatgtcacgcccaaatgagtttgtt

SEQ ID NO: 197619 - DNA, 472 bp, Glycine max
  unsure (1)..(472): unsure at all n locations
tgggttcccaattaagaaccttctattttttatgatgtctcaaaaatcaaaatgattagatacactnttttcgtaagcctcattaagatatgtggctccaagtatttttaaccaatcctttgtgaaaagaatctatcaaatccactcatccaaccactctatatcacactagctgaaaatgttatgatttgtgaaggaacagagcagcaccatcacaactacttagtgcttgcttcttgcactagcacaactactcagcagaaacaaagaagaagaacatgactttaaattaaaacacanaaaataaacaaaatgcccatttcgctcatgagtgacacaaccacaagcattacatttgttaacatcagtcctttgtagagtcaatgtanaaagacatataanaagtggtttttagtagtgattgtaagaaaatgagatattaaatatgaaaaaaacatctttgatatatcac

SEQ ID NO: 197620 - DNA, 366 bp, Glycine max
  unsure (1)..(366): unsure at all n locations
cacatcnnanagaaacaatatacttgtgccaagggtaatcttccttgcaaccgagaatgaagggtaggacatcaacttctagctttcaaatgaacacgcaggggaaacatggggctaagctgaaaataaatcactcatggtgtataaaactcacaaggaaagtgtcttatcctattcccaaagcaataactgcaccatgactctattttgcacgcgacttcatatcgaatcatagatcaaacgtacgatcacggaccaataggattttttcgaggtcagcgtttntggagagagaaactgggtgttcggtcttttcctctctgttcatgtggggtgggatattgccagtcaagaatgattctgagt

SEQ ID NO: 197621 - DNA, 461 bp, Glycine max
  unsure (1)..(461): unsure at all n locations
tgttggagttatcatcacaagatgcattgttgtttcattataagttgctttctaagcaacttgagatcttaacagaaacacttggtaagtagccaactaaactgtctactggtcaaccttcacattcttctattttataggttataggttggaccatttgtggtcaaccttcattgcattcccattgaagaacacactcatgaagttcattacatgggaaatcaacagagacaaggatacaaccaagaaggattttcggtgttccagcaaggtccctataattagcaagggcaatggagatcacaccctgacaatcaattcaataaggactaaggtggacctttcaacaagccacctcaataagggccaatatattttcagaggaccaccaaactggaggagacactatctcagtttatgcaaatgaccatgtncaaccataagagtactgagtcatccct

SEQ ID NO: 197622 - DNA, 365 bp, Glycine max
  unsure (1)..(365): unsure at all n locations
gcttcttagtttcagatgatgcagctgtgtttgtatctacctcatgcactcctctaatgactatagcatcatttctggcgctaaactgctgggagttggaagccatcttctcaattaaatttctggcttcagtaggagtcatgtctccaagggctccaccactggcagcatctatcatacttctctccatattactaagnccttcataaaaatattggagaagcagctgctctgaaatctgatggtgagggcaactggcacatagttttttaaatctctcccagtattcatacaagctctcttcactgagttgctaaaacctgagtatccttcctgatggctatggcctggagcaggaaatgttt

SEQ ID NO: 197623 - DNA, 468 bp, Glycine max
  unsure (1)..(468): unsure at all n locations
ntgagggtgcgcagcccaccatcttttatagtagagtttcgataatgtgtctaccatcacgattatcgtctccctttccattattgggggtaccacctgngccgccagatccctccaccttttgggcgtgttctttgaatgatccgtccccctttttgcacatgttctgtagttgcatcctatccggaaccatatcaaaattgtactgatactgcctaacaaaggcaaccattaggttcttccaagaatggactcgggaaggttccaagttagtgtaccaggtaacagctaccccagtaagactttcttggaaggaatgtatcagcaattcctcatcttttgcgtattcccccatcttctgacaatacatctttagatggttcttgagacaagtagtccccttgtacttgtcaaagtccagcaccttgaacttgggaatgaaccatgttgggtattaggaacaacttt

SEQ ID NO: 197624 - DNA, 422 bp, Glycine max
  unsure (1)..(422): unsure at all n locations
agcttgacttatgaattgattntagcctttttttcactttggntattactcaattcgattaagaaagggaaataccaaagaaaaacgtccgattgatttttttgatttttactaaaagatattttttgattattatattattattttgcctcttttttttttggttttaaaacgtggttacgacatgaccgaacaatcggaattcattttaacagaaattaaaggatgttataatacgaatgatcggtggaaatttattttatttttgattaggcgagaaaatgacttaaataaatgaatgattgaagcacgtcaaaagggggtacggaaagtaaatgaaatgaaaataaaagcatgcaaaacaagtggggaccaccaagggtacatagaatgaattaaaaagttcgatttctggaacttac

SEQ ID NO: 197625 - DNA, 345 bp, Glycine max
  unsure (1)..(345): unsure at all n locations
gcgtctcaatatattatcggcctgaatcagacatccgaatcacaagttgtggcgggccaaatatgccatgtgctgacatgttcaaggttgaacatctcgatatattatgcacctgaatcgggcatctgagtgaaaagatatgccatatgagttagccgagagcttcgtgggtcgatggcgagcgtcctgacatattattggcctgaatcggacatccgagtcaaaagttatggcagnttaaacttcccatgtgcttccatgtttaattttgagcatctcgatatattatgcacctgaatacgacatccgagagaaacgttatgcgcgcatgagacatctgagagc

SEQ ID NO: 197626 - DNA, 324 bp, Glycine max
aagcccctcttattcattattggaacacacgcatctcaaatagagaacacttccttctctcaaaagcatcacatctcacactacacatctatgctattctcaataacctcttaaaccaaaatcccaaatccttcactctcaaaaactactccaacggtttaaatgcaaacaacaacgcgtttgaatgatatagtgtcggttcacctacgttggttcaacacgagaagaccaaatgcagtgaaaaacaaaaccctttcctctactggaaagcactgattgcgtcaatcaacactggagggtgacgatgatcgacgtggacacaca

SEQ ID NO: 197627 - DNA, 426 bp, Glycine max
  unsure (1)..(426): unsure at all n locations
tgttcaattctattggaatgtctccactaatcttatntgagaataaggcaagtgtgctgagctttgtcaagtttccaatagtggaaggaattggccctgagagtttatttgagcgcagactgagtttggtgagctttgtcaagtttcctatagtggaaggaattggtccagagagattattcacacctaaaccaagatgagtaagtngtgacagaaccccaatttggggaggaatacttccattcaatgagttatgactcatatctagaatgaggatgtttggaagtgatgaaaagttgagagtttgaagcgtacccgttaacccaatacctctaagagttatgttggagacagatttggagtggcacaagcaattcaagccattgctgaaggactattgcaccccatgagataacaaacctgact

SEQ ID NO: 197628 - DNA, 262 bp, Glycine max
tagatcatagatctattgagttctctatttcagatcttgaatcaaaaatgtcatcacacatgaaaatgggtgcctacttggtaactgcagtttgtttggtcaataatcaataatataacatctctcacaaagagatcgaggcaaaggtctcacctgagataaagcaagtgtaagatcctgcataatacgtaattggattatactctcataacaagcaaataagcattttaatcctggggagccctattacatatttacattg

SEQ ID NO: 197629 - DNA, 209 bp, Glycine max
ggaacttaaatctaagcgggcgaacttccttggattttgttctcttgttaaacaaccattgtcaggctggtgttggtttgttcctcggacccaaattgctcagctaaaggggttgttctattacccccatccctaagagtcttgggatattaccacactccaatattctcaattcatactgtggaccaacatgtggatgtcaaagtata

SEQ ID NO: 197630 - DNA, 422 bp, Glycine max
  unsure (1)..(422): unsure at all n locations
agcttacacaaacattcactagtgcaacacactactttctatttgtcatcatcaatccgtagttccaatcaatcatgctcagtatgatgcatgcacctgacctcaactctcaaatgcaatgtggtaccatccccaaggaaatatcctaagcgtgtccacacgacactctcatttaggaaaactaggcagtaagtgttgaggtcaccctgtcatgcataataaactccccccccccacggtgatcagcctgagtctcaagggagatccaaaccgagtgacatgcccccaagtacaagtatttttcctcatggaaaactatgagtacttactgacgaagtttgtacttattctatgcaatattaagtatgaaacatgagcatcatcaatgctatgaccatggataanttaagaatttaagccat

SEQ ID NO: 197631 - DNA, 456 bp, Glycine max
  unsure (1)..(456): unsure at all n locations
tgtaaacactaaggactcttgtaagctgggcgttcatgcttgcgggagtgatgacttcctattcttgagggcggtgcctggttgtctgccctttttttatgtatagatgtttgtttgaggtcctaggtgtcattttacccttgcttttcagtgtgctttgttggagcacttgaatgtgaccccttcccagcttcacccgaacagttagacgatggtgcaagcctttgaaattctatgttctttcttcaacatctgatcgagtgtgtcggtcttcttaatttacttccaaatgaaattgagtggcaagattggatgggtctccccttgaatagtgtgtccaagaagttgtttgagtttgattcanatatctttcatcnatttaaggaccattntttcaaggtcctggctactggtgtcgtggctgatgatatgtcattgatgttcaacanggatggg

SEQ ID NO: 197632 - DNA, 384 bp, Glycine max
agcttgcactaagatttctgaggcaggttcttaatgtatcgagacattgggtattgaacaatggaaactcccgagaaattaaaatcgtcattacttttcactcggatgtccgtatcaggcactctagatatcgagacgctcgaaattgaacaacggaagctctcgagaatttaaaatggtcattactttacacatggaggtccgattcattaaacattacatgtcgagatgctcgaaattgaacaacggaagctgacgagaattgaaatggtcatacttttcactggatgtctcatcacgcgctcatttttcaggctctgttatcgaaaattaactctcaaaaattaaatgggatccctttactcggatccgaatcgggcatat

SEQ ID NO: 197633 - DNA, 310 bp, Glycine max
agctacctagtctatatatagcatcatgtgtaacacattgctgtaactgtgatgaatgagagtcttgtgagacacaactcaacagtcaacttctctcccttgatcttccttcaatatcgtgctccctcccttgctctttctgtccctctttcttttcctccattgaagcatgctctgcaagcttcttatccaaggctcatcttggcggtgaagctccttcttacatggcttattgcttatgcgcctgaatcgaacatccgagtgaacagatatgaccactccagtgtctcgatatcatccgttgacaatt

SEQ ID NO: 197634 - DNA, 464 bp, Glycine max
agcttaaggaatcttgacacacctatacttactccactatataaccttcccacttaaggttgagggtttgactgttgttttctatgtctaactctctaactaagacactggtcaaatcaagggtttcctactcaagttccaactattaagctagctctagcggttgtaactaaactcacaatgataactgctaaatatgagttattttttataataaaaatatattgaaaatatctttaaaaatatttatttagcaattattttttacttaaatattaagaattgatatttttcttatttatggcttacaaatatgaaaaggagggattaaaagtaaaaaaatccagaaaatatcatacatataaataaggaagaattttttgcatcaggtccaagtccactccagcaactatagaaagggagtcaagtccaagtctactccaacaactataaaagagggagtc

SEQ ID NO: 197635 - DNA, 453 bp, Glycine max
  unsure (1)..(453): unsure at all n locations
ctggttgccaaaatatttggttctttcatcagttnttcatgaattctcaaagcctgacaccactctgtctctcaatctaattgcaaaaatattttgtttcagtcatcagctcttcataaactctcccaatactccatccctcaatctcgttacaaaaataaactgtttctttcatcagttgttcataaagtcacaatctctcaacactgttcctcctcaatcttgttgcaaaaatatagtttttttcatcagttcttttataaagtctcaaaagctcacatcactctgttcctcaattttattgccaaaatatattgtttctttcatcagtttttcacaaagtcataaaatctcccacaactccatccctcaatcttgttgcaaaattctatattgtctctttcatcagtttttttatagttgcaaaaccttacaccactctatccctcaatc

SEQ ID NO: 197636 - DNA, 376 bp, Glycine max
  unsure (1)..(376): unsure at all n locations
agcttcattcctttttcactcatgtgtccatgtctntgacgccacatggttgaattattgacagcctcagtaactgctaccatatccttatctgcaatcatgtaaagatcctcgcttctttccacgagccacaacaagattttcttttgttaccttccaagctccatctccaaaagtggtgtgatgcccctcatcatccaactgccctatggatattaagtttctctttaaagaaggaatatgtctgacattgggcaatgtccatagtgatccactagaggtcttgatgtcaatatcacctcttccgacaatggtcagagattttccatttgcaaggtaaacttttccaaatcttccagaaatatagttagacaat

SEQ ID NO: 197637 - DNA, 351 bp, Glycine max
  unsure (1)..(351): unsure at all n locations
tgagtntagataggaagatgccatgaattgaacagtttttccatttgtgctgcttataagctttttattccatctcgcattngttccttatgctcaaatgtcagctgctggtgtttttcattggttgagtaataataatattaaaatattaatcccggaccatttaaaaaggttcatttttttaaccattaaagggcctttgccttaaccattaaattgacctttttaaaaggcttggttctggtataacaattttcttaccaaagcttcttcagagatacacacacaaaattggacctcttttaatctaatagagaatatatctatatgtgcactgagaccgagaaaaac

SEQ ID NO: 197638 - DNA, 331 bp, Glycine max
caagcttcataggtgaaagtaggtgcattcttttcccttagagtcctctcacgaggtggaggttgtgccatgttctcaaaatgtgcaaaatcagaatgcttagaatcagaattctcaaaattataatgctcaagatcaggatgtttaaaatcaccaataacagaatgcacagattcaccagttatggaatgctcagaatgatcaagaggtataaaatgatgcctaactaatctatgaaatgtcctatctatctcaggatcaaagggttgtaagtcagatggattgcctctagtcatacactacattcagcatgcacacaactagcttcctt

SEQ ID NO: 197639 - DNA, 269 bp, Glycine max
  unsure (1)..(269): unsure at all n locations
tctagacattatcgtttacctcatgtatttccgacatgttnatctatattccacgttttcaaactttttttttcattttctttgatgctgatgtattgtttcctccaagctgaaagtgttctcgacactttccaacttgcggcggtattagagatatagagctgtttagttagctacaaattagttatcagtttagttagttacaaattagttcaattactctcaaattatttaccacttcggctatataacactcaatgtatccatgt

SEQ ID NO: 197640 - DNA, 345 bp, Glycine max
tccttttagtgcgtcacgtttaaaatcaagctcgattgttgtgcgggcctttgatggtactcggcgggaagtaatgggggaaatcgacatttcgattcagataggcccccacacttgcaatgtggtgttttaagtaatggatataaatcctgcctatagctgcctcttgggaagaccgtggattcatgccctgggagtggtcccttcaacgcttcaccagaaattgaagttcgcagtgggtggacttttaatgatagtgtccggtgaagaggatatgttagtgagctgccccttctcagcaccatacgtagaagcggcggaagagcattggaaacggctttccat

SEQ ID NO: 197641 - DNA, 443 bp, Glycine max
  unsure (1)..(443): unsure at all n locations
agctntaggcgttacatccaacattatggctattgtgccactagcaaggatcgaccccagcaactgagcaaaaatgtagagtggcacctacatgcacaaaactcatcatagcaacacactaagactcaatctcaaacaaaggaccatcaaatttaatcattataaattatagctcgcatatttttctaaaaattaaagcataccaagattattaatccatgttttttttttcctttcaaatttatagcttcatcttgaaatttaaaccgtgcaggcgctcgtatctataaacaccccggattcttttcctggttttcatctatgcctcttggttttttatccgcagttgagtttttcttacatgttctttctttacgaatttgtaacaagataggtgaagactattaataggggacttggtatatatatangggttctatgtc

SEQ ID NO: 197642 - DNA, 446 bp, Glycine max
  unsure (1)..(446): unsure at all n locations
tgcacagcactctcaatcaacccacccactcagaatatttcttactttaacagaggcaggttccaattttttcccaggaaagtgaagggtatgatatggatgactcttacaaagatctgaggattgaatntaaaggaagataaataaattaaaaaatggaaagagaattaattaacaagaaaaaggaaaaaaacttcatgcctcttttacatgtctcctttgttcatcttttcgagattatggacggctaggaatcacccaaaagacaatgatcgtgcggctgaggatctattgtgaagaaggtcactcggatcgatgccgtggcagggatgtgttacttctcagaaatatttgaagtacactgttgtcttttgcaagctctgtatttcggatgaggttttctgatggagactatcccgagntntaactttttttattagtttttt

SEQ ID NO: 197643 - DNA, 462 bp, Glycine max
  unsure (1)..(462): unsure at all n locations
agcttgctgacccgaaccccataagaattatttaatggagtataagaaacgttaacgaacagaagcacataaacaaccttcatgtcattttccgcttcgctcaagcccacaacggctgtgatgatgtcggaacaaagctccggccaccggtcaaggcagtggttaagggtgacctcggagggggaccggaaaaaaagaaacgtggtttgccgaacgcttttatgcttctagtctaatggagaaattattaagtcataaactgttattggactcaaacttcaatatcgggagaccaagtataaaaataaacaaacattcatatattcatatcaaatttcatatgaaatattcatatgttctgaaataaaactatatacaaaatttataatattcatagaaaaatatattaaacaaacagcanacttaacatttnttaaagacccaacattacataattcaaca

SEQ ID NO: 197644 - DNA, 441 bp, Glycine max
  unsure (1)..(441): unsure at all n locations
tattgcatataaagtactggatccattgatctagtttatttcttaccaatcatatttgttcggctaagattctcccggatttaactttgatccattaaatgttgatttttgtgcacaaattagagatgatgttgattgattaaggagttctccaagtaaccaggttagaatggttctctttggactgcaatcttagaagtaatgttacattggttggaccacagtgcttgaaaatttatagatagccttcattttttagttatttgagaatacgacattcttttggattcatactggtattcctctatttgctaattttttgtttgttcactttgattntatttaaaagattatttcttccccaatttcatggaagttctctttcctttntatcttagaataatctggcatgttgcagccattctctctcttgtatgaatg

SEQ ID NO: 197645 - DNA, 182 bp, Glycine max
  unsure (1)..(182): unsure at all n locations
gggatcctntgagnggacccgaggcatgaagctcgggaagagacggttttactttcctgtaagcacacaagggcccacctctgcctctttagacttgagcgtcttaaataacacccactggaacccccctgcccgaacgtctgcgctcctatgacccacctatgtttatctaaagaaaacct

SEQ ID NO: 197646 - DNA, 123 bp, Glycine max
  unsure (1)..(123): unsure at all n locations
taagcataggttgagcctactaagagaagttggactttgcttaagtgagatgacatgcaaagaanaaatgagctagtgcatggatttcaagcttaagcgtgaagtgaagccaacctgaacatt

SEQ ID NO: 197647 - DNA, 274 bp, Glycine max
ccacagactcttgcaacatgcgcaaatctctcattcatggcaaactgaattactaggctgaccaaggcgtcaagaccaccctcaagcttttattttcagtagatgaagatgaatctgcggccacctgatggactcctctaaggacaatagcatcatttcttgcactgaattgttgggagtgggaagccatcttcttaatcaaattcctagcctcagtaggggacatatcaccgagggctccaccactggcagcatgaatcatactcctctgcat

SEQ ID NO: 197648 - DNA, 427 bp, Glycine max
tgtgctttcctacaatgccaacctttcccatcctgcatattaaaaaatattcattgttcggttctttccacaaaagaaaaaattgatgtacatgtacttcctaatgatatatggtaaaaccatggtgatcattggcagaagtgaacaaattaacttggtatggcaattattccaccaagggtcttttactcaaattatccagaggtaaatcttaatttggaaaaataagctgtgtcataagttcttacttgttaccaaatataacatattaatcacagagcaatgttcttttggtctttcctgcattaattcaaatggaaagctcatcaagttcattctgtcaaattgattctcagtgcagaatagtaaaatgtatgtcaatcatgtcgattatgcctctcaatgttatagtactactgaatactga

SEQ ID NO: 197649 - DNA, 352 bp, Glycine max
  unsure (1)..(352): unsure at all n locations
agcttaggatgattcgccacaaagaataaatttctttgataaaaacctaagtgtcgcaacctacccttcgacgggagggcgacgcgagactcacgggagcgtcttccaaggaaggaaaacgcgcggagtcgccaccaatgtttatttaaggaaaacgtcggaaaaaccggaaaagacgtggtctatgaactttaagtgaaaggtttgggagttgtatttacgcacggngaaggtattaacaccccacgcgtccgtcacaaaggacggcaacctttaatcaagtgtgcgaatatgacttcaatttatgttacgttcttatgtctttttatgcctttntatantttttatcttt

SEQ ID NO: 197650 - DNA, 363 bp, Glycine max
cttacaaatctatttaagtccaagcctataaatgaaataatataaattctggacaagataagataagtttggatgaaataaaatctggacgaaataaaatctagatgaaataaaatctggataagataagattttataaaataaaactatctactctcttcaagttcaagcccaattccggattcaagcccaattgcttataattctcctaaaattaaattaaaaacataaaattagtcaagtaggcacaaatgataaaactgcataattaatttgacaattaagactaatcagtaataatatggtgacaagaagggttaagaaataggagaaaataatgacacatcatcagctccatggacg

SEQ ID NO: 197651 - DNA, 376 bp, Glycine max
agcttgcacctacaattcatggatgcagacatcctttaaaaaattcctacttacaaatatatagtttagataaaatcccataaaataaatatatattaaaataattattttatattaaaataattatttctaaaaatattataagacaatagtaaaagaaaaaataatactagtttcctttatatgaagacaaatattcttcatatctttcattcggtggacggcttcttagttacaaaattatttaattgagttttaaaatacaaaaatctaatcaagtaaaaaataaataacaaattagtacagagcaatgagattctatccaaagttttgtttctaggggcaaatgccagaattcaacttattaaaaatattt

SEQ ID NO: 197652 - DNA, 98 bp, Glycine max
cttggtaaatcataatgctaaatcaggagccaggtttataccttggaattaccctgctaaataccattttgaattaaaagttttttctgcctgtttgc

SEQ ID NO: 197653 - DNA, 425 bp, Glycine max
  unsure (1)..(425): unsure at all n locations
agcttgtggaganaaaggactcctattagattacattctancataggaaggagaatcacaacctatgagatcattgattactggggatgattcaagggtaaagtattgatccttgctgagttcaaaagaaatagtggttccctggctgctgctattatcatggatttcatggcatgaattgctttgtagtatttggtaatgagcgtagggatcaatatcttgtgcacgctggtggtataaatggataccagctgaagttgggtgcttctgagaagtttgcatctaaaaagaaattatttacttagtggagaaaagttatcacaacaatgagtggtcaactttgtattgtattctagcagttcctgtcacccttcataaatgcataaacttacatacagtttctggatgtagcctcctttttaact

SEQ ID NO: 197654 - DNA, 429 bp, Glycine max
  unsure (1)..(429): unsure at all n locations
agctntcaaatggtttgtttcagctgcatgattatgtgtttgttttcatttttcaaatttctaatttaattgtgtggatcttaggatgactattttgttgtatgattttccatttgtatatttgtgtgtttttcttattacaatatttggtttctaaagccacatattttagagacaagagcatcctctgcctatttttaatcttgcgctaatattgcaatatgttcataataacttcaactaaaggagatgttaacagtagtgagaatatataaaacaagggagtgcattttgttgtatccatgtgctgtatctatgttattgtgttcatcaaaataaaatcgttgggtatttagtcatgttttgttgatctagatatcttatttgaatttataggataattagagtggaactttgaatttgtttaat

SEQ ID NO: 197655 - DNA, 286 bp, Glycine max
  unsure (1)..(286): unsure at all n locations
tgtgcatccaataccctgatgaggatgtcccatatgttcttattactggactgattcatttgcttccaaagtttcatggccttgcaggtgaagacccgcacaaacatttgaaagaatttcacattgtctgctccaccatgaaacccccagatgtccaagaggatcacatatttctgaaggcttttcctcattcattanagggagtggcaaaggattggctatatacccttgcttcaaggtccatacgagctgggatgaccttaaaaagattcttaaaaaaaatttc

SEQ ID NO: 197656 - DNA, 440 bp, Glycine max
  unsure (1)..(440): unsure at all n locations
gcttaacatgagggcaatgttagaatatctataaaatatctcatatatgcatgatttccttctctcaagtattttttttttcttaaaacacttaacctgaaagtctaagcaattaaaaattaacatatcaacaatgggcttgaaatattggaaagtttactatttcttggagaaatttcaattataaaagcaagggtaacatggatcaaacattttaatccatggctgactagtttttgattttataaaaacaaagtagttgatgttgaagtttataatattaagaaagaaaattttcaatggaagttactttgccttcaggaggaatttgatcaatgtgagattatataaccattaagttacattggcagcctttnggtagcttagcctctgcatgctcgatcacnnttttcgtgcttagttggctgcttttctctctg

SEQ ID NO: 197657 - DNA, 444 bp, Glycine max
  unsure (1)..(444): unsure at all n locations
tcgattngaagccatagaaatgcaattatggtaaaatcattttatagttgattntttgtgggggcatagtttttagttcgagtactctcatcgtgcatgttgtgttaatagttagcacccgcccccatctctcgccgaaccaaaatggtacgacagaattaagaaaaaccataaatgcgacctggatgagagtttttcacataaataataataaaaataattatttatataaataatgcaactgaaaaattatttacgcgtatgatataaattattatttatgttgaaaaataagtttttcaagaactaatttcttaatgtgaatatttttattttttagaaactaattctaaaactaagatttttattttataacatgcattatgaaaatggtccttatgaatcgatttcataacagagattttatattttatttcttttgat

SEQ ID NO: 197658 - DNA, 371 bp, Glycine max
  unsure (1)..(371): unsure at all n locations
agctntaacttaatcaattcagaagctttttgtgctagatcattccacccaaacgcacccttcttcaaacattcggtcataggacttgctatagagctaaaattctggataaagcgtcgataaaatgatgcaagaccaaggaaagatctcacctccgaaactgttgtagggctcggccaagtcttgatagcatccacttttgtttgatcaacggatactccatctttagacaccacatatccaagaaacaccacactttcaaccaagaaatcacacttttccctcttcccatagagtttttgtgctcttagggtctcacatatttgctccaaatgagtgaaatgctcctctatagaattgctatacaccaa

SEQ ID NO: 197659 - DNA, 434 bp, Glycine max
  unsure (1)..(434): unsure at all n locations
tccattgtccaattntgaacgtctcgatatattatgtctttgaatcggacttccaagtgaaaagttatgaccatttgaatttctcgactgcttccgttaatagatttcgagcgtctcgatatattatgcgcctgaatcggacatcctagtgaaaagttatgatcatttgaattgctcaagagcttccattgttgaatttcgatcgtctcgatatattatgcgcctgaatcggacatccgagtgaaaagttatgatcatttaaattgctcaagagcttccgttgttcaatttcgaacgtctcgatatattatgcgcctgaatcggacatcctagagaaaagttatgatcattggaattggtcgagagctttcattgttcaattgcgacgacttgatatattatgcgcctgaatcggacattcgagtgaagagtat

SEQ ID NO: 197660 - DNA, 404 bp, Glycine max
agcttcaggttgctcattgactccaaattgattcaaagaaggacaaagatctgtatggtgatctgcaaaagaacatagaccacagactcttgcaacatgtgcagatttctcattcatggcaaactgagttactaggttgaccaaggcatcaagttttccctcaagcttttattttcagtagatgaagatgaatctgtggccacctcatggactcctctaaggacaatagcatcatttcttgcactgaattgttgggagttggaagccatcttcttaatcaaattcctagcctcagtaggggtcatatcaccaagggctccaccactggcaacatcaatcatactcctctccatgttgctaagttcctcatacaaatattaaagaaggagttgcttacaaatctg

SEQ ID NO: 197661 - DNA, 345 bp, Glycine max
  unsure (1)..(345): unsure at all n locations
taggtcttggacatgcatcgtcatcacgccgaagaagtcatcgcccttcgacgtgaaaatgcacatctacaagaatgtaataggtcacaacaacccanagttcaggaagagacattaagtcaagactttcagtgtggtccaaacccttacttaaatggatggcaagaaactattttcccatcacttaatactttggggaaaacagtgctaccattcaagaacccttttatgccccacatcttggaagcgactctttcttcaaactggaaatattgaccattaagaagtatgatggtactaatgatccacatgaacaccttgacgtatacattacccacgtaagct

SEQ ID NO: 197662 - DNA, 433 bp, Glycine max
  unsure (1)..(433): unsure at all n locations
agctngatattccaactatctgtcactggtgttatcacgttgaaccggttattaagtcacatagattgcaacgcttcatgggtaatccgattattcctcctcgttatctcatagaggatgatcatgttgctgatcgaatcatccctgattatgaagccttggaggtccaaaatcaaacactcctggtatggctgtagtcaactctttctaaatcagagttggcgcgtgttatcggttcacatcatttctatcaggtttgtgataaaattcatgagcattgtagccttcacactaaaactcgagcacgacagcttcacactgccatgagagcagttactattgacggcataacaatcgaggagtgcttgtgaaagatcaaagattatggatgaattgtagtgtggtgcccctgtctcataagaaacattgaccc

SEQ ID NO: 197663 - DNA, 285 bp, Glycine max
  unsure (1)..(285): unsure at all n locations
ctcagctttcttatagaccaaataagcatgcataaaagatttatcttattgtnttgtttgnacatttgatttgtgtgatatcattcttttgatgctggataaaaccaatttaaactccacctccttcaccgaagcaatatctgtgacttcaaaatatccaaacttttcaggggcttangcataacttcacctaagtagcttttaagggttgcaatccttgcacataaagcaactcatcaaaataatccaaaaaatatcggccacttattaatctaccatcctaaa

SEQ ID NO: 197664 - DNA, 449 bp, Glycine max
  unsure (1)..(449): unsure at all n locations
agcccgaccaggcgatgtgagtgaattcttatctttcacttagntatcagccaatgcaattaacaatgagaaatcccaaagagacaaagtccgatcgatttttgtgctctattttactaaaagatatattttcttatcattatattattattttaccctcttttttttatttccaacgtggttatggcacgaccaaacggggggaattcattttaacacaaatgaacgaatactacaattcaaatgatcggtggaaatctattcttctagattacgcgccaaatgacttacataaatgactgaagcacgtcacaaggtggtacgaaaagaacatgaaacgagaataaaacctccacaaaaattggggaccatcccgggtacatagaatgaattgaaatacttgattcgcaacttacccgtgaacaatgaaaacggatgaacagcggtga

SEQ ID NO: 197665 - DNA, 394 bp, Glycine max
  unsure (1)..(394): unsure at all n locations
ntgaatgcactattcaatggagttgacaagaacatctttatactgatcaacacttgcacagnggccaaagatgcatgggagatcctgaaaatcactcatgaaggaacctccaaagtgaagatgtccagattgcaactcttggctacaaaattcgaaaatctgaagatgaaggaggaagagtgtattcatgacttccacatgaacattcttgaaattgccaatgcttgcactgccttgggagagaggataacagatgaaaagctggtgagaaagatcctcagatccttgcctaagagatttgacatgaaagtcactgcaatagaggaggcccaagacatttgcaacatgagagttgatgaactcattggttctcttatacctttgagctagactc

SEQ ID NO: 197666 - DNA, 421 bp, Glycine max
  unsure (1)..(421): unsure at all n locations
ngctnggactgtgctagagagtatttttttgtctcaagngaatcaagagccatttctagggcaaaattgggtgttgaggagtcaaattttgattcggcggaaatttaggtgtaaatccagtttgagcaagtttagattgatgttataaacttgtgtgaggtgagagtttgctccaaattaacctcattctcacattcacttttcaaaccttgaacatccattaaaatgaggagttttggacacctagattttgtgttgctgcggcttgaagcttgactttggtttatacatgattgatacatgatttgggacttgtaggatctgatttgcgcaagattggatgaggggaagtgtggttttccaaatatgttctttgtgcacatttngctgtaaaattgtgcagcataattttgtacaatgc

SEQ ID NO: 197667 - DNA, 420 bp, Glycine max
tagtcagtgttgccggtaaacgtgtatctatatgtgttttattaaatgcatcgaggcattgagtgtggcattccaaaaaataaccgcctaataaacatagaataatgataccatatattttcatagctgcccacaataaatgcatttgccgattatggaggcagtaacaaaaaaataacaattggaaagatccaaaaaatcaacgcattgaatattggtttttgaataaatggttttaaataaaaataaatcttggaaggttgggaacacttaacccggaattaatctttttaaaaattctatatccccttattatgtttatgtcataaatcgcctaatacttttttatgtttaaaaagacatctcttttgtataaccgacccacattattaggaatatctattttattttcactcctac

SEQ ID NO: 197668 - DNA, 388 bp, Glycine max
  unsure (1)..(388): unsure at all n locations
ntagttnntattattttaatgaagtctaagatcttaatttaactaattatatttagtaaaatagttaaattaaaaattttaaaattcagattattatacaaaataaatatttactaaaataaatatattattatacaaaatttagattttaaaatatatattcaccaaaaaatatcttaaataatttaaataatataacaaaaatatttaaatttaataatatcattttcttaataacaaaattaaattataaaataatattacataaattaatttaataaataactaattttcaaattatttaaaaataattgtatataatataatatttaattttaataatataaaaactgttttattaaaaaaaaaagaaagaacggaagtcggg

SEQ ID NO: 197669 - DNA, 460 bp, Glycine max
  unsure (1)..(460): unsure at all n locations
tcttaagtcacctgcggcatgcaagcttaactgaggacaagtctttgcactctttttctgtttgaaaagttaaaaagttttatgtacaaaatttgaatatactaaccaccaagtctgtatcacctgctatgagatttatttagcttaataataattgattttaagtttgagtttagttagactataaatatttatcaattgaggcaaccttccgaacactttaggcatgggacaaatatctcccaaatgtaatttaattaaccctgactccaacatacttttagtaaatttcaaacttctgcattgcaatccacggaaaatctcagtttacaaccactctttgcgcttgctttttcttaaaaagaaaaggagtgaatngttgaatttgtccctaaaagtagagacccgaataaatgatctctaaaaataaaanaattcaattaatttcaaaggataaaaa

SEQ ID NO: 197670 - DNA, 339 bp, Glycine max
actcagcttctatccaggctcatcttgggggtgaagctctttcttccatggcttatccctaggggatggggcctcctctcacctcttctctttggtcttgggcggcttctccgtgataaaaaataccctttaagggacctcttggactctcagagatccaccctctatagaagccctacaagcacgcttctatcaagtggatctgtgagctctagatctttaagtgggcgctctatacaccaacataaattttttgcgctacaccttctctcatagtggtgcttcatcattcttcacgtgtatctcacagatgtgttgtgcaagatgttataacatgat

SEQ ID NO: 197671 - DNA, 455 bp, Glycine max
agcttggaggattatggggtacccatcacatgtgttactaggtggcggtcgggcgatggtgcacaacaagttttccacatccacaatgcgcgcataaacccaccatcccctgttgcccacctccaactgagctcacgtactcccacgtagcccatatcctcgtttctctcaacaccgggtccccatcaatcctcccaagcttccccaacatcaaagtaatacaacattcaaacagcacaaactatcacagccaagaaaacagagcaaaggcagaaaactctgccaaaacaccaaccaaaatcacagcttttttcacttaaagaccccagtaacaatttcttcagtccaattcgttaacccgtggatcgactccaaagttttactggaagtctctaatacataagcctacattttgaccgttgggatctattagcaaacatccaaaacttattctg

SEQ ID NO: 197672 - DNA, 455 bp, Glycine max
  unsure (1)..(455): unsure at all n locations
ttntgaaatcaaattctattactggtaatcgattacagttattctggtaatcgattactagagagtaaatactctagtaacttagaatatttgagaaaactctttttgtaaaacaaaactgtgctatgtttggtttttgaaaaatccttttgaatatttcccttgtgaagtcttgacttgttgcttttttatttcttctcttgaatcttgaattcatcttcttttgaatcttgattcttcttgatgtcttttcttgaatcttgaaattaatcttgatcttgaacttgttgactcaatcttgacatcattcttttgggctttttgtcatcatcaaaactacttgattcatcatcatgaagcttgcttctacaatctccccctttttgatgatggcaaccctgaaatcaagaaacacatgcacattctttttcctagtcgatcactcacttatttct

SEQ ID NO: 197673 - DNA, 360 bp, Glycine max
gctgtgcatatgaaaggaacattttatcctgttttggtgaaagtcttctacacgtgtgcacgcgccgatttagaaggtaatctcttttctacagttaatggaataaaaatggttatcgatgttgatgtatggaaagaaatatctaaactggacatgggtggagttcaacaatttgaaaaaataactaatgggtacaacaagatgcagacctacagaggaatgcttctcgactgatcaaggtcgtacccgaatcaaataaacattaaaaatgcagtatctaggaactgatcctagggtcatctccaacgagcagtggtcaaccaaacgttcataacatatagtaataaaaaagtaacgaat

SEQ ID NO: 197674 - DNA, 475 bp, Glycine max
  unsure (1)..(475): unsure at all n locations
actcagcttgtcaanacggaagaaaagaaaccaaaattgaacgaaatattttgttagccaagaaacaagaaatgaattaaaagtctcggatttggaaacttacccgttgaagaacgaagaacggatgaagaacggtgaataacggaggaaaaccttcacggatttgcttacggaaacatctcgaaagcgttacggaagcacctcggcttggattntcttcacggaaacaatttttttcacccaaaacagctgaaatacatcaccagggggatctgggacccttagaacaacccccttcagcctatttataggaaaaacggggaggaggttgtcacccagctcgcccaggcaagctgggttgcttcctccagaagaagcaatccagcttcaaaaatactctggaaggccaaatttcaaaattgctatttgcattncccattttttataagttcaccccccttctttcgtaatttta

SEQ ID NO: 197675 - DNA, 401 bp, Glycine max
  unsure (1)..(401): unsure at all n locations
agctntgagcaaatgcaaacgacaatttcttttttacttggatgtctgattgagtctcgtaatatgtcgagacgctcgaaattgaagaccgatgccctgagcaaattcgaacgacaataactntttactcggatgtctgactgagtcccgtaatatatcaagacgctcgaaattgattatcgaagctctgagcaaattcaaacgacaataactttttacttggatgtctgattgagtcccgtaatatatcgagatgctcgaaatggaataccgaagctctgagcaaattcaaacgacaataactttttactcggatgttcgattgagtcccgtaatatatcgaaacgctcgaaattgaatgtcgaaactctgagcaaattcaaacgacaacaactttttac

SEQ ID NO: 197676 - DNA, 419 bp, Glycine max
  unsure (1)..(419): unsure at all n locations
tgtaggattatggngtacccatcacatgtggtactatgtggcggtcgggcgatggtgcacaacaagttttccacatccacaatgcgcgcataaacccaccatcccctgtagcccacctccaactgagctcacgtactcccacgtagtccatatcctcgtttctctcaacaccgggtccccatcaatcctcccaagcttccccaacatcaaagtaatgcaacattcaaacagcacaaactatcacagccaagaatacagagcanaggcagaaaactctgccaaaacaccaaccaaaatcacagcttttctcacttaaagacccagtaacaattcttcgttcattcgttcccgtggatcactccaaatttactgaagtcctagacataacctacgtttgaccgtggatcactacaaaaatc

SEQ ID NO: 197677 - DNA, 349 bp, Glycine max
agcttcttggggttggctggctattatagaaaattcattgagggattttctaaattggcattgcccctaactaagttgactcgtaagaatgagaagtttgtttggaatgagaagtgtgatcaaagtttccaagagttgaagaggcggttgacaacagctccagtgttaattttgcccgaccctaagagaccatttgaagtttattgtgatgcaagcgggcaaggtttggggtgtgtgttgatgcaagagggaagagtaatggcttatgcttcacgtcaattatgtcctcatgaagttaactacccgacccatgacttggaactagcagcggtggtctttgctttaaaga

SEQ ID NO: 197678 - DNA, 418 bp, Glycine max
  unsure (1)..(418): unsure at all n locations
tctnttggaccttgaacaggcaactaactcctctttcaaaaccatgccatgtgctcgcgactgggccctttcttcctttcgcaactggagtccattatggctcccccataaagctccgcaaaatttgttccggccttactcttcttggagagccctcttggtctctggttcaagggctcttgcggaaatggtattctcttccggtaacccggcacactccttcagagcgtgtgtagcagacaactagaacttcttcttggagagttgcgccttccataactcgctttagagagcgtggacttcttcgccctcttcgggcgctataaaattctcttctgtgacaactttaaacgtggagagccaatctaaacctcgtgtgagaactttcagccattcgtggcacccaccaatgacgcca

SEQ ID NO: 197679 - DNA, 383 bp, Glycine max
  unsure (1)..(383): unsure at all n locations
agctntcttgagaaaactgccttgagatgcttctttgagaaaacttccttgagaagctagagcttagctacacacacccctctaataactaagctcacctccttgagaagcttccttgaaaagattcctaaagaagctagagcttaactacacacacctctctaatagctaagctcacctccttgagatgagaagctagaacttagctacacaccccctataatagctaagctcacctccatgacaaaatacatgaaaatacaaaaaaagtccatactacaaagactactcaaaatgcctcgaaataaaggctaaaaccctatactactagaatggccaaaatacaatgcctaaacgaaggagaataaaacctattctaatat

SEQ ID NO: 197680 - DNA, 446 bp, Glycine max
  unsure (1)..(446): unsure at all n locations
ctattacgtgacctatgaaactcagctnataagtgcgggtctgggagacgaaggtcaagtgttctctatatacgaagatgatgttccgagtacattggatttggtacgaccatgccctcctgatttccagctgggaaattggcaagtggaggagcgccctggcatttatgcaacgagcataatgtaaacctttacggttttaaaactctatagttgggcctaggctttagattttttcttttgttaaggctttgtgtcctttgttttgaatttataatacaaggatctttcttcatctgttcctacgtctctacccattctcatccatttgcatgtttacttctttacttattaaaacgacagatccgatgatgagtccctcgaaggtactaatacctgggacccgcctatcaacttcgagcaagaaacgaatcaaacataagatg

SEQ ID NO: 197681 - DNA, 450 bp, Glycine max
agcttctagccaaatggactgaccttgaattatttcctttgatagcccttttgagccttgtttccctttccttgttttgaagctcactacaagccttaagtgaaaaaccatgatattaccatatccttaaggaattttggagctttggaattgttttgggaataagtgtggggggtttttgtttcattggacaacttgttttgttggctatgcttcatgatgtattttgggccatacttgatgtacattgtatattgggtaaatgttggacatgctgaatgaaatgttgtttctcaaaggctaaagagtaacaataaaaataaaataggaaaaaaatcggaaaaaaattcgaaaaaagaaaagaaaagcaataaagttgagtgaactagatcttaaatggcacaagaatgatgaaactctgggtctactctcaagttaaatttatcttac

SEQ ID NO: 197682 - DNA, 455 bp, Glycine max
  unsure (1)..(455): unsure at all n locations
tcannattttgcatcatcatgaatactcatgtcatcctgtagtaatcatcaatgatggacaggacgtaccttgtcccttttagtgatggaactctcaaaggcccccaacagtcagaataggcatagtccaatatggccttaataatgtgcataaccctggtgaattttgtccaatgatgcatcctataaaaaaaatggccataaaattgaagaggttccacctcatgatttccacataagcctcgcttcctcaaaatttccagtcctatttcactcatgtgtcctagatgagatgccacaaagaattatcattgggccatccattggatgcatggctcccagcatgtgaaacagttgagacaaaatctatcacagtggaccttgaaggatttacaaattntcttgcttggtgccatgtancaaattgcgtaactccaccttcaactcaataagaa

SEQ ID NO: 197683 - DNA, 449 bp, Glycine max
tttagcgaggaggatccaaacaaagcaattgaacatacttaatttttgacagacaatcctagtatattatatatacattaagaaagggcatgtataggacaaaaaccacatttaaatagtcatatacaactaagttctcatattttgtttactgtcattaaaattttaaggactataaatattcctttgatctaacagtagtatttatgtagatgcactacaccacctgatttgaaccttgtgagtcattgaagatttttcttgaatatttgattacttgaactagtactaaacacttacaatttattcaccactaaaaaatcattaacaacatactttagctcgggtttcatttattgccatcaatcttatcagttggaccgggtttcaactcataattaacttttgaaatttagatataagaaattttattaataaaccattaaaca

SEQ ID NO: 197684 - DNA, 410 bp, Glycine max
  unsure (1)..(410): unsure at all n locations
agcttatatgcaatgtggtactatgtcagttataaacctcgtcgggcgcctaggagtacatgacaagacaaaccacacactagtaagtcaagtcactctcactaggtaatatcatagggagaccagtcagggtcacagtgttttgcgagaatgctccaaccatatgggatcaacataggcttaaaggagcactcaaaccgtgtgatccccaaggcctacactccgaagagtccgtcagggcctctccctcctgattcaggtccaacccagaaaacattttaacacacagactctatctatgaactatacaaaacacacgactccttaattgttctncaaaataatttaactcgtcgccctttaagggtcttatcattaactcgtcgcccttaaggggacttaacataact

SEQ ID NO: 197685 - DNA, 405 bp, Glycine max
  unsure (1)..(405): unsure at all n locations
ttctattcctaaattntatctttgtaggatctcaagatacccaaggtctgtccttggtaagtactcctacaaaaacccaaggcacgcccttgtaagccttctcctttagaactacaacgagtatagccaaaggcccaaattaaggaacttatcctcaaataagaggtaccaccccactggttagcaagaccttcaaccaagtggaaatcactctaactcctcacaagcctaaaaggaaaagcttcacaaagtgaaatgaagcatcaccagattaacaagacatttactacgatgaaacaaacccgtgagatactattttaatattctctacttctacaaaagccgcagggtgttgctcctatgctgataaacctcactcttataaggcggctatccttacaccac

SEQ ID NO: 197686 - DNA, 390 bp, Glycine max
gggccgcagccacgaacaacgcgagcgttgcttggttttctatgactagtagggttctatcgcaggtttataaaagggtacgcgatgatagcccacccactatctcaaccactgaccaaggcggagctggtttggtctctggaagccgaaagcgcattccacatgctcaagaaggcagtcacgatggcgccggtgctcgctcttctggacttcactaagccttttatggtagaaaccgatgcttcgggcttggggataggcactgtgcaggatgggcatccgatctccttcttcagcaagcagttctgcccaaggttgttgaggtctcccacttatgtccgggaactagccgccatcaccgccgcggttaagaaatggcggcagtcccta

SEQ ID NO: 197687 - DNA, 134 bp, Glycine max
accttccacgagggaagcactactacatgacatatagggggagtcctaacctaattagtctcaatccaaactaagccaatcaatacttcaagcagaagcataatgacctcctagaaaggtaaatatatatatgt

SEQ ID NO: 197688 - DNA, 360 bp, Glycine max
  unsure (1)..(360): unsure at all n locations
agcttaggctaaattagtctaaactctcgtttgctatttaagctaagtctagtccaacaagagggatctgaggatgaagcttantttaagttagtctaaacctaggaggactgtctaaattaagcctagtctaacaagagggatctgaggacgaagcttggattgatttagtctaactagggatcgagatttattaatttaggctacaacataaaacacaaagccatgattgattagagaaacatcattatatacatcacctgatttgttagaaagaacaacatttttacctactattgcaaatttacttacttgcattttactgttttaccctaactttgttaaatttgtttaaaaaat

SEQ ID NO: 197689 - DNA, 458 bp, Glycine max
  unsure (1)..(458): unsure at all n locations
ctataaaactaagcttaacagagaaaggtgtgataaggaaggaaccaagcctttctttttaaggttctctaacacttcctgcacctttgtgtaggaaaacagtggacgaggtttggtctgagatacacaaaggacaacaatctcaacaacaacagcaacagaacaataacactaacaacaattgtggcagtaataataataataatgtacagaataccgaatctgcccctcgccaacctacgtttggagagatgactttggaggatttcttggttaaagctggggtagttagggaacagggtggaatggctgcaatgcctgttcaagcttcagcacatcagcatgtgcaacaatatggcatgtatccaaataacaaccctacaatgggggcttcttttgtcggtaggccggtgatggngatggccggtggcgtccgtgttggcagtggtggtagaaat

SEQ ID NO: 197690 - DNA, 239 bp, Glycine max
  unsure (1)..(239): unsure at all n locations
agcccgncccatatcttatgggagcaagatctttttctcctgcgcacaccctcttttcttcctcactcaggtccaaaaacctctggctcgccctaaccatcttatccattacggctctccacacaccgtgattaattacctacatcaaaagcccttcaaagttaacagaacaaccaaagttacatgcatgcattccgaacatataaggtatttaacataataagcacttaaaacatgca

SEQ ID NO: 197691 - DNA, 456 bp, Glycine max
  unsure (1)..(456): unsure at all n locations
tgcgctgctcacttantgtggaggcctgtattcgcgcttttttcttcttgggctgggccttcctcgctgagcgaacagttgataccaaaatcttccttgtttcgtatttttgctatattctgaatcttttttatttttaatccctcattttcatatctccaagccataaataagaagaacatcaattcttaacaattaaacataaataactactaaataaatatttttaaggttattttcattatattttcatcataaaaaacaaatcatattcaacagttataaaaaaatcgtccaaattaaagattgtgcttgtcctcaagcacaaaatataaataagagtagactctagatgctccaacactcttaatagctgcattcttttcagatccattagttggaccttcgtgcatttgccatgatcttgcaatggaagcataaacaatcattgagata

SEQ ID NO: 197692 - DNA, 411 bp, Glycine max
  unsure (1)..(411): unsure at all n locations
agcttcatccttcttagtttctatttcacaggggatcatttaggtttcaatggtaatttatgttgcatggtttatggatttaagccagacatatcctaataggaccaagagaaaatatcttggtattctcacaacagggccatcaactcttctcagatgttagttgacatacaagtgccaaccttaacctcattnttctcttcatcagtgcctaggctaacaagctatgttttctcttgatgtggatttatttccctctcttcttgctccaccatcctcaacaaatcaggaaataatccccaatcctcccttttctcttccttggcttgattggctggcctttcaaaatngacattaggaagctcattatcactatctncataggactcattatcggatatgcagcaaatc

SEQ ID NO: 197693 - DNA, 423 bp, Glycine max
  unsure (1)..(423): unsure at all n locations
ntctgcaggaaagctaagtgtgaagtatgcaatcctgcacattattgnggctgcaaactgggtacccaccaatcatacttccactgttgccacaggtttgggtaaatttctgtatgctgttggaaccaagtccaaatttaattttggaaactatatttttgatcaaactgttaagcattcagaatcttttgctgtcaaattacccattgccttcccaactgtattgtgtggcattatgttgagtcaacatcccaatatcttaaacaacattgactctgtgatgaagaaagaatctcctctatccctgcactacaaactgtttgaggggacacatgtcccagacattgtctcgacatcagggaaagctgctgcttcaggtgctgtatccaaagatgccttgattgctgaactcaaggacacatg

SEQ ID NO: 197694 - DNA, 419 bp, Glycine max
  unsure (1)..(419): unsure at all n locations
tggggtcctttaatggtgattttccaccatggagatgcagtggaagacaaaggagaagaggcgaaaggaggcgccattcattaaggaataagccatggaagaaggagcttcaccaccaagatgagccttggataagaagctnggagaggatgcttcaatggaggaaaagaaagagagaaggggggagcatgaaattgaaggaataaaagagggagagaagtggaacttttaagtgtgtctcataagactttcattcatcaaagttacaacaagtgttacacatgcttctatttatagactaggtagcttccttgagaagctttcttgagaaaaacttcttgagaagcttctttgagaaaacttccttgagaagctagagcttagcttaacacacacatctaaaaactaagtttcacctc

SEQ ID NO: 197695 - DNA, 358 bp, Glycine max
tctcagctcacgccgggaaatcctctaattcagcacccatgcagcctaaggcacccgttcagagggaggccccccaagtcccaactccaaccacgacccgcccggccggcaatcccaacgcaatgaggaactttcccccgaggccaattccagaattcaccccactcccaatgacgtatgaggaccttttgccatctcttatcgccaaccaactgggtgtagtaactctcgggaagatcttccaaccccctttcccaaagtggtatgatcctaacgcgacttgcacgtaccacgggaatgccccggggcattccatcgaaaaatgcttggcccttaaatacaagggccaacatttgat

SEQ ID NO: 197696 - DNA, 340 bp, Glycine max
agcttgagtaatcgattacactgatttgttaatcgatcaccagcggttgtttctgaataaatcaaaagatgtaactcttcaaatggtttttgactttctcaaatgggtttaaatttttctaaaagttataactcttcaaaatggttctcttgaccagacatgatgagtctataaaagaaaggctttgttttgtattttcaatcaatctttctaagaaatatttctatcaattcatctcaatcatttctttcaatcatctttcaatattttctttcatctctttcaacagttgttctgttcatcttctcttcatctttctaaaagtttttgctcaaaactt

SEQ ID NO: 197697 - DNA, 450 bp, Glycine max
  unsure (1)..(450): unsure at all n locations
tgactgacccatgacttgaggtggttaaggatgaaattctgctatagcgaggtgtangtggagagggctttatgcgtgaaattaggggcgggaatttggttgggcctaggaagggaagcaccaaggagggtcctaggatggaaccttttttgactatgtacaaaatctgttccaggagaagcaagaggaggatgaagcatgtgaggtatgaggtaaactccatgaaagagaaagagggtaagagggatgaagttttccttgttgttggaagcaaatcctgcttatcttataattattattattggattagcaagtaaatataagcagcaatcgagttaatagtggtcataacatgagataccatgtatgatggaaactaagagttangagcagttttgacagaatgttaggaggagttacgatgtattaaatatgtgtgtaatagtggaa

SEQ ID NO: 197698 - DNA, 369 bp, Glycine max
agcttataatatattgataagctcgatattatcatcggaaactctcgagaaattcaaatggtcataacttttcacacggatgtccgattcgatcgcataggatgtcgagaggctcgaatttgaacaacggaaggtcttgagaaattcaaatggtcataacttttcacacagaggtccgattcaggcttataatatatcgatacgctcgaaattaaacatcggaaacactcaagaaattcaaatggtcataacttttcacacggatgtccgattcaggctcataatatatcgatacgctcgaaattaatcatgagaaactctcgcgaaaatcaaatggtcataacttttcacacggatatccgatccagg

SEQ ID NO: 197699 - DNA, 451 bp, Glycine max
  unsure (1)..(451): unsure at all n locations
tgaatcggacatccgtgtgaaaagttatgaccatttgattttctcaagagcttccgtagntcaatttcgagcttctcgacatattatgcgcccgaatcggacatccgtgtgaaaagttatgaccatatgaatatctcgagagcttccgatgtttaatttcgagcgtatcaatatattatatccctgaatcagacatccgtgtgaaaagctatgaccatttgaatttgcgagagtttccgatggttaatttccagcgtatcgatatattatacgcctgaatcggacatccgtgtgaatagctatgaccatttgaatttctcaagagctgtggttgttcaatttctagactctcgacatattatgcgcccgaatcggacatccctgtaaaaagctatgaccatttgaatttctcgagagttccgtcgttaatttggagcggataatatataat

SEQ ID NO: 197700 - DNA, 381 bp, Glycine max
gcctctcccagttatctgtaagttcattatacagctccatatactttttgcccaaggatcatgctccttttaggacaacacaagcattttatatattaaacaaacaatatgaatttgaatttcacattttgatcatagatccaaaatgcaacatacttctgcactatcaagtcaagaatgtatcagcattataatatccatgacatttatcattcacattgaacaacataataaccatgtagttatgtattttgaaaatctgaaatgaagaacacataatacaatggcacagaatgatttgtttagggtaaatatgttgatggctctgaaatagcccactttttttaatgctagaattttttataatttaagcactcattg

SEQ ID NO: 197701 - DNA, 280 bp, Glycine max
tattcgacatctttctttgcatcaaaaagtttagaattattatctaacattattttttcatgaagggttctttttcctatattatcctcttcatcataagtagagattcatccattttactatagtttgagaaccttggagttcatttttaataatagctttatttcaccattcttctatgcatttctgcatgattgtcccatgtcaaagtccaccatcattctataagatgagttggaagttgttgtagtttcaggttattatttttcaccaatagatc

SEQ ID NO: 197702 - DNA, 370 bp, Glycine max
agcttccacagcatccaagctatgcaacatctatacatcatgaactatccaaagccaagaaaacaagggagaggcataaaactctgcccaaaacacattccaataccaaagcttttcttactcatataccccagtaacattctctctttccgattcgttaaccgttggatcgactcgaaaagttttctggaggtccctggtacataaatctacattttgaccgttgggatctgctaaaaaatgtccagaatccaatatgtactacccttttcacaaccagcaatgcataagcatttcctgcacaatattcaaattcttctacacaaaatttgacagctttttgctgcacaaatgggcacattctaatcac

SEQ ID NO: 197703 - DNA, 314 bp, Glycine max
  unsure (1)..(314): unsure at all n locations
ctattacggacctatgatactcagcttgcaggttcgctaatgatactccaatttgtttcttttcaaagaaacattagcttccctagtgcagcatatagcaagaccacccctattcttagatctagtggttatggtgtcccacttaacccaatgacaatgaagacccctcaaatgaagccatgaatataggaatcaattntgtcacaaaccccttcaagcaaccacaatgtttgtatggtataagttggcacaaatgcaagcaccgaattagctagcaagaatgaccctccccgctctactcaataagtttcttt

SEQ ID NO: 197704 - DNA, 302 bp, Glycine max
ctcatcgtccctcacagtctttatatttgggagccaatccaatccttgtgttcggactttcaaccactcacgggagccaccaatgggcccactgcctctgagctctttgtctttcttttgtaccaccccccatgccttgcggaccttttgaagtgtcttcacgttggtcttattgaagcctcatgaaatgacaggcgcgagcccatcctctagtggcgcccctttcataaggtagccaagttgtcttattgtaagaatgggattgtagcggatgcaacccctcgtcaccatcaagggaacat

SEQ ID NO: 197705 - DNA, 457 bp, Glycine max
  unsure (1)..(457): unsure at all n locations
gttggaaattatggttggagatagtttaaaatgttattatatatcttgccagttgcagaaatagggaaatgttattatgttaaaatttgacaatacttgttttgtgtgtagttcattgatggtggaaccatggtatcactaatcgttgcttgtgctacctgatgaatgacatggcacaagaagcacttggagatgccatgcaagctcaatcaacatctcccacttggcccactgcatactatcttcaagcagttgctctcttcacccttggcatggacaatgattcataggaaacccttaaagatggcacaaactggaaaccaggaagtatagaaattgaaatttgaaattgtatagnctttttcctttcttctactttccctccttgatcaagcaaaaaatttatatatcacttttagttgtatgtaggaatttatatgtgctttagactcctaat

SEQ ID NO: 197706 - DNA, 353 bp, Glycine max
actaacagaaagagtgctgttgttccttatcttcctaacaccctgatactaaccctatcttcgtccaggacgagtcacgcactccactctgcatggcttattaagtaatccttcagatatgctggagtggactactccctatgtggcctcactcccgttactacatgcaccccccttgctatcggcacctcctccaaatactgttacgaaacactcccgtgcccttaaagcaacaccttgtcctcaaggtggtgggtgctcttcaaagcagcccatacctcccataaagcgtgttaggtggtaatccacgccattgaaccagtaccatatgcttgggccctgtcttctatgga

SEQ ID NO: 197707 - DNA, 453 bp, Glycine max
  unsure (1)..(453): unsure at all n locations
tgtngaanaaagggaaatgtgtaaccactatttanatangtctgttnagataaagngatataatttcaatcctacgtgtaagcaactaatctaatcatatcaacacattatattttcaacttacaaccatgtgaacaactaatcttatgatcaatactatcatcaatcctgtgagtctttcaatcttatcgtcaatgtaacaattagtaatcaaattatcaatactcttcctttaattattttattaagagacttcttttccttttctaaaagcttagacataattaagtgaaagactcaccatggaacacgttgttagctatagacaaaggaactctgaaactttaattaaaaagaaaaggttacactacaccaaatattattattntaattaaatgtcagttatcaataataataaattaattatcaatcttatcgtcaatgtaacaatta

SEQ ID NO: 197708 - DNA, 328 bp, Glycine max
agcttgggaggattgatggggacccattgttgagagaaacaaggatatgggctacgtgggagtacgtgagctcaattggaggtgggcaacagggatggtgggtttatgcgcgctttgtggatgtggaaacttgttgtgcaccaatccccgaccgccacctagtaccacatgtgatgggtaccccataatcctacaagcttgagatgaggaagtatagaagggtgaaacttcctgcttttattcgttgaccacagagtggtacctggagatatgtcgcgggggtcaggagaccttggtgatgtcatgtggggtgctattgcccaaaacc

SEQ ID NO: 197709 - DNA, 456 bp, Glycine max
tagggtaaatatttatgtcctaaaaaaataacccacaaaatataacccacaaatataagtcatattgttagagtcaatgtccgtaatcaaataatgttagagtctatatcaaatgtttaatcagatcgagatgctccaacctatctaatttaacgagtttttatatgtatatttttcaatatttccccctcttaacaagcgttatatttccttaaagaaaaaataagggcaacatttttggtttagaattctttaattttaacaactatttagcttcgtcagttgccataatcaaatgacgttagagtctacaccaattttttttaatagaatcgacatgattcgtcgctgtttttttatttctaaagtaccaacctaagtttaaagcggtaaagtcttaactgtaaacattcaaacaatactttaattcactaataatataaaaaaaattaaaag

SEQ ID NO: 197710 - DNA, 408 bp, Glycine max
agcttaatgactaacagaaagattcctcttgctccctaacttcctaacaccctgatactaaccctatcttcgtcccggacgagtcacgcactccactctgcatggcttcttttgtaatccttcagatatgctggagtggacttctccctatgtggccttactctcgtttcttcttgcaccccccttgctatcggcacctcctccacatccttttccgtaacactcccgtgcccttcaagcaacaccttgtcctcaaggtggtgggtgctcttcaaagttgtccattcctcccataaggtctcttctggtggtaatccacgccattgaaccagtaccatatgcttgggccctgtcttcgatggaatgaccttagacgccacaatggccaggggtgtgacaacatgatgg

SEQ ID NO: 197711 - DNA, 379 bp, Glycine max
  unsure (1)..(379): unsure at all n locations
tcaagatanagatggcctcagcaaattccttatgtccatatatgtgtttcttcaatagacctccaatctntaatggagagggttaccactactggaaaacccgaatgcaaatttttatcgaggcaatagatctaaatatctgggaagccattgaaatagggccttatatacccaccacaatagaaagagtttcaattgatggtagttcatcaagtgaaagcataaccatagaaaaacctagagatagatggtctgaagaggatataaaactagttcaatacaatctaaaagccaaaaacatatatacatctgctctaggaatggatgaatatttcagagcttcaaattgctagagtgctaatcgacatgngggacactc

SEQ ID NO: 197712 - DNA, 374 bp, Glycine max
  unsure (1)..(374): unsure at all n locations
aagtncatacagaatccagtgaacagttggttcttatccaatacgacttaatctgaaccaaaactttccttaattctctccttaccacttccaaaagtatgtgaaatggaaaaaaaggatcactggatcataattgataataaatcagcccaaaactacaggtaatacatagccaattattttgaaatgacttcaaatatatcttaattcacataaaccaaacaggtgggaactttgtaatcatttgacgacagatgatcggatgtccgatgatagagtgatctacattaacagcagattgaagttcaactttctaggagggtatgtaacaaatcgaactacagttctgaacctgactttagtttaccaagcaa

SEQ ID NO: 197713 - DNA, 412 bp, Glycine max
agctctacagcagattgtagtaatgacccactattctataattaaaataacttaatgccattaacctatggaattaaaaaaacttaatggctgagtataactgaaatcgtggcaaccaaaagtcaccctcaacagccaactagttaaccaccatttgggcttcccataggctgatgcctaggttgccaattgggcctctattacaacttgaactaaacctaactaaagccctttaagtaattaaccccaaacattattttggtcacccaacttttacaggattgggccttttttagacaaactaacactttaaattgaacacaaggtgtaattaatctcctcttttggccatatcaattacaacttgatctttccttgaactggcttgtattaaaaaatgacaaacttggga

SEQ ID NO: 197714 - DNA, 459 bp, Glycine max
tcatgagagagtcaaagatcaaatcgagaggaaaaatattatctatgctaaacaagccaacaaagggagaaagaaggttgtcttcgaacccggagattgggtttgggtgcacatgagaaaagaaaggtttccggaacaaaggaaatcaaagcttcaaccaaggggagatggaccatttcaagtgcttgaaagaatcaatgacaatgcttacaaagttgagctgcccggtgagtataatgttagttccaccttcaatgtctctgatttatctctttttgatgcagatggagaatccgatttgaggacaaatccttctcaagagggagagaatgatgaggacatgaccaagagcaagggcaaggatccacttgaaggacttggaggacctattgatgaggacatgaccaagagcaagggcaaggatccacttgaaggacttggaggacctatgacaagggc

SEQ ID NO: 197715 - DNA, 359 bp, Glycine max
  unsure (1)..(359): unsure at all n locations
ccgggatccttgagtcacctgcggcatgcaagcttatttcgntgtaatcacaacttagattaacttgttataagagtgaacacaaggtggttgtttataaccatctttaatcgattaaatctacaaggtaatcgattacattatctttttaatcgattaaagtgttcttcccaaaacctagaaatagctcaagaacaatgtaattgattatatactcaaagtaatcaattaaagtgttcttgttcacttctaaaacacttatggaaagagaagtaatctattatatcacatgataatcgattaaagcagagactcctgaataaattaatcattgtctcaaaaacaactgtgtaatttat

SEQ ID NO: 197716 - DNA, 447 bp, Glycine max
  unsure (1)..(447): unsure at all n locations
tggagaggatgcttcaatggaggaaaagagatgggagtattttataggggggagcatgaaattgaaggaataaaaagggaaagaagttgaactttgagttgtgtctcacaagactctcattcatcaaagttacaacaagtgttacacatgcttctatttatagactaggtagcttccttgagaagctttcttgagaaaacttccttgagaagcttctttgagaaaacttccttgagaagctagagcttagctacacacacccctctaataactaagctcaccttcttgagaagattcctaaagaagctacaacatagctacacacaccctctataataactaagctcaccccatgccaaaatacatganaatataaaanaagtccctactacaaagactactcaaaatgccctgaaatacaaggctaanacnctatactactagaat

SEQ ID NO: 197717 - DNA, 449 bp, Glycine max
  unsure (1)..(449): unsure at all n locations
ctcttatggatgctcgatatttgattcagaacatcatgtanttctttccacaccgattaaaccaccacctctactttagtattgtgcaaaaaaagttttgaatgtaaaggtcattttcttacagttctttctcattcagtgagtgcaaattagcagtgccaaatggcattcactcctaacatgtttaatgcgtgcatccatataggtgaacgtacaggtacagcactatgattcaacatggagctaaccatatccattatagtacgattttgccttttagccacaccattctgttgtgatatgtcatgcgtagtatactatgaacatatgcctctgctatcagagaatttagcaaatggacctggacatttgtcacttacattttatcttcgtacaatccaccacctctattatactctacaactgttacctttctgtctgtgacaccc

SEQ ID NO: 197718 - DNA, 366 bp, Glycine max
agcttaatgactaacagagagatgcctcttgttctctaactccctaacaccctgatactaaccctatcttcatcccggacgagtcacgcactccactctgcatggcttcttgtgtaatccttcagatatgctggagtggacttcttcctatgtggccttactatagtatcttcatgcacccccgttgctattgacacatcctaaacatccttttccgaaacacttgcgtctcttcaagcaacaccttgtcctcaaggtggagggtgctcttcaaagttgtccattcctaccataaggtctcttctggcggaaatccaccccattgaaccagtaccatatgcttgggccctgtctctaaggaattac

SEQ ID NO: 197719 - DNA, 461 bp, Glycine max
  unsure (1)..(461): unsure at all n locations
acacaaaaactaagcttcaagaaanaaatncgtgctagctagcggattgctttatatacgcggatggagaaacagaaaaaattgtcctcattattattaatttattacctaaggtaatgtaaatctgtcctgttgaaatagtccaccaatgttaattggtttctaattgttcaagacttctgttcaattatagtgcgtacaaatgattatttacttggtcaaagacagtgattatttgggtgttgtttgtttattgnttataaaaatacttttctattttttcaagagaaaacatcatcaccaatcgtttatattttgagttttagaacactttttttttttgtttcaaaacttaatagatcttatatcaaaaattgataattaagtagtatggaattgttntaacagcacagttcttgaaacaaaatataagaagaatatcgaatagggtcttatttttc

SEQ ID NO: 197720 - DNA, 401 bp, Glycine max
agcttataagaacaaaattgccttaatcatttccaaatatgcatgtgaattaggacgcatcaacaagaatcaagccaaggctattgtgcaagcaatcaatggggcaaaacacaccaaatgattataatgatggatggctcaaattctcacaagggtaaaatcatcactttcaaattgagctttcaaaactatcatgacatgtagagaagaatcaaggatttcaagtcacaaaatgtcaagaacttttattttcaaaacaattacccatttcttgaacatatcctataattcaaagaaaaacatgcaaattcttacgtgcacacgaaattgacccaaaatattaaactgaaaatccgacgaaactaacaacttaaaaaattaacacaactaacacaataaca

SEQ ID NO: 197721 - DNA, 449 bp, Glycine max
  unsure (1)..(449): unsure at all n locations
tatgactcggnttcttggggattcctaaactatatgattatgaggatgggattttgtgaaaaatggagaaaatggatctatggatgcctctctagtgcaactgtatctattttgatcaatggcagccctactagagaatttgtgcctgagaaggggttgaggcaaggagatccccttgcacctttcttatttaatatagcagctgagggtctcactggtttgatgaggacaattgtttccaaaaatcttttcagtagttataaagtggggaggcaaaaggaggagatcaacatcttgcagtatgcagacgatactctgttctttggatctgcaaatacagccaatgttagagtcatgaaatctatcctcangaattttgagctggtctcagggctcaagattaattatactaaaagccaaattgggtgcttgggtaaatccttagactg

SEQ ID NO: 197722 - DNA, 457 bp, Glycine max
  unsure (1)..(457): unsure at all n locations
gtgtgtcagcttatcgctgagaagggtgctgatattgtttataagacncgccaagatgaatttcagaatcctgaatatgcattnttgtttggtggagacccgggaaccgaagctgcaatttctcacacttatttcttgtggatgaagaagaaatataatttggatactggatggcatgaaaagaaaaggcaatcagatatagtatactcttcaggggaacagtatcatctgcatgttacaaccgtgagtgctgattctgacatggaaatggaaggttagttttctttgttatgatcctggcatcaaaaactgatatttaacattttttgtgtntaggtattaaattatggtatctcttattctggtccagcattgggttgagcctgctctctgctgctatatattcttaatatgtaagactatatagttgtgttggaattggatgctctcaagcgcc

SEQ ID NO: 197723 - DNA, 255 bp, Glycine max
cttatggagcttatatggaggcatgatctttgagcttcaatgaggtcctttaatggtgattttccaccatggacatgcagcggaagacaaaagagaagaggtgagaggaggcgccatccattagggaataaaccattgaaaaatgagcttcaccaccaagatgagccttggataagaagcttggagaggatgcttcaatggaggaaaagaaagaggaagagaaagagagggggggggggggattccctatcctcc

SEQ ID NO: 197724 - DNA, 479 bp, Glycine max
  unsure (1)..(479): unsure at all n locations
gacctatgatactcaagcttcagcagattntagtaatgacccactaacctagaattaatttagttttaatgccattaacctagggaattaaaaaaaacttaatggctgagtgtaactgaaattgtggcaaccaaaagtcacccccaacagccaacaagtcagccaccatttggtctcccaaaaggttgatgcctaggttgccaattgggcccttattacaacttgaactaaacctaactaaagcccttttagttgattaacccaaaacatatttttggtcagccaactttacaaggattgggccattatttagacaaactatacactctaaaattgagacaaagtggtatcatttagtcctcctccatttgggccatgatacaactcacaaccttggacttttctccttgaaattagggcttgtattcaaatagtatggacaacacttgttgaagagcttccttggctttccttgctct

SEQ ID NO: 197725 - DNA, 288 bp, Glycine max
agcttccttaagagaactgccttgagaagcttctttgagaaaacttccttgagatgcttgagcttatctgcacacgcccatctaaaaactaagctcacctccttgagaagcttccttgagaagctagagcttagctacacacccatgatgaaactaagctcaccttcttgacggaatacatgaaaatacaaagaagaaagtccctactacataaactactcacaatgccctgaaatacaaggctaaaaccctatactactagaatgggcaaaatacaaggcccaaaag

SEQ ID NO: 197726 - DNA, 337 bp, Glycine max
  unsure (1)..(337): unsure at all n locations
tgcttgtggagcttctatggtggctggatctttgagcttcaatgaggtcctttaatggtgattttccacaatggagatgcagcggaagacaaaggagaagaggtgagaggaggcaccatccactatggaataagccatggaagaaggagcttcaccaccaagatgagccttggataagaagcttggagagggtgcttcaatggaggaaaagaaagagggagagaaagagagaggggggagcacgatattgaaggataaaaagggagagaagttgaactttgagttgtgtctcacaagactctcattcatcaaagntacaacaagtgttacacatgct

SEQ ID NO: 197727 - DNA, 354 bp, Glycine max
  unsure (1)..(354): unsure at all n locations
ttaagtcacctgcggcatgcagcttatccaaaaggaaacaagttataaacttttttccagtaaaaacattggttctacctctcggcccttaaagttgtacaccttgatatgtttggcccaacaaaaacagcctcagtgaatggtaaaaagtatgtatntttcatagaggacaattaatctaaataggtaatgttcctagccccacaagatgagacttttaaggtattctttaaattctgctaaaaggttcaaaatgaaaaaagtatgcattacctcaattaaaagtgaccatggaagagaatatgaaaatgaacatcttcagttgttctgtgaagaaaaatgtattctttacaa

SEQ ID NO: 197728 - DNA, 456 bp, Glycine max
  unsure (1)..(456): unsure at all n locations
nttctagttntctagatagttggttgacaacaattggatctgtgaaaaacataaatcaaatacagcaaattactaatgaaatttgcaatgcttcatgaatgctaaattaagatttgtgcatgcataaaaaaattgcaaactcaggtataccgagtttaataatctcatatttgcagtaatcttcgcatttccatctttaataacgacatccatttttgacaaattagccaaagttgaaggaaagattctgcaaggatataaagaacataagagcattgttactcaccaatgagatccatccaaatttaattgcaaatataaaaactttatattcttataatcaaaagggaccaatctgaagtcccaagagaggcacaataattgaaaagataaaagcaaatcttcgaagagaaaactcactcaaatataaacctagcagcanacaagcctggactt

SEQ ID NO: 197729 - DNA, 343 bp, Glycine max
  unsure (1)..(343): unsure at all n locations
agcttcgngtctcatctttagcgagctttcttttgatcgtaaagattttatttttgattgataaaatatctgttaaagcataatggtaaagataattattttttgatgatgggtttgttttatttccgtaattaatattccgatactgctgaatccctctattatctatctcttgaaacccttgcattttttgttgtcttagaaactaagataaaaatgttactttttcattcacatttttttcccttttaacttcgttccttctggattggatatatcgggttctgtgttgtctagattaatttattttccttttatccataaaggtatattctactcagta

SEQ ID NO: 197730 - DNA, 397 bp, Glycine max
tcaccaccaagaaagtgtcttggataagaagcttagagatgtatcttcaatggaagaaatgaatgagagagaggggggtgaatttgaagtgtgtctcacaagtttcacgttcatcaaagttatgacaagtgttacacatgcttctatttatagcctaggttactaactaaatgaaagcttccttgagaagtttccttaagaagctagagtttagctacacaccccttctaatagctaagctcaacctcttgagaaacttccttgagaagctagaagttagctacacacccctctaatagctaagctcaactccttgagaagcttccttgagaagctagagcttagctacacacacctctctaatagctaagctaacccctatgccaaattacatgaa

SEQ ID NO: 197731 - DNA, 385 bp, Glycine max
agctatctttggaccttgaacaagcaatcatttcttctttcagaaccatgctatgtgctcgcgactggtccctttcttgccttcgcaacttgaggtcattattgctaccccatagagctccgcgaaatttgttccggccatactcttccttgcgagccctcttggtctcttgttcaagggctcttgcggtaattgcattctcttcccgtaacccggggcactccttgcgaacgtgtgtagcagtcaacttgaacttctccttggcgagtatcgcctttcctaactaggttttgagagctcggacttcttcgtcctcttgcggtgcttcaaaattctcttcgctgaccagctttaacttggcgagccaatctaaaccttgtatgcg

SEQ ID NO: 197732 - DNA, 462 bp, Glycine max
actcagcttgtaataggactgcactgctaactggtgagaattgttttgaaaatgaagagttagtttcctgtttactctatgaaggaatggcatgctacatgcatgatcacaaaactgaatgtaagtatgctccagaaatgcaatcaagagctcaggcttattacaaatcagaatgaatcaaaactgtaatagctcttgaaccaaatacattgaaaacaaaaagccaactagagattaagtccaaacaacttgaagatgtacaaaggcataaggaccaagcttacctcgaacccaaacagtgacaatggcagtgagatctaaaacaatggcgtggagacttaaagctttcctcctacctcgatcaggtcaccacaaaatgtacctagggttaaccgaaacaacacaaacctagtaggttagacgaaataaagcttagacatcaaatagtttaccttactcaaa

SEQ ID NO: 197733 - DNA, 240 bp, Glycine max
cgcagctgcaactgagcggacggcagagagaacaattaccttttttgctgcatcgccatattactggactaatgataaatttatattctgaaagcctacaagctacacacttcttcatccttcaataacatcaaatcaaatacttgacagagaaatctccaccacccgacgcattcataacaagtggtgaaccatcccgaactaaatgacaaaagcccaagggtaggggagttaaccata

SEQ ID NO: 197734 - DNA, 389 bp, Glycine max
  unsure (1)..(389): unsure at all n locations
aaggacaataatgaatgctttgaaaacaagaaatgagctntaagaaataatcgtcttggttattggaagttccaaactttctttgtctcattttttattacagcatgtgaaaagaaccacgcaattgtgctgttgtctgtatcattaactaagttttagctcaagttagaaaaaggcaaagtgaatgtagctctactatttgcaaaagcaactagtttttcttaattttttttaaaagaagctntattgcattgatccgcttgccttttaattaataatatgcactttttgtatttctgttcaacagaagcttgccgtacttcttgccactgcaggagcaatcatgtccataaaaaanttcaacaactccttcaacaataatcatcaaa

SEQ ID NO: 197735 - DNA, 345 bp, Glycine max
ggatccttaagtcacctgcggctgcagcttaacccggatatgtgtatatatactttaggggctctcttttgggagggagaagatgcaatgggttctaaacgaatgcttggggtgtggtgttctgccaactgccattacttggaacatactagttagagcggtgatattttaaggagcttcaacttgattcttttgtgccctaacatagattaaaataattgtttaactcctactttccctcttgtgactacatcacacaagtatatatactaaatacaccatttggctggatccacaagaaaaggattctgtgatgtttatgtttagacccacatcttttttaca

SEQ ID NO: 197736 - DNA, 460 bp, Glycine max
  unsure (1)..(460): unsure at all n locations
tgtaaacattntannaattgtntttatttctggctacacatttttatcttcttgtcaagtagaactactttaattnttctattaaaattggtagtacatggaggtactcccaatactactaagcatagtataaaaaatgctaggactgctattaatgatctacttagaatattattatacgtatataaataataaataatttaactactcactttgcgagttattttaatttttttatatctttcttcaattcttacgaataaaaaaatatttatgagtctttgagtgccaagagtaggacatatttaataattaatttgttgatcttgattcataaatcaaataaattgaactntagttaaaaactaagctccttaagtagacgagttgaacttaagcaacatataagttagtatcataaaccaattatatgtatgtatgtatgtaaaaggaatcaaat

SEQ ID NO: 197737 - DNA, 424 bp, Glycine max
  unsure (1)..(424): unsure at all n locations
agctnngacgattatggggtacccatcacatgtgtgtctacgtggcggccgggcgatggtgcacaacaaagttttccacatcccgcaaatcgcgcataaacccaccattccctgttgcccacctccaactgagctcacgtactcccacgtagcccataatctcgtttctctcaacaccgggtccccatcaatccntccaagcttcccaacatccagtaattcaacatcaaatcatacaaactacaaaccaagcaaacagggcaaggaagaaactctgccaaactaaaccaaatatagcttttctacttaagacccaggacattcttcgtccaatcgtaaccgtggatcactaaaagttactggagtcttatacataactacatttgccgtgggactgtataacatcagactatttgcctacctt

SEQ ID NO: 197738 - DNA, 328 bp, Glycine max
gggaagctggaacgatgggatctgtttgttgtggttagagctttgatgaatttgaagattatgtaaatccatatgggccccgttataggaactgggtgagcgctaaatgcttgaatcagaaccttttgatagaggtatgatcactcctgttccctgtctcctagcggcttcctctttctgatctatgtccatttttgagggtcatgacaaggtaatgtggcgtctggagttatgtgttgctgccaaacctaaaatgttgttctctaccatgacttattggttgtctttccataatacatactgaggtggcaccttgtgtccagaaaaa

SEQ ID NO: 197739 - DNA, 371 bp, Glycine max
  unsure (1)..(371): unsure at all n locations
cgggcgggntctatgatgcttccaaatgatggatagtcttattatgcaacacttgtgcgtgcactgctcgaattcgtcacagctcggtgctcancgccaacaagccttccattagttatgatctggaagatccagagaacaaataatcaaactttacttcgaagcttaagagcaattgaaattggttaattaaattaatcattagtgtttcatgatgaggcaatgataacattgacttgacattgactttatatatatttatatggtaagtcgggttttggttcctactataaaatatttagataaaataaatcatctgattatttgttaaaagccacacaacttgcgtgggatcacagctggattaatta

SEQ ID NO: 197740 - DNA, 336 bp, Glycine max
  unsure (1)..(336): unsure at all n locations
agctngngcttgttttatataaatcttttgtttttaacaactaggtgtgtcctactatgacttgagaaacaaaggtgatcaaataacaagcaaagatttaaaaggtactaggttgcctcctagtagcgcttctttaacgtcttgagtcgaacccttgatgacttgtcggtcatggacctagtacctttgctatcctttggctttggacttggtcgcctgctggtcaaccacgggtcgtaggcaacgctccagcctttgtatatgagccgaggggctctggaggtggcgagagtgcgtctattgcccgttactggccatcctcaggataatgttgat

SEQ ID NO: 197741 - DNA, 454 bp, Glycine max
  unsure (1)..(454): unsure at all n locations
tcagaccaaggcaattcanaatctaggtatctaaaactctttaatttagaggattttcaaggtttgagaagtgaaaatgagaatgggataattttggagcaaactctcatctcaatcaagtctataacattaatctaaacttgctcaaactggttttacgatgaaaactccaccgaatcaaaatttgacccctcaacacccaatttaccctagaaatggctcttgctttcactttggtcactcattttcctcatttgctcagtccaagctttcccacaagacctaaatgacattttaaactaggattaactcactttagactccaatttacactaacctcaaatttagcttctctaaccctcaaaatctcacatcaaacatgacaagtttagcatgctttcaacaaattccttcacaaataactaccataaggcataaaattagtagaactacc

SEQ ID NO: 197742 - DNA, 471 bp, Glycine max
ggacctataaaactcagcttcatattgggaaaccaaggtggtaggctaatgcttcttatcacttgttctttgtgcttcttgataagtcctatttctttacaagcaaaccattagtagaaaaagtctaatagactaaaaatctacttcttaaaaatttgttgtcattaaaacattaatttcataaatattattatgttgagatcatgagatttacattcatatgagtttttggtgagttgtttacaagaattcaaggtgttggaatatcttgctatgcatattgaattatctgtgggttcatgagtgtgatgaacgtataaatggtgaatctatgatgttataacctctgttgagattagtgaatgaatttgtgatgacatatggtattaatttgaatgatcataacatacatgcattgatgaatgacattatatgtgagtaggcacgtaagttgtggtgtaagaagaccct

SEQ ID NO: 197743 - DNA, 358 bp, Glycine max
tctccctcttttccctataaatagggggaggagggattatcttttacgttcaaccctcctggtatctgaggatcacttgaaattagtgagaaaaatcatttccgtgaagaaaatccaagccgaggcgctttcgtaacgcgtccgagacgttttcgtgggtgatttcgagaagatattctgccatccttcgatcgctcttcgacgctctttagtcttcaaccggtaagttctcgaaatcgaacttttcaattcattctatgtacccttggtggtcctcatttgtttcgggtacttttgttatcatatgatatactttccgtaccccttttgacgtgctttagacatatatataagtcat

SEQ ID NO: 197744 - DNA, 408 bp, Glycine max
  unsure (1)..(408): unsure at all n locations
cctgaggctgcagctatccccaacctctctttccttctttgtattacgcggncnggccncatacgcgaaacccttttccaaggctccaatcctccttcaacaaccatgatggatattgatactctccaacaactccaaaaccgcattgcaaaggtggagcgatgccatgaggaagagctcataaagctaaaggctgaccatgatcggatggaggcttgtgtataatgcctctagggcgacgagcactcttctaacacattgcctaagcgcactcaagggggaatcataccccaacacactgtcaacacccaagatgatcctagtctctctcacatacaccatcttgaagggcaaactacttgtcgacacccgtgtgtcaatcacatcatggaggctgccataccattt

SEQ ID NO: 197745 - DNA, 264 bp, Glycine max
  unsure (1)..(264): unsure at all n locations
tccaccgaagctcccgcatctgctgctttgattntgatgtctattttatcttgattcggtccctccactgcggctccacaaccccatttcccaaagtaaggtctcgggagctaggaactgcctcctgctgatggatggggctagaaggcccatcatcctgcagctgaacattgaagttaaaaggttcatctggctgccggctgcacgagtcatcaaaaaccagcactaccagtggctgaactggtttcccatccaaacttgaat

SEQ ID NO: 197746 - DNA, 405 bp, Glycine max
  unsure (1)..(405): unsure at all n locations
agcttaacaaccacattcatgttttctctttaatgaacggaggtaagnagccgcgggttgacacatcaagaaagacacactcatcccaggcatatatacggttcaaaaggttttcacaatactattccacacatcaagagagaaataaccttattaacaacatacacgtatgaagataagggctcattaaggcattataaatcaatatcaagactacctgcatcacctaacgacttgccataatgtccaactgcacttcacaaattataaagatagccgatctcataactcatgactcaactatgaatttatggtatagcaaacattaaggatgaaacacacatcacaagcatcaattactctcatgtaatcatgcataggaaaatacctgtataattaacaaag

SEQ ID NO: 197747 - DNA, 182 bp, Glycine max
tcatccaactaaaacatggaaagaaagttgtttttcttttcaccgaagatttctcaaacattatcatccatatcagtgattgaaaagagccttcgatggaagtcaagaaaatgaaaacgcgtctagtccattacctggcaaagaagtttatgattgggtaaaggatatcctacctatgtttg

SEQ ID NO: 197748 - DNA, 450 bp, Glycine max
acttagaatctaagcttgaattcctgatccttagataacatactgtggttaatgttgggactggaacgagtcaccactggctttcttgatgagagagacatgatagatcggatgaattttactgtgagatgggagatcccacttattagctactgcacccacctagtttaacacttggaaaggaccgtataaccgacgggagagtttttcattaattcttttagccaaggatcttcttctgtcaggttgcatcttcgacaacacccaatcactgactgcatattctatgtcccgacggcgtttgttgacatttgctcacgtgatatcttgagacttcaacagattgtgtcttatagtagccaataattcattccgagcaattgttagcttattgacttcttcaaggcaggaatgaatggtggatcccctgagaatgtgaaggggatcatg

SEQ ID NO: 197749 - DNA, 427 bp, Glycine max
  unsure (1)..(427): unsure at all n locations
agctnacttaaaagaatcccgcacctcctattcttttgtttgatncggngtccttcaaattagttatgttcattccattcatttcacactaccgtgttcatcccatcaaacactgaagattcctctcccactttttaatgacataactattggacattttagtgtaattgatctctttattatgttaaaataagagtgcacgcttgttttaatgtaataacgagatgttcggtttaggcaaattttggaagttacatggaagttactaaaacttccatcaacggttggaagttacatgaaagttactaaaacttccatcaacggcagttttaaaaagaaataattttcatcaacccgccaaaaccacctgttctttgattataaatactcatcctgggtcacaaagcatgacatgtgaaaaacatac

SEQ ID NO: 197750 - DNA, 460 bp, Glycine max
  unsure (1)..(460): unsure at all n locations
tctctttatacacattaactaatccttctaaggatnngtttgatattttggtcatgctctttcaacaagatttaggcctcgccaattttcatcttataactttataatagtccattgcttaatatattatataattttaaaatgtacattntattattatgaattcgatttcgattcaaccataactaaattcgtaaattatgaactaattcaaaataataaacttttatgggttgaatgatcaatccaattctagaaacatggttgatgtcatcattccaaatatcctcccatcatttctatttttttttataaaagaaagatattttgatttcttttccaaattataaacttaatctgctttattnggcaagcactttactattttcatgaaacatgacaacatcatgtatgtaaagggtgaatatcacatgnactcacccaacctacccctacaacg

SEQ ID NO: 197751 - DNA, 337 bp, Glycine max
caccttctggtcctcctcatagttgtggcatgagaattttgctctattttcatctcccactccaagtaggcctccggatcattctttcctttaaatggaggaatgttgagtttaataccatcaattcggttttgtctaggaacaccatcattccctcttctcctcctttcttcttcattatgatctctattctccatttgatccaacctctcatggaccgcatcatctcgttgtttcattaacctctccatatgttgcatcaaagcttgcatttggaattgcgaaagccccactccatcattaggattagtacctgacatctcaaacaaccaaatca

SEQ ID NO: 197752 - DNA, 467 bp, Glycine max
  unsure (1)..(467): unsure at all n locations
cacctgaggcatgcaagctngtccttgaaggctctccaagatctgctctgtaatatattcactgagtcaatattattgatttattctacaatattaatttttttggtgagtccgatttttattaaaaattaaaaatataaaatttatcaccttataacatgaataaactgtataacatatattatcaacatatttttattatttcactaaaagaattaaatcttcagtgataaatgtaaaattaaaaattttcagtaatggaagtataagaacattaaaagagtggatcttatggttaagatggtcattaattaaaatgattttaaagattcatgtattatcatatgactaaaattaagttntaaattttttacttctcactaaacatatcccctaaagtaaaaaaattcttctaaacaaagaaaaattgtttcattcttatgaatactattacatgtatatgttat

SEQ ID NO: 197753 - DNA, 460 bp, Glycine max
  unsure (1)..(460): unsure at all n locations
tcgccaaaccgcgctatcttcttcctcttctccgggtctcattnttccctcaacctccgatgtcgactctctctgcgctctgaaaatcatttttcacatcctcgaatccgattccatccaatacgcgtgctaccctgtgtcgtcttttcatgagatccacaaatacacaaattcctcctcaaacgacgagcctctctccgtcgttttggtcaattggggcaaccacagagacctcagcaataccctaaacctcccctccaacgcccgcgttttcgtcgtcgacagccaccgccccatccacctccgcaacctcagcgaccagaacgacgccgttgtggttctcttcactaaagaggacgagggacaatccgatcttgcttacgatttcgacctcaccacactcgccaacgccgccaccaccgtcgattctgattccgattccgaatctgagtccgaatcg

SEQ ID NO: 197754 - DNA, 270 bp, Glycine max
tatctacacacaaggatctaaaatggcaatgagacatgctcagccaagtaattgagactaataatcacatgaaagctattctattttgccactaaagtgatacttcacatcaactcccaaaaagaaacatgacagttccatccaaaaaagcactggcaatattgtttccagatgcagagaagcaacaccgactgattggaccggtgtgccccacaaatgtctcctaaaacccagaaagaaagaaatctttacatataagtcattgcaaga

SEQ ID NO: 197755 - DNA, 451 bp, Glycine max
  unsure (1)..(451): unsure at all n locations
acatgctatgcaaacatcaaccatcttgtctcatataccttctcctttnctttttcccaattcacttctcttttgctccaacttctgaatgctttactttcaagatagtaataaattttaggggcgtggaaaattactttttgatttctcatattttcattgaataaaatgataaaaacatttttttatgaatataatagaaaattaacataattaaataaatttttttatatattaaaattattcaatgaaaaattatttctacaaagctttcaaatgacaattattttaaggaaaatgttatcaaatactctaaaataatggttaagacaataaaaatattttttattaaaaatgtaacaatgtatagttctatgatatgaatttcatccaatccctgccaaaatttatattgagagtttgaaacctttattttaaaatgagatacaga

SEQ ID NO: 197756 - DNA, 454 bp, Glycine max
  unsure (1)..(454): unsure at all n locations
gcttctagcacactccagacatcttctcatagatcctaacggtcagatcatggacgagtgtcttgtgaagttgcaaaccaaattttgagtagatccaacggttaacgaaggctgtgcagcgcttttaccgaggcagcttcatgtagttttctctagaagcttgattaagaggcttctagcacactccagatatcttctcaaagatcccaacggtcagatcatggaaaagtgtcttgtgaagttgcagacaaaatttcgagaagatccaacggttaatgaaggctgggaagcgtttttaccgaggcagcttcatgtagctttctctagaagcttcattaagaggcttcctccataggcttcctcgtggcttctttgagaagctntctcaagaggcttctttgagaagctagatccttatctatccacacccctctattagactaaataacttcct

SEQ ID NO: 197757 - DNA, 447 bp, Glycine max
  unsure (1)..(447): unsure at all n locations
tactaagctttaactgaatntgcaacgttccaattgtgttttaaatggtgtattctattacaatatattggtaatcgattactagtgtatctgaacgttggaatttaaattcaattgtgaagagtcacatcctttcataaaaagctttgtgtaatcgattacaaggatttgttaatcgattaccagtgacaagttttgaacaaaaatcaaaagatgtaactcttccaatggttttcaggtttttctaaaggttataactcttccaatggttttcttgaccagacttgaagagtctataaaagtaagaccttgatttgcatttaaacaacacttacnaacctttacaaacaaatttccacatattcttttacaacctttgaatctctttgaacatcttctngaacttcttcttcttcttcttcctttgcaaaagctntctaaagtttc

SEQ ID NO: 197758 - DNA, 472 bp, Glycine max
  unsure (1)..(472): unsure at all n locations
gaccttaagcacctgggctgcagcttctctccaaggacaacttttaatcttacaatgagngtgttacaattcttaagaattgttaagagtgattgcttttctctctaatggtgaaattattatatacattcttttaagttcaagaactcgtaatgctcaataattctcattgaagatactatgagaaaataaaatttgttaaatagaaaatattttttatatatgacccaatgataagtgacgtgtaaagtaaattttaagagaaatattttaagttttttttaaaacttgtgttatgttttttttttctaataaatttcgtctttctgttttataaaacttaacacacgtatttttttatggacataaacattaagttctaatcactttatctttttggacttatctttggggtccttgtcggaatagatatacattcatctttactctaaagctaataaagattgttcca

SEQ ID NO: 197759 - DNA, 450 bp, Glycine max
  unsure (1)..(450): unsure at all n locations
ggataattcattgcagcctataacatacctgagctcttttgtctaatagaagatatcttccatgggttcttttaccaccaacatgcacaatcatatcacattgcagacacagcgaactaccatctatctcacagtaaaagaaagctacacatacaaatttccatgacaagggacaaaggttcaacttctatatagtttagaatgcacaatcttgcaaaaaagatatgaatacccttcagtaccaggtgcattttcacatatgtcacagcgtggaacatcagtggggtcagcaaggccaactcgaacatgcctactagcaagttttgtacacatatggatctgtagctccaatgcaaaccacaaacacgatgctgcagagaaaaaaaattacatgccaatgtatggtnacttcattaaatatacatgaatgtcgttaccagaacacatgtc

SEQ ID NO: 197760 - DNA, 389 bp, Glycine max
agcttgaatggagctctagacagttctgtgtttctgaacagaaggctttctatgggaatccaacagctgggatccaacagcataaattcaggaaatcacggcatgtccttcattaaagatggaaggaatgtcctaagaaaaaagatttatggcgaacccaccttcacttctcctacaagagacggggcatcttctgcggtgtcaatacgttctatacggttttcccctaaatttcttattagaaacctagattttgtctgaaactgcttcagaaagcttgctttccaagacaactgttgtggaatagcaaaagaataagcatggagatatttatgtactcatgttcctaatcttaagtcgcccaaatggatgagctcgtacttgatgtc

SEQ ID NO: 197761 - DNA, 338 bp, Glycine max
  unsure (1)..(338): unsure at all n locations
ctatgaaactaagctatgagctntccgttctttgtgatgccgaggttgcttctttcatcttctccaatagaggaaagcagtacgagttttgcagcggttcaaagtattttcccccccacccaaatggcaaaaccaaaatggataattataaacacatggaatggacacaacatagcataaccaagaaaaaaaaaaaatcctttctctctctctctctctccttttggttacctcttcaaacacatatgggtatatgtgcacataaaacatactatcaccgaanaaggaaccgcaggacctttctagttctcatccacacctttctctcttcctttgat

SEQ ID NO: 197762 - DNA, 454 bp, Glycine max
  unsure (1)..(454): unsure at all n locations
tagaggcagatcgttggaattgactccaccagctctctcttggtcatcatcatcgtcctttgttactccaaaattgattcttagagtactagtggttgcaggaattgcctttgcatggcaatactattcacaatgatatctgccaactaagtagttttacttgtactattgcatgtattttcatgtacaatacaaaccttccactgcccgatgtgcctgcgtgcattcatgactttctaattgatcataacaatacatgtacaagaacaaattgattgattataaaaacaattttgtccatctgattntacattttaaatgataaaaattgcaataccatttgttttaatcgattatagccttatcataatcgattacataangttgtttaaacttgtaaagttatgtctcgtatcgggttaatcgattacaatcttatcgtaatcgaatacac

SEQ ID NO: 197763 - DNA, 384 bp, Glycine max
  unsure (1)..(384): unsure at all n locations
agcttagtggctacgtgtaccgccaaatctatttgcgttaacgggacagcgctcgcttcccgatctggcattgccagcgcaaaattgccccccatgcagatcaatgctcgagcctgccccgtacatattgcttgcatgctggcaattgcagcatgtccaggtgcatgaggtggggtgaagccatatcgctcacccagacgagccagaaactctgcagacggtttctcggtgataccgacggttcggtcgccctgtacattagagtgtccacgtagtgggcagatacccgcaccaggcttgccaatgttacctttcatcaacagcagattgaccagtngctgtacgttctgggtaccatgttcgtgctgagtgatccccattccg

SEQ ID NO: 197764 - DNA, 451 bp, Glycine max
  unsure (1)..(451): unsure at all n locations
ntcgacgaaattggcgcacgccttcaaagctatagtgattcttatcaggttgaattctatacttcgggccgcacttccaatgaagctgcctttctttatcagctttttgcccgtgaatacgggagcaataactttcccgactgctccaacatgtgccatgaaccgacaagcgtgggtttggcagcgagtatcggtgtaggtaaagggaccgtgttgctggaagactttgagaagtgcgatttagtcatttgcattgggcataaccctggtacaaaccaccctcgcatgctgacttcgttgcgcgctttagtgaaacggggagcgaaaatgatcgccatcaatcctctacaggaacgtggcctggagcgatttaccgcaccgcanaacccgtttgaaatgctgacgaactctgagactcagttggccagtgcctactataacgtgcgcattg

SEQ ID NO: 197765 - DNA, 347 bp, Glycine max
  unsure (1)..(347): unsure at all n locations
gctgcagctatacatggggagatattgcatttcttataacaaaaggtgaaaatatcctaccttgtagattatgtgcgacattataaaaaatttaatacccgccaatagataagatattccaaatgcaaaaacagaggattttattcaattaactaanatgaactaaaatgattttgttcaattaacacaaaggagctcatgtgagtaaaatggtcactcactttattattaccaaataaaacttattaaaaacatatcaggcttagaacaaggccatcaaagtttacaaaagaaatcttgttaaacaatggaataaaataaagtataataacatcatgcgattgaat

SEQ ID NO: 197766 - DNA, 457 bp, Glycine max
  unsure (1)..(457): unsure at all n locations
tgtaatcgattacaagaagctgtaattgattatagctcatccctgcctataaaaagctgcactttcgcagaaccctcactctcctcttctccttgacggtgtccaacctcctctaaacttcaaatcctcataactttctcgtttcttggccaaattacttcaaacaaagctcaaacttcttctttttttaattctccaaaaatcctacctatcagaattagctgaaacaagctccaatggcagaatcttcaaagaaacgaaagggatcctcctccaccaccactactgtaggccaccgtcaccatggaacattcgatgacccaccagcatccattcctccttccttttcatctcccaggtcattaactctattttcctctgatgatcagtgtcagaggaattattcccaatnttgaaaacgcgtcattcttgaccctaaatatttagatattgaatt

SEQ ID NO: 197767 - DNA, 350 bp, Glycine max
  unsure (1)..(350): unsure at all n locations
gataatgggtctaccatcacgattatcgcctccctttccattattgngggtaccacctgatccgccaaatccctccacctgttgggcgtgttcttagaatgatccgtccccctttttgcacatgttccgtatgtgcgtcctatccagaaccatatcaaaattgtattgatactgcctaacaacggcaaccattaggtccttccaagaatggactctggaagattccaagttagtgtaccaggtaacagctgcacccattagactttcatggaaggaatgtatcaacaatttctcatctttagcgtatgccctcatcttacgacagtacatctttagatggttcttggagc

SEQ ID NO: 197768 - DNA, 361 bp, Glycine max
  unsure (1)..(361): unsure at all n locations
atcaccattctttgtgctcatattaaaaaatgccactctccacttgaatctactaacatctagagctgacagacgctacggtacacgtggcctggatgggccttgagatttcacacattggactgttagtaccctttgttaggagaacatgaggggggacctacaatacacagaactatgacgctcatgtaaccactactacaattnttagatttaacatcgcacggctaacatcggctattcacaaaatcgatgtcaaccctatcgctgtggcatatttgtgaataagtagacttaagtcacatcagttnttgtgaaaccgatgctaactactcgatattaacaaccgatgatagtgtcg

SEQ ID NO: 197769 - DNA, 447 bp, Glycine max
tgaagctaaggaaatggtatgatatgataagttgtttatcattcatttatgcgctgcaatccagcctcagaaatgacattccattgtgattgattcactttgcatttctcaaagaaatcagcgattttgttgcttgattcctctccattgagggggtcaatgtggaagccggagaccccatcaacaataatttctgctggacctccttggttggtggcaaaagtgggcaagccacagttcattgcttcaatgacagttaatccaaatgcttcatacaaagcaagctgcacaaaggctcctcttgtgtcaacgatgcaaccgtaaagctctccattgcgatacctattcgtctgtgcaccaatccatctaaattgacccttgagttggtacttatcaattaagtcatgcatactttttatttctgccattttctccctatcttttgat

SEQ ID NO: 197770 - DNA, 395 bp, Glycine max
  unsure (1)..(395): unsure at all n locations
agctnggcacgaagaaggcccacgaagaagttctttgtgcgcttagcgcgacatccagcgctaagcgcatgatcgcctcgctaagcccagatgtgccatgctcagcgtgtgatcagccgctaagccctgaaggggcgcacttagctcagaggcaatgtaaaaattaagctaccttgggcctatgaaaggagtaggaagcagaaggagaaaacaagtctcaaaactctctattgaagatatccatattagtccctgaagtgtaaagcttctcatggctatgagaggctaaacccnctctgttgggagcctagtagccaacacccttgtaatgtaacttcttttattatctattaaatacaacttttgttctcattatctcttttcttctcttcatc

SEQ ID NO: 197771 - DNA, 218 bp, Glycine max
  unsure (1)..(218): unsure at all n locations
tgtggctcctcctcanatcctcaggaattcccccagagagtatagttccaagaaatatcaaggcgcgtgagttcagtgagttgagagaaattntcgaatatgttaccatatatgtcactggtagagatatcaactntcacaaccctccttgttgttccattcaagatgctgctgcacttngattcctgacccattcacantgatttgaactggtcttg

SEQ ID NO: 197772 - DNA, 416 bp, Glycine max
  unsure (1)..(416): unsure at all n locations
agcttcagatacgtggtgtcttggaaaacttactttgttttcctgncatgnaatatgcatacactgtttattatgctattgtttacatggggacacagcaaagtcatataattaactctaccaaagaaatcttttcgagctatatacagaaccggatacttattcttagcaacaatgaaaaaagaactagtaatatttaccactccttaatntcacaatcttatatactggccaagtgctacagtgtagaattgtatgacaatgaatctatttatctgcaatggaacttcaaactcatgctatacctcttggacgtggctgctcaaatcacactgtcaattgatgaaggaagccagagttccacacgagttccccccgctccaagaggagcatctttaatccaaggcaaaacaatg

SEQ ID NO: 197773 - DNA, 151 bp, Glycine max
atccctaatttatgattagatttacggttcactaaaatttaaaagcactcttagagattattaatacacgtgtaagtaaagtactctcaccctgtatagtgatctccttgtgtcaattggcgcaaactgaatgcatttgtctattacaact

SEQ ID NO: 197774 - DNA, 434 bp, Glycine max
  unsure (1)..(434): unsure at all n locations
agctngaattaggacagaaacattcaagcttttatattattgcattaagggatgaaggtggtttcacacttttgaagtatcatttttttttacattagggttctattccttatgtattcaaaaaaatttatgtcagtcactgtaatcttacttatcatgtgtaagaacatattaattggcaaggatggcttaaagaatggttgaaagagatgattgaatattgacactatattgtaagacaaggtgacattttttttaaatctaaaaacttaggaataagaagtctcaaaagtacgaatcaattgtatgttttagaaattgggggtgtacgaacaacaactattcttatctaagactcggcaaattatgaatgagaatgatgtagctccatctagagcttgctggccttggatcttctaatcaatgaagtcttt

SEQ ID NO: 197775 - DNA, 264 bp, Glycine max
cgaggtacttacccgttgaagatcgaagaacgatgattatcttttgaagaacgtcgaagaacggttgaaacctttgcgaaattcttcacggaaaacgttacggaaacgtttcggaagcgcctcggcttagattttcttcacggaaatgatttttccaacaaattcgaaagagagagaagtgccaaaggggctgaacccttttcttcttcacttccttccctatttatagcaaaataggggaggtggttgccgcccacgcgagcc

SEQ ID NO: 197776 - DNA, 449 bp, Glycine max
agcttaatgattatatattaacaatgtagaataatattatctaattataaattattattgatataattcttaagataattatttaaaatctaatgaacttggtatatatagattagatgattgtgtgaaactattttatattttcaatgtatactaatttttttctcttaaaagattgcatggatgattcatccattttaatttctataaagaattcttttaaattaagtagaatatgtgtctatgaagtaaataaacaaatttatatatttttaattaaatttagctataataagtgttttacgcattaaagttttttttacggatagtggtatttatacaagcaattattaataacatactactggaattagttacaccacccaattgttcttctaaacaagtttttatttattaaaatataaaaattcgctatatattattaattt

SEQ ID NO: 197777 - DNA, 455 bp, Glycine max
  unsure (1)..(455): unsure at all n locations
actaagcttcacggagaaaaataacctgaactccaggatgtgtctcattgtttaactcaaacaacttgttcacaacagttttaaggaacttccaatgagctcttaaaaaccgtggatactgcccaacaacatacctgccaacaaaaagatatattattaaaagaaacagaactaaacaagcaaaacacagcaagatggaatgtgtgaataatccttacatgatattactcgcaataacagctttgttatcttttccctttgtgatttcacataggtttaataaatcgcgaatgaccataaccaagaatctgttttcctgtaaaaagtccaagataactaaacaaaaaatagagaanaaacaccaaaactaataaaaaagaatgctataaaagaaatagagatagttaacaaattaaatcagttgataaagggatgtaatacatgaatcagtccca

SEQ ID NO: 197778 - DNA, 429 bp, Glycine max
  unsure (1)..(429): unsure at all n locations
agcttgcaattaccattaataaagtctcttgtacngaccatatccaatgttgnaatttatcttccacaacatgtttttagccatgatcaattatatgttgctttgtcaataagtgtttctcaatcttccacaaaaatccatattaaagaaagacaacttgaatgagaggatggaaacttcacaaaaaatgttgtctttaaagaaatttctttggttttcttttaacaaatattcaatagaattagtaatattgtctaggatagaaagtttgaaaagctatggaatatttggaaggatgagtattcacttggaacaatttgtccaattgactacacggttagatcaaatttgtactaacaatctcatattatgcatttcatccataactgattttaatttctttacatgggtcccgctaaaaatatttgt

SEQ ID NO: 197779 - DNA, 461 bp, Glycine max
  unsure (1)..(461): unsure at all n locations
cttcctcgggccattntctgcgaaggcaaacatttggaatgttagttttaccaagaaatgctactcttaacacaaacatcaatgtaaatttagagcaaactcatgcacatacttccttacgaacattcactcgcacaagatattcttccaactaaaaaaaaaatgcacccatgcacaatcaaggcaccttcgttacctagattatttatatgtacttccaaggtgtatttgctacctacatcacatgcacttccttggctaaatttacatacatgcatactcaaagcctcttggctaccaaaaattgcacacgtgcacattctagtatttctaatacctatgcatatacaaactttgtgatgaatcttggctatctacacaataaggtgctacatttcatgctttattcaagtgtttttgctacctaaagccgcatgcaaattcaagtatattntcttttg

SEQ ID NO: 197780 - DNA, 230 bp, Glycine max
atgttgaagctgatgactctgcttgttggaattgggatgatgagcaagtggagaataacgttcttatacccgctcaactacgctaagaagaagctgaggaagaacacccaagtgaaccaccttcgcctccaccacaacaaccagatcaagaactatcatctccagagtctactccaggatgagtaacatctttggttgcatatatgaaacctattacttggccatacttg

SEQ ID NO: 197781 - DNA, 449 bp, Glycine max
  unsure (1)..(449): unsure at all n locations
agcttgtctaaagaaccattagcaccatatctantgatcaaaattattcatcactcataaatagagagggcaaaatgaaataaagcagatattatttaattcaaatgtcaagcaaactagtcatgcatgcaaaggaaacaaagcaatattttgtccttgagctagagataggaaaaaaaactacataaccaaaagatcactccaagttgttgcaattcaaagcatccttgacttttaggattgttgaggttaaaagggagttcacagcttccacagattccagtgttgacatatngattccatctggactngaagcaagtatttggaaagccacagtcagtaatgagcctnccaatctttcaatatctgaactattaaaatgctccaaagctgcatttggttcaccatctgcagagatgacaaaacctgatggaagaactgggtacatt

SEQ ID NO: 197782 - DNA, 455 bp, Glycine max
  unsure (1)..(455): unsure at all n locations
ttaagcaccgcagctgcgctgcaaggaagataatctcatattttttacgcgtcaaaatcatctagtaaagtaatgaacatatactgtaagattgcacgcattgatttgcaatgagcaatattcaacataaaataaatcagttatctaatcgaaacccatatatgtatatttctgaatcttgaagcgaaagtttcaatggttataaaaaataggataaatagtcacttttttccataaacgcgtaatttgttaacaaatgcgtttctgaaagataaaaatacaaaatttagtcatcgaaagtataaaaaatgcgataaatatatcctgccgttaacgtctgtccgtaccgttaataataaacctacgtgatcaaagagacgaattattgcaacatgatcatcttaattgctgctaggacatattattataatntcttttgactttgattccacaat

SEQ ID NO: 197783 - DNA, 347 bp, Glycine max
tctggttggtattggattttggtatatcccttcaacactttcatgtagcgttcaactggatacatccactgcaaaaaaaccggaccacacaaccgaatttccctcacaagatgaacaattaggtgaaccatgatgtcaaaaaatgatggtgggaaatacatctccaactgacaaatgacaatggcagcctcattctctatgtcatccaattgttgaggattaatgactttgctacatatggcattaaaaaggaagcacaaacgggttatggaaaccctaaatttgtcaggcaagatgccgcgaatcgcaacaggcaataattggttgcataagacatggaaatcatg

SEQ ID NO: 197784 - DNA, 407 bp, Glycine max
  unsure (1)..(407): unsure at all n locations
aactacgcttaaaagtaaccctaaacccttattaagaagcactttncattattataacctcaacccaaatttcgaaaatttaaaaagcttctcgcagatcaagatgatccgtgtgaagcatgcctgaatcaaaccatatacgaatnaactaatacctacagggatcatctacatccctaccctaccctatgactactcaggcaaatgcatacgcggatcaactaccataagcactacacaaaaaccccacaatggaaacacaaatgacattgagggagaagagtgcttacctcgacaatgcctacgagctgaataatatgaagaagactatgaagaacaaagcaacgggccaagaatcatatgagattacaaccccacataatggaactgggtggacattgtagaaa

SEQ ID NO: 197785 - DNA, 449 bp, Glycine max
agcttgtagtatgaagattaaagttcttgctttgatactatatagaaggatggttctattgagtgttcaaactcccaagatcgtctgttctttttggtaggattgatttttgaattgacctgatttgttgaattgttaattaagaaatcaagcgtaaatttcattatgtatttgtcagcgtgaaaattctgagcacttcatagacttacccctgtaagagtattggcgcatgtctggtttggcatccacgattcatgttcatgtgaaatttagatcaaaacttaacgtaaaaacaactgatagttatttatgatgatacggtcacagcaacatacaaggcaggatcgtaaatattgatgttatcattcgctaagtaccatgtgcgagtacacatgactttttaagaggaaatgagatcttttcatgcccttgacttgtgaacgtatctc

SEQ ID NO: 197786 - DNA, 454 bp, Glycine max
taagctccttcaactacacaagactcttaatatttgaatattatccttgtggaaccttcacccgacgaagacactgacaaaaacttatcttctccttcttggacaaagtatggcaggctgggggcaagtaaattttcttcccatcagaccttggatgcaactgtgatcgtatacccatatgagctagatcttgacgggtattcaagccatccttcgtcttgccttgaatgttaaggagcgtcccaatcacactgtcacaaacatttttctccacatgcataacatcaatacaatgtctaacgtcaagatcacaccagtacggaagatcaaagaaaatggacctcttcttccatatgcaactctgacttttatccttcttttgggtcttcccaaatacagtattcaggtggtgaacccgctgatatacctgctcaccagtcaatggtatcagcgc

SEQ ID NO: 197787 - DNA, 240 bp, Glycine max
ttagacagtggtgtatggctcaaatactggaaattcgtcttacaacgattggaaattatatcccggcagcacgatttaagtagctaaaataacccttgctggttgtggaagttcacaccattgaaaaagagcttgcattcttgtataggatttaggtgttatataaaataggaatctttagggtgaaaatggcttttttaattgagattcaaaatgtttacctgcataacatggtgttaa

SEQ ID NO: 197788 - DNA, 451 bp, Glycine max
  unsure (1)..(451): unsure at all n locations
actccgcttaaactctcgatctttctgacaatttcttcactgttctacttccagatactctntcctacatgaagggtctccactatttgtaagttcaagaatgctacactttatttcataggctttatagaaaaatctgtgttaattccctatcaagaatatgatgataggaatttgaatttcaatcaggcggctaaacaataacagtctcactggaccaattccttcctctttggctaacatgactcagcttgcctttctgtaagtctcttctagctttttattattaacttattattttttcctcctttgttaatgtgatttcttatcaataatttggcttcttctggaatttgcttagggatatctcttacaataacttgagtgaacctgtaccaagaataaatgcaaaaacattcaagtaagggtgtttggccttaattttattagt

SEQ ID NO: 197789 - DNA, 360 bp, Glycine max
  unsure (1)..(360): unsure at all n locations
tgcaagctttacaatgaacaatacttggatacttatgcctcttnctnctcacaaaacaagtatcggatgtcgctggatatataaaatcaaatatcgagccgatgggtccatagaaagatacaaggcacgcctggttgccaagggttacactcaaacggaggggttggactaccttgacaccttttctccggtagcaaaactcacctccgtacgagtccttctagctttggccgcactcaacaaatggcacctgcggcaactggacgttaacaacgcggtttttcatggggaccttgaagaagaggtatatatgcaagttcccccgggacttccagttgataacccgcagcttggctgtcg

SEQ ID NO: 197790 - DNA, 315 bp, Glycine max
  unsure (1)..(315): unsure at all n locations
tatagttattggagggagaataaaacaatccataatcaattgtacccttcaagtaacgaagaattctttntgcggcttttagatgaggagaggtaggagcctccgtaaagcgacacacaacttccaccgcatatagaatatcgggccttgtattggttagataccttaaactccccacaagactcttgaagaccatggagtctaccttctctccttcatcaaactntgataacttcaagccaccttccataggtgtgttcacgggattgcaatcaagcatactaaatttcttcaacactctttttgtgtagcttt

SEQ ID NO: 197791 - DNA, 346 bp, Glycine max
attaatcgccagaatcatatcacgttcccattgatgaaaattgctttcggtcaacgatggcgaaacatgaacaacggtatgattctctccgggatgaagaacatatggattgacagggttgacaaagtgatcggaaagtgaatgttgattattaacagccatggtttatatataagaagatgacaagaaggatcaaaataggaaactgaatctcagatagagaaaaacggaagaatgatgaacaaagatagctttctgtacagggatgataccatgaaagaaactctgtcagaaattggagggaaaactcagtttttggaatgatcttctcatcaatacacctaaa

SEQ ID NO: 197792 - DNA, 381 bp, Glycine max
gagcgcacatgatcaacatgccagataccaaatctagttttgtttctgatggatatgcctcaaataatcaaaagacatttatgaactgtgacgacaacacattaatccatgtattaccttgcaattcatgcacatcaaacaaccatggcttgaaaacaaaatatctgattggtccattatgccatttgtcaaacccagatattcattctcaatcaacctatatagagaaaagtgacatttaacacggctgatctaatatcaccagacaattaagaaatgactcaggagtatatctataatcacaatgatataaaggatggggatctaattccctttaagctgtggtggcatcttaacttttcaacttcaatggcaacattt

SEQ ID NO: 197793 - DNA, 423 bp, Glycine max
tactaagcttatctgaataattaagaaaatcggcacactatgtcggatgttgtgatttggcacaaaatctcaaaagccctcaccatggcccaactgttatgggggagttgggaagggcccatggtcaagtgctcaagaagagcacactgaaaatcggtcaagcggggagcaagaaccaagacctcaaacagacacctgtacatgaagaagaatggcggattgcccgacaccgccctcaagaaggggaagtcatcattcccgcaagcctcaacgagtatcttgtaagagtaattatggtttgccagcttcacctggcattgcagagcaacgacaatcaccgcaaaggtgagggaggacttatacttatgaacatcgtccttcacccactcatagccaacaatggcaggtggggatgatgacaat

SEQ ID NO: 197794 - DNA, 369 bp, Glycine max
ggagcgcctagtttgatagagatataagaaaggaaaatatttgcccactaaaaagatgttgactatgaagaataaataagaaatcctgaacgtgatgggtgttcggaaaaaatcgctgtgtcaatgagaactttgtgattcaattcatggatccaagaatgaatggtgtgagtcaaaatgttttctgtcattgtaatgcttcactaactgtgccttcttgtatgaacaataagtacagtgatggtatgtgatgtgtgttgtgatctaattacaaacttttatttgtgtggcaacaacaacataaaatgtatttctcataaaaactggattattagacatactcttaacacttatatccttggaaagata

SEQ ID NO: 197795 - DNA, 419 bp, Glycine max
  unsure (1)..(419): unsure at all n locations
tactcgagctaactgactcacatcatattgaagttagcttagctcaacctttgtctgcttatcggaccaaatctgcctcagatgcaatggttgggcgctaatcgcttgatactcactgctgagcgcatgaacagagatgcgcttagcgaaatgactgttttttttcagagaaatttttttttctaagttatttttcagtcgtttttccaagaaattgaaatccttatgttaaacattcaaagattggctgatatactcttatgtacagattatatagcaagttttagctgattaaatgcatgaaaaacaaagataacagaaattcaaagctgggttggctcccaagaagcacttctgtaatgtcattagcttgacgctnttacctcactgggtgatcttatgttttggttcttactttc

SEQ ID NO: 197796 - DNA, 402 bp, Glycine max
gctactcatatacaccagatataatgcatgctccattcattgttattatggcgtccatcattgcagatgccaactcttgctatatgaacatgccatgtgacctcataaacataggcgcgacatttcaacgactaatataccgagtcttcaaagaacagatcagacgaaaaattgatgtatatgtggacgacatggttgttaagtctgaaagcataccctaacatctggtggacctggaagaaatattcgggaactatgcaaatacgacatgtgcctcaaccctgaaatatacttttggggtatgtggcgacaagttactcggcttcatgataacacttcgggggattgatacataccccacaaatgctctgtcatatggagatacgcatcccaaccaacata

SEQ ID NO: 197797 - DNA, 411 bp, Glycine max
atgcactattcaatggagttgacaagaacatcttcagactgatcttcacttgcacagtggccaaagatgcatgggagatcctgaaaatcactcatgaaggaacctccaaagtgaagatttccagattgcaactcttggctacaaaattcgaaaatctgaagatgaaggaggaagagtgtattcatgacttccacatgaacattcttgaaattgccaatgcctgcactgccttgggagagaggataacagatgaaaagctggtgagaaagatcctcagatccttgcctaagagatttgacatgaaagtcactgcaatataggaggcccaagacatttgcaacatgagagtagatgaactcattggttctcttcaaacctttgagctatgactctcggatagggctgaaaaga

SEQ ID NO: 197798 - DNA, 423 bp, Glycine max
gctcctaagaagattcctaaagaagctagagcttagctacacatacctctctaatatctaagctcacctccttgagatgagaagctagaacttagctacacaccccctataatagctaagctcacccccatgacaaaaaacatgaaaatacaaaaaaaaaaaaagtccttactacaaagactactcaaaatgccctgaaatacaaggcttaaaccctatactactagaatggccaaaatacaaggccaaacgaaggaaaaacttattctaatatttacaaagataagcgtgctcatacttagcccatgggctcgaaatctaccctaaggttcatgagaaccctatggccttcccttggatctctagcccaatctacttggagtcttctacccaatgcccttgggggataagattgcatcattc

SEQ ID NO: 197799 - DNA, 300 bp, Glycine max
cacctatcgagttcagatacatgacacacgagatgtgctttttattgctaacaagatattctcccatcttaaaacctatctgcaattatgtgactacccgtccccttgacatcacttcctagaataaacttatttgactcctttcttatctggatcaattgaattccagttccactaatccaatgccctaatgatgtttaccccaacattttaaggataaaatcttaaaatcagtaacaggacgtaacccgagcattaaagagttattctttatctgcctattactatctccaccattag

SEQ ID NO: 197800 - DNA, 398 bp, Glycine max
ttttgtgttatgagcctacatcaacaattggtttattgatgtttctgtcacaatcaagtgatagttgatgtctccatatgtgcgtacactgtgattatgttttcgtttctagaattcatttggagtatctattgttgattctagatgagtgatccttcttgatttaaaattattgtctcctaatcaatcgagtgttcatcttattattggctgctcatcttccaatcatgtctagttaaattgcttgataatctttcttgttgttacttctaattcgaataaagagagacttcgcctttgacaatcacgttaagatgttttgagaggaaatacttgagtagacattatcattgttacctatagacgaaagtcaaacttaataagacgtgtacctgtgt

SEQ ID NO: 197801 - DNA, 400 bp, Glycine max
ctcataagtcctaaatgacacttcatactaggactaactcactgtttctctccaatttctactgaatccagatttagcctttcaaaccctcaaagcatcacactttttccactcataacactacattctcactttctaaccctgtgttaactctacccttcatccctagcagttttccatcagcaatttcagcacataaacatcacaagcatcatcataataaccctaaaacagaatgggtaagcttgactcacaccaaacatggcaagttcaacatgctttcaacaaatctcttcacaaataactatcacaaagcataaaccaagtaaaactacccatcatatctcccaaagccccatacccatgaatatttatgtgagaagaagtctacccaaacctg

SEQ ID NO: 197802 - DNA, 378 bp, Glycine max
tttacaaattcttcttccaagagttggctatttgcatgactgtgagtcagattgttagtgtaacaaacagcttgcttgtagatcagtaaacaacatttttgtcgaaggaatggatatatagaagttactttatgcttgttctaccacccaaagctaacacacttgtgaacttatcgaacagcataaccaacaaggatttaatgcaatgattagcaacagtaattacagtatgactaacaaaggattcaatgctaaggtcatatttcgaagacaacaattgttgcgtggacttcttagttatggtagtcttccaaagagaataaataaacttgatttgcgattggttgagggtattgcatgtggaatgttgtccccatt

SEQ ID NO: 197803 - DNA, 432 bp, Glycine max
gcttgcttgatttattctgtgacttgatccttgcttactcttagttgctgtgacttcggatacaatacatatcatataatgtcatcaaaccaatatccactacatttttcatccaagtagaccgggagtactcatttctcggcacattccataatttgttgcagtgggaagctacgcagtcagtcacatttcactgcagtgggtcacgatttctaagttcactgtagtgggaaggtgtatcagccacatttttcactttctaatacaaaacagattcaacagtgaaagaagaaaacaaggaaacgaagaaaatcaggggaattactcaatattgattaaaggcaaaatgaaaaactacaatagaggatgaaccccctaatgtcccagagctatgctccgcatagagaaaaactattctccctacctttaact

SEQ ID NO: 197804 - DNA, 416 bp, Glycine max
gcttctatttcaattcggagcatctcgattatgacgggactcaatcggtcttccgttttaaaagtataggcgccggaatatcctcagagcttctggttacaatttcgagcgtcgagatataccacaggactcaatcagacatccgaggtaaaagctactatcgcttgaatatgctacgatactccgttttaaaatgcgagcggctagatatactaagggacacaatcgtacatcgcagaaaaaaggacattgcgattgaatatgctcaaaacttctgttttcaatgtccagcgtcttgatatattatgggaagcaatcggagatccgacgagaaatgtatgggtgggagaaattgctcagaacttactggtttaatgtcgagcgtctcgataaaccacaaggatcatgcggacatc

SEQ ID NO: 197805 - DNA, 411 bp, Glycine max
accttaagagattgattgcaagacatgtgtatcaaatttttataattttcattctaagacgggtctctaaaaaatcggcttagaatgtttacattttaagatgattttttgcgaaaatcatcttagaatcctcaaaatattttactttgtaaaaaaaaaatacattctaagacagttctctaataaaccgtcttagaatgtcaaataaatgtcttagaatccacaatattttgtatatatatatatttttaaaaaaatacattctaaaacggatatctgaaaaaccatcttagaaagtctacccttctaagacagtttttgactaagaaccgtcttagaaagatatcattctaagatgggtttgagctaagaaccgtcttagaaagatacatgttttcaaggcgatttttt

SEQ ID NO: 197806 - DNA, 369 bp, Glycine max
ctatatatacaactaatgagggtaaatagataattgcatgagcactgtaaaaattacaactaatgtagtactgatcgcgcgtggtacacgtgtatctgaatgagtaactttcttctctcggtcaattgaccatggactgttcaacatgtgttacacgtttgacattgacaagtcattttattgtattcatttaatcggtggcatcttttgagttactctacttggttaactctaaaactctttaaagtgtaatatgttgtgtttagtacttaataattaataaacttcttattcattttataataaaaaaataaactttatgttagtttcattaaaaacaagtggaaattttttttcctaaataatcat

SEQ ID NO: 197807 - DNA, 410 bp, Glycine max
  unsure (1)..(410): unsure at all n locations
cttctgcatgtctangggtttctagagagagataggtccaagtttcttattttgagagatttgctgtgtgaagacctgcatataaccgatcttgaagacgaagccgtcctgagagcttgagatgattttgtgagtgattgtgacgttctatatgtggaggaaacatccccaccacttctatttcttcaatccttcatctttttttctctttggggtaaaggaggctccgtaattatggagagctaaatcctttgttatttattccttgtcagtacttgatgtaaatacctgtatatctatttaatgatgctttatgtgttcactatgctataagaacttcatttttccatgcttttgccttgaccatgtatatgcatgtgtttttagaatcattaaaccgtgggaaccgg

SEQ ID NO: 197808 - DNA, 413 bp, Glycine max
  unsure (1)..(413): unsure at all n locations
agatactaacttataaagttatatggctagaaacaagcactgatgcagtggtacatttattntaatgagtttatgagcaacctatgattcaacagatgtggcatgaaccattgctactacgttaagaaatatactaatagctatgttatccttgcctagtatgttaatgacatgtgtattgcaagatctattatggcagaaattaacacgttgaagcatctgttgacaaaaaaacttgaaatgaatgatcttggttcatctaaacaaaaatttggtatgagaattcttagaaacagatcataaggaattttgaagttgtctcaagagaaatatatacataagttgtttgacaggatttaccttgaaaattttaacaccatgaatacacctttgggatctcaattgaagtgttc

SEQ ID NO: 197809 - DNA, 441 bp, Glycine max
  unsure (1)..(441): unsure at all n locations
ctaagctaacgggagttcctgaacaaggagaagtaagatgagaagtagaaaggtgatcaaagccaagtanttgacctggccaccacaaaccattccttcttcgaacccaaacaatcgatccaacatcacaatccactagacctaacccaaacactccatctccctcactctacctttcattttctctctttttcgcttccccaatttttctcttgatttcttttggtctttcgatattaatagatggatgtgatgccttagctgctgatgaagaaggacgatgaataaaacgacaaaaagtgcgatgtgggttagggcacatgattccattcaaatttgggaaatttcatttttaaggttttcaattttgactgtgcttaattaaaagcttgaatcttctagaagcaccatgagctaaccacaaatccatcactataatgt

SEQ ID NO: 197810 - DNA, 417 bp, Glycine max
gtgtggaccctctgggcaatcctgcattctcctctattttcggagccccatgaatgtcattgcctatcgctgttcatgtgtcttccaccttcgagtctggagccccgcgaatgtgattgcctagctctatacgccaattctccattctccacttttattcggagccccatgaatgtcatcgccaagcgctggtcattcatcctccacccaaagagttgggagctaagcttcttgattgcctaagtgtggaccctctaaggcaatcctccattctccacttttttcggagccccatgaatgtcattgcctagcactgttcatgtgtccttcaccttcgagttctggagccccgcgaatgtctttggctagcactgttcgccaattctccattccccacttttcttacgagccccatga

SEQ ID NO: 197811 - DNA, 425 bp, Glycine max
tactaagcttgtacaggtaccaatctcttctggaatagcgcgaacgagacctttctgttccataaacaactgttccagcttctggagcctaccaagctcagatggtatagaccctgatggctattctcttttttaacaattcaacaagctcagaacagttacctaactcgggtggaatctcaccacacagcatagtagtattgatggacagggtctgataccttttaagtctccccaaagaatcaggcatagaaccagatattctggtatctgcacaccccaacacagtcaaattgccgcattcttcaatctcttcaggaatctttccaacaatatctttgtaccctcccgctcttaaagactcaatgtgtgaaaactttcccagctcaagtggaataatcccacttatctgattatcaaaaagg

SEQ ID NO: 197812 - DNA, 415 bp, Glycine max
gctatacatggattctggtatggtgccattctattttttatgatagatgtcaaggtctgtcaagttatggtactcaagtatgaaactaggcaatccgccagtgaagacattgagatctaaagcaagatgagttaaggcaaggcattccaaaaacatattcttacatgcgaatccaactacgaattagttcatgcaggttttgttgatattaggcatagaggtaaatgtaaatataggaaaaatataactatatggtgtggtccacgtccgctgtggtatgtagtgattataattgaattccttgtgttttataccaccatattgaaggtctttggttctctgacggcacaatgacttcaatttccatgcatgaaaaataatgcactagtatgggcatgggactaaaatacaaaaa

SEQ ID NO: 197813 - DNA, 431 bp, Glycine max
  unsure (1)..(431): unsure at all n locations
tctgcttacaagatagcttccatcaatgttatacttagactatcctaaattatgatagctttntcaattggaaacccaagattgcttaccagacctttaagtcagatctcatcctttattgcttctattatagccacaatgggctaaagagtttccttcaaactatcaagaaagttgccaatcatgaatgcgtaccttgtcatagttctccttgcatccaaatctacagcatagtcaaaatctaaataaccagcatgagcacaagacgtgtctccatggtagacaagtccaatatcagttgtacccattagtacccaaatatacatatcacaacttaccaattgtcgcaacctacccttctgcgggaatgcgacacggggctcacgggtgtgtcatccaatatacgaaaatgcgcggagtcgccaccaacg

SEQ ID NO: 197814 - DNA, 383 bp, Glycine max
atttatctcatccagcgcaagttgttgcatcccatatacgcacactgctatataaacatgaaggctgcacgagttttctaccaagtccgggattgaagagttattttgtgagttttgggacttgagtgttttgtgagccaccttgaagtcaccctaacatcaagtgttggacctgagtgtgtagagttgatctctattgttcagagagcaatctctggtgtgtctttgatttatttgtaaacacgggagagtgattgagagggagtgagaggggttctcatatctaatagtggctcttatgtataggttgcacgggtagtggttatgtgagaaagttgtaaacagtggctgttagatcctcgaactaacactattttaatgga

SEQ ID NO: 197815 - DNA, 382 bp, Glycine max
  unsure (1)..(382): unsure at all n locations
ccaatctttctttcgaaacgactctatactctgcagttnttcgaagttaagaattcctactggatccctgctccacacctgctccaactttgggagtccccttaccataacaacctgcatattcgtgtctatcccaccacatgcatgtacttgctgataaatctttgatttcaaaaatcactttgaactgactgacaagaataaacctgtaagctgttctaactagctaaccatcctttcatgtgacttggaaatattctgtctagtctattgcaactataaatgtacacagaagtgagactggaaaatgaaataacactcactttagcttgccatatgttatggtacctatccatttggtccaagtggatttccttcaact

SEQ ID NO: 197816 - DNA, 427 bp, Glycine max
tactcaagcttacatctctccagctccaatgaccaacatccgtgcatgggcatgtgttgcttcaagaagcttcatcaaggccacttcaacagctgctgaactaacagaaactgcaccaacagcaatgtttgtctcagttctaaccctcttccccacagtgattgcatgcttgaatagtccactaatgttcctcccaaagccattcactccttgtccaactttgacaacctgcttcacctgagcaaggattagaccttctcccaacactacagaatcaagacctgccgatacttcaaaaaggtgctgtggggcatctttgtcgtatagcataaactgatgccggcaaatatctgcaactggaatcccacttgtcttcataaaggacgaaacaagaatatcccatatcttatatgatggccataaaaac

SEQ ID NO: 197817 - DNA, 310 bp, Glycine max
  unsure (1)..(310): unsure at all n locations
cattttctcagcaaggaacatgatacaggctgacaaaaataaaacagcacacacgggaaaaaagcgaaacaaagagacaaaagaagggaggaggaccctggcaccccctaccgcaaaaaaaccagggagaagcggaagggacgtgcacactacaccgggacacgccaccgcggatatggcaaaagcgccgcggacgtcgccgcagacagagatctgatgaaatcaaccccagcaagggagaaaggcacacgtgcctgggacacagaaagcacaacaaaagtgcaancctcaaaccgcagagacaacaaac

SEQ ID NO: 197818 - DNA, 299 bp, Glycine max
ctcttacggggtatgcgagctagatggctcaagtttcctcttaatttccacaaaatgctctacctgagtgcactgatacactgagagctcgaccgataaatgcagaggtcttccacgaaagcgcttcctctatagcttatacgactcctaaattaactttccatcacacaagctgacattattaacatttaacattcaacataaggacgtacttcttagcatgccaaaaccacttgttgacataatcaagattattctgctaaataaggctgaatgccggacaaataactatctgcatc

SEQ ID NO: 197819 - DNA, 395 bp, Glycine max
  unsure (1)..(395): unsure at all n locations
tcttcatggctacatcaacaacgcatttcatttttgttcttctttacccaattacatatgacattaagtcgaagatacatgctctcctctatggcgtatactagttgagcctattatcaaatcaaacaaacttcaatgattcattgctaatacgcatattccactttgatttctctttaaagaagatcatgaagtgggacgcgataacctagtttatgaggcatgggagtagcaaaattaggtgttattaatttggcttcaatgcattctttctacactgattntttctcatgtaatcggttataatcactcctatgaagtctaggagcgcatccatgattacttccacaatcagatcatcgccacaacgcgttagtggcacattcaacttcgag

SEQ ID NO: 197820 - DNA, 408 bp, Glycine max
tagagatgtcgttatcactatcaaacttctctcttgagcctgcttagaggcaagggatgagtgtatcgcaattggggttagaatgaacatgtgtagggatccttacaggatcaaattgtggtttattttgaaatgtttattgtattataattcttcctttatgattataattacaatatcattgtatttgatggaccaatcaattcggtgatgtgaattggttgataaaattgagtgctcttggtgtttttgtgtttttgacctatgattttgattcctttgattttgatatgataatgcaaaattgttttaggggttttactctccatgttgtgagaaacattattgtataattagtttgtgttttggacaatatttactatattagtgtgataaagtgctatattg

SEQ ID NO: 197821 - DNA, 380 bp, Glycine max
ctaagcatcatcattcatttacacaaatgtaagcatgcagagaaagccctgtattatcaagaacatcatacatccatcctaaacatcattggaaggggaataaaaaaccattatccatgcccatttgttacaggaaaaaatatttccacaaggcctaacaaccagtttaattgaacagttagactatgttaacaataacagccaaaaaagacaatgtgacctataggtttttttcttggagcattttggcaacttataagagtgaatctagtttgcttccaatagatattgagtgtgtcctcaatcattggaccattttgttaatgataagctttaatggtcttgatacaatttaagaagaaaaagaacaatccaatcat

SEQ ID NO: 197822 - DNA, 344 bp, Glycine max
tgctcagaatcataatgctcaaaattataatgctcaagatcacgatgttcataatctccaataacagaatgcactgattcaccagctctggaatgcctccaatgatcaaatggtgaaatatgatgcctcactaatctatgaaatgtcctatctatctcaggatcaaagggttgtaagtcagatggattgcctctatgtttacactacattcaacatgcacacaacttgttgcctcgtcatgtaaataaatgtgtatgtttgaactacagctacccccaaatgatatccatatgacttgtaattttgagatgcaccctgtaaaatgtggacaagatagcacaaaa

SEQ ID NO: 197823 - DNA, 360 bp, Glycine max
tgatgcctgaaatgtctattctgattgtctttgtcctatatgaagggaagaatttcttcaagaacacccacttaaagtcgtcccatctgtaaataaacctgtgagcaatgttatatatccaatcatgtgccactccctccaaaaaatgaggaaaagcctttataaagatatgatcgtcttggacgtcatggggcttcatggtggaacaaacaatatggaactccttaagatgtttatgaagatcttctcctgcaagaccatgaaacttgggctgcaaatgtattagtccagtcttgagaacatatggaacaccctcattcagatattgaattcacaagttaccataagtgaaatcaagat

SEQ ID NO: 197824 - DNA, 374 bp, Glycine max
  unsure (1)..(374): unsure at all n locations
tctatctaaaataagacactcaaagtcattgggccctattacaattctctgacccaaaactaaataaacactgaacaacataaaataaaattgcgaaatttcctaattagaaattaactaatgtaagcgctgctttatttntcctcttcaagtccacaaccaaaatccggattaagcccaatgtttcattaattcctgaaattatattaaaaacatcaaattagctaaatgagcccaaataataaaactgcctaattaattgacaatttaagaccaatcaataattaatatggtgcaaaaagggtttataaaatagaagaaaatgatggcacatcacccaaccttcaacaacattgcttccacacctacaccat

SEQ ID NO: 197825 - DNA, 141 bp, Glycine max
gacccgggtccttgtaattggtggtgaaagccataatgctctcagaaacttcattattgccaattcgctgtgcttactacgaactggttataagtaaaatgcattcagtttgcatcaaggagagaatttttcctttttcat

SEQ ID NO: 197826 - DNA, 390 bp, Glycine max
agtggcagtgttaaatacttgtaacctgttgtttttattggtacttggtgatttccaaagaattggatgtatatttgatggctaagacaaaccatcattaatcctttgtgtcttatgttgttatttaaactaccctatggtttgaatttgatctttgctgttgaaaaactttttttgttttactaagattttaaactatcatttgacttttcctacgaaaatctattgtttattttccttaagtctcatcagacgataccttagttgttttaaaaaaaggttttaaattaagtaaaaacacaagtcaaccccccttcctgtgatatttcctttacaactcgacttggcaagaaagattctgtcgcaacctacccgtctactggagtgtgg

SEQ ID NO: 197827 - DNA, 374 bp, Glycine max
  unsure (1)..(374): unsure at all n locations
taagctttgcagtttctatcttggtccgacttcttggcagccaagaagcttgttgttatggngattncatcgagagcggaactagcacctccttgggtatcaagtgctgtctttttgctggagtttccatggaatcgtatgagtcggacagaacactgacacctgaggaagaattgttctcaaaactgcttcatgcagtggaagcagaatgttcattaccacggaaaagttctggcgcaatcataccgcccttgttcatttcccgctcctgcaccaagctgctgtgagcagcacaaagttcactctttccccttgcaaatttctcacactttccatctccccaactacattgctttcctccaccatgtgccttg

SEQ ID NO: 197828 - DNA, 391 bp, Glycine max
  unsure (1)..(391): unsure at all n locations
gcttattgcctaagagttactctcatnttcttatatactctactatntggaagagactctgtttctcttgatgaagtgcatgctgctctgaatttaaaggaattgaatgaaagaaaggaaaagaagtcctctatatatggtgaatggctgacaacaagaggctagaccttcaataaagatagtaaatctgataagaagaagcaaaagccagaataccagaaaaatggtgaaagatatgtcttcaatatcagatgttatcactgtaaaaaggagggtcatacaagcaaagtttgtactattaagcagataaatggtggcagtaacaataggaagaatgactcaggaaatgctacaatttttcaagatgatggctatgaatcttgcaaagcac

SEQ ID NO: 197829 - DNA, 91 bp, Glycine max
aaaaaaaaaatgaaacatggaaccaaccacaccaaccccagaaacaccagagggggttcgcggcacaaggggacagcaaggcccggggaaa

SEQ ID NO: 197830 - DNA, 424 bp, Glycine max
  unsure (1)..(424): unsure at all n locations
ttatctataaagccaactcacctcanatctgattgatgcgtaaatttgttttgtgtntgagctcatgcgcttatcgcaattctgaaccgcttatcgcgcattagtgaattttggcttattgcaagcttttcttgctcatcgaatggactgaagcggtgtgcttatcgagatgtccattcgctcaacatacatgctcagctcatacttcttccaaattcttcctcacacacatcttatgagtgttgcgctcatcggatggcttgctaatccgacaggttggcttctcgagatggtgaaaatcagcactttacaaacttgcctaattaacctgaaattgagagaaagtgattattaaacacacaatatggaagtaccaattatttattacctattctgtcccaaaagtatattcaacacttcataa

SEQ ID NO: 197831 - DNA, 401 bp, Glycine max
ctagagagagaaaggtccacgtttcttattttttgagagcttttgctgtgcgaatactggctgataactgagcatgatgaggaagccatcctgagagcatgacatgagtccgtgaatgatcgcgacgtttctagaggtggaagagacatccccactacttgtatttcttcaatccttcattcttttcttctctttgttgtaaaggaagcttcccagctatggagagctaaatcctccgttggttcttccttgtatgtacttgatgtaaatacctgtatatctatttaatgatgttctatgtgttctctgtgctatcagtacgtcatctcaatttgcttttgccttgatcatgtatatgcatgctttgtgtggatcattcaacagtggaaactggtctgatt

SEQ ID NO: 197832 - DNA, 380 bp, Glycine max
aaccatgctttgtgctcgcgattggtccctctcttcccttcgcagcttgagttcattgttgctaccccacatagctccgcgaaatttgttccggccatactcttccttgcgagccctcttggtctcttgttcaagggctcttgcggtagttgcattctcttcccgttatccggcacactccttccggatgtgtgtagcggccaacttgaacttctccttggcaagtttcgcctttcctaactcgcttttgagagcttggacttcctcgtcttcttccggtgcttcaaaactctcttcgctgacgacttttaacttggcgagccaatccaaacctcggatatgaaccttcagccattcatggtaaccaccaatggcgccat

SEQ ID NO: 197833 - DNA, 371 bp, Glycine max
acgtctctttttaaaggaagtgtaaaaacatccaatattgtttcccaagtcaaaatagatgcaaagataggctcaaactaacaagaataaggcttataatcacggttacctcatagaaaccctgatagaaggattcgaggcttcgttctctaccgaatcctcgagttgaattttgaagattccgctctaattaaatcgttcttctctatgcggtgatccgacggcaagcaaaggcggctcgtggcggtcactgtggtggatgaagaggttgggggtattcggggaaggtttaggggaagataaggaaaaagaaatggctcttttacgccgttggaactatttgtatcctgcaacactatcccaagcgaacc

SEQ ID NO: 197834 - DNA, 355 bp, Glycine max
tagtagaataccgataatgtgtctaccatcatgattatcgactccttttgcatcattgggggtaccacttgggctgccatatccctccacctttgggtgtattctttgaaggattcatgctcctttttgcacatgttctgtatatgcatcctatccaaagccattattctgacaccgcctaacgaatgcaaccattaggtccttccaagaatggactcgggaaggttccaagctagtgtaccaggtaacagctaccccagtaagactttcttggaatgaatgtttcatcaattcctcatcttttgcgtatgcccccattttttgacaatacatacttaaatggttcttggggcaa

SEQ ID NO: 197835 - DNA, 409 bp, Glycine max
gtattcccaacacaggaatgtgatggtgaatttattgtttcccactcatttccttaaattttctatttgatctctgtaaggtaaaaatttataacccattgtattagttgagtattatatagcattgtttatatatgggttgtgcgaagagggttagaaaactaagtattaaggattattatgggttcctcaaaaccctaggtttgctaaattaggagattttgtctaatctcttattctcttattttaaatgcttagatcctatggaaaatatggtggtggatcctcccaacagcattggaaggcattgattgcattcttttgtgtgagtagcttatcctacttaacaacattttttttaagttcttgtgggagaagcacagtaacttcataaatatattcttttgtg

SEQ ID NO: 197836 - DNA, 283 bp, Glycine max
tgaaatcaaatgaattgtcaccagtgacctatagtgcacttttgtatcctgaagtggcatagaaaattgttggttgtaatcaaagattttattagtggaaaccttctaagtttgaaggagaacttgacgtaactcatgagttggggtgaaccattatacaaccgtctttttttcataatggcctctatataacttggtattttattgaagtcacctctacactatcatatgcaaattgtgcaaactggtttgccaagcacatatttactttgaatcctttgat

SEQ ID NO: 197837 - DNA, 383 bp, Glycine max
  unsure (1)..(383): unsure at all n locations
gctctagtntatatgatgccgatgagtgtgtagctacctcattctctcttctaatgactatagcatcatttctggtggcttaactgctggagagtttggtaagccaatctttctcgaattnacctgtcttggcgtttagtaagaagtcatgtctcacaatgtgctccaaccactggcatacattctatcataacttatattcatattactgaatccttcataaaaatattgggaaaaaagctgctccgaaatctgatggtgagggcaactggcacataatttttaaatctctcctatattcttatatgctctctccactgagttgtctaataacctagatattcctactgattggttgggtcctggaaccacggaaatttttt

SEQ ID NO: 197838 - DNA, 365 bp, Glycine max
ccttctcgctaagccaatctgctggcttttggagcgtccgctaagcgcaacattcatgggctaaacgcgaggaagactctggaagaagatgagttgtacaggttcgctaagcgcaccacttcatctcactaagcgcaccgcttcagttcatccgctaagtgagaaaggcacttgctaagccaaaattcactaatgtgcgctaagcggtccataattgcgctaagcgcatgagcacgaacaaggccatctatttaagcctgaaattagattttagaggaagagtttggactgggattcagagctttgcatgtctagagtttctagagagagaaaggtccaagttctaaaaaaggttgagagatttt

SEQ ID NO: 197839 - DNA, 405 bp, Glycine max
gctgcttgtggggcttctatggaggctggatcattgagcttaatggggtcctttaatggtgattttccaccatggagatgcagcggaagacaaaggataagaggtgagaggaggcgccatccactatggaataagccatggaagaaggagcttcaccaccaagatgagccttggataagaagcttggagaggaggcttcaatggaggaaaagaaagagggagagaaagagagaggggggagcacgaaattgaaggaagaaaaaggaagagaagttgaactttgagttatgtctcactagactctcattcatccaagttacaacaagtgtttcatatgcttctatttatagactatgtagcttccttgagaagcttttttgaaaaaacttccttgagaagcctctt

SEQ ID NO: 197840 - DNA, 157 bp, Glycine max
aaaaaaaaaattgaaaactttggttcgaaccaacacgaagaaacccgaaagacacgagagaaggactcccttcaaacaccaaacccgaacggacggggggaacgcccacaacaacacaggggccgacccaaacgaacagaggaacgaccccaccaac

SEQ ID NO: 197841 - DNA, 376 bp, Glycine max
gtatcattcttcttgtctataggagactactatgatgacgctttatatgatataatccttatggatgcagggaacactttgttgggtagaccatggcaatttaacaagatagacatccacaatggtctcaccaatgaaataaccctcacccatgttagcaaaaagctcaaacttgttcccttgacaccttcacaagtggttggggatcaagtacaaataaaactcaaatgggatgaggaaaataataaaaaaaagaaaagaagaacaacctttaatggttaatgaggagtgtaaggaggtatgtgtctcctccaataagttagctaagaagataaagcattttgcaataaaaacaaacattatagacacttccctt

SEQ ID NO: 197842 - DNA, 406 bp, Glycine max
tgcttacaggtaatggaaggaggtcattatgttctgacggtaagaaccgaaacttaagatcaccctgtgaggttaatgtgtcaagctaatgacgtttaataagcgcttcctgtgatgcaacacagttttaatttttgttatcatagtttttgcatgcatttgatcatttggaacttgctgtataatctgtacattggagtttatcaacttatccttgaatgttagatataaaggtttcaacttgtttaagaagggactaaaaaatggattagaaaacatgttttgaaaaaagacagatctttcgctaatcgcaagcctctcgctaattgcatctttggtcatgcgcttatccgatagtctaaagcgcttatctcccaacccttgcatctaatgctgatttgttcac

SEQ ID NO: 197843 - DNA, 315 bp, Glycine max
  unsure (1)..(315): unsure at all n locations
gcttgctctattctcactagatagtntcattctctttttcgcactctagaaagttggaaatatgaatctaaactccctcattcttccttctaaatttcatggagactataaaaggttagatgggtctctcaaactctcgaaccatatgctcggtatcgaacttcttagaacatgttgctttgaaatatttgaacttgctgtcatgtacagaacctacgtgttgaggtgctctcctttagtttttcaaaacaaaaatgagctatttgcatgttgaaacatataattatgctaaatttgcacgctattacaagtttc

SEQ ID NO: 197844 - DNA, 388 bp, Glycine max
tgaacaacggaagctctcgagatattcaaatggtcataacttatcacaccgaagtccgattcatgcgcataatattccgagacgctcgaaattgaacaacggaagctctcgagaatccaaatggtcataacttatcacacgaaagtccgattccggctgattgtataccgagactctctaaattgaacaacggaagctctcgagaaattcaaatggtcataacttttcacatggaactccgattcaggcgcataatatatcgagacttttgaaatataacaacggaagctctcgagaaattcaaatggtcataaaatttcaaacgaaagtccgattcatgcgcataatatattgagacgctcgaaattgaaccacggaagctctcgag

SEQ ID NO: 197845 - DNA, 416 bp, Glycine max
tggacctgtgtgttgcccaatttcatcatatcttccgtattactcaccacctctatcatatctaataattgtcacatttttgtctaattgcatttttacttcattctagtagatttctaaggcatccattgcctgagaaatcttatgcagtaagtagacataaccataacgtgaataatcatcaataatggtgataaaatatcattcctttccgaaagaactaacatcaaaaggtccacaaatatcagtatgcacaatttcaagaagctgagtgcttcttgtaactcctttctttgtatgttttgcttgttttcccttaatacaacccacacaaatatttagatccgtaaaatctagataatgaagaatttcattctttattaatctttccatcctttctctataaatgtgaccta

SEQ ID NO: 197846 - DNA, 381 bp, Glycine max
ctgcttcaatgtttgcacgacatgcttccagatgaaatctcattgcctaaaagttactatcaagcaaagaaaatattgtgtcctatgggtatggagtatcagaagattcatgcttgcccgaatgattgcatattatacagacatcaatttcaagaaatgtcgaaatgccctaagtgtggggtatcacggtacaaactcaatgatgatgaggagtgtagtaatgatgaaaactcaaacaagggccccccagcgaaggtgttgtgatatcttccgatcattccaaggtttaagcgtatgtttgcttatggagacgacgcataataccttacattggatgcaaatgagaaaaactgtgatggaatgcttcgtcatccggctgat

SEQ ID NO: 197847 - DNA, 272 bp, Glycine max
ctcggaccaacggtgcaagttatgcagccaacataatggcattaatcaaactgtaaaaaatgatcgataattccgatttcaattgggtagacaagcttccacaggtaatgtggtcataccacactataccactatctttgactcatgagaccccttttatcttggtatatagagtaagtgctatgatatcgatggatatctatgaacccacgttcaaagaaactatgtttgatgaaaacaccgtgaaaattgatcatttatgtccaaccttg

SEQ ID NO: 197848 - DNA, 433 bp, Glycine max
tgataatcctgtatttaatatggcggattcgaaatgacaaagtttttattatcttcatcattattatatttttatgtttaattatgttggtgaaaattcgtttgatatgcaaatttttaacatggacactaaagagttgtcttatctcattctcattttatatggcattatctgacgtttttttgtttctacaaatgtttacagaattgcaaagatcaaaatttatccaaataaggtaatttaaaaaatatgcatattgtatattttattttaaattttttggataaaatgattatttgataaaaaaatattcagcttttaaatttattttataaatgcagtaggcataaacgtttctaattttttattgattgttaaattttaaccttatttcacgtcaactaatgcatataaatgtagcataatttataat

SEQ ID NO: 197849 - DNA, 441 bp, Glycine max
aagcttatgatgatgaagcaagcatatttgttgatgccgaaagcccatgtgtttgattcatgacttcaagatcaagcatcaagaatccaatccaagattcaagattcaagagaagaaatcaagaagcaacaagacaagacttcatataggataagtactaaaagattttttatcaaaaaccaaatagcacagttttgttttacaaaataattttctcaaattttctaaggtaccagagtgattactctctggtaatcaattaccagttattagtaatcgattaccagtgaccagcttggttttccaaatattttcaaatggtttgcaacgttccaaaatgattttcaaacagtgtaatcgattacactatattagtaatcgattacaagtgaatctgaacgttgaaattcatatccaattgtgaagtgtcacaacttttct

SEQ ID NO: 197850 - DNA, 422 bp, Glycine max
  unsure (1)..(422): unsure at all n locations
gcttttcatatatatcctatattaagtatgagtgtctcttttttttttattctncactatattcttcgtttgatgtcttgagtccgtatgagcatttaatgcacgtctcttttcatgcatagaccatgatgataggataacatgttttatacttaaatgaagaagtcacttctttcatcatagtaggtctactacaataagagagcgccctttgatgatgatcaacatctccaaagtgtgggtttcatttattctctataggactctgatagatcctaggagaatggtggttagagagatcgtctaaagcacatctagatgttacaacaatggaggtaggagagatcaccacttgagtctcaacaacagtccccttgttgctgtctccatcttgtcttgatgtcctttaaataacatatggg

SEQ ID NO: 197851 - DNA, 235 bp, Glycine max
aggtgacattaatttgaacataagaaaggtatggcattcagcaaaactataataattaataaagattgtacactatatgaaacttcattaaggaccattatatcgagttcatatatggatcacataaattatacctaatcctgactcatgttatcaattcttgttctctaaccaataacattagcacgacgaggctaacatctcattcttcagaaactaatataataagtatttt

SEQ ID NO: 197852 - DNA, 426 bp, Glycine max
  unsure (1)..(426): unsure at all n locations
tctggggggacatcttgacttgctntccaatcagacattcttctattattttgtcttcatctattctcagattgggaatgcctctaacagcacctttgacaatggatttcctcatgcctcctaagtgcagatgtccaaatctttgatgccatatcccgacttcatcttctttggaggatagacatgtggaggagtaactggtttcttgaggtggccataggtagcagntgctccttgatctgctgcccttcattagaacttcactcttcttatttgtcaccaagcattctgactttgtgaagtttacaatgaatccttcatcacacagctgactgatgctgatcaagtttgcagacagtcccttcaccaacaatactattgtcagactaggaagtccatcatgagctanctctccattccagtgat

SEQ ID NO: 197853 - DNA, 374 bp, Glycine max
gcatgcaagcttgtaacatgggcgtgctaacaaagaattcttttttttcttggattacaatctcatgtcctaagagaacattcattccttattctctcgataaaccatagcacatatttcatagccccatcccttgctacagttaacaacacatataattaatttggcacatagtttcttttagatttatttatcaacataaataaacacatctttttttaaattgaaatatcaataatactgtagcaacttatcacatactacaactcacattatctatgtgctgatattaaggcttctgcaacaacaatcacctaagaaactcccctaaatatggggacaatttgcctcaaccatgagcgctctcccataac

SEQ ID NO: 197854 - DNA, 450 bp, Glycine max
  unsure (1)..(450): unsure at all n locations
ttgaaactaagcttgtgaatcaatggaatccaagaatcagctggaccaagttgttttatttgttctaagaaatgtgacctaagcgcttatgccataatgctcttgagttngtattatcaattctacgcttagtaccacgcaattaaaggattcaccataggaagctacagtatcatgtaaatatagaatatcggtaaccaagagtgaaccaggtccaacaatatctgaattaaaagacaacatgaacatattgttttcaaatgaacacaaataacccaatttgtccaaataagaaactgaaaccaaatttcgtctaaatgacagtacaacaaaagtgtctttcaaatccaaataaaaactagtacgtaataataatctanagtgccctatagcttccacttgcaccgatntaccatctncaacgtagatccatctttcagaatcaattgg

SEQ ID NO: 197855 - DNA, 485 bp, Glycine max
  unsure (1)..(485): unsure at all n locations
ntatctctaacgtgttgtctcatctttgatatccgaagtcttgtataacaaagcataaaagtataactaatttgtagtaaattntgaaatcatcgtgattttactttatttatatacattagataaacttattttgaaaattactttgttttcttagtctcatgtataaacttttaaaagcaagtgattattgtacaaattttttataactagacatttaatattggatattctgtaaacttattttgaaaattaatttattttcttagtctcatcactactagaaaaatgatnttttacgacgttgatttaacgttggttgaataaaaaccgtcttacaaagaaatgttatgacnntttttaaataaagataactattctacgacgggtttgcaaaaatcatattaaaaaataccaatctaagatgaatttgtgaaaatcatcttagaatgaatggcattctaagatggttctcgcacaatcgt

SEQ ID NO: 197856 - DNA, 464 bp, Glycine max
  unsure (1)..(464): unsure at all n locations
agcttaggctcaatcttttttaaaagcttatttatattaatagatcatgcttaggcttaataaaatgtcttataagcctgatagaccggcatatatatatatatatacttatattatttttgggtactaatatataatattattttntttggatacaattaatttttttttgaaactatcagactttgattacttcttcataacttctattcctataatcaaggactttaatatacaattaggtgtgagtcatgtgtctttttatatttctaattattttaatattgtgatggacttttaaaaaagtaagccgaaccaaaataaaagtctttagtaggctataggtagacttatgcctcanagattctagcctcatgcctttgaaagtctatcctaacctaacctattatcacccctatttaaggctacttacatcattttttgtcacctacaaatactagtat

SEQ ID NO: 197857 - DNA, 435 bp, Glycine max
  unsure (1)..(435): unsure at all n locations
cctgtagaatgaataacatctttaaatttctctgaaacctaatttctgaaaatgacagttctcttaatcagcagcatcaatatacaccaggtaactttgctgctgctaaaaaatacacaaaatgataaaaagccaaaataatttcttctaggtataacatgacaccattgcaaccatatcaagcatttagtacttgcatattgttctcgtatcattcagcactggctgtttaaagaggatatttacgttgaattgttttgcattcagagatgacagtgcacaggttcttcatgtttcaaattgtattctacgtttctaaccttgaaatgccaaaattgaacaaatcatgagctccaattagagcaacatattgatccanaatcttccatttctccttttcagtgataagaagcacacatnttgaaagtaattcta

SEQ ID NO: 197858 - DNA, 496 bp, Glycine max
  unsure (1)..(496): unsure at all n locations
actaagcttcagcttgtcccaggcttcatgtagactcgtctctgtttttcatgcttaaatttgagcatcgcgataggctacttgccttattaagagatccgtcggaaaagatattgtcgtttgtatttgcgatgggcttcatttttatcctaagtgcgtctcaacaaattatgagcttagatcatgcatccgagtcaaacgctatggccgtccgaatatgcatgggaattccatttcaacttttaatcgccatgatatattacgggcctcaatcggacatgcgagtcataactttagcccgtcggaattcacccgagtcttccatgttaatatttgagcgtcgngatgggttactttcgttattcgaagatccggagganatgttatggncatctgtatttgcgatgggcttcatatctatcctaagagcatctcagtatattatgagcttcaatcgggaatccgagtcaaacgttatggctgtccgaattatgtg

SEQ ID NO: 197859 - DNA, 399 bp, Glycine max
  unsure (1)..(399): unsure at all n locations
gctatcctgagagaagggtatcaacagcttttcatctttagagtgggcgcccatcatacggcagtacattttgagatggtttttgggacaagtcgtccctttatacttgtcgaagtccggcactttgaacttcgggggaataacaacatcgggtactaagcaaagatccgtcatgtctgcaaacggatagtccccaaatccttccacagccctcaatctttcctcaaggagatcgagcttcctcctttcttcagttgccggnggcggcccttccatggacaaaactattggcgaagctgcgatgttgggttgaggcaacgtgcctggtgccggcccttctgggatcgggggatagaactcgacatcccttcgagcataatcttgagggtctttatggac

SEQ ID NO: 197860 - DNA, 487 bp, Glycine max
  unsure (1)..(487): unsure at all n locations
cggacctataaaactcagctttgctcttttataaaagagaagttctatatctcatctctttatctaanaaaggcattgaggtggatacaagtgctctgatcattcattatcatatccatgttgtaggggcatactcaccactatttgtttctttagggaactcaccataactaaaaaagcgcaaaggcacccctacaacacccgatccataaataagatggataacgaagagggagtgcaagaacaaatgaaggccgacctatcggccttaaaagatcaaatggcttctatcacggaggccatgctaaagcttcagaaaactatagaagataatgctacggcggccgcttccaatataggtagggaagcggaaccggtgctacagcccgtaataaacttatgccgagacagaaacacgacggggtttaaccggaggtataatcctcaagcctacccttatgtgttgcctccagacttcactccccgt

SEQ ID NO: 197861 - DNA, 416 bp, Glycine max
agcttgtaagattatggggtacccattacatgtggtactacgtggcggacgggcgatggtgcacaacatgattttcacatccaaaatgcgcgcatatacccaccatcccctggtgcccacctccatttgagctcacgtactcccacgtagcccatatcctcggttctctcatcaccgggtcccaatcaatcctcccaagcttccacaacatccaagcaaaacaacattcaaatagcacaagctatcacagccaagcaaaacagagaaaagacagataactctgcctaaacaccaacgaaaatcacagcttttcttacttaaagacccaagaacaatgccttcgttccaattcgtaaaccgttggatcgactcgaaaattttactggaagtctctagcacttaagcctacaattgga

SEQ ID NO: 197862 - DNA, 443 bp, Glycine max
tgagtataattcacattttgtgttatgagctctctttaaacttttggattattgatggggctgtcacaatcaagtgatagttgatgtctccatatgtgcgtacactgtgattatgttttcgcttctagaattcatttggagtatctattgttgattctagatgagtgatccttcttgatttaaaattattgtctcctaatcaatcgagtgttcatcttattattggctgctcatcttccaatcatgtctaggtaaattgcttgataatctttcttgttgttacttctaattcgaataaagagagacttcgcctttgacaatcacgttaagatgttttgagaggaaatacttgagtagacattatcattgttacctatagacgatagtcatacttagtaagacgtgtacctgtgttccttgaagatatgcttagttaccaccta

SEQ ID NO: 197863 - DNA, 445 bp, Glycine max
attatatgcttattatttttgatagcacagaacagcaagagtgaggttgaaaaattgaagtctgagttgagcagggagtttgaaatgaaggatttgggagcagccaaaagaatattgggaatagaaatcaaacgggacagaaaaaggaaattgctgtatttgtcccaggagttatatctcagaaaaattcttgaaagggttggaatgtcaaattctaaacctgtaactactcctatgtcacagcagtttaagctcagtacaagtcaagcacctaagacacatgatgatataatttacatggaaggtattccatatgctaatgctgtagggtcactgatgtatgttatggtatgtactcgccctgacatagctcatgcaatgagcttagtaagtaggtccatggcaaatccaggcaaagcacattggcaggccctgaaatggatac

SEQ ID NO: 197864 - DNA, 370 bp, Glycine max
  unsure (1)..(370): unsure at all n locations
ggagtacgacagtcaccgctttatgagcgttgtacaccagcagcgctctcaagccatcaagggatggtcgtttctccgggagcgacgcgtccagctcaaggacgacgagtatactgatttccaggaggaaatatggcgccggcggtgggcaccactggttactcccatggccaagtttgatccagaaatagtccttgagttntatgccaatgcttggccaacagaggagggcgtgcgtgacatgagatcctgtgttaggggtcagtggatcccgttcgatgccgacgctatcagccagctcctgggatatccgatggtattggaagagggccaggaatgcgagtatggccagaggaggaaccggtctgat

SEQ ID NO: 197865 - DNA, 256 bp, Glycine max
tattacaaacgaactaggcatataggatgcatctagcatagaatacatcttattcgcataagcgtggtccacattggcactcatatcatttttctttgcttagtatgagtcttagcttattggatcatgtgcatacttagtttggtagaagaacacatgtacatcttaagtggtatgctatttcttgctgattaatcgattactcttcattataaatgaataccgtatgatatctgttcggaaagcttttcaaaac

SEQ ID NO: 197866 - DNA, 436 bp, Glycine max
  unsure (1)..(436): unsure at all n locations
gtcttgtaatcgattaccagaggttatttttttaaaattatttccaaaggtcatatctgttcaagtgggttttacatggccatcaaaggtctatttatatgtgacttggaacacgagtttgctcagagtttttcagaacaaaaaggtcttatcctctcaaaaagaaaaatcatcttatcctcttaaaaattccttggccaatacacttgcaattcaataaggaattatttgagtgctcaattgtttaatctatctctttcaagagagatntcttcttctcttcatcttatttctaaaaagggattaagagaacgagggtctcttngtgaaagtaatctgaacacaaaggaagggttgtccttgtatggtttagaacttgtaaagggctcttgcaagatagtggaactctcaagcgggttgcttatggactggacgt

SEQ ID NO: 197867 - DNA, 455 bp, Glycine max
  unsure (1)..(455): unsure at all n locations
agcttcgagatctgcgcttatagattccagatctgtgtttaagggtcccagttgaggtcattaacgatgtcattccagttctgctttgaggttccagattcgttgcacttgtctgaggctattctttacgcacttaagggagctaaacaccaccgtcacacgcggaacttcacaaagttcatgaccaagggggtggaggaagaaaaaggagcatcctggggtagctgtcatagcttgagtcgtcgattcaacaccgacaggcggtggctgctagggtcccgatgcactttggcacggtggagcgaatggtgctcgaggtgaagagcaacgataaacttgaaacttgttatattttttaaanacaataataaatatagtggcaggtggtggttcactctctggtgatgtcttcacattgtaatggtaatgacgttgacgtatattgcattagctat

SEQ ID NO: 197868 - DNA, 367 bp, Glycine max
  unsure (1)..(367): unsure at all n locations
gcttacgaatatcaaattcagcctgacaaacaataaattaggttttattgttagtaaattataaattttggctaataaagaaaatgaaagatgaaaactaaaatacctgaatatccttccatatcgaatccttctgagcagcagggacttccttccaagtctcgtatgtcacatcgaccttatcacgagcgacaatctccaaatatgttcttaatttcttcttgtagggactgtcgaccttctcggtcgcaggatcgacgtggactactggtctctctgccctaggtggtctagttgccaaggatcgtagccgtgtggctntgcgtgtccacttcaaggtagacggagacgctaatgctactgcagg

SEQ ID NO: 197869 - DNA, 359 bp, Glycine max
catgatttccgaacttctttgaagctaaaaagagaaatcataaccgtaggattcaaaccttgggaaggaaaataagtatcgttacgaaattcgtaaagtttcgtaacgttacgaaaaaagaattaccaaaaaaatagaagggggtgcatttagtaaaaagggggggtacaaataacaatctggcccacttgggccttccagatccttcctccacaaggctgatgcttctggaggaagcaaccttgctcgcctgggcgagctgggtggcaagcttctcccctagtttgctataaatagggggagaaccgaagaagaaaagggtcaaccttcttgcacatctctctctctcgaaattgtga

SEQ ID NO: 197870 - DNA, 450 bp, Glycine max
  unsure (1)..(450): unsure at all n locations
tctccccgtatttgctatatatagggtgcagcggtcttttctcttctctctctctcgaaantgctgaggaaaattatttccgtgaagaacatcctagccgaggcgcttccgtaacggttccgtgaataattacgcgaagattctcgaccgttcttcaagattcatcgttcgttcttcgttttcttcaggcttcaacgggtaagtacctcaaaccgagcttttcaattcattctatgtacccgtggtggtccacattttgtttcatgttgtcataccctaatttcgtccggggacctttgcttgatgacatgcgacttttgtttggtccttggaaggtgcttggcacccatcattaggcaatttgtgaaattccgagacagtgccgaaaagacaagaaatattgatgcacactcccgaagggtccgtgacacaccggacatcaaatggaag

SEQ ID NO: 197871 - DNA, 430 bp, Glycine max
  unsure (1)..(430): unsure at all n locations
tgcggcatgcaagcttctaatggacatcgctncatgtttttcatcanttactactncaccaaaggggtngaagtggcttcgtacactagtgtgactaggagtgtggtggttagattcatcaaaaaagtgataatttgccagtatgggttgcccaggaagattatcaccgataatgccaccaatctgaacaataaaatgatgaaggaaatgtgtgaggatttcaagatccaacaccacaattctatgacttataggcccaagatgaatgggccagttgaggctactaatatgaatatcaagaaaatagttcagaagatgaccgtgtcatacaaggattgacacgagatgctcccctttgcactgcatggttatcgaacttcggtgcgcacatcgactggggcaacccctttctctatggtgacaggatgga

SEQ ID NO: 197872 - DNA, 497 bp, Glycine max
  unsure (1)..(497): unsure at all n locations
gcttnctcgggccattcctgcgaagcaaacatttggtaagtttatttatcagtgggacactactcttaaagcaaaaatggcatataaccttcttccataaatacaaacatcaatgtaaatttaaagcaagctcatgcgcatacttncttacgaacgttctcttgcacaatacattctattaactaagaaaaaatgcacccatatacaatcaaggcagcttcgttacctagattatttacacgtacttccaaggtgtatttgttacttacatcacacacatctccttggctaaattcacatacatgcatactcaaagcattttggggtaccaaaaattgcacatgtgcacatcttggtatttctaatacctatacatacacanacttcatgatgaatcttgactatcttcacaaaaaggtgctacacttcatccctttttcaagtntttgctacctaaagccgcatgcanattcaagcatatnttcctttctgactaa

SEQ ID NO: 197873 - DNA, 311 bp, Glycine max
  unsure (1)..(311): unsure at all n locations
agcagcaagcttattataataccgacatcttgtttattaccggactcacccggacttccgngtataaacttattgacaattcactaatctcagagcattggatcacatatttgagcgacttgaatattaccggactcattgagacatccgagtaacaagttattgccgctcgaaatcgatacgagctctcgctttcaatatggaacatctcgagatatattgcgacactctgacgggcatccgaaaaaaaggttagtgacgcatgataatactaagagattcccgaatcaatttggagcgtcttgatatat

SEQ ID NO: 197874 - DNA, 484 bp, Glycine max
  unsure (1)..(484): unsure at all n locations
aaatgacaataactttatacacggttgttcgtgtgagnnnccgaanatatcgagacgctgaaaatttagaaccgaagctctgagaaaattgaattgacaataactttatacacggatgtccggttgagtcctgtaatatatcgagacgctccaaattgaaaacggaaactcttagaaaattcaaacgacaataactttgtactcggatgcccgacagagtgtcgtaatatatcgagggatgctccaaattgaatacgaaagctcgtatcatattcaaacgacaataactttttactcggatatctgattgagtcccgtaatatatcgagacgctcaaattgtagatccgaagctctgataaaattgaatagacaataactttatacacggatgtctgggtgagtcctgtaatatatcgagacacttccaatagaanacggaagctcgtagaaaattcaaacgacaataactttttactcagatg

SEQ ID NO: 197875 - DNA, 464 bp, Glycine max
  unsure (1)..(464): unsure at all n locations
agctagcaaaatctatagatataattgctttttatttcctctgtgaatgcatcaggttttggtaaaaaaaaataatttaactcattctctgccccctcccctagctctttgacttnttgtcattgatctcaaggaccaggttttcaatgaggttatataattttttacatgggacaatgtcatgacagtgagtaagaaggaattgcaaattcatttccttattatatttaattttctaaattcatgattttttcctacgtataacaccaatatcaaattctctaggattcttgctcttccatgctttatggnggtatttaacataaccattttttgataatttagtatttttctgtacgatcttatggcgacaataacatttcttgtttcatgaatgacattggaagcaagctgccggatacaatcaaatcttttggctgtgtgcacggaactctgatctcaaa

SEQ ID NO: 197876 - DNA, 399 bp, Glycine max
  unsure (1)..(399): unsure at all n locations
tgttatgcctatcatcattcaaagatgcagcgaggcatttttatggtctcaagtccttggtggatgtcggtgggggcaacggcaccgccatgcgcatcctggctaaggcttgcccttccattcgacccatcaattttgatcttcctcatgtcattgccctctgcgatggcgatggcgatggcgtccaacacgtgtcaggcgacatgtttctaagtgttcctaaagctgatgctgcttttcttatggtacgtacagtatatatatatatatataaactcatttgtgcactttaaataaaatcaatttgattntgcttgcatgcagtgggttttgcacgattggtcagacgaagagtgcatccaaatcttaaagaagtgtagggaagccatatcaaattca

SEQ ID NO: 197877 - DNA, 460 bp, Glycine max
  unsure (1)..(460): unsure at all n locations
gatcttaagcgactgagctgcagctgtaaatatggggacccattatattgtttctaggnggcggacgggcgatggtgcacaacaagttttccacattcacaatgcgcgcataaacccaccatcccctgttgcccacctccaactgagctcacgtactcccacgtagcccatatcctcgtttctctcaacaccgggtccccattaatcctcccaagcttccacaacatccaagcataacaacattcacacagcacaagctatcacagccaagcaaaacaaagcagaggcagaaaactctgccaaaacaccaaccaaaaatcacagcttttcccactctaagaccccagaaacaattccttcgatccaatttgttaaccgggggatcgactccaaaatatttctggaggtctatagtgcataagcctacattntgaccgttgggatctactaacaaacatcc

SEQ ID NO: 197878 - DNA, 458 bp, Glycine max
  unsure (1)..(458): unsure at all n locations
ctcgaaatntaaaatnggatgttttttagaaanntaattggtnatagtgtatnacacggatgtgcgattcgggtgcataatatgtcgagacgctcgaaattgaacaacggaagctctcgagaaattcaaatggctataacctttcacacagatgttcgattcaggagcattacatatagagacgtacgaacaacggatgcactcgagaaattcaaatggtcataacttttcacaccgagttccgattcaggcttataatatattgatacgttcgagattaaacatcggaagctcacgagaaattcaaatgtgcataagcttttacactgatgtccgattatggagaatcacatatcaagatgctcaataatgaacaacggaagctcttgagaaattcanatggtcataactnttcacacggatgtgcaattcaagcgaatcacatatcgagacgctca

SEQ ID NO: 197879 - DNA, 416 bp, Glycine max
  unsure (1)..(416): unsure at all n locations
aggaggggagggagaggtctgtgtacacgtgagttcgaatccttctcactaacaaaagctaacaaattaacaactaacattgtcctttaaagaaaagtttaacatgagaagggattattacatggataacaacaaattaggaggatagtggataaaatgatataaatataactaacaaaactgttgtggacttatggttcaggtaggtgcacataagcatataattacactacatctcccagattatccaacanatataaatgcagaaacaattgagcaagagttctgaaggcaatacagtagttntaggttggtcatggcagtgacactggaagggaatggtcctttgaaatccgttgaggaaaaacaaaaatccctggataagaaanaactaaaacaatgaatgtagatgataa

SEQ ID NO: 197880 - DNA, 427 bp, Glycine max
  unsure (1)..(427): unsure at all n locations
tatagagatctttatgcacttgcttttgnaatgattcaaagttggtatgccaatactgaggacataaagtgactctgcatataaattagacaatgattccatgattccaccaacaaactagtttcggtatatataaaagctagcttaacttctattacaataatctatttagaatacagtattccttcttttctctcatttggatataaatttaactataagaaatattttcctggtattagtggttagcttagcttcactttgtaaccttcatctagttagtaatgaatcaatttatctcttttggcattagcctcaatagtctgtcatctttgttttcactttctactctctttctatcattggctagctataacatgtgaaggttctaaaaaatggctcgcgactgtgatttggaccacaacat

SEQ ID NO: 197881 - DNA, 386 bp, Glycine max
tctcagctgaacaaccttttgttgggctgccacctgattgctttgtttgctactatcggctactattgggcctggaaattctggaaagatatgaattgatgaaaatagccatggttgtattacattctggatgactcttgttctggtttccaattatcaacaagcaccataacaaagacatggtcgacgatgcatgatttgaaccatccagataaatgtcaccatggatggcaacattactgtaagagctcaccttccgcacttaagcatgtatcatgatacatactttggataaactggatctgataaacttctaatattgtgttgaaacttagactttgtaaatagaaaatatatcttcgttggctaatatattttaatcagta

SEQ ID NO: 197882 - DNA, 467 bp, Glycine max
  unsure (1)..(467): unsure at all n locations
actaaacaagctgaaattatcattatctcatcaaggtatgctaattacatgcaagagatgagaatgaaaaataggaaagggaaagaaaagctgggttgcctcctagtaagcgctcttttaacgtcactatcttgacgcatcgtcttgttatccaggatccaatagagttcctacttcaaggaccttcttctcaggtctctnttcctccatcacatgcactttaagatagatattttgactaggaggatctttgtcctcatggaacaaatcaaagctgatcttctgatcttctatgcccatttgcagtatcttctttcctgtgtctaccatgcaacttgcagtagaaatgaatgggcagccaagaatgagaggaatntcagcatcctcttctatatctatgacaacganatcagttggatatataaggtgtttaaccttcaccanaacatctttcatgactccatatg

SEQ ID NO: 197883 - DNA, 246 bp, Glycine max
agcaaggacccacaggagaagtataagcataagaagcaaagccatcaagaccatcgaaggggctcgggggaacactccgggcaccgggaaggcacctctgaggagaagagagctcaagagccaacacttaagttctaacctatcgatgcctccactctgggcaaccatgcggctttaaccaatcaaaagctttacaacaataacttctaccagatccgcttgtccaccagagatgattcagagcat

SEQ ID NO: 197884 - DNA, 410 bp, Glycine max
  unsure (1)..(410): unsure at all n locations
tagccctagaagggatggaccttntcaggtctcggagaggatcaattatcttgcctatagggtggacctcccataagagtatggagtcagaaccacttttaacatttctaatttaattccttttgcaggtggagctgatattgaggaggaggaaccaacagatttgaggtcaaatcctcttcaaggcggaggggatgatgcaatcctccctaagaaggaaccagtcaccagagccatgagcaagaggctccaagaggattggactagagttgctgaagaaggccctaaggttctcatgaacctcagggtagatttctgagcccatgggccaaggttgggtccacttatctttgtacatattagattacgaattcattatttntgggtcttgtacttanggctccataatg

SEQ ID NO: 197885 - DNA, 505 bp, Glycine max
  unsure (1)..(505): unsure at all n locations
cctataaaactaagcttctacagaagaatggccagaagataaggatggactatctttcttatgcatggaaggagaaaatcacaaggagttgaatnggagcatgttgaagattgatgaacaacacgcctgggcttagtgcgagctgtctggcttagcccaattccaacccgaggagaaatagggcttatcgcaagctgtcaggcttagcgtacaccttcaacattaatttacaaaaattcctaatttttgtttatttgtgtaatgggcttaagcttgatgtaaataggtcttattagatgctgagttatcttcttaagcctagttctataaatactcaaaaactcttaattgagaaaaacttttgataaaattgcaattaagcttgtgcttagagagagcttagcctcttctttggtcttttgactgannaccatattaacttttatcaaggaagctattctcttgtgatgaatccttcttcggctttatcgatcttcatggacca

SEQ ID NO: 197886 - DNA, 469 bp, Glycine max
  unsure (1)..(469): unsure at all n locations
gctatgatgctgcaacgattgggttgatcattgatgaaaaccaacaaaaaagggggtcaatttttgctggataagattttacgtagtaatcctactggcttaagtggacaaattcagttcaatggacatgaaagagctccaaaacatacttttcaaatcattaatgtgattgggagtagctacagggaaattgggttctggtcagatggacttggtttctcaaaatctttggatcctaatgcttcttacagttcttcagtgaaggaattaggaaaggtagttaatccaacatgtgacatacgactaaggattggtgtcccctccatgtcaatcttcaaacagtatgccaatgttattcaagatcactcagaaaatgttacttccttcaggggatntgccatagatcttttctatgatacagtaaaaanactgccataccatctggaatatgaattatttgcgtttaatg

SEQ ID NO: 197887 - DNA, 483 bp, Glycine max
  unsure (1)..(483): unsure at all n locations
ntgaatgctctattcaatggagttgacaagaatatcttcttatttatcaacacttgcacagtggccaaggatgcgtgggagatcctgaaaaccactcatgaaggaacctccaaggtaaagatgtccagactacaactattggctacaaagttcgaaaatctgaagatgaaggaggaagagtgtattcatgacttccacatgaacattcttgaaattgccaatgcttgcactgccttgggagagaagatgacagatgaaaagctggtgagaaagatcctcagatccttgcctaagagattngacatgaaagtcactgcaatagaggaggcccaagacatttgcaacatgagagtagatgaactcattggttcccttcaaaccttngagctaggactctcggatagggctganaagaagagcaagaatctggcgttcgtgtcanatgatgaaggagaagaaggtgagtatgacctgnatactgat

SEQ ID NO: 197888 - DNA, 464 bp, Glycine max
  unsure (1)..(464): unsure at all n locations
agctatctacctttgggtctgctcaaggganatttatatttnttataacataccaatcaaaagtataattattattatgccaaattaacataatatggcatgcaataaagcagttaaaatataaattattgaattaactctnttaaaacatctacactgttggatgcagaacatccaatattatattaaaaaaagtgcttctcatgctttggattctttccatttcaccaaacatgagggaaataagaaaaaagaaaggaaactaaagagtccctttctttcagtacctttatgttattgcttggaaagcatgagactacaaatattgtaagaaaagcttaaattgtcatacgcgctaactaattattactcttgttgcttgggttttttcagccaaaacctccattcataaatcattaaatcatatatctcctttgctgaatgctgaggacaaaacagaaaat

SEQ ID NO: 197889 - DNA, 483 bp, Glycine max
  unsure (1)..(483): unsure at all n locations
gtatacatgctcctatcttaaagttaacttgtattttattcatcctattgaatataatttaagtaagtgctttcaagcttataaactgtaatttaaagtgctctgctattgtaatacttcgcttgcaagttttaatggcttgtgaactgaataaactactaggctctattggagatgctaactggctagttatagtgttttacctcctctgcagccgcctttctgtggcggaaaccgtgacaaaattcagcagaagatagctaaagacaagattaagctgccagcattcttgtcaagtgaagcacattcactgttgaaaggtgtaatcactagtccacanagaagatatttccattgattattctagaacaggtcatataaatctcatgagtattaggcacataataagctctagataactcttcccgtttagaatactgatagcaatataatactgtcatcttagaataattgccctaccat

SEQ ID NO: 197890 - DNA, 471 bp, Glycine max
  unsure (1)..(471): unsure at all n locations
agctngaagactcgtagggtcaagctgtancttcttgtctcaaccctaatcacgggcttgtggagctctaatttgctgtaacagaaggcgcggttgctggaagcgaacatcggaacaagatcgggcgtcacaattagcgaaggagagagcaaaggaagcattgagaataatgaatgaaagtgaaataggaaggcacgtaccataggtcttgaattgcgttggaatgagaaatgagggaatcgaggactcgaatggctttggaccagtccttggaggcgcagagcctggccaagtccacccgctcggaggtagcagcatcagcaggaggaggaggaggaggagccatggggcacgtgaggtgcacggatcagtggtgcgatgatgtgttctctgaaagggaacattgaggggtggaaatgtaattgcaattgcgcgcgcggtgatgaaatgaagaaggcgatggattgttga

SEQ ID NO: 197891 - DNA, 478 bp, Glycine max
  unsure (1)..(478): unsure at all n locations
tcaagaacatgaaatagaacttatgagacaccatcatcatttatataatgatgacaagaggaaaggaatagtccattttttgtgacaaagaggactcgcatgaaatagaagaagatgatgatttcagattttttgtgaagagattcaataagtttctgagaaacaaaagaaatcaaagaaaattaaacatcaattcagagaagaaaggagaagattcctccttagccccaaaatgctatgaatgcaatcaacctgngcacttgagatgtgattggcctgtccttaaaagaagaatggaaaaatccgacaagagaaatttcatagaagagaaatcgtacatcacttgggaagacaatttcatggattattcaagtgattcaaaaaataaaatcataaatctgggtctcatggcgaaagactatgaatacggagaagagtngacacattgatagtggttgctccaacatatggcgggaga

SEQ ID NO: 197892 - DNA, 466 bp, Glycine max
  unsure (1)..(466): unsure at all n locations
ctaagaaattttgcaacattattntaaatattcaacatgtttatcctttntcttgacattggtactttggtgattaaattggttctcccatctttgatggaaagactggaatctttcctgtgaatatcataacctttttcgagtaattgtcccaaactcaatatattattgttcatatttgggacgtagaagacatttgatatgaattcatgtcttccatccttcaaacaaattaagatcttacctttgccttttataggagtcttagaattatcatcaaataagacattgccacttattgattcatcaagatccacaacacatgcttctttgtccacacatatgngtgcttgcaccattgtcagggaccaagtgtttcttgactaccttattgctcacgtgcagagcactgttcaacttttgcttttgctcactagtagctcttccacttatctgggattacttt

SEQ ID NO: 197893 - DNA, 420 bp, Glycine max
  unsure (1)..(420): unsure at all n locations
agcttccactnttagctgtatctcctcacattttagcccccaaatcaaagagacagagagatctccagttttgaattgtaaatttctttttctttcaggatattctcttttttctttgctctccttgctcagagtgattaacaaaaacacacgttagacgtgtactgttttgttgcaagatgttggaaatcaatagagatcttaaaaaaaatatatcatttcactattaatatttttaaaataaatatgtgtaaaactttatatttttttatttatatttaagtcttttgtttcattatttttctaattttcaaagataaataataatccttaacattaataacaaaaatataaaataaaattgtataaaaaatatagaatataaaacaatccacaaaatatattaaataanataatatg

SEQ ID NO: 197894 - DNA, 492 bp, Glycine max
  unsure (1)..(492): unsure at all n locations
ntagcgttcaatagacaaaattatagtgttactactatattctttnttataataaaatcatttagacataattcatgtcattttaaaattaatgttaaccaaaatgaattttgttaatattttaatgaatatttatttttgacaaagaaagactctctacgtgatatttatgctacctttgaataaacaattgaattttgtcgttatttattaagtttttatcaaatgagagtttatttgtaaactttattaagataaattttaaaaaattaggagttcgcctgtccaagtaagccttttaaaacacttctttactctgcttttgttgcaagaaaatcactattctttctactttacagaagagagagananagatgataagggaatgtggaatatggatgaagtccacttacgtttctagtttttaattcagttggttgagataaattcagattccaaccttttaaatangtttacatagtaacatgatgt

SEQ ID NO: 197895 - DNA, 349 bp, Glycine max
  unsure (1)..(349): unsure at all n locations
tttctgtctgctgataattaaattatttgttttagttttaggtattataaagacttgcatgctatattcgttttaggtattaatattattcggtttaggtacctaagttttattcaatatatggaacattagtttgcattaacttgggatatatatatatatatatatatatatatatatatatatattgttgaaacttttctttctatattaatttatgttatcaaaacatatattgngttatgtatataaacttgtatttggcgctcttacgcttgtggtggcggccaacaactcgtgagctgtgtgtactccaatccatatttggtttctcaaacttgtgcatacc

SEQ ID NO: 197896 - DNA, 443 bp, Glycine max
  unsure (1)..(443): unsure at all n locations
tgaagagatcttcaatggctacgaacaacaacgcatttcattttgcttcttgcttccccaattacatatcacataaagtagaagattcaagctttcttttatggcgtcaactagttaagcctattatcaaatcaaacaaacttcaatgattcattgctaatccgcaaattccactttgatttctctttaaagaagatcatgaagttggacgtgaaaatctagtttatgaggcatgggagtagcaaaattaggtgttattaatttggcttcaatgcattctttctacactgattttttctcatgtaatcggttataatcactcctatgaagtctaggagcacatccatgattacttccacaagcagagcatcggcacaacgcgtcagttgcacattcaacttcgagcaatgaaactcggaagcaagtngatgcaatagtttcta

SEQ ID NO: 197897 - DNA, 437 bp, Glycine max
  unsure (1)..(437): unsure at all n locations
agcttcttacgcagcgaacataaccaaaggattatattctttatagaacacaaaacaaccagttgtcgatgggccctacatttgaaaataattgggtacgtaaaataaaaacattctatacatgtatttgataaattttacttactgattcaagtaagctcctaaatagaccttttgttgggattccttaacccatgttttaatgtaatgttgacatttagcacgtctgtcctttgcattgtgatggactgaggctcaaggaacccatacaccacaccatgacccaaggtcgaactccactcatccataaacctattttcatcattngaaatgaaaaattgaaaatcatgtatgttataaccaatattaattaatagtgatatggtatagaatgtacttacatcatccacaattgtagtacaagtatgtttagacat

SEQ ID NO: 197898 - DNA, 443 bp, Glycine max
  unsure (1)..(443): unsure at all n locations
ctgcanaaggcttgtcgctggagctgacccatcaactgtcctaactctttcagactggcgactcctatgctcttgaccttgacttgatagaaccactttttaagcgaaggcgtctggctcaatcccatgttcttactaaagtggaataaaaaccagtgcgaatcaagactccgacatctatcataggtgaaatggacgaatgcatgaagcaacgcgtatggcacagatgcattttatggatacgagagcccgggaggttatctctttcttaaatacaacattcgggcagcatagcgcccgatgcatggatttaagaaggcgacacggaccttccttcttcgcgtgacaaagtgaggggattaagacgcaacccatgcatgatgacatgatgcagaagtgaaaaaaggggaaaggtaacaaggagatgtacacagcatgacaat

SEQ ID NO: 197899 - DNA, 465 bp, Glycine max
  unsure (1)..(465): unsure at all n locations
agcttgctttttacaaagatcatcaagacttgttatgtttattggcaatggttgggccctaatatgtaacaagtgtgttagtaccacgcttatgatctcaagagatttgtttgttttgaagaactacacataatggttaaataggttgtatttcttctttgtttgattacttttttttggcgtttgagaaggggaagactcacccctacaaccaacaactttcaagtattgacaatgttgaggacgttgatgcacatatgggcttggcataactcacagtgggagtgggtatggctntgtgcagtaacatgaaatacaagttacacatgttgtacctagtacattntgtgccagtagagaatctggatgtcgtgctcattaccatagactacactatatcctgctatatctcgtggggattaacatctcgctcagagctctgctattatgaggacattcgttgat

SEQ ID NO: 197900 - DNA, 389 bp, Glycine max
  unsure (1)..(389): unsure at all n locations
ccatgttctcagaatgtgcaaaatcagaatgctcaaaattataatgctcaagatcaggatgttcaaaatcaccaataatagaatgcacagattcaccagttatggaatgctcaaaatgatcaaaaggtataaaatgatgcctaactaatctatgaaatgtcctatctatctcaagatcaaagggttgtaagtcagatggattgcctctagtcatacactacattcagcatgcacacaactagttgccttgtcatgtaaataaaggtgtaggtttgaactacagctaccctcaaatgatatccaaatgacttgaaattttttgagcaaccttataaaatgatgagaagatagcacaaaatatctcagaccaanattcacagtctaactat

SEQ ID NO: 197901 - DNA, 319 bp, Glycine max
atgaagacaggaccaagaatgatgaacaacggtgaagaatgatcaccaaatcgatgatgaaaatgtttaggaagcgccccagccttgatatttcttcttctttatccctcttctcactaattgcagtgaaaacatctcaatatatgatgctagacccttctcctcagctccctcacgcctattcataggaaatgaggggtggagggtgcataacagcttgcccaagcgagctacttgcttcctccagaagtaacctagctcgcctaagcgagctagttacttcatccctaagcttcctaaagagccttggggctaaaaa

SEQ ID NO: 197902 - DNA, 475 bp, Glycine max
  unsure (1)..(475): unsure at all n locations
agcttctatggaggctggatctttgagcttcagtgatgtccttcattggtgattntcaaccatggagatgtagcggaagatgaaggagaagaggtgagaggagacaccatccactatggaataagccatggaagaaggagcttcaccaccaagagagtgccttggataagaagcttagagaggaggcttcaatgaaggaaaagaatgagagagagggggggcacaaaattgaaggagaataagagggagagaagttgaactttgaagtgtgtctcacaagtttcacattcatcaaagttatgacaagtgttacacatgcttctatntatagcctaggtcactaactaaatgaaagcttccttgagaagctttcttgagaagctagagcttagctacatacacccctctaatagctaaactcacccccatgccanaagtctctattacaaagactactcanaatggccctgaatac

SEQ ID NO: 197903 - DNA, 471 bp, Glycine max
  unsure (1)..(471): unsure at all n locations
agcttgcaacaaaataatgaataaatttattttttttttaagaaagnggaaaggaaacatgcatgcaagacatcactaaagctaagaagatcctacctaggacaacactcataataataacaattttntgaagcatatgtatatataaaaatatatttaaatatttattgacatatctactaacataaatttattaaaatttaaactaaataattaataatatattaaaatgtaaatattataaaagatagtcctataaattataaaatataaatctaatactcgtgtatggtatagacaactaagctatattatatatntgactgtcttttactataaatatttgagtgttactaacagaataaaaataaataatgcattaaggactaaatactttcttatgagcattaatggataaataataaatatattatcacgttgacttaattgaagtatgaatcatattaatat

SEQ ID NO: 197904 - DNA, 489 bp, Glycine max
  unsure (1)..(489): unsure at all n locations
actcagctggtttacctccattntattcagaaaagagttctaggaatattctacttcccctctctattggcaattagaagaccctttagaaaatggcatggggtcagggcacaatagaccttggcacaattattgacataaaataatgtgaactctctattaccagaatataataacaataatgtgaagtctgaaaaaaaatgaactaaaagcagacagagagtaattatggtgtatattttaggaacattctaccagattttaaatgatgcattgctccacaagcaactatntaatgagattcactaggtgtattctatatataaccttagtggagctgtctttattataagcaagttgtaactaataagatngaagcaacaattaaagctgcctaataacgtgcataatgatcaatagataagagcatgcttttctttattgattagtgggtgtgaataaagtcacttaacatatggngacacaaat

SEQ ID NO: 197905 - DNA, 305 bp, Glycine max
agattaacacacacatcagtgatgatacggcctccccatataagggtaaaccttcattaatatataccaaaagcgtaggcttgccttgcgtgctgacataaaattctcaccagttgagacacatccttattgtgtacaaactctcagaatgtcatggaaaatgagaaaaactattcatgttcaatacgtgtacgggaaacatggcaaggctcggcatgcattgatgcaaagtctatggtgcctcaacgatataaacatggatacgaactatgacgccacccccgccgaatatattcaattataaa

SEQ ID NO: 197906 - DNA, 486 bp, Glycine max
ctcagctatatcagattctagaacctcaaaattacttattattttgtctcgaaaaaaaatcctataatctatttatataaaatgcctaagaattccagaatgattgcaagagcattaaatcacagtcaattgaagaaagcatctgaagtaaccggtaaggcttataatggaacagtagtacagttcttctattcatagaatgaacattaatcaacattaactgataaagcttatcttattaattatgcttcttgagtagttaagcttcatattttagtttttatcttgatgattaagctctggttacttttgttggtggttaagcatttatcattggtttgcttcttccttctagttagttaaacatgtttacttcttttaagtgattaagctgtgctgtgactcttactctgatggtaagttcttgtctcctgacttccgacagttttggtacatatataccgttcagctaatgtacttatgaca

SEQ ID NO: 197907 - DNA, 367 bp, Glycine max
  unsure (1)..(367): unsure at all n locations
tagaaactcaagcttgagactntacatgaacacacacacacccagatggttagtatattatttgaacctgctgacgaacttcaagaggggaggcagtgatgtaagaaacctcagattcctaggaaacgaatggatccgctgcaaaagagagtgtgaggagcacggagacgttgattacaaagaagaagaagaagaagaaagctctacaagaagaataagaagacattgtgnggaacgtttcacgtttcctcaaaacaagaaaggattagagccaagtatatagtagctttttctttatctgtgagtttacattatcaagggaattagagagaaagaacttggtaagggtttttgtgcggtagagaga

SEQ ID NO: 197908 - DNA, 356 bp, Glycine max
agctatctatctataaaagacgcttgtgttctttctaggtccaacgccctaacggtatctattattcctgctggcaaaaacgaacctctcaaaagtttaaaatcaactcgacacataacttccttgctttaaagaaaacatagggccgagtttctcaacgcacttgaggatacgcaggagcaagggcaacacctctttcgacccccaaaaaataaaaaatataaaaaagggaaaatacacaattgtgaagtcatgtgctgcacactcgaataaaggttggcgtcccttgtgacgggtgcacggggcgataataccttccccttgcgaaacaactctcgaacctttattttcaaaaa

SEQ ID NO: 197909 - DNA, 417 bp, Glycine max
  unsure (1)..(417): unsure at all n locations
tttaggcgtcataaaattgttattttattaaacaaatgcacatcctcgataaatggaaaagattaaaaccatggatgaaataaaaattttgggataaagaccaaaaattactgaaaagtttataatgaaaatcataaatttgaaaaagtttaaggacaaaaaaaatataatttattctatttttttatggcacaatagtattaaaatgatgatatgatataatattataataaaaatattttctttttattaagaactctattttcatgtactataggtataaatacttttaattacacctttnttgcatttgatggcaaaggagatgatattaaggccaaaatcatggccctttaccatggcctcttgctagcttgaaatgacatanatcacttacacagtgacaccaagatggac

SEQ ID NO: 197910 - DNA, 387 bp, Glycine max
ctacgtaggagtgcgtgagctcaatttaaaggtgagcaactggggatggtgtgcttatgcctgacttgtggaaatgagatagttgatttgtgccatcgtctgattgccacctagtaccacatatgatgggtgccccataatccaataatcttgatgtgagaaagcgtggaagagtcagtcttcctacttttgtttgttgaccatagagtgtgacctggagatatgtcgcgggggtcaagagaccttggggatgtcatgtggtgtgctattgcccaaaaccaagcttgggcaatcccgacccaacccgagcatagtcagtcaatgagaacctatgatgtacctaaacaggcgagcttctggagtcaaccaattaaagaacaaagtcca

SEQ ID NO: 197911 - DNA, 449 bp, Glycine max
ctcagcttagtcttatgatgctcccctatctctgcacaactttctgtcctcttctcagagaagtggatttgaaggtattttggtccataagaaaaactctgaatgtcttgaaaccctttgctatgataaatcgaaaagcttaatgccctatgacatgttaaaagatctttattgtcttgtacttaattgaaagatccaagaagtgtgaatctcggacaactatcaattaagaatgcaatgtctttaatttttatcaactgtattggagaccaggaggagagtgaacctcgtgcactaaatatgtgtgtttgatttcttgtgtgatatattgatcgtaaattgtagtgtgtatgttatctatggatagagtcacatggacttgggtgtaggacatttgatgactaaaactcagttccaatgttataggtatgtaggatgtaaaccgtaat

SEQ ID NO: 197912 - DNA, 430 bp, Glycine max
agcttaacaaaaggcacattaatagtaaaggttcttctatatttttgattcacaatttaaaaattcaaaataatctcaaaaagaattttattaaataacaatgtattaatcccatgcggcccattggcgtatgcataaggggaggaggggacaaaaccatagatttgcatgccacagatccacaagacctaatctcatgcgcaatctcatttgcacatagcgttaggcacacgttgattgttctataaacaaggaaagcaaaatatgtctagacaacgtgagactcctgtcttttaatataccactaaaatacaatagcgattaattttttaataataattctggtcttatcctttcgggacctagtatttctattaaatcttcagtctctttttatcatgttcttatagatataaacacatgaatcaaa

SEQ ID NO: 197913 - DNA, 457 bp, Glycine max
  unsure (1)..(457): unsure at all n locations
tgtctctcttagtgtcgttgccatgagaacttcggtattcagtggtgcagacctagcaaacctaatgaatcaagccgcgattcttgtcgggtgaaaggggcaaagataaaatcacaatggaagaagttgatgacttcgtagatcgcattgtggcaggcatggaaagaaccaagatgatgataaaaataaattttttatctactgaaaattaactntaaaagactactaaaagctataaaagacggaagagaataagataaaacttgagatatttcattcatttgattgatggcaaaagcaaaattctggtggcttaacattggtcataccangtgaagatccatctctcatctctaagaaccaactacttgctagaatagttggaggcttanngggaaaagtagaagaggaattcatatttcgtgaaactgagataaccactggagctgcagtggac

SEQ ID NO: 197914 - DNA, 390 bp, Glycine max
  unsure (1)..(390): unsure at all n locations
gaagaggcgcgcaaggaagtccacaaacttatggaggcagggcttgggtgtgcccagtgcaagtggtccccaagaaaggtgggatgactgtagtgagaaatgaaaagaatagccttattcctacacgaacaatcttagggggggcaaacgtgtattgaatatcggaagctgaaagatgccaccaaaaaagatcacttctctctcacaattatggatcatatgctcgagcggntagccaatcaatcattttattgcttcttagatggctattcagggaacaatcaaattgttgtcgatcgtaaagaccaagaatagactacattcacttgttcattcggaggattcgcttataggagaataccatctgcgatatgaacgctccagccacat

SEQ ID NO: 197915 - DNA, 503 bp, Glycine max
  unsure (1)..(503): unsure at all n locations
gctgttaagaacttagaaaanatcaagaacaaacctggtcgcacatctttcgcgtgtatgatatccactccacaaggtttgaagtataggagtccctcaatcctattacgcaacgtggtggacaaaagtgggcagttaacttaaatggtcattattgtcaatgcggaaggtattctgcacttcactatccatgttcacacattattgcagcttgtggttacgtgagcatgaactactaccaatatatagatgttgtttacacaaatgagcacatcttataagcttactccgcacaatggtggcctctcgggaatgaagcgactattcctccttttaatgacgcatggacacttattccttgaccaactactattcgtgcgaaaggtcagtcaacatcaacatagataaggaatgagatggattcggcacaccatctgagtaccgacataaatgtaagagatctggagccgaagggcataacatgcatcgctgtccaatgcatc

SEQ ID NO: 197916 - DNA, 376 bp, Glycine max
  unsure (1)..(376): unsure at all n locations
cagctggccttgaatcagaaatctgtacctgttgcaagggtttggggtttgtgctcctctgctgaccaccatacagacctttgcccttccatgcagcaacctggagcaattgagcagcctgaagcttatgctgcaaatatttacaatagacctcctcaacctcaacagcaaaatcaaccacagcagagcaattatgacctttccagcaacagatacaaccctggatggaggaatcaccctaacctcagatggtccagcacctaacaacaacaacagcagcctgctccttccttccaaaatgcttgtggccacagcagaccatacattcctncaccaatccaacaacagcaacaaccccagaacagccaacagttga

SEQ ID NO: 197917 - DNA, 509 bp, Glycine max
  unsure (1)..(509): unsure at all n locations
tctcagcttctaaggaggtgagcatagttatgagagggtgtgtgtagcttgtttctcaaggaagtnttctcaaagaagcttctcaaggaagttttctaaagaaaacttctcaaggaagctacctagtctataaatagaagcatgtgtaacacttgttgtaactttgatgaatgagagtcttgtgagacacaactcanagttcaacttctctccctttttcttccttcaatttcgtgctcccccctctctctatctctccctctttcttttcctccattgaagcatcctctccaagcttcttatccaaggctcatcttggtggtgaagctccttcttccatggcttattccctagtggatggtgccgactcttacctcttctnctttgtcttacgctgcatctccatggcggaaaatcaccatttaaggacctcatttaagctcatagattcagccttcatagaagctccacaagcaagctctcatcaccatttatgtccagtaatgttg

SEQ ID NO: 197918 - DNA, 413 bp, Glycine max
agatactcagcttcagaggaacctctaatgaagctctagagaaactactttttctgtctcggaaaaatgctgcccacctacttaaccgttgatcttttgaaattggcttgaacttcacaagacactttcatgatctgaccggctagaacatccgtcccgaagcattcttattaaacacttaacctttgtttcgtgtagcttagaaaacgcatttcttcttctttttcttcaagccttttaaagtccagcacttttcatacccacagcccattaccccaaaccatattgtctcattgaaccacccgaaggaaccttcaccgaacgaatctcactggttgggttcgagaaacaaacctatcgaccttgttctcaagctggtgatcacagcagacaaagattcaggccgcagatcc

SEQ ID NO: 197919 - DNA, 376 bp, Glycine max
  unsure (1)..(376): unsure at all n locations
aacaccaactcacttcttccttcattgattgctacagaaaaaatcagatgaaaaatcaaacattcagactattttaaagctcttcctaattattcaaaacttataaacaaggacaaacaagcttacatgtattgaaatagtcaacatagctgcctacaaaacgggcattataatagccgtcctaaggcaattatcacccaagtcagtaaggtgcatatgaattatgaaacgctgatgatcacaacggctttgaagcaagtatgcaagtcgactntcacttcggacatatgtgatgatatctctctccttattggactntgcacaaacaacgtgacaatctaattcaatgtgcttcaccctctcatggcataccagt

SEQ ID NO: 197920 - DNA, 427 bp, Glycine max
  unsure (1)..(427): unsure at all n locations
tgtcgctggagctgacccatcaactgccctaactcttttattatggtgatncctangctcttgaccttgacttgatagaacctcattttaagagaaggcgttgtacttgaccccatgttttactaaagtgaaacaaaacctattgtgaatcaaaactccgacatctatcattgctggaatggatgaatgcatgaagaaatgcatatgacacagatgcaatttatgaatacaggagcccgggatattgtccccttcttagatacaacgtttgggcggcatggcgcccgacatatgtatttaagaatgcgacacggaccctccgtcggtttgacaaagtgaggggatcaagactgaacccgtgcatgatgcatataccaatgggcacacacggngatgtacatagtacggcaatatccacaaacaaata

SEQ ID NO: 197921 - DNA, 454 bp, Glycine max
  unsure (1)..(454): unsure at all n locations
agcttatgcgcatatttccttacgaacgttcttttttcaagacatcctatcaactaagagaaatgcacccatatacaatcaaggtatcttcattacctagattatttacatgtacttcctaggtgtatttgttatttacatcacacacgcctccttggctgaatttacatacatacatactcaaagcattttggggtaccaaaaattgcacatgcgcccatcttggtatttctaatacccatacatatacaaacttcacgatgaatcttgactacctacacaataaggtgctacatttcatgctatttttttatcaagttttgctacctaaagccacatgcaaattcaagcatatttttctttgctgactaaaattgtattcaaattagaaggtatatattntcttgtaatatgtttacttacataacatgcaacnatattatatatatctttt

SEQ ID NO: 197922 - DNA, 430 bp, Glycine max
  unsure (1)..(430): unsure at all n locations
ggtggactataccttcgaccgaacacggccgtgtttctctcttgtccggattcaaggcggcctgcagcaccggctctgcttccctaactgtactggaggcggttgcgggggctttatcctctatggttttctgaagttttaacatgacctccgagatgaaagccatttgatcttttaaggctgatcgatcggccttcatctgttcctgcacgccctcttcattatccattnttctggatcgagtgttataggggtgccttggtgttttcttagttatgaatgaaatcctaaagaaataaacaacggtgagtgtgctaccaaaacatgagtatgcaaattggtgatcggagcacttggatccaccccaagaattttagataacgtaacgagtccagaacttctcattttataaaaagaacaaagctttcat

SEQ ID NO: 197923 - DNA, 461 bp, Glycine max
  unsure (1)..(461): unsure at all n locations
agcttgccaaccctatgaagctctcttatatcttttcacactttttgnggtgggccattcttggatggccttgatcttctcagggtccacttgtaccccatttctaccaactacaaaccctaagaaaactatattatctacacaaaaagtacacttctctatattngcatagagggtgtttttcctaaagactgaaagaacttgcctgagatgtcctcagtgatcatctaggctcctactgtacactaaaatatcatcaaaataaacaactacaaatctacctatgaaatcccttaagacatgatgcataagcctcatacaggtgcttggtgcattagtgaagcccaaaggcatcactagccattcatacaaaccatacttggtctagaagcggtttccactcatcacccttttatcctgatttgggatacccactttaagatcatttttgaaagatattg

SEQ ID NO: 197924 - DNA, 464 bp, Glycine max
  unsure (1)..(464): unsure at all n locations
tccacaacatccaatcaaaacaacattcaaacagcacaagctatcacagccaagcaaaacagagcaaaggcagaaaactctgctcaacacatcaaccaaaatcacagcttttctctcttaaggaccacagtaacaattccttcgatccaattcgttaaccggtggatcgactccaaaattttactggaagtctatagtgcataagcctacattgtgaccgttgggatcgactagcaaacatccagaactcattctgtactactgtttgagaggcaagcacacacaagcattttctgcaccaagctaanattctgctgcacctatnttgacagcaaaattctgcataagtgcagaattcgaaaatcacacttcctctcatncaatcttgctcaaatcgaatcctacaagtcccanatcatgtatcanacatgtctaaaccatagccaacttcaaccacagtacac

SEQ ID NO: 197925 - DNA, 390 bp, Glycine max
  unsure (1)..(390): unsure at all n locations
agcttgaagatatattggataatttgtttgttccattangcttttaatgtctttagaggttacttcctcgctgacatcttttgtttcgaatggaattgccatgacaggtttattactactgtctttgatatttggtagttgatattgtgttgtgggaggtaaatccgattaaattaactcaccatctctcacttgccagtttgttatgacatttgttgttggatcacctatgatttcttgtttccaagggtaatctatattctttctgatggcatatgcatgaaaccaatcaaagaaaaggacattaattttgactctttcgacaaattcatagaacttgtcttggacttgttatttgtctgttcccttgaaatgtaggaaaaccatctt

SEQ ID NO: 197926 - DNA, 490 bp, Glycine max
  unsure (1)..(490): unsure at all n locations
tgtgactcttgtcaatttctttaaaactagtcacttaattagttgtgactcttgaaagaatcttcagaaacaagtcactttaagaattgtgacatttggaaatgtatttttcaaaatcagtcactggtaattgattaccatgaaggtgtaaccgattacacatcaacagatgtgactcttcattnntgaatttgaaaattaaaacgtttagaaacactggtaattgtttacaagtattgtgtaatcgattacacaagtttaaaatgtttaaacacaagttgtaactcttgaaatttgaaatcttaacattntaaaacactggtaatcgattactaccttttggtaatcgattaccagagcgtaaaattctttggtaatgatcttgtaaaacttcttgtgctactcaatgttntggaanactttnttantacttatctctgatgagtcttctcttgattcttgaaatcttgatctgattattcttaaatct

SEQ ID NO: 197927 - DNA, 466 bp, Glycine max
  unsure (1)..(466): unsure at all n locations
agcgcgggtctgggagacaaaggtcaagtggtcgctatattctaagaggatgttccgagtacattggatttggtacgaccatgccctcctgatttccagctggngaaatggcgagtggaggaacgccccggcatttacgcaacgagcaaatgtaaacctttacgggtttaaaagctctatagttgggcctaggctatagagttttttccttttgttaaggcttttgtgtcttttgtttttgaatttataatacgaggacctttcttcatctgttcctacgtctctacccattctcattcatttgcatgttcacttctttntctgaaacggcagatccgatgacgagtcccccgaaggtactaatacctgngacccgcttatcgacttcgagcaagaaatgaatcanacggaagatgaagganatgaggatgtgggacttccccagaatagaaagaatggcgccatg

SEQ ID NO: 197928 - DNA, 409 bp, Glycine max
  unsure (1)..(409): unsure at all n locations
gcatcaagctaacaaaccatgacgagaacttgacattttcttgctcataacattcttgatgaacggctatttgacatctataaaatatataatgcattcttatattaattgcaaccaaattcaatatgaagagtaagataacaacaaccaacaaaaacttgccggatagttcaatctngccaaagaaaaaaaaaaggttttataaacaaatgtgttcattgtcagcggtgatctgactgataagtgaggatggtaaggctgaaaaactgtttcggcaaagcagaatggagactgctgagcatggaattgaacaacataagaaagggtgcatataatcgtcacatgtgttacacaaaatgctggacgtacttcttgcctatatcattccacgatgacactaatcagatcg

SEQ ID NO: 197929 - DNA, 486 bp, Glycine max
  unsure (1)..(486): unsure at all n locations
gatagggagagctaaatcttctggtgggtcttacttgtatgtacttgatgtaaatacatgtatatcgatttaatgatgttntatgtgttctctgtgctatcagtacgtcatttcagtgtgcttttgccttgatcatgtagatgcatgctttgntaggatcattcaacagtggaaactagtctgattcttagaacttgataaaacgtggcttgtttattgtattatcatgaggaatcggggtacggtaacctagttgttgcatgtttgtcttaatgcggttctggtcgagtttagtccaacaagaggaatctgaggatgatgcttgatcaggattaggctagactatcatgaggaatcggngtttagcatttcagtagacaccatagaacacatgagcattngtaagtagagaatatctntataacatcangcacctaataggaggatcaacgtgttgtctacttgtctttacacatcattactcat

SEQ ID NO: 197930 - DNA, 440 bp, Glycine max
  unsure (1)..(440): unsure at all n locations
ccttaagtgacgcggctgcagctttcctatttgctataatagggggtgtattgaanaanaaaagggttcaaccccttaggcacttctctctctctcgaaatagctgaggaaaattagttccgtgaagaaaatccaagccgaggcgcttccgtaacatttccgtgagtaattacgcgaagattctcgaccgtttttcaagattcatcgatcgttcttcgttttcttcagtcttcaacgggtaagtacctcaaaccaagcttttcaattcattctatgtagcccgggtggtccacattttgtttcatgtatatttattctcattttcattcgctttttatacccctttttgacgtgcttaagccatntatntaagtcatttctcgcttaatctaaaaataaaataaatttccaccgatcgtttgaactgtatcatcccgtga

SEQ ID NO: 197931 - DNA, 481 bp, Glycine max
tggcgtacccaccagatgtggcactaggtggttgtcttgcgatcgtgcacaactagactttacacatccacaatgcgcgcatatgcccaacatcccctggtgcccacctgcaactgagctcacgtattcccacgtagaccatatgctcgtttatctcaacaccgcgtccccatcgattcttccaagcttccacaacatccaagcaaaacaacattcacacagcgcaagctatcacagccgatcattacatagccaaggcagagaactctgcctaaacaccaacctaaaatgacagctattcccactcagagacccatgaactattccttcgatctaattcggtaaccgctggatcgactcctaaatattactggatgtctacagcgcataagcctgcatattgaccgatgggatctactatcatacatgcagaactcagtctacattactcgtgtcacaaccagcacatacatgggatttt

SEQ ID NO: 197932 - DNA, 455 bp, Glycine max
  unsure (1)..(455): unsure at all n locations
agtctcgtggatttatggatagagggctgtttttttttgttgttaagttagagtttgggtctgaggcttgtgttttggaaaaaaacctcaggaaaaagttttgggtctaggtgtatgtttctcttcatagatgttggccaaccaaatcgttctgaggagtcatgtacagattaattgattctatattaattaagactatatcgaggtgttggttaccttgatttatatcattgcataactttgatttcttctcttccaatacaaaacggaaggttgagaatggattattttaaaacattgtcagctaggttgcagttaatctcaattatattatcttcataggaanagacatagagacttgggaaaaattttgaggctttatttcaacgattaagcagctaatatcatgaaaggagttcttttgctttcttcaacattaacaaactattttgtaa

SEQ ID NO: 197933 - DNA, 408 bp, Glycine max
  unsure (1)..(408): unsure at all n locations
actattacccacaaccacccaccaaacctatcattgtttatattatgacatcggcagaaatgcagttgagaagagaaaggggcctatgctttacttgtgatgacaagttttcccctagccatcgttgtcctaataagcaatattttgttccacagtgggaagaagaggatgaacctgcattacaaccagatccaccagacgaggttgagacagctggtgaccccagtttgcaagatcatcatttgtcttataatgctttaaaaggctcatcangtcttgggacaattgaagttcaaggatcaataaatggattgggagtgtagattctactagatagtgggagttcatataacttcctctagcctagactagctcaatgcctgangttacctgtagaaccaattccta

SEQ ID NO: 197934 - DNA, 427 bp, Glycine max
  unsure (1)..(427): unsure at all n locations
tcagctttaggagataccataaaaactattgttttttttaaancaaaatcaattgaggaaacttcttctaaaatccccattgaaaaaccattattcaaacctttcaaagtagagagaaggcttaaagaaaaattagggaactttagaaaactaaattcttaattgaaggcggttgtgacaaccatagtgaattactaaacaagattggtagcttacttaaagtcattccagataccctccaagcctcagagaatacttccaaaatggtaacaagaagtacctccaaattaatcaatgttattaatgaagatagtgaccataactcagataacacacctgagataggatcagtgtcagaaaagaatataaatccaattaattccaaacactggaaacaccctccataatatattatcaactgccaact

SEQ ID NO: 197935 - DNA, 418 bp, Glycine max
  unsure (1)..(418): unsure at all n locations
cggaactataaaactcagctttaaccaatcccaactaatgatgctctcatagtaattatatgtatattaatgcagcaaatttaatgaagttgtacaaccccaattcatgagttccgatcgggtttgacaacacaattttacggctttcatcaattcacaatattctaaaactcatacccgatatacatgaatattcaaatacgatccatctaaaatacttagaatgtcacttatctagaattatttatataaaaataatcttcaaagaatataccatgatcattttaaaggaaaacaaagtgttctactcacctcttgattgaagacccacaaagtctctagacattctcacaacatattctatagtcacaatacattctctccctacacgtttccatttntcacttatttgatctca

SEQ ID NO: 197936 - DNA, 440 bp, Glycine max
  unsure (1)..(440): unsure at all n locations
cttagagtcacctgaggctgcaactatacttaaatgataactttgttgttgtatttaaaggctntaaaacttctaaaatcacaatccaactgataaatgctaattatgagtatattttgggggttaaattatagaggagattgtaatttttctattctaatttttcctttttgagcaaatacttgttaaattaacatcatttaagtttttgcgtagagaatattaaaaatgatgaatttataaagcttagtgagtaaaataaagctcaggaaagcaagctaattgaggaaagaatggctaattaaggaaataagactaattgaggaaagaaggattaattatggaaaacagaataattaaggaaaggagactaattaaggaaatcagactaattcaaatatctgctaatctacaccttataaagaagaagagagaagaag

SEQ ID NO: 197937 - DNA, 453 bp, Glycine max
  unsure (1)..(453): unsure at all n locations
ntntttcaggattacacanaagcaaatctaataagggtttataagagatgctcttggagagagcattttttcaagagtttaaaaatagatttttctcacaaggatattnttgcaaagcttgtgcatccaatgtgaaaggaataactttagataaataggttatataaaaagttagagtaaaatcacaatgtttatagtggttcactcaaacttgtgagttacatccaattctccttaaaatctttgaagggttccattagtcacaaattgattacaaacaagtattttactctctcacttttgactacttttgactacaagtattctctagaccactcttgagacactcttagtctccccttgagattaagaanacaccaaagtattcttttgttaataaaacactcgtgtttttctaattaacagtttggttgaataaaatatccaaagctt

SEQ ID NO: 197938 - DNA, 435 bp, Glycine max
  unsure (1)..(435): unsure at all n locations
ctgcagcttgtccgaaaaatactaaaatgttttttgtccaacgccttaaacggtccgtattgcttctatcggttaacatggaccgttcaaaagcataaaatcaacatgttactttaccgcttttgcaagaactacgtaggtctgatttcctcatcgcaattgaggatatgtaggagcaaaagtcccgctcttttcggccaccccaagagatcattaataggccaacgccttaacgtttctcttctttcanaaaaccaatagatcgttaatgcgccaacgccttaactgttctctcctttccaaaaatcaaaagatcgtttaatgtgccaatgcctcaaacgacttttgtttggtcaatatatatcttgcaatagataaaacaacttatccaacgttcagttttcgaaaactacgtatgtctgattccttataaca

SEQ ID NO: 197939 - DNA, 432 bp, Glycine max
  unsure (1)..(432): unsure at all n locations
atagaaactcagctcggagggcaaaagaagactcacagtgtcatnggttgtgtattgttatgaagaagttaacatgctcactagatgaagaaaaatacttcaagccatgagaagtaatcaacaactaaaggacaagaaaaatgttgtatacatgacaatcttcacaatgaacatgacatgaagaaccatattgttgcaacacactcaaaatggaatttcatcaatagaatgagttcatattgttacaacacactcagaaccatattaggaattctagaaatgcaattgagtctttcttggtggctatggaaatcttgaagtaatctcttcaactctcatgaataagtcatggtttgatacaacctagatccgggataaaattgagcctgaaattgcaaacagtgtgcttggacaacttgatatgtgtgcaat

SEQ ID NO: 197940 - DNA, 460 bp, Glycine max
  unsure (1)..(460): unsure at all n locations
agctcggattccttaattanggaatctattcttcctaagatggagccaaacccagtcaccctcattaagaactagctcttttcttcctctattgcctttaattgaatacacctttgtttggttctctatttggatcttaaccctctcatgcatctcctttacaaattctgacctacattccccttctttatgtataaaagaagtgtccggtgggaggggaatgacgtctaacggtgttaggggattgaacccatatacaacctcaaaaggggactccttggtggttctatgaacccccctgttgtaggcaaattctacatgaggaagatactcattccaagacttatggttgcctttcagaagagcccttagaagggtggataaagacctattcactacctctgtctgcccatcagttagtggatgacaagtggcatataaaagaaatttagtctctaac

SEQ ID NO: 197941 - DNA, 222 bp, Glycine max
ttgagcttatcagggttgacgaaatttttttgtcaccagccagggccagagggggagatcgaaccctctgaagacctcaaggaaagtcaatgcactctggtcaaatcaaattgaaagaagagaaaagtttctgattccagacatttgaatgccatgctgcctgcttggaaaaagcaataaactgggaaaatctaatctgctaaaatgctgaagcctgataag

SEQ ID NO: 197942 - DNA, 439 bp, Glycine max
  unsure (1)..(439): unsure at all n locations
ggcagcaagcttgctacaaattctccttgcctgtttttttaacctncnnggggggtcatatagatgtcttcctctaaatccgcatgcaagaatgcagttttaacatctaactgctccaagtgaagattctctgcagctactatgctcagaataactctgatggtagtcatctttacaaatggagagaagatctctgtgaaatcaattccttgtttctgctnnaaccctttcaccacaagtctcgccttgtatcttcttctaccgttagattcttcctttaacctatagacccacctattctgtaatgctttcttttcttctggaaaattagttaaagaccacgtattattcttctgaagggatgtcatctcatatttcatcgctagctcccactcaatagtgtcattcccctgtttacctcactgaacattctggctca

SEQ ID NO: 197943 - DNA, 438 bp, Glycine max
  unsure (1)..(438): unsure at all n locations
tgacaccatgtgtgttacaacctagtattctttgtcctattaagtcactgctggctctacacaaattaaaaaatttattgtttgtttgcacaatgactcactcttaatcatcttatagtcaaatatacaatctcaacacttagtcctttatctcaagttgctcaaggtgttgagattcttttcaaactatacaacaatttacaataaagctttttacggaaagaatttgaatgaaagtgcatttgttcatttccattatttcaaaacttctggtatttataggcattcttcaacaagtgagtggtgtctctaaatggataaatctcttcacttaagctcgcgtttgagattgtggttgtcaacattaatacttgcttanatgcacgactcctcatgctgaaaaccactctgtaagtttcatattgacacttcagcgaa

SEQ ID NO: 197944 - DNA, 430 bp, Glycine max
gcttataagaacaaaaatgcctcaatcatattctaatatgcatgtgaattaggaagcatcaacatgaatcaagccaaggttattgtgcacgcaatcaatggggcaaaacacaccaaatgattatgatgatggatggctcaaattctcacaaaggtaaactcatcacttttaaattgagctttcaaaactatcatgacatgtagaggagaatcaaggatttcaagtcacaaaatgtcaaaaactcttattttccaaaaaattacccatttcttgaacatatcctatgattcaaagaaaaacatgcaaagtcgtacatgcacacagaattgacccaaaatattaaatctaaaatccgacagaactaatcaacattaacaaattaacacacctaacaaattaacaaaaccaacaaaactaacataaaccaaag

SEQ ID NO: 197945 - DNA, 381 bp, Glycine max
  unsure (1)..(381): unsure at all n locations
catcaaactttcctaagttatctgttccattattcaatacaaaacatttacagccaaagatatgaagatgtgagatgtttggttttctgccattgaacaattcatatggagtnttctttaaaatgggtcttattaaagccctatttaaaatgtagcatgcagatcagcccaaaagtattttggaagaggagtatcatttaataaaattctagcaatctcttccaaagatctatntttcctttcaacaacaccattttgttgaggggttcttggtgcagaaaagttatgctcaatcccatgcttatcacacaataattcanaatacttatgttcacactcacccncatgatcacttctaatagatataatcttgagattttc

SEQ ID NO: 197946 - DNA, 475 bp, Glycine max
  unsure (1)..(475): unsure at all n locations
agctntatgcttaagtatgtatggcataacttctattattggttatcaagacatacaagtgagcttgtaacaaatcttctagacttggagtgatcacatgcagtactcttgaacccttaccacccactctgttatcatgccgagactcaagaaggccaacaggtttagccttctcaatgtattttgaacaaaattcaatggcttcttctacaatgtacctctcaacaatagatgtttctggacaatatagattctttgtatacccttttaagatcttcatgtatcgctcaattgggtacatccaccgcaaataaataggaccacaacatttgatttctctgaccagatgcacaatcaagtgaatcatgatgtcaaagaaagtatggggaaaatacatctccaactggcacagtataattgcagcctcattttccagctcatcatacttgacaggatcaacgactntgctacatat

SEQ ID NO: 197947 - DNA, 401 bp, Glycine max
  unsure (1)..(401): unsure at all n locations
caatctttatgctagctaactgagttagtgttaggtggaactatggtcttattttggatataatgtgcttgttttgattaagggtagacgacctaatagaggcctaaatggaggggtgagaagcccctgctttttctggaaatcgcgattagcgcgctaagcgtggctgtgcgctaagcgagttcatcattatttgttgaatatctggatttccagatgaactcgctaagcgtggccatgtccctctaagcgcgttcatcttctctgattgaaaattcaattgcgtatgacctcgctaagcgtgtctatacactaagcaagtgttgtgttctcaaacacttagaatatttgtgttttgctatgcgctaagcatgccctatcacactaagcgcaantatctc

SEQ ID NO: 197948 - DNA, 452 bp, Glycine max
  unsure (1)..(452): unsure at all n locations
gcatgcaagcttgttgaggaaggtgtgctatcaaagacttttattttatcctactccattaacaaggacaaggttgattctcttctaaattgacactaacctctttcctctggtctagtagtgtaggagcacaagcgtgaagtaaagctctataccggatatgaatgggaaggttgaacaccacataaccgaacaaaaaagactcctaaatctaaactttaagaatttgggttaaagaattatgtccggttcacttatatgactggttatgacccatctcgcgtaaatcctctcaagtatttattcctttgaatttgcaacaagtaatctttttctttntttcccgctactgatgaaatggcaatcgtagaaactagaatatgagctcccccgcgtgaaagaagaaattgacggtcaaatctctcaagcctttgacagaggtttgcagattg

SEQ ID NO: 197949 - DNA, 449 bp, Glycine max
  unsure (1)..(449): unsure at all n locations
tactcatttcttttttttttttcaagtgnacacatatggtatgctattgaaagcagatgttcatttgatatgttttttcaattgataattatcatgatgaatttaattattacaggttgatatgcttatgctactaaatcaagattagatcgaatggtcttttcttatagggcatctagtatagtatagtggataatttgacctctatctccttaagcataaacgcactgccacacttttcaattcattcagttgtatatgtttcgatgcctagctaatagctagacataccaagattttctttctggatatatattggcttctcagtacaaattttcttcttccaaactagctgctctctctctctctcgttcagaaatcaacagtggtccattangtcaggatctcaatgtacggtaatctaacaatgatatgttccctgtatctac

SEQ ID NO: 197950 - DNA, 305 bp, Glycine max
aaacaaacaacacccccatttaacctgctactgcaaacaaatgaaaaattaaaccctttcccagctattccaagggacacaataaggattaaacaaatatggcaaataagaggcaattatatacgccagattcactacatgaattctcccctagcttcagtgataacaccaacatcaacataataaacccctctttagatggtcacatacctgaatttcttcaagaaatcaaacatcatacaataaaccagcaaacgatcctgaataaaactatgactgggataatcaatagcaataggatcacc

SEQ ID NO: 197951 - DNA, 463 bp, Glycine max
ataccacttatctgaaacatgcaatgactttaaaggtcagcacactagtgaacaatctacatttgtactaaaactactaaagatattatcttgttctttccaaggaagaaaataatctcaccgagttactatcagtgaatattatgggaccagatttaatcccttcacactcaatcatacatgcaaaggtgttgaaataacaaagatgtttggccttaggaaggcgatcgaaggatctgccagattccaacagttggtttggatgtaggccaagttgatcacggtgcacataaactcaaaggtcagggtgtctgaagggaccccctgtgtgtcgcaggagccatgatcatggcatgacagccaagtcgagatgtactacatcggacgatctatggtatatgggaagaaatgaggctgccagatccatgtccattatattaccaacccatatatgagtcgatca

SEQ ID NO: 197952 - DNA, 464 bp, Glycine max
  unsure (1)..(464): unsure at all n locations
gcttccgctctcgagagcattctattattctttttgcctttgctttcgggtagcttaagaaaaacaccatttcttcttctttctttcttccaaagccatttctaacgtcccaagcactttttccatcacccacagccaccattagccaccacataccatcgttgttctccattgaaatcccacaccgagaataacccttcaaccgaagcggaatcttccaacttggcttgcgggttcggtagagaataagcctaatctgaccttncattntcttttgaggtaaacatggttctacgcttatatcttggtagtttcatcttgtctttgcatcctttctgactctggaaccgccattgcatgtcttatgcttcctttgaaaaaccttagagaaagagactgtgtaaacttatgctttcatgaaatgcatggtattttcgtaacctacattgaaccccggtcacatt

SEQ ID NO: 197953 - DNA, 372 bp, Glycine max
  unsure (1)..(372): unsure at all n locations
tcatttaccacagaaatcagacttaggcttcaactctaaccctactctttttcactataacacacatctcacttcaaccctaagtaaatctacatttcatttctaaccagtttcccatgggcatttcagcctataaacatcacaaacatcatcacaaaaaccctataacagaatgggtatgtctaactcatccaaacatggcaatttcaacaagctntcaacaaatgtcttcacaaataatcatcacacagcagaaacctagcaagactacccatcatatctccccaaaccccatacctacgaaaatcaaaggagaaagaagttcaccctaaccttgaatttcgaagtcccactcgtagccatgcacttcac

SEQ ID NO: 197954 - DNA, 473 bp, Glycine max
  unsure (1)..(473): unsure at all n locations
ctgcagctgaggtttcctgttatgattgttatttattttaagaaaactttcatctcaacagaggacaacgtcaatggataataaaatgatgaccgaaatgaaaaaaggtcaaacgttcaaagtgtaggtgtgtttttcttattcttatgctgaatataaatgtcattgctattgtcaaatggttagatttcaacgtataagtggtatttgattctgaaagtaatctctatgttttttgcttctcataccctctgtttaaattggagtatatgcatgcaatttttttttgtttattctgcatgttccatcattactcataatatacatgttnttgaattggtaggccctgtgatttatgttctacggacttctaaatctccatgtggactttgacaacaacaatgttgaatcatcatgaaaactgtcttggaattcagcattcctccttcagtccccaaataatagaatatgca

SEQ ID NO: 197955 - DNA, 381 bp, Glycine max
  unsure (1)..(381): unsure at all n locations
gtacatgtgagatgcatgtatganttggatacctttaatatgatggtgcttactgatatgtgtacacccctttttttaaaataaattaaaagggttattttaaaattaatagaggttttagaaattaaataaatgagagaagatgaattgtggtaattaaaataaggggttcatagtattagaaaataaatatcataaaatgatgttctagaaaataaaggatgtcttaattggttatttatttaatgaaagagtaaaatagagttcctttttattaaataataaaataaaaaatagaggaaatagtagacttagagtaccctagagtaaaaaagagacatattatggccagtatcagatttacgatatggttctacactc

SEQ ID NO: 197956 - DNA, 393 bp, Glycine max
  unsure (1)..(393): unsure at all n locations
atatcttaagaagggggggttgaattaaaatatcccaaaatacttccccaactaaaaatctatttcactttcttttcaagttataaattcccttaacaatgagcttcttaaatattaattcaaataaaacactctgaatatgaacataaagcaataataaanaaaggagattaagggaaaagaaagtgcaaacttagacttatactggttcggccacacccttgtgcctacgtccagtccccaagcaacccgctggagagttccactatcttgtaaattccctctacaagatctacacacacaaggaaaactctttctttgtgttagaactcctctacacaagagaccccagtctcttaatccttaagaataggagagaagaaaatgatcctc

SEQ ID NO: 197957 - DNA, 463 bp, Glycine max
  unsure (1)..(463): unsure at all n locations
agctggctactacaatccccgcgcgctttgattattacttctctganagcaagaaacacacacacacacactntttcctagtcgatcactcacataaatgtccattctccccctttggggttgagactaagcttcatttgaaataaggtaattacttatgtgagttctagagttattccctatttatctccccctttggcatcaacaaaaagccaaagtgtgtaacaagtataagacacacatatactattaatcattcacaaggcatacatggaagaatataaaccaatcatgaagcatgatacatgaatagatcaaatatataaaaaccacataggcatataatataattcataattgttcattcaaaccatgcaaataaagatatactaaattatccaaatggcataataatatagggtattgggaaagtcactagcatctagcaggcctagatctcttc

SEQ ID NO: 197958 - DNA, 471 bp, Glycine max
ttaagcaccgcggctgcagctgtatcattaccaggcttttattattatcagaagttttaaacgttatataatagccttcagaaatttgaatctaaattttaaagcctgtaatcgattacaacttgtgtataatcgattaccagaaatgaaaattcaaatttcaattctgaagagtcacaactcttcagaatctaactgtgtaatcgataacaacagttatgtaattgattaccagtaaggaattttcgaatataactcccaagagtcacaactgttcaacaagtttttgaatgaccatcaaaggcctatagataggtgacttgggttacaaaatttcttagagtttttctgaacaaattgacttatcctctcaatacaaaattgtcttataactcttaaaatattccttggccaaaacactcgcaaattcaataaggaatcttgagtgatctttcattgtagcatccttct

SEQ ID NO: 197959 - DNA, 470 bp, Glycine max
agactttgcaaagaaagaggaagaatatgttctattatactcagaaatcaatgtggcaaaatgcttgtgtaagaatgaatcggaaaagatagatgatcaaatgcaaaacaaagccttgattttatagactcttcatggttggtcaagagaaccattagaagagttatgacctttataaaaacttataaccaatttgaaaaagtcaaaaactatttgaagagttacatcttttgatttgtcagaaactatcactggtaatccattatcaaatcagtgtaattgattacacatagctttgtgtgaaaggatgtgactcttcacatttgaatttaaatttcaacgttcaaacacactggtaattgattgcctaaacattgtaatcgattactacattttgaaatcaattggaacgttgtacattcaatcgaaagctttttgcaatcatttgctactggtatccgatacataat

SEQ ID NO: 197960 - DNA, 476 bp, Glycine max
  unsure (1)..(476): unsure at all n locations
tcataatagttacctaagtgatgtcataagcgcttcttgttttattcataaggtgatagcagtttttagacttgaagtcactatgattcctatttgtatgagttgtaggctttaatgttagtaaacgttatccataacaggttgatcataaagatagtacttgagcttgcaatgaatcatgtatagggatgtgagtaatctacataggatatgtccctccctcttacatattaggagttatgtttatgggcctctcgatagaatgggatgcactatgcccgtggccacacaaaaatgggccaatatgagatattggatccatttgtgtntatgcgtccactcaagtatcaagatatcaacgattggacttaaggaggatgcctcatgttcgatcaagacatttggacgaagagaacaaggctacatggtgaaaatggctacagacggtgaaattgaatcattgatttctcatgggt

SEQ ID NO: 197961 - DNA, 449 bp, Glycine max
  unsure (1)..(449): unsure at all n locations
agcttgaccgtcaagaggaagtttggtaggtgtttttnttttcagaaatatgattctggaaaagtcgaaaccttgaaaataaaatatataaaacatatttggttagttttaatatataattaatgcttttgctacactcgaaaaagttaaattcctacctcctctaaaattaatttatgagaatcatagttttttgacaatcttttttttattaattacatatcaaacaagaaaatcataaattttcactttaagattcttgagaaaagtaaaagtttttcgtctatgaaacatctccttaaattgtattgattnttccatgacaaaataatgggggtgcattcttgatcactttcctggttttcgatgggtatgttggttgatatctacatacgaggtcacgacactggtgaaaatcatagtcatagctcatcgtggagcatatatta

SEQ ID NO: 197962 - DNA, 470 bp, Glycine max
  unsure (1)..(470): unsure at all n locations
ttagaactgggtcaaagagattnggatggtatgatttggttgtaactaaactcacgtgggtttccaattntatcaaacatagcaagagattttcttgctatagttgtctctaacatagcctctgaatctacctttagtaccagaggaagagttatggatctacgtcatagttctctcaaaccatgaatgatggaagcactcatttgcatgccagattggctcaagagaatatttaacattgtcttcaaatgaaaatgagtttttgagatacttgagcaattnggacaaggtaacaagattattttcaaatacattcttgtattgtgtactttntgtaaactaatggtgctttcttcactttgtagaaactgtaccttcacaggacataacttattcagcctcctctattgcacttgatgatcaatgaagaataganggttcttcattctggtatacggatatatatatct

SEQ ID NO: 197963 - DNA, 473 bp, Glycine max
  unsure (1)..(473): unsure at all n locations
agcttctatataagctgaaccattntatctatttcacaagttgagttntattcagaaaattagagattatctcttttatcttagggagagtgattctcctaaattcttgagtgattcaagaacaccctggctgtatcaaaggactttcacaacctttgtgtgttgccctcgctggaaagagtgattctttccttcctatcatctccacccttgttctttcaaaccacaattccagaaaatccacctctgcccaaaattatctcgtgaccataactcccattttacacactcaaattaagtgattcttgagcctaaattgaattncaaaacgagacctttcacctcgttttggaatcacctcanttggagccctgtagcttccgttattgccatttctatatttctggccagccaccacttaacctacgtttaccatcccattcatccatnttatgcccgaaaccaccttatta

SEQ ID NO: 197964 - DNA, 408 bp, Glycine max
ctcagcttgaattgaacacggaagctctcgagaaattaaatggtgtttatttatcacaccgaaggccgattcaggcgcataatattccgagacgctcgaaattgaacaacggaagctctcgagaatccaaatgggcataacttatcacacgaaagtccgattccggctgatagtataccgagactctcgaaattgaacaacggaagctctcgagaaattcaaatggtcataacttttcacatggaactccgattcaggcgcataatatatcgagactcttgaaatataacaacggaagctctcgagaaattcaaatggtcataaaatttcaaacgaaagtccgattcaggcgcataatatatcgagacgctcgaaattgaacaacggaagctctcgagatattcaaat

SEQ ID NO: 197965 - DNA, 456 bp, Glycine max
  unsure (1)..(456): unsure at all n locations
agcttcaccctcaaagcacaccatagatgattatggaaaatttggatgacttatgaggggtgaattttctctaaccattttattttccctttcagatttggtgccccatctccacacagattaatcaaatcatgtcatgaaaagagcgatcatcactcaaccgaaatttagcataagaatctaaaacctaacctaacaatcaagcatagatgcttggcatgaattacaatgaacaatttcaactcgtatgcaccaaaattgactagagagtccaacagcgtcaaaattttaaaactgaattaaaaatacgacccagatggcaaaaaaacatctagaacgcagcccaagtgcttgtacttgatctgtagctaagttagatctgattaagatgcanaattcagaaactgaagacatatatcaaagtgatatgcgaacaaatgacaaataagggattaa

SEQ ID NO: 197966 - DNA, 426 bp, Glycine max
  unsure (1)..(426): unsure at all n locations
ntaaggtgggaaacaatgatgtaaaaaaatggtgggcagatatcatatccgccaaaggcgagggaagcataaaaaaaagaagagaaaaagagaagacaagagtcctccaatatttacaaggcacaaaagtgcaataaggattaatgtataagacaaatgaagtaaagcctaacccaaaaagtttaaatgaataaaagtacaagcaacgctctcgaggttcgtactcaatataacccttaaacactctntgagcctctctaatcctttctttcattgccttcttacccctgaccacgttacaagcccaataaagttcatgtggatcaaggaaagactaattntgcttttgagttaagattttggaatataacccacacacgcttgtgattgccagaaaaaccncgaggtttgcacttgcacgtttga

SEQ ID NO: 197967 - DNA, 307 bp, Glycine max
  unsure (1)..(307): unsure at all n locations
tgcagctgaagtgaaaggatattgattttaatatgatatgatatgacatgatntttgttcggntagggactgatgagaatcctgaaattggtcaaatacaggcttaaggctcaagcgggtcctatcttatcctattattgttctttgtaatttttcttggctcgtgttttgtccttgttctgatatttggcttcttgtatgcgtcatgttgcgatcctgtcgtgtctttgctacggtcttgttcttgacacgtttgtgttctagcttctagagtctattagactctttgtcaaaaaaaaattgtttg

SEQ ID NO: 197968 - DNA, 464 bp, Glycine max
  unsure (1)..(464): unsure at all n locations
gcttgcttctacacaagagtgtttgagggttacattgagtaagaacttcaagagtgtttctcgtaccttttagggtgggctttacttcttttgtattacacattagtcttttattggactttttgcctttcttgtagaatttggagatcttttgtctctttcttttcttcactcgcctttggtggattttatctacttttgtttaattgcttcccaacttcatgcatgtngttgttgcatttctcttctcactagtttagtggtggttcccactcagggtttctattttgctctagttgttttntggttttgtttttagaaaacaaatatgccttggctcggagggggtagcaaaggataaactagtggttgggaatgtgaaacatgaccatgtgtcatttcanatcttgacttagatccttttgagtttggattttgngacacaaccttaataacaccccctg

SEQ ID NO: 197969 - DNA, 457 bp, Glycine max
acaggcgcttagcccaaactgtcttgttaaacttaattggcttagcgagcaagctcgctaagcccaattccaaaacagagaagaaatatcacttaacgagactgacttgcttaacgcatgaacaaaaacttaaaaaactaaattgctttgggcttagcgagacttactcgcttagcccaagcttattcactaacagaggctaggtggcttagcgagactaactcgcttagccacaacagaagatcaaaagcctcttagactctaactcaagcaacataactcgctaagcgtggcatgccggctaagcgagttcatacaaacacttaaacaaaactggaaatttaaacactcgctaagccgaagtgcagtggcttagcgagttcataccaaaactcatatattcaaacaaaaatgatgaacacgcttagctggacagcgccagcttagcgatgtcatc

SEQ ID NO: 197970 - DNA, 445 bp, Glycine max
  unsure (1)..(445): unsure at all n locations
ccttcacccgatgaagacactgacaaaaacttatcttctccttcttggacaaagtatggcaggctgggggcaagtaaattttcttcccatcagaccttggatgcaactgtgatcttatacccatatcaactagatcttgacgggtattcaagccatcctttgtcttgccttgaatgttaaggagcgtcccaatcacactgtcacaaacatttttctccacatgcataacatcaatacaatgtctaacgtcaagatcacaccagtacggaagatcaaagaaaatggacctcttcttccatatgcaactctgacttttatcgttcttttgggttntcccaaatacagtgttcaagtgttgaacccgctgatatacctgctcaccagtgaacggtattggcgcaatatcatgctctntgacttcattaannagctttctcagtcgtct

SEQ ID NO: 197971 - DNA, 381 bp, Glycine max
  unsure (1)..(381): unsure at all n locations
tgtttataagctgaaaatgcctatggaaactgttagagatgaagggtagagttaacctatggtnaggaagtgagaatgtgaagtatgagtggaaaaagagtgaggctttgagagttggaaggctaaatctgaattcttggggaaatggaggttaaagggagtaatactatcttgatatgccattaagacattgaagaaaggttaggctgatctagaggtgaaaactaatgacctaagtgatccaagagccatttctagggcaaaatngtgtgttgaagagtcaaattttgattcggtgagattctaggtgtaaatccagtatgaacaagtctaaatggatcgtatggactggtgtgatgtgagagtttgcctcaaattacc

SEQ ID NO: 197972 - DNA, 331 bp, Glycine max
  unsure (1)..(331): unsure at all n locations
tgacttggctagtgagtataatggaagcgccactttcaatgtgtctgatctatctctttttgatgcacacggaggagccttggatatgaggacaaatcctttntcagaaagagggagtgatgatgacataaccaagggcaaggaccatgaagcacttgaaggtcccatgaccagaggcagacttaaacaagcccaacacgtcatagagacaaggctggtcatttgtatagctgccattgatgatgattgaaggcccaagtggagaaagatgaatgcccagaggcagaagcactaccaagactactaattgttgttgaacgcccaaactaac

SEQ ID NO: 197973 - DNA, 370 bp, Glycine max
agagaatgagcatttgattgtgtagataactgaaaatgttagtcaattgtcagattgattgtgaaggaatgcattaaccgtatcctggtgagagtgtgatccttaaattttgagagaaacgactatcatttaatactgatttttgtgtgaatctctaaagtgtggactgaatgcctgaaattgaggatgatgaagaccatgtttgattgtgatagccacttagccaaaaagctgaccacgtgcttgaatgatttatccctcgcacccagtttgagctgaatgaattattgattgattgaacactgagcccatacagtgttatctcttgctaccttgtcttaagttgtaggagagcatcatccacataagc

SEQ ID NO: 197974 - DNA, 434 bp, Glycine max
  unsure (1)..(434): unsure at all n locations
tgtaatcgattacacatatactgtaatcgattaccagagcttattttcagaanatattctcaacaatcacatctttttatgtggttcttgaatggctatcaaaggcctatatatatgtgacttgagacacgaatttgcgaagagtttttcagaacaaaaaggtcttatcctcttaaaaagcaaaatccgtttattctcttacaaattccttggccaaaacacttgtgattcaataaggaattatttgagtgctcaaattgttcaatctatctctttcaagagagatttcttcttttcttcttcttcattctgaanagggattaagagaccgagggtctcttgttgtgaaagaattctaaacacanaggaaggatngtccttgtgtatntagaacttgtaaaaggaatntacaagatagtggaactctcaagcgg

SEQ ID NO: 197975 - DNA, 399 bp, Glycine max
cgggacctcaagcgactgcggcatgcaactaatataacggggctttttttctttatttatagattctgaggattgatagaactagctttagaggagtactaagcctctaataagacctagttacattatggtcaggcccattacaccgataaacaaaaattatgagatttcttaaattcacgctataaggtgtgcgcataagccagagcagcatcgcgcctaagaccaattatctccttaaggtcggaatatgggctaatactaaacaggctcgcgctaagcccactgaaggtgtgcgctaagcccaggcgtgtgggtcaacaatcttcaacgtgctacaattcgggtcctatgatttctccttctttccttgatgataggccatccctgatccttgtg

SEQ ID NO: 197976 - DNA, 380 bp, Glycine max
  unsure (1)..(380): unsure at all n locations
cggaactaacaaactaagcttcctcctgacanatacgaaacattttgttagtggtctctatctcgacacctcacctgcggcacccaccataatatctcaattcaacaccagctccataacgtaatgagccaaatagatacccgtgattctcgtcacccaccttgccgtcaggcgtgctctaccttactcccgggcatgccaaacacaccacccaaaccacccctgcagagccatcccttcttctcttatgtacatcactaatccatgggatgatttgcaagactcacacctctataagctgttataccacagttgaaccatgcgcttcatgattcatacgccacacactgtgacatacccacatgatcgacactaccacg

SEQ ID NO: 197977 - DNA, 436 bp, Glycine max
gcttctatccaggcaattctaggtggttttgctccttcttccttggcttattgcctagtggatggtgcctcccctgtcctcttctcctttgccttccgctgcatcctcatggggaaaaatcaccattgaaggacctcattgaagctcaaagatccagcctccataaaagcctcacataccagcttccattagaaaagaaaaaggaaaagagagggttgaaataaatcctgatgagagagaacacatcagagaggaagaaagaagaaatatcttgaaagacatgacaagatgaaaacatgcctcctatagtagtcatgactcttgcacgagtttaagtgaagaacttatcaactattatagaaggctccatagttcacatactaaacatcattcccaaagaagagataaggatacaaggcctctagagggtaacatt

SEQ ID NO: 197978 - DNA, 280 bp, Glycine max
tccgtcccgtaatgcttctcttcatgtctgcctgagtgggcttatatgctagaccatacttcccacgatttccttgagtatttatcacgctagatatgccgccgttgttatttcctaaacccatgccgggttcaaaatcgttccccaacataactcgggccatgattaccgctgcatcagacagacaaggttgcccaaagagggacgtcacggaagaaatgctgaccacctcagaagactggaaagcagattataacgagtcttctgcggcttccacata

SEQ ID NO: 197979 - DNA, 444 bp, Glycine max
agcttgagtcaatagaacacttcatattgtctgtattcctgaacttgggttgcacctttatcttaaaagcaagcacataacccaacagcttatcaagtgcttggggggaaacatttaaatcaaaatcaccatccttgtgcaaagagaataattggatgctaaaaaaaaggataatggtattggatattacacaaacaaaaaataacatatcaaaggaaaaaagttgcttttgaatccaaatatgtacttcaattttaagcctattaattgcatcagctgactgaccaattaattcagtgcattcacgatcccaaagcaagaattctgtgttttcatctctgtggttgatcatcacgtcaagcctatacctcgtaccatatataccaacagtgtgaaaaatatgaatgtatgaagaatacacaggaattttaaagatcgcaatga

SEQ ID NO: 197980 - DNA, 440 bp, Glycine max
  unsure (1)..(440): unsure at all n locations
cgagctattanaagacttgcttagtcattgagcgttgttttctctaccttcagagtttagttagtttaagatatcttataactgtcagaaggaagaaatggtctcttaatgagctcatttcatactgtgtgaaagaagaggaaaaagcaagaaagaactgaaagtgctcatgttgtgagtacctctaaagacaagggcaaaaggaaaagaactgaggagcctaagaatgaagccgctaagggtccagcacataagatacaaaatcaaggtgacaattgtttctttngcagtaagcctggacatgtaaagaagatatgtaccaaatatcatgcttggcgtgcaaagaagggtatgtttcttactatggtttgntctgacggtcaattagctttagtacctagaatcactnggtggttagattctggtgtactactaacatc

SEQ ID NO: 197981 - DNA, 463 bp, Glycine max
  unsure (1)..(463): unsure at all n locations
gagcttcaagaataatgccctcagcaaatctttttattctctagaagganattcaataaataggcctcctatgtttaatggagagggctaccactattggaaaacccgaatgcaaatcttcattgaggcaatagacttaaacatttgggaagccatagaagttggaccttatgtacccaccatggnggctggaaatgcaacaagagataaaccnagagaagagtggactgaagatgaaagaagattagtgaagtacaatctaaaggctagaaacatcattacttctgctctaagaatggatgaatattttagggtttcaaattgttagagtgctaaggatatgtgggacacttttcaagttacacatgagggaacaactgatgtcaaatgatctaggataaatactctaactcatgagtatgaattatttacgatgaagacaaatgaaagtatacatgatatg

SEQ ID NO: 197982 - DNA, 484 bp, Glycine max
  unsure (1)..(484): unsure at all n locations
tccatcaagtggtaatcaaagcacacaagagcttcatgtattgtgcttcttaaacctctattaatattttgctgtaccttctcttccattggtgattcttcatttttctccatggatctccttacatgtcttgtgctaaattttgttaacatgattctttagagtttccaccgattaaacttgctatagaagctagatttgatcttctatggttcaaatttcttgttcctgttcttgaaccatgaattgtgttgagtttacgttcctttgagttttgtcttgttattttttgtggctgaaacctaaaccataaaattcttacaaaaatattaaagtagaaaagaacctcacaaatctggagtgacttggtcacctacttgtagtttgtcatagaagtcatgacatttgcacataagattcttatgtgngctgaatgtattttcttgtgttctgcaactcattcttcatagtgatgaaatattta

SEQ ID NO: 197983 - DNA, 422 bp, Glycine max
  unsure (1)..(422): unsure at all n locations
agcttaacaaatttagaaatcatgtgttcttgttttctgaaatatagggggagtaaacggatgcatattttatctatatacaattgtttgttgcttgcttgaatcttgatttcagatattgtattgtcatcatcaaaaagggggagattgtagatgcaattggctttgatgttttgatgatgatcatgatgatgtgttgcaattgatgcaaatgggcttttcaagattaaaattcaagacaatacttcaagattacaagtcacaacatcaagatgatcactagaatattaggaagggaattcctaattgaattagcagaggtttggccaagtgatttaaaatataaagtgttcctcaaaggttctactctctggtaattgattaccagaggatgtaatcgattaccagtggccanatacgtt

SEQ ID NO: 197984 - DNA, 286 bp, Glycine max
  unsure (1)..(286): unsure at all n locations
tgcccgctaagcccaaagcacttgtgattttntgttgtcttgtcatgcactaagcgtgccctgtcacgttaagcgcaatttactctatgtttctataattggtggaattgggcttagcgagccttctcgctaaaccatttgatgcaatcctaccccgcaagggcattggataagaagactcgcaagctagaattgggccataagatccaatggaaggccctatggttcttatgagccttatggtagatcttaagcacatgggctaaggatgagcccacttatcttt

SEQ ID NO: 197985 - DNA, 331 bp, Glycine max
cttgcacggcaacattgataccaagccccccaactccacaggaaacctacccaaccgaaaacacagaaaaaaacgcacacctcacgtgttcacaaaaaggaaaagctaatataccgatgcgggaccggactcacccggaagcgcgagacaagcgccgcgcacagagagacacaaaaagaggcaagagtggagacgggttggtgaacttgtcatgacaatagcaacaacacctctgatgcgacacaacaaccaacacatcacactccacgaggccatgctcaaaccactcagatcaaacctccgcccgccgcgacaatcaactatgaatcta

SEQ ID NO: 197986 - DNA, 397 bp, Glycine max
  unsure (1)..(397): unsure at all n locations
agcttgccgccacgggatttttcgactgtgctcttgtgtggnggaacacgctacaaaaggagagagcaagaaatgaagagccaatggttgatacatgggcggagatgaaaaggatcatgaggaagcaaaatgtgctggctagttactcaagggatttgaaatttaagctccaaaaactaacccaaggcaacaagggggttgaggagtatttcaaggaaatggatgtgctcatgattcaagcaaagaatgaagaagatgaggaggtaactatggctcgatttcttaatggtttgactaatgatatccgtgatattgtngagatgcaggagtttgttgaaatggatgatttgcttcacaaagcaatctaagtagagcaacaattaaaaaggaaaggagt

SEQ ID NO: 197987 - DNA, 488 bp, Glycine max
  unsure (1)..(488): unsure at all n locations
tatgtggagatgacctatagaagtcctaattatgttagtttatccaacggagtgtaaacttgatacaagcccaaataagcctgttattttctaagtgtatctgaggagtgccaaaataaaggggattagtgggaaaagtgtgataacaaaatagcggtatgagttgagagaggtgggaggaggtggcttatgatccttgggagagtttatgcctctcacagtgcctaaggagagtttctcttattggtgncttccttgtttatttataatgtaaacagtactatatcttaggatctggtccttaattccagacctgaatatgtaaataataaaaatactttcagcctttatttctatctttacttgatacctatcaaacccaattgctatgggtagaggagacaaagataggagatgtangtgatatcatcaagaagaatttagaggtcaaagtttgctatagatatgatttatgatagaacattatc

SEQ ID NO: 197988 - DNA, 387 bp, Glycine max
  unsure (1)..(387): unsure at all n locations
cacccaccttaaacccatatntcttcatcaaatcaaagatcccaactgcgcttctcctttgctttgcttcaacaaaggctttgaagcaatggagaaagtctccattgtcaaaaggcccttctcacccatttcctcaagcattgccaccatggtctcaaactgtctagtcctcccaagaacacacatcatgaagttataagtcctagaatcatgagcaaacccaggcctcttcccagcccaacaaaagaaccgaaaggccggcttcctagcatgcttgaacctntgcagcacatccacaaccaaatcatgggacaaccgaaccccacattcatcaagaacaacctccatgttcctatccaacgcaaacaattcatgaatcaccttgca

SEQ ID NO: 197989 - DNA, 464 bp, Glycine max
  unsure (1)..(464): unsure at all n locations
tgtaacanagagataacattaaaaacaaatgagggatcttgatatgatcttcagacctaaaccttcaatttccatgtctttcattgtaatgtaagttnttcatagttagtaagtttattttgctttatcccaatagattgaagggtttctctatatagcaaaaaacctgacaactttggatattatatcatacaacgccctggctaccaaggaatatagacattgccttaatcacatttcggcattggctttcccaaagaaatggaaatgagatggaacacatttggattttgtctaagaatttatatttgcttgatctttctgtggggaaatcaagaatgttggtccattaataatgaaggtgattntcttggactactcttttaactttccatttgtataaaaacattcatttcctcgtatcttgattttattnntgtggttntatntggaatggaaaacct

SEQ ID NO: 197990 - DNA, 394 bp, Glycine max
tcgttcaaacaagattaaagaaatcaagaagattcaagtgaagattcaagagaagactcaagatatgcaagaacatcaagaaaagcatcaagataagtatgaaaagaatttttcaaagaaaagattgaataacacaattcgtccaaagagaattttcaaagaataatctgttaccaagagtttttactctctggtaatcgattaccataaggcagtaatcgattaccagaagcccaaaacagttttataactggtttaaaaaggagtaatcgattaccatgggcatgtaatcgattaccaatctttttgaacattgaatttcaaatttcaaaagtcacaacttgtgataaaacatttcaaacttgtgtatcaatacacaacatttgaatcaata

SEQ ID NO: 197991 - DNA, 429 bp, Glycine max
  unsure (1)..(429): unsure at all n locations
ttctggaganaacttccttgagaagcttctgtgagaaaactttcttgtgaagctagagcttagctacacacacccctctcataactaagctcacctccttgagaagcttccttaagaagattcctaaagaagctaaagcttagctacacacacctttctaatagctaagttcacctccttgagatgagaagctagagcttagctacacaccccctataatagctaagctcacccccatgacaaanaacatgaaaatacaaaaaaaaagtccttactacaaagactactcanaatgccccgaaatacaaggctaaaaccctatactactagaatggccaaaatacaaggcccaaacgaaggaaaaacgtattcctaatattacaaagaagagtggatccaaccttgacccatgggctcaanatctaccct

SEQ ID NO: 197992 - DNA, 349 bp, Glycine max
atattgaataacataaactctcgagaaattctaatggtcataacttttcacacggatgtccgattccggcgcttaatatgtcgagacgctcgaaattgaacaacggaagctctcgagaaatctaatggtataacttttactccgaggaccgattcaggcgcataatatatcgagacgctcgaaattgaaaaacggaagctcccgagaaattcaaatggtcataacttttaactcagaggtccgattcaggcgcataatatattgagacgctcgaaattgaacatcgaaagctctctagaaattcacatgggcataacttttcacttggaggttcgattcaggcacatta

SEQ ID NO: 197993 - DNA, 345 bp, Glycine max
  unsure (1)..(345): unsure at all n locations
tgccttgccccttgatatatttgagggactcatggtctctatgaatgacaaattccttgggataaaggtagtgttgccatgttttcaaagcccgtactaaggcatacaactccttatcataagttgaatagttaagggtaggaccacttaacttttcactaaaataagcaattggatggccttcttgcatcaacacagccccaatcccaacattngaagcatcacactcaattttcaaaagaatttgaaagtttggcaaccgcaagtatgggggcattagttagctnttgcttaagaacattgaaagcttcttcttgtttctctccccatttgaacccacatttt

SEQ ID NO: 197994 - DNA, 390 bp, Glycine max
acataatatattgagaccctcgaaattgaacaacggaagttctctaaaaattcgaatggtcataacttttcacgcgggtgtccgattcggggacataatatatcaagactgtcataccctaatttcgtccggggacctttgcttgatgacatgcgacctttgtttggtccttgtaaggtgcttggcacccatcattaggcaatttgtgaaattccgggacatgccggaaaacaaaagaaaatattgatgcacaatccgtaaggttccgtgacaccccggaaatcaaatggaagtatcgttgcataattagtgtggttccgtaacattccgtaagtcaaaaaggggatgattatgtaatcccgcagggtccgtaacattacggaaagaaaa

SEQ ID NO: 197995 - DNA, 296 bp, Glycine max
  unsure (1)..(296): unsure at all n locations
cgcctacagcagaatttagtaatgacccactaaccaagaattttaataacttaatgccattaacctaggaaattaaaaaaaaacttaatggctgagtgtaactgaaattgtggcaaccaaaagtcacccccaacagccaacaagtcagccaccatttgttcccatttattcggcaaggaaaacattagcccaactcggcananaatattattcaccgatattgaaaaaaaaaatgacagtccacgtcggccaggaaagatgaaagatncgggtctaaaaaggaacatcatcggatg

SEQ ID NO: 197996 - DNA, 469 bp, Glycine max
  unsure (1)..(469): unsure at all n locations
agcttctattataattcacaatatgatcattaagcaaattgagactttgattcaaagattctaacctcaataccttcctctgctccaccttagaattattttgatgctcataagttaatgtttgtgacactactgactttgaccttctcaaaacttcatatcttctccttaattagcctagcattacgccatcctctaagcaagaatcaaaatatgcatctgaccctaaaatcacccttcctctccctatattcaagttcgtggaacccttttccttttgaataatcctcaccagcacctcttgacttgtagccaacttatatcttctagcaacataactcccatcctatgggtcttcttcattcctacaaaaattcagattctccatattngcactctcattttcttccatttgggccagaacatacntaatctttataggagaaacaatttgttcaaccaaaacaaa

SEQ ID NO: 197997 - DNA, 457 bp, Glycine max
  unsure (1)..(457): unsure at all n locations
ggatatgaganagcatggaagagtgagtcttcctacttttgttgattgaccacagagtggtacctggagatatgtcccgggggtcaggtggggtgctattgcccaaaaccaagcttgactaatcccgacccaacccgggcatagtcagtcagtgagaacctgcgatgtacctaagctggcgagctcctggcagtcaaccaataaaagaacaaagtccacgaagctagaaggcttgtgtggcggctggccagctatgtatcttgggtggtatctggaaattagcctatggtaatcaattaccattcgtgggtaatcgattacagggcttaaaaatggagacaagatgttaaatggcctctggtaatcgattaccaagggtgtgtaatcgattacacagggtgatagggcactggtaatcgattactagttgggtgtaatcgattacacagtgttacct

SEQ ID NO: 197998 - DNA, 447 bp, Glycine max
agcttacttctacaatctgcccctgttgatgatgacaaccctgaaatcaagaaacacatacatattctttttcgtagccgatcactcacttaattctccatattctccccctttgtttttgagtttaagctttacttgaatttaagttatttaattatatgagttcttgatttaatccctattttctctccccctttggcatcaacaaaaagccaaagtgcgtaagaattataaaaccatacataaatggcatacacaagaatagaaaacaatcaaacaagataacttaaccatttatcaatcttagaaagataatacttcatagaatgtcatataatccagaaagtcatttataataaccaagtaaagctactaatgcaggaagaaaaaaatactattaactggttttaagacatacgcaaatacacggcgttgaaatcaaatact

SEQ ID NO: 197999 - DNA, 452 bp, Glycine max
tatagctgacttattgtctattagcttcttcataggctcttctcttttaatcttcaattgtgacatcaagttcttaagccgcaaggcttgacaagctcccattgaggctgcaatgtattcagtctcacatgagaacaatgccaccactggctcctccttaaaacaccatgaaataggtgctccacacatcatgaacacataccctgctgtactctttctgtcacttttatcaccataccaatttgagtcagagtagccaaatacttcatcaataacatttctgcgatggtttgaaaacaatctatagtccaaagagcccttcacatatcttaatatcctcttagctgcaagcaaatgagaaagccttggatgatccataaatctactaattgaccccactccataagctgtgtcacgcctgctgctacacagaaatctcaatgaaccaacaa

SEQ ID NO: 198000 - DNA, 429 bp, Glycine max
  unsure (1)..(429): unsure at all n locations
agcttgcggactataccttcgaccgaacactgtcgtgtttctatctaggcccggattcaaggcgggctgcagcaccggctccgcttccctaactgtactggaggcggntgcggaggctttatcctctatggttttctggagttttaacatgacccccgagatggaagccatttgatcttttaaggccgatagatcggccttcatctgttcctgcacgccctcttcattatccatttttctggatcgagtgttataggggtgccttggtgttttcttagttatgatgaaattcctaaagaaataaacaacggtgagtatgccaccaaaacatgagtatgcaaatggatgatcggagtacttggatccaccccaagatttaagataacgtaatgagtccagaacttctcatttataaaaagaacaaagctt

SEQ ID NO: 198001 - DNA, 467 bp, Glycine max
  unsure (1)..(467): unsure at all n locations
ntgctattgctatgctntttgcctaagagttactctcatttcaaagagactntactatttggaagagactctgtttctcttgatgaagtgcatgctgctctgaatttaaaggaattgaatgaaagaaaggaaaagaagtcctctataagtggtgaagggctgacaacaagaggcaagaccttcaagaaagatagtaaatctgataagaagaagcaaaagccagaaaaccagaagaatggtgaaggaaatgtcttcaaaatcagatgttatcactgtaaaaaggagggtcatacaagcaaagtttgtactaaaaagcagaaaaatggtggcagtaacaataggaagaaggactcaggaaatgctacaatntntcaagatgatggctatgaatctgcanaggcactggtggtgtctgaaaagaatccaaaactaaatggataatggattcacggtgttcatggcatatg

SEQ ID NO: 198002 - DNA, 347 bp, Glycine max
  unsure (1)..(347): unsure at all n locations
caagctatcctgaaagaagngtatcaacagcttttcatctttagagtgggcgcccatcatacggcagtacattttgagatggtttttgggacaagtcgtccctttatacttgtcgaagtccggcactttgaacttcgggggaataacaacatcgggtactaagcaaagatccgtcatgtctgcaaacggatagtccccaaatccttccacagccctcaatctttcctcaaggagatcgagcttcctcctttcttcagttgccgggggcggcccttccatggacaaaactataggcgaagctgcgatgttgggttgaggcacgtgcctggtgccggcccttcgggatc

SEQ ID NO: 198003 - DNA, 316 bp, Glycine max
  unsure (1)..(316): unsure at all n locations
aaaactcagctttgttccttttataaaaagagaagctctataactcattacgttatctaaaaaaggcattgaggtggatccaagtgctctgatcattcattagcatattcatgtnttggtggcatactcaccactatttgtttctttagggaactcaccataactaaaaaagcgcaaaggcacccctacaacacccgatccataaataagatggataacgaaaagggagtgcaagaacaaatgaaggccgacctatcggccttaaaagatcaaatggcttctatcacggaggccatgctaaagcttcaaaaaacta

SEQ ID NO: 198004 - DNA, 374 bp, Glycine max
  unsure (1)..(374): unsure at all n locations
aaactaaattataaaaaaacctatttaaagtcatgggtctcaagtattacccctaggacaattcttattcttggatgaagatctcaagcacacctcattcctccattgaaatattgataatgattgaatggaagaagagacatgatactaatacaccctctatcagcagcttctacaatgaaagagaaataaaactttggaagttaatttctaaaatgctctcagatgataggacacaaggtgttccaactntcaaagganaaattgctntactacagtattctcattgattgattcattgctttgctgtaaaataatataaaatggataaaatttaaagtcactttacaaagtactccactgagatctgatat

SEQ ID NO: 198005 - DNA, 466 bp, Glycine max
  unsure (1)..(466): unsure at all n locations
tactcaatcaccaaacaagcaccaaagagaaantttgacttagaaccaatcttcaagatccatgtcagcaacccagaaaaaatttaaaaacaaaaaggaagaaccttatagaggcacacatagtttttttccttctgcagctcaattacggaaaggcaatcacaacagctaggtaacaagcagcagctgaaagaaaagaaaggtaacacctgaaacaagggtaaagcatcccttaagggaaaaagaataataatcaaagagcatatatatataatgtaacattgtaatattgaaactaataataatcaaagagcgtgaggggaaaaagaaaaaagcaaagatgcctcctgatgtaattcaatttcgtcctaccgtagcacctcttcaattntcttcaccaacaaaaagaacctcaccaacaagaagaacaggcaatcagtggcacaattattacttntaaagcatt

SEQ ID NO: 198006 - DNA, 399 bp, Glycine max
acaggaataccatcaatgacaatgaagtattgtgtgtgggatgtgttctgactataaatatacatgacacttgttctttgaatgcaatttttttctctcgagtttggtgcggttactttaggtggtggggtattcattttgcacaatataatgactctccttctaacttctcacaattcgtgggtttgccaagttgcaatgattagaatgagttactgtgataacaattttgtttgtagtgttttgggctaaatggaggactcgtatttttcttcgttttaaaaccataagaatgagtgttgatctaattgttaacggttaaacacacccttgtcaatgaatagtactatatatgtttcttttactgccctactatgttggttgaaactcaaagttatt

SEQ ID NO: 198007 - DNA, 463 bp, Glycine max
  unsure (1)..(463): unsure at all n locations
tgagggtaaactagatgccttggttaactaggtnacccttctggccttgaataagaaaattgtacctgtcgcaagagtctatggtttatgctcctctactgaccaccatacagacctttgcccttccatgtagcaacttggaggaattgagcagcctgaagcttatgctgcaaacatttacaatagacctccttaacctcagcaacaaaatcaaccatagcataacaattatgacctctccagcaatagatacaatcccagatggaggaatcaccctaatctcagatggtctagccctcaacaacaacagcaacctactccttccttccaaaatgctactggcccaagtagaccatacattcctccaccaatccaacaacagcaacagccccagaaacaacaaatagttgaggctcctccgcaaccttccctcgaagaacttgtgaggcanatgactatgcaa

SEQ ID NO: 198008 - DNA, 415 bp, Glycine max
gcttctcaggagatgagcatagttattttatggtgtgtgtgtaactaagctctagcttctcaagcaagttttctcaaagaagcttctcaaggaagttttctcaagaaaacttctcaaggaagctacctagtctataaataaaagcatggtaacacttgttgcactttaatttctcaaggaagctaccacagttttaaaggtccacttctctccctcttttattccttcaatttcgagctccccccttctctctttcctttcctccattaaagcatcctcttcaagcttcttatccaaggcacattcttggtggtgaagcttcttcttctatggcttattccctagaggatggtgcctcccctctcctcttctcctttgccttccgctgcatctccatggtggaaaatcaccattg

SEQ ID NO: 198009 - DNA, 394 bp, Glycine max
  unsure (1)..(394): unsure at all n locations
ggccgccacannagttttcgactatgctcttgtgtggtgtttctttctacaaaaggagagagcaagaaatgaagagccaatggttgatacatggacggagatgaaaaatatcatgaggaagtggtatgtgccggctagttactcaagggacttgaaattcaagctccaaaaactaacccaaggcaacaagggggttgaggagtatttcaaggaaatggatgtgttcatgattcaagcaaagattgaagaagatgaggaggtaactatggcttgatttcttaatggtttgactaatgatatccgtgatatcgttgagctatacgaagttgttgaaatggatgatttgcttcacaaagcaatccaagtagagcaacaattaataaggaagggagtg

SEQ ID NO: 198010 - DNA, 410 bp, Glycine max
  unsure (1)..(410): unsure at all n locations
ggaagtaaccaacttgcaaaagttacagcagaagatgcatcgagtttacatagnctctgtggctactgccaacacatgattgagctaaataatttacaaaanaactagggactgctattgtccatgttttatttccagttgcactttgactccaacaagatgtaatgaacaatgttgttttaatgaatatctgaattgattcgaccctgtgttctactgaatgtcctgtgtaaaanttgcaatacttcaacaatgtatcagtcacacacatccatgcttatttttcttttcacattgttggcattgctcattgcattctttccttgaaatcacaactgtaatcattgtaatcaaaaggaaagaatgcgctntacagtgtccttaccgaatgcatgccaatgctagagtga

SEQ ID NO: 198011 - DNA, 475 bp, Glycine max
tactaagctatatatcctctgttcttcattgtcttgaaatcttggttatttgtaagacttttcaaaagctctaaattgtgcttcactcacaacttttcttgtctcatttctagcattctgataccttaaccaatttcgaacattattgccccaatgtaaggctttaaaacactcttttgtttttaccatgttttgaacactttcattccaccaccaagattttattttatcgcatttcccaaaacctcatgattcccccaagactaaacatggcatccataaaataaaaatctcaaataagcttgaaacttgaaaacaattattttgttgtgcggtggattagcttcatatactactgcggttttcaaattgattgcaattaccattgaactgaccaataggatatacaaatcgatatatggtccaaagctttaaattctattattatttaaatgcacatcagacttatttatgg

SEQ ID NO: 198012 - DNA, 331 bp, Glycine max
  unsure (1)..(331): unsure at all n locations
gcgaccgcagcagcaagcnngggaaaaagaaagcagacgattattatttttaattctgaaacggcccagctcggattctatttttctgaaagagcctaactcgatagtgttggcggagcttaaatcttggtttatattccgccgagtagcatagtactctttctttattctctagaggtctctctttatacaagtgagcatagcccaaccattattccaagctctgtcgcgtaaaaaacaagttgagataaaattgaggggactaatccgccaagtctttctttatttactaaaaaatcaatctaatattcagttggagatatacatatat

SEQ ID NO: 198013 - DNA, 308 bp, Glycine max
  unsure (1)..(308): unsure at all n locations
gattnntntgtggaaagttaaagnngngngggggggcgngngngnntgnatgtnntatggcttagtatgttaatcatacaatgaaaaccacttactacattcaatgttgtgcgactcaattagattatggcatctacttttatatcatgctcataaaattcatcatatcactataacgatcgtcttatattttcattacacaccttttctgtcactctcactcagcttagccattctcgccaatacactttaataaaatcgaaccaaggcaattcaagggagtgacacattctagacacatgcaatac

SEQ ID NO: 198014 - DNA, 452 bp, Glycine max
  unsure (1)..(452): unsure at all n locations
accttaacaaccttagaaatcaagtgatcataaattccgaattatatggggagtaaacgcacattntatctatatacaatagtggtgtgctagcttgaatcttgatttcaggtattgtattgtcatcatcaaaaagggggagattgtacatgcaattgcctttgtatgtttgatgatgatcatgatgatatgatgcaattgatgtaaatgggctttttaagattaaattcaagacaatacttcaagattacaagtcacaacatcaagatgatcactattatattaggaagggaattcctaattgaattagcaaaggtttggccaagtaatttaaattaaaaagtgtgtttcaaagaatttattctctggtaatctattaccacaggatgtaattgattaccagtggccaaatatgtgttataacagctaccaanattttgaattcaaatttt

SEQ ID NO: 198015 - DNA, 426 bp, Glycine max
tgtcctggtagacatgatggtacatgattgggacttgtttattcaatttgggaaaaattggatgggggaaagactggttttcgaaatctgcactctatgcagaattttgctgatgaaatgtgcagcagaattttgtataaatgcagaaaaatgcttgtgtatggctggttgtaaaaagggtagtacatatggcgttctggacatttgctagcagatcccaacggtcaaaatttagacctatgtactagagacttccggtaaagatttagagtcgatccgacggttaacgaattggaacgaacacattgtactagagtatttgtatgtgaaaagctgagattttgagttgtgctttgggcagagtttctgcctttgccctggtttgcttggttctgtagccctgatgatggatgtggaatacctgga

SEQ ID NO: 198016 - DNA, 295 bp, Glycine max
acggcgtgggcatcttcttctttcttctttgccccaatcgctctgaaatctttcgaagctcgcaccggtaggggtgacatagccaaactttccccttttcaggcctactacaatcctctcgctcgcaaatactagatccgcgaagctagaggcctacttcaaactctccccttttaagggaaaaggatttgaattaaagtcaaaagattctttaaaaaataaatgtatatataacattaaacctttgaaaacaccttatgaaagaaccttaagcagagaatgcacatatcacatt

SEQ ID NO: 198017 - DNA, 460 bp, Glycine max
gtaccttactattgatgcagagatatgatccaagattatttatctgaactctcttttgcaacttctattccttggatgcccatagaaagaccaatatcttcctaaattacataatagtaaagcactgtatcaactataataaggaaattaatataattcataaactctaggttttaataatgaattttaaatttcaacttttaagcacgcacacaatctgtttgcattacttgagttatttgatgattaatttttcagcatgacccttgtatatttgaatttgaaaataggtgtttatggttaatatgaaaattcctcgatgatagctgttattatatgcattaacaagttttgtcattattttgttgctcacttgagtaatgtttctgaaatatacttgtgatgaaatatcctcaattaagtaatttcttgaccttgatataactatatctctctctgc

SEQ ID NO: 198018 - DNA, 408 bp, Glycine max
  unsure (1)..(408): unsure at all n locations
acgccttanaacggtccttcttgcttttatcgattaacatggaccgttcaaaagcataagatcaacacataactttaccgcttttgcaagaactatgtaggtctgagttcctcatcacaaatcgaggatacgtaggagcaaaagccccgcttttgtcgaccaccccaagagatcgttaatggtccaacgccttaacgtttctctcctttcaaaaaccaagagatcgttaatggtccaacgccttaacgtttttcttctttcaaaatcaaaagatcattaatggtccaatgccttaaccgttctttcctttcacaagaattaaaagatcgatatatggtccaacgccttaaacgacttttgtttggttaaaataatcctgcacagagtaaaaacacttaaccaacgttt

SEQ ID NO: 198019 - DNA, 462 bp, Glycine max
  unsure (1)..(462): unsure at all n locations
tcaagaaaaagatggcctcagcaaattccttatttccatttgtgtgtttctatcaatagacctccaatctttaatggagagggttaccactactggaaaacccgaatgcaaatttttatcgaggcaatagatctaaatatctgggaagccattgaaatagggccttatatacccaccacagtagaaagagtttcaatagatggtagttcatcaagtgaaagcataaccatagaaaaacctagagatagatggtctgaagaggatagaaaacgagtacaatacaacctaaaagccaaaaacataataacatctgccctaggaatggatgaatatttcagaatttcaaattgcaagagtgctaatgaaatgtgggacactcttcgattaacacatgaaggaactacagatgttaaaagatctangataaatgcactaactcatgagtatgaattatttagaatg

SEQ ID NO: 198020 - DNA, 428 bp, Glycine max
  unsure (1)..(428): unsure at all n locations
accctccatacatgcgagccttgatttttttttcaacctctgaaatttctttacgagcaaagatccacaagggatgtaccctcccttgttctctttgaacaacctantgaatgtaccctccactagaactgatccataagagatgtaccctctcttgttctcagtcacaataacccaagtagatgtaccctctacttgtaccacataggatgtaccctccaatgtgttaagacaaagttctcaggcggttagtcctttgaaactttgtgaagggggaaacaaaagaattctcaggcggttagtcctttgaaatcttctgttcatcggaaagggaagaatcaaaagaattctcacactgtgttgntttgaattcattgacaagggagaaaggagacacaaaagaattcaggcgattagtccttcgttct

SEQ ID NO: 198021 - DNA, 461 bp, Glycine max
  unsure (1)..(461): unsure at all n locations
cgatctttgaatcttgattctcttgaattcaactttcttgttgaatcttgaagtgttcttcaacttttcctcttgagtcttgaattgttcttgattccatcttgaacatcttgaactcattcttagattgatctttgagctttttgttatcgcctgngcgagctgggtgagctgggcagcaaccacctccctcttttcccctataaataggggaaagagggcagagggaattcgttcaaccctcctggtattcagtattcacttgaaattagtgagaaaaattgttttcatgaacaaaatccaagctgaggcgcttccataacgcttccgagacgtttccgtgagggatttcgtgaagattttccaccgttcttcatcgttcttcggtcttcaaccggtaagttcccgaaatcgaacctttcaattcattctatgtgcccttagtggtcctcacttgtttc

SEQ ID NO: 198022 - DNA, 208 bp, Glycine max
  unsure (1)..(208): unsure at all n locations
gaaaatggggtgagnggggataaaaaaggggagaggggtgnaagtangaggnatgattaaaatgattagnggaaggaanggggagggagtatgagattaatattgatgatgtttattgattgaaaatttgtgatgattaaggttggttagtatatggaaatggtatgggtttgaaaaatgtttagtttttttaattgagaatgttatt

SEQ ID NO: 198023 - DNA, 398 bp, Glycine max
agctttccctctttgaacaaatattcctcatccaaatagaatccatcttgggcctttttcccacaactctcgtaaatgggagagaaatggtcatctaaagcatacaggtccctaatattatcaaatccttaaatttgatctcctaaggagcaaaacaatgtgtgtctcctagagagggcatcagctaccacatttgtttttccctttttgtatttgataacatatggaaatttctctaggtactctacccattttgcatgcctcttgtttaacttgctttgccctctaatgtacttaagtgattgatgatcactatgaatgacaaattccttataaacaaggtaatgttcccaagtttggagggctcttattaaggcataaagctctttatcataggt

SEQ ID NO: 198024 - DNA, 435 bp, Glycine max
tcctacatttcatgtgtagcatgtatactctttctttacccactcctcacgtttggttttttagggaacaacaccataactaaacgcgccgcatgggatccctatcgcaccagatccaaatctagaacgatgggtgatcaatacgagacgcaggaacagatgaaagccgacatgtcggctctgaaagaacaaatggcctccatgatggatgccatgttaagtatgaagcagctcatagagaagaacgcggccaccgccgccgctgtcagttcggctgccgaagcatacccgactctcttggcgactacgcaccatcctccctcagacatagtaggacggtgaagggacacactggggcacgatggcagccctcacctgggatacaaccgagctgcttacccttatggatttgccgccaactattcaccacccgtc

SEQ ID NO: 198025 - DNA, 394 bp, Glycine max
  unsure (1)..(394): unsure at all n locations
agcttatggataaagacttgtatggggattatatggnctctatttctcttattactaaggctttgagaaaataaatgttactcttcacaaaatgtgtatcatctccatttcatttgtttttccaaaaggtaaataatgttcttagtgttaaggcttatttgatctaattaccaaaattatgactaatttggctgtttgaattattgcttgcaacaataagcccttgtgacccaaactcatgcacctcttgcatatcacaaaatggtatataaacacctgagccaaagttatcccaagcaatgtgggaattggccttttgtgatattcttcgtactataacacttttcccttnttcacaatacaatctggggaaggtagatgtatgtagctttac

SEQ ID NO: 198026 - DNA, 395 bp, Glycine max
  unsure (1)..(395): unsure at all n locations
ggcttcattctcaaccgaaaccgtgaggtaagtttggaagatttcgctccaattgaagggttcctctcggtgtgaggtttcaacggagaactacgacggttcgtggtggctactggtggttgtggtgatggagaaaaagctcgggacattggaaatggttatggaagaaggaaggagaaagaaatggcatttttccaaggctacacgaatcacaaaggctgaaacactcaagtgcttctgctctcggaaaaggaatgtttctcacacgttagacgtcgtatcgccaattgcaacggtcagatcatccacacctatcgtgtgaacctccagactaaatctcgagaagnccaacagttaacgaatgcangagggcgttttaccgagacactcaacaa

SEQ ID NO: 198027 - DNA, 440 bp, Glycine max
  unsure (1)..(440): unsure at all n locations
gatgatatggtcttgcataccctaatttcgttctgtgattattacttgatgacatgcaataattgaagtcccgagacgtctcagaaatcgaaaggaagcangcttgcgtgattcgtgaaattccgtaatgtggcggaaatcgaaaagaggtgtttttgcgcaatccgagagtttccgtaacttcttcgaaagttaaaaaaaagagtaaatacataatcagtaaggattcgtaaccttgcggaaggaaaataagtatcgttacgaaattcggaaagtttcgtaacgttacggaaaaagaattacaaaaaaatagaaaaggggtgcattttgtaaaaaagggggtacaaatagcaaccaggcccacttgggccctccagaagattcctccagaaggctgttgcttctgtaagaagcaaccttgctcgcctgagcgagctggg

SEQ ID NO: 198028 - DNA, 426 bp, Glycine max
cccctatcttgaacactttgatgatgccaaacttaaatatggcattgagtgcatttggagggtctgagtcttgagactggagacttgatccttagtctatcctaaaaaatccttaacacttaagagattaattcatcatcatcatcatatatcttacttgtatatattactggtattaatgcaatgctcaatacttatgcaatgcaaccgatatgcaaatatgcaccaatatgaaaatatgcaataatgtatattctcctccttttggcattaacaaggccaaaaagtgtgattatacacaaaacataacacataagtggaagagaaataaaaccataattcattaatcatagaacattacataaccattaatcataagaaaaaaaacttaactatcatcttaaaatagagacagaccgaacatat

SEQ ID NO: 198029 - DNA, 407 bp, Glycine max
  unsure (1)..(407): unsure at all n locations
caaataaataataaagtcatctcgacacaaggaagatcatctaagtttcatacaattaatatagaacctatatcctaatgtcacatcctatcagagcgtagtgttctcgtgttctctagcatgaggttcttcatagtcatccacctattcatctgctcccccgaacacaaagttcaagatcattacaggatccaaacacaaatagcaaaccgggagtgagttatcacatttctaactactagagagaaacaacacaacatatagtagccaagtaccaattacctagcatatctcacattatttcatcactntgccattcattaatcacacttttcatccatcaatcacacctttcattcataatcacaatacacaggaatcacacactccgatcaagacataataac

SEQ ID NO: 198030 - DNA, 252 bp, Glycine max
tttctcctccccccaggttgtctctgcgccctaacacgagacaccgacccagagaggggtttatgctcacaccaccaagaattatcaaatgtcagagaaacgaaaagatactgcgcaaaaagaaaataagactcacaaaagactttactcaccatcccaatcaaaataaaaagaaacagcaatactcaacctgaagcaaaattcaaaagactaactccaaaaaaccgtaactaccccaagaaacgacaccta

SEQ ID NO: 198031 - DNA, 462 bp, Glycine max
  unsure (1)..(462): unsure at all n locations
nttacctngttgcattgngttgaaagacaatatataatttattattgatnagatatctcgcactacaaaaaaatagaattttttaggaacatccaataattgcattgactaaaaaataaatttttaactataactaactattatatataaaagaaatacgatgttttgatgtacattttattatatttatcttatctttataactatattcataacttattattttatttatattattacctttataaattacccgctaactaattattatttttcatttaataaataaacatgaataaacagttagacgtgcatgtttcttcctagaatgtaataataatatgtcattacctcaacattttatttttttaattattcttatatgatacatatacatctattacataacaattctaacgggatctgcaggatcaatctcaatgtttgaatcaatagtaattc

SEQ ID NO: 198032 - DNA, 459 bp, Glycine max
  unsure (1)..(459): unsure at all n locations
ntcatcaacctcaatactacatttgccgaactcgagaatctcttacatgaattaattcacaaacaatccaaaacaaaacaaaactaacatgcagagtgtaacaatgacataccttgctcgttntgtagattgtacgaatcaaaactaatctctaatactactcttcaagagaaatattagttgaaccaacaacatattgttgagaaaccaactctgtaaaaaacaaaaaaattcttgtttgttaagtcaaaggacacttatgtcttaagatgaatcaggaccttaattattttgattagatgtaattaaatgcaaaggttaaaagttgcatcttatgaaaaatatgagttntatgttttgtatctgatgctttatcaaaacatatcttaagaaatttgtgtttgatgtttcacacaataagcagatagagtcatgatttgatatgacatttaatactat

SEQ ID NO: 198033 - DNA, 206 bp, Glycine max
gctcacttctaagctttgaaattctgtaataatacaattcaactaactatctatatatttttattttcagggtacactttccccttaaaattctctcaaattacgttctcaacaaagaggggagcttttccatctgactttctatatcccccgggcattttctcttgatgcacctccccagatcaccttgaccaacagaatctctt

SEQ ID NO: 198034 - DNA, 467 bp, Glycine max
taattgatgatatatcaaggtgcataaatgttaaatcacatatctaaaaccaaaataataaaataatcacctatatgttggtgagcatcttgtcatgatgcatcaagaatcataagttataaactatatatgaattggacaaaaaatgttaaagaaaactcaccaacgcattgaaatcgagtagattcctgattcttaaactcgagaaaaccacaatgggatgatgagtgtttttgtctcgcaggagatccatacctcttctgcttattacgttgaagactccttttcgatcccacaacatcgattcagaagcataaaaactcaacccttgtagcactaagcacccaaaaaaaattgtgttcatgacaacaatcttagcacaaaaaagaaaagaaaataaaatcagcaataaaatcaaaccttcatacttttggtatggagagaggatcatcaccctaattgaaact

SEQ ID NO: 198035 - DNA, 436 bp, Glycine max
  unsure (1)..(436): unsure at all n locations
agctngccgcccagctcgcccacgcgagcattagtgcttcctttataagcaacagccttctggaggaatcttctggagggcccacaggggcctggttgccatatagcaccgcttatattacatgcaagcacccccatctattgttttggtaacttcttttccgtaacattacgaaactgtgcgaatttcataacgatacttgatttccttccgcaaggatatgaatccttacggatcatgtatttactttcttttagctctcgaagaagttatagaaactcacggattgcgcaaaaacacctcttttcgatgttcgccacattacttcctttagatttctgagacgtctcgggacttcatttattgcatatcatcacagaataatcctcggacgaaatacgagatgacagttgcccctctctacttacctctcatc

SEQ ID NO: 198036 - DNA, 455 bp, Glycine max
  unsure (1)..(455): unsure at all n locations
ntaatgatatggtcttcaccaaagagaggatcaaaatgggtctttattaggcaaatctgatcatcatgctttgataaatgcaaaaaaaaaaaactagggcaaatgaagagggtgagaatgaacgagaggaccatgctgtgactgccattcctatacagccaagtttcccaccaacccaacaatgtcattactcagccaataaacaaaccttctccttacccaccgcccagttatccacaaaggccatccctaaaatcaaccacaaagcctacctaccgcacttccaatgacaaacaccacctttagcgtaaaccanaacaccaaccaagaaatgaatnttgcagcgagaaagccctagaattcactccaattccagtgtcctatgctgacttgctcccatatctactngataattcagtggaaccataccctaaccaatgtcatcaacctcattc

SEQ ID NO: 198037 - DNA, 473 bp, Glycine max
agcttatcccacacaggacgcttatttgtctttaattcaaaacgtctacactggttaaatgaccatcccaaatttcaaaacattgatcaaaactcaaactagtttgccttttctaaaacgaactttctcaccgatcagagaagtgtaacttcactgaaaaactataaagctcattgacccctgcattccaagcgaaacaaagacataataacacttccattctcaaattgtattatgtatggccaacacatatgtctagcttgttaaaaatccagggtcactgaaccatcagttaaccctgcaaagatttatggtaagcaacctttcagaaatgcttgtcttgcccttacatagtcaaagctatgttaccgttcaccattctcgagatttttatgctttagtatcaagtgcatcctttgcatcgctgctacagcatctttcgtatcttggtctttactagcagatgcttcagc

SEQ ID NO: 198038 - DNA, 451 bp, Glycine max
  unsure (1)..(451): unsure at all n locations
ntgtanaattaattcaacatcgtctgtatagaagtatttctctttntatttcagttcacattnttttgagttatattataccttcctttacacctgttgagaaacaatcatttttgctttctcttttgtttggaaaacggttatttcacactacttttttaatacatattctctttatacttcttaaataaatgtcaaatcgtaacagagaatatcagctgacttcttcaatagatgtataacgaaaagaaacataataattcaggtaagcaagtaaatggaatatgtctccaataaatttatgccatttaacaatcgtttgtatttgtaaaatatatttcgtactgattatcatttacctcttaatgacacaagagagaagcacaacaaggaacaaatntgttaggataagtctaccaataaaagaaaaatttctcgcattccaattact

SEQ ID NO: 198039 - DNA, 423 bp, Glycine max
  unsure (1)..(423): unsure at all n locations
ttaagtcacctgcagcatgcaagcttgagatgaagaagtgtanaatggtgaaacttctttgctttatttgnngaccacagagtggtacctggagatatgtcgcgggggtcacgagaccttggggacgtcaggaggggtgctattgcccaaaaccaagcttgaccaatcccgacccaacccgggcatagtcagttagtgagaacctgtgatgtacctaaacatgcaagctcctggcagtcaacagataaaaggaacatggaccacaaatcaaggaggctggtggtggctggccanctatgaacttgattgatatatgagatatggcctctggtaatcgattaccaagggtgggtaatcgattacaaggcttaaaaatgaagacaggaggctaagatagtctctggtaatcgactaccacgcttg

SEQ ID NO: 198040 - DNA, 418 bp, Glycine max
  unsure (1)..(418): unsure at all n locations
ntgagggtgcgtagcctaccatcttttcatagtagagtaccgataatgtgtttaccatcacgattatcgtctccctttttgcacatgttctgtagttgcatcctatccggaaccatatcagaatagtactgatactgcctaacgaaggcaaccattaggtccttccaagtatggactcgggaaggttccaagttagtgtaccaggtagcagctaccccagtaagactttcttggaagaaatgtattagcaattcctcatctttgcgtatgcccttatcttccgacaatacatctttggatggttcttggggcaagtagtccccttgtacttgtcaaagtccagcaccttgaacttgggaggggtgatgatattgggtactaggaacaactcttctaggttagcaaaggcataatcttt

SEQ ID NO: 198041 - DNA, 478 bp, Glycine max
  unsure (1)..(478): unsure at all n locations
agctntaggagaaaccattaaaacttagatttttcctaaacaaaaatcaattgaggaagcttcgccaagtgtccccattgaaaaacctttattcaaacctgtcaaagtcagtgataaggctaaacgaaaaattagggaacttagaaaaactaaatccataattgaaggcgtaggtgacaatcatagcgaattactaaacaagattggtatgttgcttaaggtcattccagacactccccaagcctcggaaaatacttccaaaatggtaacaagaagtacctccaaattaattaatgttattaatgaagatagtgaccaaaactcagataacacaactaagataggatcagtgtcagaaaagaatataaatccaataaactccaaacactggaaaacctcctccaaattatattatcaacgtccaactggccttgaccttctattagaagaaagaggtgaaaacaattttataagtttt

SEQ ID NO: 198042 - DNA, 458 bp, Glycine max
tctagaggaagcctcttaatgaagcttgtagagaatgcttatgaagctgcctcggtaaaaatgatgcccagccttcattaaccgttggatcttctcgaaatttggtctgcaacttcacaaaacacttttccatgatctgaccgttgggatctttgagaaaatatctggagtgtgctagaagcctcttaatgaagcttctggaggaagcctcttaatgaagcttctagagaaaactacatggagctgcctcggtagaaacgctttccagccttcgttaacctgtggatcttctcgaaatttggtttgaaacttcacaagacactttaccatgatttaaccgttgggatctttgagaaaatatctggagtgtgccagaagcttccgttcccgagagcatctcttatttaagcatgtcagcctttgctttcttgtagcttacgaagaatgtcatttcttct

SEQ ID NO: 198043 - DNA, 461 bp, Glycine max
  unsure (1)..(461): unsure at all n locations
agcttgtaagagtatggggtacccatcactatgtggtactatgtggcggncgggcgatggtgcacaacaagtttcccacatccacaaatcgcgcataaacccaccatcccctattgcccacctccaactgagctcacgtactcccacgtagcccatatcctcatttctctcaacaccgggtccccatcaatcctcccaagtttccccaacatccaagtaactcaacattcaaacaacacaaaccatctcagccaagaaaacagggcaaaggcagaaaactctgtccaaaacaccaaccaaaatcacaggttgtttcacttaaagacctcagtaacaattccttcgttccaattcgttaaccgttggatcgactccaacgatttactggaagtctctactacataagcctatattttgaccggttggatctactactatacatccagaactccgtttacatt

SEQ ID NO: 198044 - DNA, 463 bp, Glycine max
  unsure (1)..(463): unsure at all n locations
ngaaagagcccgggtagtcaaagagaagttcaaatccattgtcatcaaagtctgaagagagtatgatgaactaagggacgtcaatatggccaccgatgaagccttggaatgagaaaccaagaaggcccgaaaggaagaacacgaccaaaacaagttttgaggggctttatagggcagcaatagtaagctcaaactccgaagaggtgaaaggaatcatcacgggtcaaaggcatgatctggaaggacgagctaaaggcttgccttatgtcgaaaagaaatttgtcccaacagttaagcgagactgaagggaatatgtgggccatcatcgataagtgcaaagagaagctaaatctagcagcgactcacgagcaaaggctagaggatgagtacgccaagatatcagcagaaagggaagcaagggaaagggtaattgantcattgcaccaagaggcaacaatgtgga

SEQ ID NO: 198045 - DNA, 380 bp, Glycine max
  unsure (1)..(380): unsure at all n locations
agcttacattaaatattaattctatttattttctcccttttgagctgaatgaatttgtcaataaattgaaccctgaacctgaatgatactctccacatacattgtttagattctatgagagcatatatttcaaggaaaatttaccccaaatctgggggagtggaactaattgggatgcaaagaaagagagaaagcatcagcacacataacaaataagttgtttgttnaaaaaagaaaagaaaagaaaagaaaagaataaagtgtgctgatgtaacaaggtcaaaagcaaacgaaagtaaaaagctagtgagcaagctaagtgtattaaaaagaccattgggataagtctaagatttgtgctctttgagaatctaaacctt

SEQ ID NO: 198046 - DNA, 471 bp, Glycine max
  unsure (1)..(471): unsure at all n locations
ntagccttaggttgtttcatgttgttgcttccattatctctaacaaccttcccttacaaagatgttcgaacccggcaagtgcaccggatcgcataagtactataaaacggtaagaaccgagtatcgaactcttggggaacttgtgttacttggtaaagctatattcagtgaataagtgtctagtatgaaaagagatgtgtcaactatgcacaggtatgtacacaaactattaaaaggaaaatcacgtgagtaatgatgtgtaaagacaagtagacaacacgttggtcttcctattaggtgcctgatgttaaaaggatattctctacttaacaatactcatgtgttctatggtgtctcttgaaatgctaaaccccgattcctcatgatagtttagcctaatcctaatcaagcattgtcctcggattcctcttgctggactaaacttgactagaactgcattaagacaaacat

SEQ ID NO: 198047 - DNA, 359 bp, Glycine max
  unsure (1)..(359): unsure at all n locations
agcttgcaaacaaattatatatggaganttctatatgataaacatgtaatatggcacaatctgttgaagtacagatataggaacgtccaattcgatattaactctagaatataccacctaaatcgtcaatttggtggaaagatgtcatggtattaaattataacaagagttgtcctataaattggtttttggagctagcaatgaggaatgttggtggtggactttacactttattttggatagatgtttggaagggaaattgtagtctcaaagatgttttgccccagttattttaagtagcaggaaatgaagatgatttggtggcaactatggttatagaatctgaggatggggatatc

SEQ ID NO: 198048 - DNA, 281 bp, Glycine max
  unsure (1)..(281): unsure at all n locations
nggcgagtgctaagtatggttgtttcctgcactttcattgctgcactttgattgaacaacacactgcattatttcagcttcatgtaaaattccaaaatggtgcaattnttttttttgtattttccaacactttaattgcattctttgcgccaaaagttgttgtattaaacaagatttctgcaatgaaaattggcgaaatggcaaaatagatggagttggattacaagcatgttgaagttgtaaagatccaaacgacttcaaagttgntgcaatgcaatgac

SEQ ID NO: 198049 - DNA, 423 bp, Glycine max
  unsure (1)..(423): unsure at all n locations
ngagatgaggaagtgttgaagggtgaaacttcctgcttttattgntgaccacagagtggtacctggagatatgtcgcgggggtcaggagaccttggggacgtcaggtggggtgctattgcccaaaaccaagcttgaccaatcccgacccaacccgggcatagtcggtcagtgagaacctgtgatgtacctaagcaggcgagctcctggcagtcaacagataaaaggaaaacaagaccacaaagcaaggaggcttgtggtggctggccagctgtgaattttgtgtaatatgtggattgtggcctctggtaatcgattaccaagggtgggtaatcgattacaaggcttaaaaatgaagacaggaggctaagatggtctctggtaactcgataccacggggtgtaatcgattaccaggcttgaaaa

SEQ ID NO: 198050 - DNA, 436 bp, Glycine max
  unsure (1)..(436): unsure at all n locations
gcacctgggctgcagctcattccttttactcatgggccttgtttgatgtttagggnagaantatgacagcctcagtaactactaccatatcctcatctacaatcatgtaaagagatcctcgcttctttccacgagccataatgagactgccttttattaccttccaagatccatctccaaaagtggtgtaaagcccctcatcatccaactgccctatagatattaaatttctctttaaggcaagaatatgtctaacattatgcaatgtccatagggatccactggaggtcttgatgtcaatattacctcttccaacaatgtcaagagattttccatctgcaagggaaactttcccacaccttctagaaatatagttagataataaatctttagagggagtggtgtggaatgaccacctaagtcataacccatgaat

SEQ ID NO: 198051 - DNA, 461 bp, Glycine max
  unsure (1)..(461): unsure at all n locations
tatgctgaatattanntttattgttgttttttttaaatcttaattagattttcactttagtcactaacacaacctttaacattaattnttattatgcaaattatcacgatgaagctatggttttattaaaataaaataaaatcatttaaaataatgcacctatattttatcataattaatgttccattgaattccttatatttgatagtataatgttttatttactcaagtttactgtttctttttggtcaaatgcttgagttttgggtgaaattctattatctttgttttttttatttgaagattttagcatacaaattaaaaaatatataattaatatattagaatcctttccaatacaccctttttttttatctatattctccccataataatctttntttttaattacaaatctaacaatacatgattaagaaataaaagtaaaagttttctttatt

SEQ ID NO: 198052 - DNA, 430 bp, Glycine max
  unsure (1)..(430): unsure at all n locations
agctttacatcaaaatttagtaatgatccattaacctagaattaaaggaacttaatgccaataacctagggaattaaaagaacttaatggctgagtgtaactgaaattgtggcaaccaaaagtcacccccaacagccatcaagccagccaccatttggtctcccaaaaagctgatgcctaggttgccaattgggcccttatacaacttgaactaaaccaaactaaagcccttttagttgattaagccaaaacatatatttggtcagccaactttacaaggattgagccattatttagacaaactaaacactctaaaattgagacaaagtggtgctatttagtcctcctccatttgggccatgatacaactcatgaccttggacttttctccttgaaacttgngcttgtattcaaatagtatggacaacac

SEQ ID NO: 198053 - DNA, 426 bp, Glycine max
  unsure (1)..(426): unsure at all n locations
cctatgatactcagcttacgcgatttagtatgaccactacctaaatttatactaagccttaaccaggataaacaactaatggtgaggtactgaattgtgcaccaaaatcacccccacagccaacaagtcagccaccatttggtctcccaaaaagctgatgcctacgttgccaattgngcccttattacaacttgaactaaagcccttttagttgattaacccanaacatatatttggtcagccaactttacaaggattgggccattatttagacaaactaaacactctanaattgaaataaagtggtgtcatttagtccttcatatggccatgatcaactcaaaccttggacttttttcttgaaactgngcttgtatcaaaantatggacacacttgttgagagcttcttggtttcctgctatacc

SEQ ID NO: 198054 - DNA, 397 bp, Glycine max
  unsure (1)..(397): unsure at all n locations
agccttnntgngtctgcaactgaaagtgaaagaatggaanttttaaccacaccaaatcatgtgttctctactttggagttccattgcattgtgtgtaacaatcctactccttcagcttggcattgtgcacccttcaccctctcaccataggatcactcgcttaccaggtcaaccccatgttcaagttcatcagttttcaggttatgtaactgttgatgacaaaaactagcatgcactcttctactttgctaaagctgaaaaagatgcactntccaaaccccttgttctttggctcaatggaggtgctcctcagtcacttcttgtttcttttcacacctgtaaataaaaagttctcaatcaaataagaacttgaaagtttggtaacttatgctttgtg

SEQ ID NO: 198055 - DNA, 463 bp, Glycine max
  unsure (1)..(463): unsure at all n locations
ttattggaagcatgttggagcaaattactaaaggggatcaccttggttctagctttactaaggtagggtggaaaggtattcaatccaagtttacacaattactggaaggacttataacaaggcacaattaaaaaataagtatgataacttgataaaagattggcgtgtatggtacaaattatttagaaaagaaactggtttaggatgggacaataccagaaacactgttggtgcaccaaatgaatggtgggagaccaaacaacttgtatgtcatatttaagtgtacttaatatatggtaaaagcttatatttagtgtgactattatatatgatgagttgtaaacatgcaggaaaatcctttatatggaaaatttangtacaagggacttccatttgctcatcaactaactatactntntaaggatgtagtggttaccaaagaatttatgtgggcaccatcatc

SEQ ID NO: 198056 - DNA, 445 bp, Glycine max
atgcccaggtgagggctcttgcgctgacatgcttgctctttctcaagggacgcagtctttctggtaagaaaactttgttaagtaccaaatttctcatcattcagatcctaaacaattcttatgtcttcgagaattgacaaatgcagctaaggtagcttgtatttgcaagtcttgactaatggtataaatatattctgcactcaggaggacctacatgggatgttcctaaaggaagaaaggatggcagaacatctaaagccagcgaaaccagacaattaccagcgccaaccttcaacttatcacaactgcggcaaagcttttctcaaagaggactgtcatgggaagacctggtagctctgtcaagtaagttattcctaacgcaaaactgccaaaacttgaccatatttcatttattcgcatttatatctgaatagagcttagagta

SEQ ID NO: 198057 - DNA, 405 bp, Glycine max
  unsure (1)..(405): unsure at all n locations
ccttgataagcattgaatatatatatgagggggagttactgtacttggaacattgctagagtattcttactaacagttcgacgtcatctaatttacgccttttgtgcatatcaaaggtttagactgtattgtcttggaaagttgagaagcaatccttggtcagaactagatggtcttcagccagagacaaagataataaatgagctgctggaaaagattaacacaaagggcttcctcaccatcaatagccagccagctgtcaatggggaaaagtcagattctcctactgttggtgggtgtaaaagaaagttaattttatctatgcatgatattttctggatgtaggtttagagcattgtagttngtactaactatagatggatgactaactttctgatacaagtt

SEQ ID NO: 198058 - DNA, 388 bp, Glycine max
ggaccttaagtctaagcttgccaatcttactttaatgatctgctaatataatctgtattgtaagacattgttcgaaggatttactgatccttgttttgcttttaactaatggagcaggttaaagagttccatagaagagatggtgttgaggtaccaagtgctgacaagatggctaagtcatgcatggtttattgtgaaatgcatctatccctaaggaaaaaagtaattacaaaagctattaatggtctttatagtatctacaaggaaactttgtgaaccaggtctatggccttgtgattgagtaactggacatgcaggtacaataacttgtgttgaagatgacaacggacctgaaagaggaatgccgagcttcaatactgagttaccc

SEQ ID NO: 198059 - DNA, 383 bp, Glycine max
ctcttgaagcacttcctccgatcaccttgaccaatggaatctccttccctcttaggagctttgttcgcctatctttgatcctcaaaggcaatgttccatatgtcaagttcttcttcacttgtacgtcatccaatgtgatcacacgagatggatcatggatatactcacgaagttgagacacatgaaagacaatgtgaaggttagaaagagacaggggtaatgcaatttggtatgcccacagtaccgacttttttataatttggaaaggacagataaaatgaggtatgagttattgtgattcaatgctcaccaactccagccacaaagtgactctcaagaaacatgatcctaacctcaactccaagtctttcttctcttgtctg

SEQ ID NO: 198060 - DNA, 460 bp, Glycine max
  unsure (1)..(460): unsure at all n locations
cgctaaaccatggaagctcctaatatctcccacattttttggggtgggccattcttggatggccttgattttcttagggtccacttggaccccatttttaccaactacaaacccaaagaaatacacaaaaggtacacttctctatatttgcatagagggtgtttttcctaaggactgaatgaacttgcctgagatgtcctaagtgatcatctaggctcctgctgtacactaaaatatcatcaaaataaaaaactacaaatctacctatgaaatcccttaagacatgatgcataagcctcataaaggtgcttggtgcattagtgagcccaaaaggcatcactagccattcatacaaaccaaacttggtcttgaaagcagttttccactcatcacccttnttcatcctgaattggtgataaccacttttaagaatcaattttgaanagatattggcaccatg

SEQ ID NO: 198061 - DNA, 456 bp, Glycine max
  unsure (1)..(456): unsure at all n locations
agctttataagtgcgggtctgggagacgaatgtcaagtgttcgcgatatgtgaaaatgatgttccgagtacttcggatttggtccgaccatgccctcctgatttccagctggaaaattggcgagtggaggaacgccccggcgtttacgcaacaagcataatgtaaacctttacggttttaaaagctctatagttgggcctaggctttagagttttctttttgttaaggctttgtgtcttttgtttttgaatttataatacaaggatctttcttcatctgttcctggtctctacccattctcattcatttgcatgtttactntcttttctgaaacggcagattcgatgacgagtcccccgaaagtactaatacctgtgacccgtctatcaacttcgagcaagaaatgaaccaaacggaagatgaaggagatgaggatgtgggacttccttctgaact

SEQ ID NO: 198062 - DNA, 457 bp, Glycine max
tgtaagaagtatagtaatataggagaatgtttttggttgattgataaggacttagattttaatcatgggttaaggagttgtacaactgatggagatatattacacttagttagggatgcttttgaaaatgagaatgagataaatgtttattttcatcgtgaagtagatccaattttagaagaagtcccacagatgttgtacttggaatgtgatccaattcgaaaagctgttgagaatgaggatgatatagatgatgtacctgttgctgtccatgaggaaggtaagttttaattcatctatacttggtccgacatggttaccataattaattaatatgattaatttttacttgatcaccattgatgcagatgttggtgctggagagcagagagatgctggtgagcagatggatgctggtaagcagagggatggtggtgagcagagggatactgatgct

SEQ ID NO: 198063 - DNA, 455 bp, Glycine max
agcttcttttggacctcgaacaagcaattaactcctctttcagaaccatgctatgtgctcgcgactggtctctttcttcccttcgcaactcgagttcactattgctaccccatagagctccgcgaaatttgttccggccatactcttccttgcgagccctcttggtctcttgttcaagggctcttgcggtaattgcattctcttcccgtaacccggcacacttcttccgaacgtgtgtagcggccaacttgaacttctccttggcaagttttgcctttcctaactcgcttttgagagcttggacttcttcgtcctcttccggtgcttcaaaactctctttgctgacgacttttaacttggcgagccaatctaaacctcgtatatgaactctcagccattcgtggtacccaccaatgatgccattacgaatgcctctaagctcttgatctttcctt

SEQ ID NO: 198064 - DNA, 349 bp, Glycine max
  unsure (1)..(349): unsure at all n locations
tatacggataaccactcaggtatttccgcccgtcagcgtgactcanaagtgagtatgacagatctcgtgagcgcggaagatgacataaatctccgcgtgtcaacgggcttgtcggccgcgattgacgaacgtcgcagaagacgaccttagtctctgcgttctatacggataaccactcatgtgtttccgcccgtcagcgtgactcagttgtgagtatgacagatcatgtgagcgcggaagatgacgtatatctccacgtgtcaacaggcttgccggccacggctgacgaatggcgcagaagacgactgtagtctctgcgcgctatcaagctgttcgtcttacagacagc

SEQ ID NO: 198065 - DNA, 449 bp, Glycine max
  unsure (1)..(449): unsure at all n locations
agcttctctagctggtgtcatccattancattcntaattaggccctcatcaccaacggtagcaacattccatagagaaagagccttcaaagaagggcatccacgagcaacagccttgagaccatgactagtcaccccacgaaccatgttgcttccacggattgagagcttccccaatcctccccgagacgaagtcccaacagctatggcagctagtctaacatctgttgccttctttccttccaagcttcgagagagatatccctcacctccaaattctacatcatcaccctccttttcaatggtctctacagtggcatttgtgttaacacagatttcatttgtgcaaatactgcttagaacataagccatcgcttggaaacacaggcacatgcactcctgtcttcctcagaaggcaacctcctatagatctcaaagagacactcatct

SEQ ID NO: 198066 - DNA, 459 bp, Glycine max
  unsure (1)..(459): unsure at all n locations
tcatgatgaatcacgaatgattcagagaagttttgttgtttacnaaggtgatgacaaaaagctcaaagatcaagaacaattcatgataacaaagatgatgatctcaagaatcaaagaatgagttcaagattgaatcaagaacacttcaaggttcaaaaggaaatttgatttcaagaatcaagtttcaagattcaagttcaagaatcaagagaaggttcaattaagataagtattaaaaaagttttttcaaaaactgagtagcacatgaatttttctcaaaaccttctacagagcttttactctatgataatcgattaccaaattattgttatcgattaccactagcaaaatgcgtttctaaaagctttcaactgaatttacaacattccaattgatttcaaaatgttgtaatcgattacaatgatttggtcattaattactagtgtgtttgaacattgg

SEQ ID NO: 198067 - DNA, 405 bp, Glycine max
tgactaagatgatgaggatgaagaccaattggtcgatgattatgattctaaagaatgtgaggagtacaagttctttgaaaaagtgttcgcagaagatggcgacttgaggagatattatgagagcaattataaggaaggggattttcattgtttgggttgtggaggtatagggaagaaagtatggaagagatttaagaattgtaagacactaattcatcactccactgccatactaaggacaaaaaggaagagagctcacagggcctatgcacaggtcatctgcaaagttgttggttgggacattgatcaattgccagctattgtattaaaggatttggatccttcttcataggttcaaggaagcttttgggagcaatcctaattgaatatctgtattctaattga

SEQ ID NO: 198068 - DNA, 461 bp, Glycine max
  unsure (1)..(461): unsure at all n locations
ctatgaaactaagcttanagtttaaccaccgcttagctaagcagttgtttatgtgatcccacgccaattaatatatattttggttgaactacgactgcggactgaataatgaaaatgaagtgtagggagcgtaaatatacacgactattgaacagcggccacaaagttggactaataaaattgaattattgatgcgtctctttctgtgaaataatccagccatgcatgcttacttcttctatacgttcccagctggacaatataccaaactgcattatatttacatttcattttcattagtcagtcaacagtcctaattcaacaaaaacatatatttctttcgctctcgataatagtaaaaaaaaaaatatacttcacatttatttaaaaaattaataaattttattaaattatgttatttataattaaaaataaatatttgtattaaattatcttttatg

SEQ ID NO: 198069 - DNA, 474 bp, Glycine max
  unsure (1)..(474): unsure at all n locations
agctttttcggagccatttcttgcaaagacttacatttggaatattaattcacaaggaaataccaatcattacgaacaagagccaaacaacacttatatggtgcgagtgtcaacatgcactttacaaaacaatcgcattggggcatatgctattttatgacacatatctatatacatgcatgtacacacacataaattttttttggtgaaaggcattntatgacacacatccatgtatgtttttgacaagcattttcatgctacatcccacatatatgcacattttnttaaaggctccttatgctacgtactcacaaatatacatattttgaaagggcattttacgctacctatccaacatatacacattttgaaaggcgattttttgctatatattcacacactttgcaaggcattgcatgctatatattcacacactntgcaaagaatnttcatgctatatattcacacact

SEQ ID NO: 198070 - DNA, 462 bp, Glycine max
  unsure (1)..(462): unsure at all n locations
cggacctatgaaactaagctacaaatctgataaaattggacgacaaataagaatgtcttctctcttcaagtccaagtcggttcagcctaattacggatccaagcccaattgcttgtaattctcctgaaattaaattaaaacacagaaatagtcaagtaggcccaaatgataaaattgcataattaatttgacaattaaggttaatcagtaattaaaatggtgacaaaaaagggtaagaaatcagagaaaataatgacacatcaattccttaattttttctactttttttaaagatattataagacagttctttgaaaaaccatcttagaatatttatattctaagacgatttttgaaaaaactatcttagaatcctcaattntttttatttaaaaaaagacattttgagacggttctttaaaaaaccatcttagaataggaattttagctaacaactatctt

SEQ ID NO: 198071 - DNA, 489 bp, Glycine max
tccttaagtcacctgcggcatgcaagcttgtctccattctttcctagagagagctttttcttatcttagtttaagagaatgatatataaaccaaaatggcattatcattagctattttagtaagcaagtagccatggtgtgtataactcatgatatttccattttagtgagcaaaggtcaagctatcaagattgttcaactcaattgagttcttcctacatttaggcatagtatacgattgaactagatcttgaggtaaacatagaagttgtagataattgtattataacagcaaggttgtaatcgattatagaagtctcgactatagaagtttgtaatcgattaccagtaggctccaatagttacaggttactcctgtaattgattacaatggtctgtaatcaattacaaagcgtccctgcataaagatctgcgttgtcgtagaactctcactctcccatttcatgtgatagcataaaccctcccaaa

SEQ ID NO: 198072 - DNA, 470 bp, Glycine max
  unsure (1)..(470): unsure at all n locations
tactcagcttctcctctnttccctataatacggtcaggaaggaagaactaanttgttcaaccctcctggcatctgaggatcacttgaaattagtgagaaaaatcgtgtccgtgaagaaaatccaagccaaggcgcttccgtaactcgtgcgagacgtttccatgggtgattccgtgaagattttccaccatcccttgttcgcttntcgtcgttcttcggtcttcaaccgcgaagttcccgaaatcgaacttttcaattcattctatgtacccttggcggtccccatttgtttcgtgtacttttatattcatttcatttactttccatacccccttctgacgttctttactcatctatttgagtcatattctcgcctactcaagaacagaatctccaccgatcatttgaatcgatacatctattacattttgtaaaatgaaatctgaccgttcgagcatgttgtaaccacg

SEQ ID NO: 198073 - DNA, 390 bp, Glycine max
gctgcccatgcacgttattcctcccagttgaagaagaaccttaccctatacgcacgggggacaaatgggcattacttaatggtcatcattgcaatgcggaaggtattatgtgcttcactatccatgtccacacattattgcagctccttgagcatgaactactaccaatatatagatgttgtttacacaaatgagcacatcttaaaagcttacttcgcacaatggtggtctcttgggaatgaagcggttattcctccttctgatgacgcatggacacttatccctaacccaactacaattcgtgcgagaggtcggccaatatcaacaaggataatgaacgacatggattggctcgaaccatctgagcaccgactaaaatgtagtagatgt

SEQ ID NO: 198074 - DNA, 463 bp, Glycine max
tctagatgcatcctagctaaccctaacatgagctaaacttctaacagaaggtatctatgccatccacgccttgatcgtgctcgcgattccttcgagaagcttcacgtgttcctccattctgcatggcttctatcgtacccttctagatatgctggggtgagtcgttcccttcgtggcctctcattccttgcttcctgcacctcccttgctagtgacaccccttcccttacttctcccgtaacactcccctgcccatctagcagcaccttgtcctcaaggtggtgagtgcgcttcaagctcgcccagtcttcccatgaagtctcttcgggtggtaacccttgccactgaacgaggaccatatgcctaggtcctgtctccgacggaatgactttagaagctacaatggctaagggtgtaataactgggtgattattagatgctaaagggggaaggtccatgactg

SEQ ID NO: 198075 - DNA, 439 bp, Glycine max
agctagccaacccatggaagctcctaatatctcccacaccttttggggagggccattcttggatggccttgattttcatagggtccacttggaccccatttctaccaactacaaaccctcagaaaactatattatctacacaaaaagtacacttctctatatttgcatagaggatgtttttcctaaggactgaaagaacttgcctgagatgtcctaagtgatcatctaggatcctactgtacactaaaatatcatcaaaataaacaactacaaatatacctatgaaatcccttaagacatgatgcataagcctcataaaggtgcttggtgcattagtgagcccaaagggcatcactagccattcatacaaaccaaacttggtcttagaaagcagtttccacttcaccacccttttcatcctgatttggtgatacccact

SEQ ID NO: 198076 - DNA, 467 bp, Glycine max
  unsure (1)..(467): unsure at all n locations
taacanaaggcatgcgaagtgggtggaattcctagagcatttcctttaagttatcaaacataaaaagggaaaaggtaatattgtagccgatgctctttctcggcgtcatgcattactttctatgcttgaaacaaaattgattggtcttgaatgtttgaaaagcatgtatgaaaatgatgaaacttttggagaaatttttaaaatttgtgaaattttttcagaaatggtttctttagacatgaaggctttcttttcaaagaaaacaaattgtgtgtgcctaaatgttctactagaaatttgcttgtttgtgatgcacatgatggaggtttaatggggcattttggggtccaaaagactctagaaacattacaagaacatttttattggcctcatatgaaaaaggatgtgcagaaattntgtgaacattgtgtagaatgcaatggctntgatgttttgatgatgatcat

SEQ ID NO: 198077 - DNA, 311 bp, Glycine max
acctgctccaagctctgccgagaccgacatgcggcacggaggtaattcatcacatagcgagagatcggatgaagtccgccaccaggaactgcaatctttgccgggtcccggcgaatcaaattctccagctccataaaaattcccctaatcgcttcccccaacctcttccaaatcgtaatcgcttcattcctgagcgacacactaaactgatcagaaaacagagcctcgaactccggaaataggtcacgcagcgtctcgaacacggcgaggattcggaacagcctttccggcgaccggctcccgatcgcgac

SEQ ID NO: 198078 - DNA, 453 bp, Glycine max
  unsure (1)..(453): unsure at all n locations
cgtcccttctctgtcttcctctgcacgcctgtttattctcttaanggnncntatggnttgaggttcttctccaagagaaatgtgggttgtggggttgtggctaaggtctctaaggaggctgaaaaccaacccattttgggtatagcgtttgaaccttttgaggaagtgaaaaaagagcttcttgtcatcccttcagtgccccatgcatcactggctcgccaaatgtacactgatcagtgtgaggctgcactcaatgcacagatcaagtgagcttcctatggtttcttgttttccattctattacttagttagtccttcttctcatctctctcatagacatttgacatggatgctagttntgcacagttattaggatgacacaatcaatgataaatataatggaatgcttcagaaactattaaagttgagttcttttattattaaaatatatat

SEQ ID NO: 198079 - DNA, 421 bp, Glycine max
  unsure (1)..(421): unsure at all n locations
tgcagcatgcaagctcttggcaagagtggagatttgttaaatcttacaataaancatatgtcaaacgttttttgttttttgtgagttacacaaagaaagagaattcataaatcttttcgtcttatttcaaaaaagaatgttcatcccatcccatgtttagataaaataacatatttaataagttaattatgtcacatgttagcaaacaatataattcttattgctattatattaaaagtataataacaactaattaaaaaaaattaattcaactctaataatttaaatgttaatggagtcttagataaattgcttcttcttttaagttaattgtaaattcttattcttgttcaataaaaaaaatctcatctaagagtttgatttatacatgatttatctattaatatattacacatataat

SEQ ID NO: 198080 - DNA, 384 bp, Glycine max
acgttttctgcttctaattacaatttcgttcttgcttcttcttctactctcatttacgtttctgttccattttacatttctgttcgtttacgtttctgttcatttacgtttctgcttcatgtttcaattgcgttttctgtttgaatccatggaaggctagattttctggtgttgtttccttttgaggacgaagcccaactctctttgaggtttcgcttgcaatgtggtttcctggtagttctcccttcaccagtatcccaaattcgtgaatattaatcagtgcacgcttcgtgttcgattaattgcctctgagcctaacttgcgttcatgcttaatggacgaagggctaactggtgtatatggtgcctaatcacgtattgaaaa

SEQ ID NO: 198081 - DNA, 451 bp, Glycine max
  unsure (1)..(451): unsure at all n locations
ggatccttaagcaccgcggctgcagctgaaggaggagtgggattagttttctccctacntttattcgtngaccatagagtggtacctggagatatgtcgcgggggtcaggagaccttgnggacgtcaggtggggtgctattgcccaaaaccaagcttgaccaatcccgacccaacccgggcatagtcagtcagtgagaacctatgacgtacctaaacaggcgagctcctggcagtcaaccgataaaagaacaaagaccacaaagcaaggaggcttgtgtggtggttggccanctatggatcttgagtgatatttggaatatggcctctggtaatcgattaccaagggtgtgtaatcgatctcaaggcttataaatgaaggcaagaagttaagatggtctctggtaatccattaccatgggtgtgtaatcgattaccaggtctaaaaatggg

SEQ ID NO: 198082 - DNA, 379 bp, Glycine max
  unsure (1)..(379): unsure at all n locations
tctagccaaatgagcctaccttgaattaattcctnttanatgccctttgagcctatgtttcccattccttgttttgaagctcactacaagccttaagtgaaaaaccatgatatcaccgtacccttaaagaattttggagctttggaattgttttgggaataagtgtgggggggggggggggcattttcacttttcactattttactacttccttcccatctgatttcttttccatttaaccttttttactcttatattatcctctctccttctcctatttatattttttcttttttttttctcttctctctatccttttcttccttccttttctttcatcaaacctactatcattatataacctgctatagcctcactt

SEQ ID NO: 198083 - DNA, 390 bp, Glycine max
  unsure (1)..(390): unsure at all n locations
agcttatagcaagtaaaaaagtcattcccatctacgccagcaatatccaaataaaagacaacaaaggaaccttgtataactgcacaaaacgcattttaatnttcaacactgctgttattttccataaacagagtatttcattccaaacgaaattgaaagaaaatcacgcggattcagagtgttacacaaacaaaattgcgcacctttgataatgctccgtttatcgcgaaggtcgacgtggaagtaagaagcgcgagaatacaaatacagagctcgttggaggagacactcggagtggtggagttggagagactgagcggaatcggcgaatcggacaatccagttaccgagtgtcaacagccttagcactaacgatcttccaacgaattc

SEQ ID NO: 198084 - DNA, 291 bp, Glycine max
  unsure (1)..(291): unsure at all n locations
tggtgcattcctttttcagttgtgtgtcaccttctcatttttttgtttgaagatcttcactttgaaacctgataacaattatatgtgtactatcatgtatgcactttgctgaanataaatttgaagcctgtgaagatgacataaacaaaagtgcattatgtattgctcttttccccccttttcaatttacagttcactggagaaaagtcaaccttacatttttcgtgttgggtctgggcaagtaaactctggatggtgcttttaatgtttcaagcctaagaatttcaccct

SEQ ID NO: 198085 - DNA, 401 bp, Glycine max
  unsure (1)..(401): unsure at all n locations
gcaagctccttaagaagagtgtaaacaagttatagcnttttctcacacacctctctaagagctaagctcacctccttgagatgagaagctagagcttagctacacaccccctataatagctaagctcaccccgatgacaaataacatgaaaatacaaaaaaaaaagtccttactacaaagactactcaaaatgtcccgaaatacaaggctaaaacactatactactagaatggccaaaatacaaggcccagaggaaggaaaaacctattctaatatttacaaagataagcgggctcatacttagaccatgggctcgaaatctaccctaaagctcatgagaaccctatggccttcccttggatctctagcccaatcgactggcagtcttctacccaatgccc

SEQ ID NO: 198086 - DNA, 446 bp, Glycine max
  unsure (1)..(446): unsure at all n locations
tcatgatgatgaatcaagttgattcaagaggttgtgataatgtcaaagatgctgacaaaaagcccaaagaatgatttcaagattaaatcaagaacaaattcaagaatcaagagaagtttgatttcaagattcaagaaaagatgaattcaagttccaagagaagaaatcaagaagacttcacaagggaagtattgaaaagattttttcagaaaacaaacatagcatagttttgtttttcaaaagagtttttactctccagtaatcgattaccagtttcctgtaatcaattactagtggcaaagtttgatttcaaaatggtgtaatcgattacaagatattggtaattgattaccagtgcatctgaacgttggaattcaaattcaattgtgaagagttacatnctttcataaaaagctctgtgtatcgatacaaggatttggtatcga

SEQ ID NO: 198087 - DNA, 408 bp, Glycine max
agactcagtaacgtcctctccccttccaactaatactagaacattcccaatatcctaacagaagtcgttacacgtccttatatccatgcacgagccttcgcactttcagacttcatacgtagtcctccatgtacgtaggaggcttcgtgttccttctgggcctctctccattctgctgtgagtttactttttggacaccctcgttgccacttgtaacattaacacgttataaaagaagcgctgcctatgttctcaaatatatacagaaccttcttgccagcgcctgtctcaaatatatattgcgcagaacactaggcccatgaaagggctcatatcaagcaaataaccagaagcattgatatcttgaatttggtgaggtgagagaatctctcataagaactcgatctt

SEQ ID NO: 198088 - DNA, 388 bp, Glycine max
tggataaaaggcaatggtattaccttgtggcgcattgatatttttttactagcttctatggatttgttgaagctacatgttattatctctgacttcaatttgttgattggatattaatttgattagatatcttttaaagggcattctttttctagtgcactctggttgaacattgcttttatgattgatttaaagcctgattcagaataatgagagatgtatattgcattacatgatttatacatcttagaatgtggctttgggcctaacttacctccaaaagctagctcattgggtgagggctgtcttccacttatatactatagcttggcactatctctagcgcatgcgagacctggatttttccaatacgcaatatacacatgga

SEQ ID NO: 198089 - DNA, 448 bp, Glycine max
  unsure (1)..(448): unsure at all n locations
agcttctacttatgtggcagggcgggctttcttcactttcttggctcaaccgcgagctttgaccaccgctcttccttcccgcgatgcttctctntatatcttcctgagtgggcttatagcctaaaccatacttcccacgatttcctttggcatttatcaggctagttatactgccgttgtctttgcctaaacccattccgggttcgtaaccgttccccaacataactcaagccatcattactgctgcatcggacaggcaaggctgcccagagaaagagtccacggaggaaatgcttaccacctcacaagactggaaagcggtttctaatgactcctctgcggcttccacataaggcatagaggatgggcacctcaccaagatgtcttcctcgcctgatacgatgaccagatgcccttccactacgaatttcaacttttggtggagtat

SEQ ID NO: 198090 - DNA, 454 bp, Glycine max
  unsure (1)..(454): unsure at all n locations
ttgatcttccaccaccacctccaccttcttagagtttagtttataattnncttttttttataagccatgtattttggctatgatatttaggttatcattttctgcactttattaatctttgggtattnggactttagtcttttatgattagattttatgtggttttgaattatgattgtttggattatattttggttatgacctctttatgatttgcttatgtttggttacaacttatgattgatctttttcctatattatctgatattgattcccatgaactttggctttttgatgttgccaaagggggagagaaatggggtggtagagaagcttaaaaaaagcttagaaatcaagtgatcatcaatttcaaaacatagggggagtgaacgcaatatatcatgcatatacattacttgtatcttgatttcnggaactaaattgtcatcataaa

SEQ ID NO: 198091 - DNA, 452 bp, Glycine max
aaaaactaagctatacatattcaaaaactagtgatagagtgatagagttttttttcttacggaagaaggtatatgtacacacttctttcatcatattatgattcttctgaaatcttgcaagcaacttggatcaccaatgtttttctagctggcataacatagctatgctggctatgcatcacaatgaagttaagagtaaattacactgatatcttctgaagtatttcagattgcacacattacactgacgccccttatacattacactaactgacatcgtgtacccgtagaaagttgttttaaacgttacagaagtttgggaattatgtgcaataaacaatctctggggtatcattgtaatttactctgaagttaattcaagaatcatggatgcacgttgcatgcggatgatcaactgcgattgatccacttatatcaaagttgaattacaa

SEQ ID NO: 198092 - DNA, 467 bp, Glycine max
  unsure (1)..(467): unsure at all n locations
ntaccacatctcccgacttanaaatatgcacatgtataatgcatgtctcanacattcaagcacaagtggttttattgaacctcacatcacatttagggggtccattctcactccacgtaggctaggtaactcacggtcaaaataccacttgggctcattctcgcctcacataggctaggtcacccgtctcaatggcatttaaccataactcataataacatggtggtccctactccacatgaactaaggctgaatataattcttttcaaaacattgtcacgacataacttgattcaccatgtacacatgaacatcatacattacaattcacactttcaaggtaaaataaaacatttaatgattccacaacactcaaaaatcaccatttaaacctcaacagcgcacatgtattcaacgtcatcaagcaatcaagtcatgtacctaaaatacctcttaaccctatgtca

SEQ ID NO: 198093 - DNA, 367 bp, Glycine max
  unsure (1)..(367): unsure at all n locations
atgccccacattatttccatgacacaaatgcaaaaatgatgatttggaaattttatgcaaaactggtcatgcatgcacctatgcggacactcaagtgtcaaatttttatggtcatgtgatgctagggcttaagatttatttcctctattttaaatcaacccaatgtttccaaaatatgttcttttatcaatttgtgcattcattcgaatccatttcgggcgtccggggaaatttacagcattcacccttcaagtgtagacacgttttttttctcttcaaaaatcggtcatgatcaatgannatttttttcgaagaagagttgaaatcatctcttttcaaaacatgtctgttttagctagacaactta

SEQ ID NO: 198094 - DNA, 462 bp, Glycine max
  unsure (1)..(462): unsure at all n locations
nggactgtgctagagagaagaacaaatgatcaaaatgaacaattagctatttctagggcaaaattgggtgttgaggagtcaaattttgattcggtggaattttaggtgtaaattcagtttgagcaagtttagattgatgttatggacttgtgtgaggtgagagtttgcttcaaatttacctcattctaaatttcacttttcaaacctagaaaacccattgaattgaggggtgttggacacctagattctgtgttgctgtgctttaaagcttgaatttggtttagacatgattgatacatgatttgggacttgtaggaattgatttgggcaagattggatgagaggaagtgtgattttcgaaatctgcacttatgcagaatttttgctgtgaaattgtgcagcagaattttgcacaagtgcagaaaaatgcttgtgtgtggttggctgtggaaagtctagtgc

SEQ ID NO: 198095 - DNA, 443 bp, Glycine max
  unsure (1)..(443): unsure at all n locations
agctntccaaagntttctgtattctaaatcttgtaactngtgctatccatnccttgcatctcttctccctttggcaaaaggaattcgccaaggactaatcgcctgaattcttcttgagtctctcttctcccttttccaatagaacagaggactaaccacctgaattcttttgtgtctcccctctcccatgtcaaagaattcaaaatgacacagcttgagaattcttttgattcttccctttcccttatacaaaagtgttcaaaggactaaccgcctaagaactcttttgtatccccattcacaaagtatcaaaggtttaacctcctgagatctttgtcttaacacattggagggtacatcctttgtggtacaattagagggtacttctacttgggtttgactgagaacaagagagggtacatctctagtggatcacttctagt

SEQ ID NO: 198096 - DNA, 484 bp, Glycine max
  unsure (1)..(484): unsure at all n locations
tatgatactaagcttcacagttcttcacaaatactatatgaagggatatcttcttgactacccatcatatctcccaaaaccccatacccacgaaatttaagagagaaagaagtccaccaaaacctgaaattttgaagtcccactcgtagccacgcacttcacgactccaaaaacgccctcctttcacgatttggggcagaaatgatggccaaaggttggagctttgttggggtttcaatggagaatggaggagaaggaaaaagcaatgtgaggaagagggagagcttctgaattttctgctttggctgagtgaggagagagaaaagctntctggttctaaataaaaagggttttctcttttctatgagtttatttaagcaatgccacatgtctccatttgagtggagcaaaaagggcctactnttcctttttgactgtgacncatactcagtcacaaaagtgagaaaaatctgacctttgaaag

SEQ ID NO: 198097 - DNA, 464 bp, Glycine max
  unsure (1)..(464): unsure at all n locations
agcttgaaagtgtgtagctcaccattttttatattagaataccggngatgtgtctactatcattgtcatcattttttttcccgcattgaggtgccacttgagctgccaggtctctccacctttaggcgtattctnttgaaagattcggccccctttttttgcacatattttgtagttgcatcctatccgaagccattataccgacactgcctaaacgaaggcaaacattaggtcctcccaggaatggactcgggaaggttccaagttagtgtaccaagtaacaactaccccaataagactttcttggaaggaatgtatcaacaattcctcatcttttgcgtatgcccccatcttccgacaatacatctttagatggttcttgagggcaagaatccccttgtactngtcatagtccaacaccttgaacttgagaggggtgatgatattgggtatcgtgaacaact

SEQ ID NO: 198098 - DNA, 452 bp, Glycine max
  unsure (1)..(452): unsure at all n locations
ntcttaagaaaacttccttgagaagctgctgtgatttatcttccttgagaagctagagtttagctacacacacccatctaaaaaataagctcacctccttgagaagcttccttgagaagctataacttagctacacacccctataatagctaagctcacccccatgacaaaaaaaacatgaaaatacaaaaaaaaaatcctactacaaagactactcaaaatgccctgaaatacaaggataaaaccctatactactagaatggccaaaatacaaggcccaaaagaagaaaacaacctattctactatttacaaagaagagtggacccaaccttggcccatgggctcaaaaatctaccctaaggttcatgagaaccctaaggccttctttatcaactctagcccaatcctcttggagcctcttgctcatggctctggtaactggtcctttcct

SEQ ID NO: 198099 - DNA, 470 bp, Glycine max
  unsure (1)..(470): unsure at all n locations
agcttaggctaaattagtataaactttcattatctatntaaatgaaacctagtccaataagagggatctaaggacgaagcttattttaagttagtctaaacataggagggatgtctaaattaagcctagtccaccaagagcagttgttggcgtacaaccatttgtattgaatcaatcttggtgttgttatgtgatgtgagggactggacagccatttgtgcgaccatgttgataactgggccaaataaagtgcatcctcagagagtgacactgtgtaaagcactggcataagcttccattatgccttcaactcctacagcctgtgcatgaaagaaaactaaactgttaatattaaattgatagaacaacaacagtactattgctatcccacgagggataaagaagaaaaagaagaaattttcaccttagaggcacctgcacttccatttatataaaacagtggaaaaagt

SEQ ID NO: 198100 - DNA, 452 bp, Glycine max
tctcttacaaagatgaaaaagagaaaatgaaagattatgttgtacaagtgttgaggatatctccttcacctctagaaacctcacaatcactcaactctcatccaatactccgaatgataacttcctctttaatttctgctatccctcaggatcatcacaccaaaagttctcttcaccactcagaggaatgcttccaagaatagagaacacgccaaaaattgagaactcccttccatttctgatttcaggctttaaatagtgttgctgattttttgtcgttcgctcagccacattctggttcgcttagccaaattaagtggcatttggcttagcgcacctattctttgctcagcctagatgttcaagcggtgcgcttagccaattgattctcactgagcacatcatgacaactcacctgcttccaggatcttctacgcacttagccatgaact

SEQ ID NO: 198101 - DNA, 443 bp, Glycine max
  unsure (1)..(443): unsure at all n locations
agcttatttcctttttgcagattaaattatttgaagggtgaaatgagatttagctctctaagatttgatcaattgattttagttcatgtttttaaaaattgtgattttggtcctcgtaattctaaaatgtggaatatttcgtctttaacaacatgtttggatatactttaatggggctacctcaaaatcaggggtcaccataattttttcagtgtatattatttcacagtaacaatgatttcaaaattgattttggctcacttcacaatccaaacatgttattcatttttatttgatcatgaacaaaattcatcacattttcaaaaatctaagaattaaaactacgattttaaaaatataagaactaaaatcaaatttgatcaaatctttgagagacttgacaccttttaccctgnaatgaattattagagaagctattaatt

SEQ ID NO: 198102 - DNA, 461 bp, Glycine max
tgttgatagctatgtgagctattattggggtgtaaccttttttattgctttgagtttccttgagcattgttcacttaaaaaaatgtttattatgattctatcctttctgttccccagcgttctcacatagtactgacaataaccaatccatcagagtctcttcttaatgagctaagaactgttgaggtatgtttatgcactttttttttttcagattcatttatctttatatatggttggttatctaatatttatgatctcctatctggttaaataggcatgctgttagactcaagagtttgaacctacaaattggatattattgttgatagaaattcaggatcaaaccagaattgtagtgcaacaagaacaatacaccgacctaagccccaacagagagtctctctctcaaacacactcagtacaaactacccactgaatacagaaactgccatgccata

SEQ ID NO: 198103 - DNA, 410 bp, Glycine max
  unsure (1)..(410): unsure at all n locations
agctgtaattaataagaggagatatattgttgcttcctganggattaacacgcgagcttccaatattaagctatagatctcgcacaaagcatatgggagtcactcattactntcatatctatccatgtccaacttataaccttaaaaatgccaaataagtctaaagtcaccatgtgggggcattcaatttaaagttacctctgccaagagttcaaagtgattagattaagcaccttttaatgcgagacaacgctcatttggggtaaaatatttcatctctaaattatatatacacaacacatataacaaaatttcagggaccaaccattgaatcaacacgtcagcaactctataaggttacctatgaaacaatgacgagagatgcccttatgttctggctttgctatcac

SEQ ID NO: 198104 - DNA, 461 bp, Glycine max
  unsure (1)..(461): unsure at all n locations
tgtctgcgacctgggtgccctctcacagcgcgtgatacttgactaaaactcctcctttgacctcaaattcattaatgttcttgatcaacatgaaacaaggatgagtatcgggacactccttaataagctcaatgaccagcaagctgactcaactatgaactccttgaatccacgactccaagcaagctgcaagccaagaaaaattgcccaaagttcggctgccaaaacagaacagcaaccaatgtccgcaacgaaggggaataaaaccaatccagtgtgatcacgaaggactcctccagctgctggctttctcgaagctgtatgaacagctggatcacagttcaatttgaactgatntgttggaggagggaaccactgaatgctagagctagtcacaggattaacaatctgaggaaccaaactctatcggcactgcaaactcactgagatagcatcaacct

SEQ ID NO: 198105 - DNA, 422 bp, Glycine max
  unsure (1)..(422): unsure at all n locations
agcttggaggtgtggatggggacttttangtgattattaacgaggataagggctacgcnnganttcgtgagctcactttaaaggtgggtcaccggggatggtcggtttatatttgacttgtggaagtgggagagttgatttgcgccatcgcctgatcgccacctagtaccacatatgacgggtaccccataatccactaagcttgatgtgagaaagcggtgaagagtcagtcttcctacttttgtttgttgaccacagagtggtacctggagatatgtcacggaggtcatgagacctcggggacgtcaagtggggtgctattttcaaaaccaagcttgaccaattcctacccaacccaggcatatcnatcagtgagaacctgtgatgtacctaaacaagcgagctcctgcgagtcaccaata

SEQ ID NO: 198106 - DNA, 451 bp, Glycine max
  unsure (1)..(451): unsure at all n locations
agctagagtataatttatactgtgttgtgagcctacatcaaacaatgggattattgatgtttctatcacaatcaagtgattgttgacatctccatgtgtgtgtacaatgtgattatgttttcatttctaggattcatttggaatatttgttgttgattatgaataagtgaccaatctttcttttatttaaaatttttgtctcctagtcaatcgactattaatcctttgatgtgctgattatcttccaatcatgccttgntaaactgcttgataacctatcatgtttttacttctgttatgaatagagagagactttgcccttgccaatcacgttaaggtgtttcgagaggaaatacttgagtaggcattatccttgttacttgtaaatgaaagtcaaacttagtaagtcatgtacttgtgtcctcgaggatatgcttatctaccacctaag

SEQ ID NO: 198107 - DNA, 423 bp, Glycine max
actcagcttctagctcccattagcttagagccttctctcctaccctaacctctaatcatcgcacagtgacctcacggtgtcgaaaggacgccttctttgcgcgcctccgtgactcctattgcaccctccatttccttgtcaccactaccacgcgccccgctaccctatcgaggttgatgggaaggactacatcttcatctccaaggaggagtttcttgggatggtggagtgggaggagctgctggagtacgctctggtctacggtgactacaagggcatgctgaagtagaagattcaggagtgtctcgcaaaaggctgtgacgtcattctgagggttgacattcacggggctgtgacgttgaagaatgtgctcgggaagtccgcggtgtctgtgtttgtggcggcgtagagcgagatggcact

SEQ ID NO: 198108 - DNA, 458 bp, Glycine max
agctttagtatgtatgtttctcgtcgagggtggtatacattggaggtttagcaggatgctcatgtgcacataccatggatagcacatactggaggcttgatagtatactcttgaatatatgtcacttgccatgggtgacatatactggaggcatagcaatatgcttatgcgatcatgacgtggatggcacatactagaggcttaatagtatgctcttgaatacatgtcactcatcgtgggtgacatatgctagagacataattttgtgctcttgcatatgtgtcactagctgtggatggcacacactggaggtttagtggggtgttcgtgcacacatgtcactgcagtgggtgacatgtactggagtcacagtgatgatacgttcttgaatgtgtgtcactcgctgtgggtaggacatactaaagtcgtgatataatatgctcttgcgtatataccac

SEQ ID NO: 198109 - DNA, 461 bp, Glycine max
  unsure (1)..(461): unsure at all n locations
tctcaaagaganatcaaacatcttggcattcatactgctctattacccaaacttacttagtattcaaagtgtgtaaagaaaccacgcaactctattcaaatacttgaaaactctaaatgaaaataatttgaattgttaatttattaattattaatttaagaagcaagagcagaatttgattatggttttcataaatttaagaaaaacccctattgctatcattaaataaaatttcacaaaaaaaggagagaataaattacccctaattacttaacatagtctatctggtaaatatgctagctgcattcagagaaagacaaacatttgtcattatcacaaatagtatttacaattttactagccattccaagaaaactggaaattgtaaacagcaaattaattaaaagttgggacattaaaagatcaaattccaaagcatataactgactgctgcacatact

SEQ ID NO: 198110 - DNA, 461 bp, Glycine max
  unsure (1)..(461): unsure at all n locations
taagctttgacttctaaagatataaacacatctgtgggtctttgtttctataanctacgtctttctagtgaaatcatctataaaggttataaagtacctgtcttcctccaagggactctacttgtatagggccataaacatctgaatagatgatttcaagcttctaagttaattttattgggataaacttcttaaagggcttctttgtctgcttgcattccaagcaatttttgcatttctcctgtgagttgaggaattcctcgtgccaacttatgcatgtgatcaagatctctgaaattcaagtgtccaagcctatagtgccaaagccatntttctttgttgctcacaacactaagacattcatgctcaagtgcttgagtgcaattttgaaagttctatgtctggtcaatggtgcttctatgattagactcctggtcttgtcatatactagcatcatcatg

SEQ ID NO: 198111 - DNA, 462 bp, Glycine max
  unsure (1)..(462): unsure at all n locations
cttaagncacctgcggcatgcaagctnctacagcaagctagaaatatgaaactttattaatttacaactttaacactcccctctaggtggagcatataaattgtgtgctccaagcttggaacatataaagtggattcgaggacctctcatagacttggtcaggatgtctgcaagccggttgttggagttaataaattcagtactgatttctttggactgcattctcccccaaataaaatggcaatcgatctctatatgtgtagttttcacaaaatacaggattataagcgatgtgaagagctgcctgattagtacaatacaactttcatttgctgaacatcacaaaattttaattcttgaagaagttgtttaatccacaccaattcagaagtaacaagagtcatagctctatattcttctttngcactcgatcgggcaacaacactctgtttttgcttttca

SEQ ID NO: 198112 - DNA, 460 bp, Glycine max
  unsure (1)..(460): unsure at all n locations
tcgctgaagaagactaccnctactagatggacaaaatggttatgttcatcaagtccacccagcataaaatctagctcctcatcaccaatacgaatattcccattaccaaacctgaagatgaatgaacatatgacaatctatccattatggagtgtaacaccctgactaaaattacaacttacgctgacaggggaaactctgtgttgtcatttgtacatgtatgtatttaatgacaatgattatatgtttctttctaatcatcatttgagtgcttattgtgtgtatgtgtgtgtgtctatatataggtatgtgatcagtttagtaaagcttaacagagaaatagaaattgtctgagctagatttccatccatgcaagaattgcactatgcattgagtcgcaatataatttttctatgtgtgagggttactctgagtatacatatccctagggagattaaca

SEQ ID NO: 198113 - DNA, 467 bp, Glycine max
  unsure (1)..(467): unsure at all n locations
agctgggggaatatggaggttctgacaattattatctttgttcttaaaccataaagatagtatagttagtggttggcagtcatatctaatctaatgatagaaccgaaattacgtgacccatgtttatgaaagaatgagtaattaattagaaggctaatgatgccacatttcaatatgaagattgaacatgaagaggcattgtgcttctaattggaaatcctctatatcatgagaaaaaaaaaaagtccaacacactcctcacacatcacatgcagctccaccaagaatccttaatcactgtcctgaccacacttttgctcctttgtcactacgacattgtcatcacatttgagaagatctctagtaaatttcttagatgatcacatttggataaaatatacggcactatataggaagtatcacttctaattgaatcgcgttnttatgtgtttcttcgctgaattttt

SEQ ID NO: 198114 - DNA, 468 bp, Glycine max
  unsure (1)..(468): unsure at all n locations
tgtgaatgtaaagccttatagatacccacatcttcaaaatgtggccatgacaaaattatcacataaatgttgaacgaagaattaattgttccaacccacagcccattctcttctttagtattattggtttgaaaaaaagatgggacttggagtttttgtgtggattatagagctcttcatgcaatcactataagcgatcaatttcttattttgacagtcgatgaactttaggatgaattacatggagccaccattttttcaaaaatcgatttatggccgggatatcatcaaattcgcataacaccgaaggacacacataaaatgtcttttcgcactcatgatgggcactacgaatttctggtgaatgcctttggtctcacaaatgctccaacaactttctaaaccgcaatgaatgacttanctacaaccttatttacaacatttgtgcttgtgtntnttgatgatatg

SEQ ID NO: 198115 - DNA, 375 bp, Glycine max
  unsure (1)..(375): unsure at all n locations
gaccgacaagcgcaaacaagagagagctctttaaaagtgtcaacaacaaaccaacggagagctactataaggtaggggagttataataaaatttaccgctctgacaccatagttagggtcaaggaacctagctatgagaatatctgtctgtccctgttgcatgctgattntctttcaagaaaaactatgtttttaacgaatgggatgcgatatatctattgttgatgaataacactattgtctattaaacttgtgttgcttgaagacctgtggagtgtgaacctcacgcatggaaaatatatatttacgtgcggaatgcgactcattgttgatgttgctattggtgactttaattgatatgtggtgatgctgata

SEQ ID NO: 198116 - DNA, 435 bp, Glycine max
  unsure (1)..(435): unsure at all n locations
tgccacccagctcgcccaggcgagcaaggttgcttcctcttattcaacagccttctggaggaatctttaggagggcccaagtgggcctggttgctatttgcacccccatttttattaaacacaccccctgccttttttttggtgattcttttttcgtaaagttatggaaacttacgaatttcgtaacgatacttgttttctttccataatgttacggaacataatcatccccctttttttgacttactgaatgttacggaacttcactatttgtgcaacaatgcttccttttgatttccggtgtgtcacggaacctagcggattgtgcatcaatattttcttttgattcccggcacgtcacggaatttacaaattgcctaatgatgggtgccaagcacctcanaacgaccaaacacaagttgcatgccaccaagc

SEQ ID NO: 198117 - DNA, 465 bp, Glycine max
  unsure (1)..(465): unsure at all n locations
gaccttaagcaccgcggctgcagctatagtgagtagctattctttaatcaactncctcctttaaatttgggatttgccttcaactacagttatttgaaaacagactttccctatctctcttaattncaacttggtatatttgtttattaaaaagcacctaatttaattttttggggaactttggatcttcttgctatcctttttcttagaccttataacaagcacaagcttgatttcaagtcacatgagtgtttatttcttggttattccacttctcacaaaggttacaaatgtatatctcctaatggcaaattatatgtttccaaatatgttgtcttcaatgagcttaaatatccttacaatgatctttgtccatacttatccaactctgtcactccttctaagagtgatntttttacctatggctcatattccattatatcacctgcttctaataatcttagt

SEQ ID NO: 198118 - DNA, 456 bp, Glycine max
  unsure (1)..(456): unsure at all n locations
ntgctatgatgcangtgttactgttaaggtgtgtgttgtctgttaaggatagcaatatagttgatacacttccatttagcatactgtcatctcattgaaagttgcatccccgacaacaaatatttccttactatcatcgttcgaggtgtgtatgtgattctcacacttatgtgcttaagtattataggcaatggttgacatgttactattctttagtagtacattgtaattcattgagtgagccatagttccccgtttgagattgaatacaacgattaatacggacagtttggattaattattgtattcaatcttgaattgtccgtttggacagtttgggaagacaaattgtttttacttcattttgacttataagttaagtatgttgtgttatttttgactaaatttcgagcaatgcatcttgctntgttctctgggtgaatacatgataggcgt

SEQ ID NO: 198119 - DNA, 355 bp, Glycine max
tccgcgaagcgcaacactcatgggctaagcacgaggaagactctgcaagaagatgagttgtacaggttcgctaagcgcaccgcttcatctcactaagtgcaccgcttcagttcatccactaagtgagaaaggtgcgcgctaagccgaaattcactaatgtgcgctaagcggtccataagtgcgctaagtgcatgagcacgaacaaggccaccaagttccagagagttttgagagatattgctgtgtgaagatctgcagagaccatagcttgaagcaagagccgtgttgaaagcttgagatgagtttgtgagcgattgtgagatcctagaggtgaaggagacatcatcaccacttt

SEQ ID NO: 198120 - DNA, 459 bp, Glycine max
  unsure (1)..(459): unsure at all n locations
taagctctgtcaactgcacaaggctcttaatatttgaagagtatccttgaggaaccttcacccgtcgaagacactgacaaagaattatcttctcctttttggacaaagtatgacaagctgggggcaagtaaattttctttccatcataccttggatgcaattgtgatcgtatccctatctcagctagatcctgacgtgtattcaagccatcctttgtcttgccctgaatgttaaggagcgtcctaatcacactgtcacatacatttttctcgacatgcataacatcaatacaatgtctaatgtctagatcagaccagtacggaagatcaaagaanattgtcctcttcttccatatgcaagtctgactcttatccttcttttgagtctttccaaatatagtattcaggtgttgaaccctgtggtatacctgctcactagtcaacggtatcggcgcaatat

SEQ ID NO: 198121 - DNA, 431 bp, Glycine max
  unsure (1)..(431): unsure at all n locations
aacttgggttgcacctttatcttataagcaagcacataacccaacagcttatcaagtgcttggggtgaaacatttaaatcaaaatcaccatccttgtgcaaagagaaataatggatgctaaaaaaaaggataatggtattggatattacacatacaaaaaataacatatcataggaaaaaagttgcttttgaatccaaatatgtacttcaattttaagcctattaattgcatcagctgactgaccaattaattcagtgcattcacgatcccaaagcaagaantttgtgttttcatctctgtggttgatcatcacgtcaagcctatactctggaccatatataccaacagtgtgaaaaatatgaatgtctgaagaatacacatgattgtaaaagatcgcactgacctaagcatagcttcctgattgtatttg

SEQ ID NO: 198122 - DNA, 454 bp, Glycine max
tgagctattagaagacttgcttattcatttagtgttgatttctctaccttcagagtttagttagtttaagatatcttataactgtcagaaggaagaaatggtctcttaatgagctcatttcatactgtgtgaaagaagaggaaaaagcaagaaagaactgaaagtgctcatgttgtgagtacctctaaagacaagggcaaaaggaaaagaactgaggagcctaagaatgaagccgctaagggtccagcacaaaagaaacaaaatcaaggtgacaattgtttcttttgcagtaagcctggacatgtaaagaagaaatgtaccaaatatcatgcttggcgtgcaaagaagggtatgtttcttactatggtttgttctgaggtcaatttagctttagtacctagaatcacttggtggttagattctggtgtcactactaacatcagtgtttcaatgc

SEQ ID NO: 198123 - DNA, 408 bp, Glycine max
  unsure (1)..(408): unsure at all n locations
agcttaatggatgaagagagtaattgttgtatttntcgcctaaccacatattgacagccctaagttggttctcgcttactaaattaaaatagggttggattaactggttaactgntagggacgaattctccataacccaggacaagagagtggcttctgaataaaaggaaacaacccatttgtaatactatgcaatatgtattctaggtggctggctctttatatcacaaaacaaacaacccccccctaatcgttctattaatgcaagcttattatgaacattcggtttatcattgctcgttgggaaacgacctaagatcacttcctagtattgcactttcatgttaatttgatacgggtgtggctcatcacatttcaactatttttgctactaaataacacataaaa

SEQ ID NO: 198124 - DNA, 441 bp, Glycine max
  unsure (1)..(441): unsure at all n locations
ntgagcctaaatcctgactcaccatataccttgacccattgtgagaatgtcaatccttaccctcggaagcaaaaaagaaaagaaggaaaatttccaatcaaagggaaagcaaaaagaaaagaaggaaaatttccaatcaaagagaaagcaaaaagaaaagaaagaaaattcccaatcaaagaatgggagaaagtaaaaaaaggaagaagaagaaggaaagaaaactcttgatcaaggatcgaaagacaacagaagaaatgtgcagaaaggtctttggaccggacaatatctgaacaatacagaattgtcaccaaatgaacgaaaagaaggaaaggaaaccatgacctanagtggttttctccctttaatttccaaccaagatattgtgtgctagcgactttntcgccccgcactanaccaaaacagaanaggaaaaaagcc

SEQ ID NO: 198125 - DNA, 428 bp, Glycine max
agctttgttctctttttataaaaagagaatttctgaaactcatcatgttgtctaaaaaagccttgaggtggatccatgtgctctgatcattcattagtatattcatgttttggtggcatactcaccactatttgtttctttagggaactcaccataactaaaaaagcgcaaaggcacccctataacacccgacctatcggccttaaaagatcaaatggcttctatcacggaggccatgctaaagattcaaaaaactatagaagataatgctacagcggccgcttccaatacagctagagaagtggaaacggtgctacagccggcaataaacttgggccgagacagaaacacgacgggttttaatcagaggtatagtcctcaagcctacccttatggtttgccctccggacttcactccccgtaccact

SEQ ID NO: 198126 - DNA, 427 bp, Glycine max
  unsure (1)..(427): unsure at all n locations
tctcggctcatgctgggaacgcctctagttcaacacccgtgcagcctaaggcacccacccagagggaagctccccaagttccaactccgaacacggctcgaccggccggtaattccaacacgacaaggaacttccctccaaggccattgccggaattcaccccgctcccaatgacgtacgaagatcttctaccatccctcatcgccaatcatttggccgtggtaactcccggaagggtcctcgaaccccctttcccaaagtggtatgaccctaatgcaacttgcaagtaccatgggggtgccccggngcattccgtcgaaaaatgcttggcccttaaatacaaggtccaacatctaatggatgccgaatggctgactttccaagaggatcggcccaatgtgaggaccaacccgctcgccaatcatgg

SEQ ID NO: 198127 - DNA, 446 bp, Glycine max
  unsure (1)..(446): unsure at all n locations
agcttcgggattgagatgacaagtcgaaagggccccaccctgccacatcagtaggagctttataagtgtgggtctaggacacgaaggccaagtggtcacgatatgcgaggatgactctccgagtaggtcggattaggtacgaccattccctcctggtttctgactaagaaattggtgagtggaggagcgcctggacatttacgcgacaagcataatgtaaccctttgtggcttttaaactctacgattgggcctaggctttagagtttccttttgttaaggcattatctctcttgttcccaaatttataatataaaaatcttgcttcatctgttcctgcgcctctacccatnctcattcacttgcatgtttatttctttacgcttaaaatgccagatctgacgacgagtccctcgaagatataatactcgggacccggtcatcggt

SEQ ID NO: 198128 - DNA, 464 bp, Glycine max
  unsure (1)..(464): unsure at all n locations
ggcctaattaacctgaaattgagggagaatgattattattcacacaaaatggaagtactaagtatttattacctatacttaacagaaaatacttataacactacataataacgataaattggaagagtttgatacaatttacacaaattttatacataaaagttagtcgttttcaccgactaatagtcatccgccacccttgccatccagagacggcaagtccgatgacacgtggagacaacatatggttatttgccacccttgtcatccagagacggcaagtccgatgacacgcggagacacctcatggtcgttcgccacctttgctatccaaagacaatcgagtccgatagcacgcgaagacagattatgatcatccgcaccttttccatcagagacaagcgagtccgatggcacacagagancaaaatggtcatcttcttcctctntcaaagacctcagtg

SEQ ID NO: 198129 - DNA, 448 bp, Glycine max
  unsure (1)..(448): unsure at all n locations
agcttttgactataccttgggtatgtgttttactcaatccacaactaactcaaggactttcatgttgatcaccaaagttcaacttttgactntcatctttattgaaaaagtggcctcaataacttaagaggggggtgaattaaatcttaagaatttttcgactaacaagttttaatccccctttaaattatatgtgatagatctagaatgtagaagaagaagcaacaatcaatttcacaatgttctttaaatgtgcaagacaaagtaaattgcaataaaataaacgagataagggaagagagaattgcnaactcgatttatactagttcaaccacttctcgtgtccatgtccaagtaaaccacttgagattttccactatccttgtaattcctttacaatctttgaacacaccttgagatccctcactgatgtagctccatgtggagc

SEQ ID NO: 198130 - DNA, 461 bp, Glycine max
  unsure (1)..(461): unsure at all n locations
ntgacttgagtcatcaagagattataaatatgttcccatggcatgagtttcataaatcatccttcaacatctttatcactatcaatcatctttgaatcatctatctttcaatcttttttaacatcatctctcaaacatctttcaatgaatctttcaatatctttctatagaattttttgattcatttctcttcatctttctaaaagttttttatcaacactttctcttccaagaaaagttctttgttaaaaaacttgtgttattcatctttttcattctcttctccctttgccaaaagaacgaaggactaaccgcctgaattcttttgtgtctctcttctcccttacaaaagattccacggactaaccgcctgagaattcttttgattcttcccttccccttaagcaaaagatttcanaggactaaccgcctgagatatcttttgtttcccctttacaaag

SEQ ID NO: 198131 - DNA, 429 bp, Glycine max
gtcaccgcagctgcagctggcatcgagctgaacatgtaaatcaataagaggttggcaactcgaagctatcttcatttcagcaccaagatggataaactagaggggctgatatgaagaaaaaaatgaaaaaatcaaggtcaataaagctttctgatcttgaggctcttcaatcatcatcaccttcaaggagaagaatgtcacaaccaggaaaaccactccctcttcatactccaacaactacagcatcaccacagaagcagcaacctttgttcagaacaacagatggttcacctaattacatgaagccaacaagcagttcacatgcaaaaaaggagcttttcccggtaagccacaggaacactcaacctggttctgattttaggagtcttcctagacaattttccagtgattccaaagcttcctgtgcta

SEQ ID NO: 198132 - DNA, 465 bp, Glycine max
  unsure (1)..(465): unsure at all n locations
nttatgtgaaaagatgtgactcttcacattagaatttgtatttcaacgttcaaaggcactggtaatcgattaccaaaacattgtaatcgattacagctttttgaaattaattggaacgttgtaaattcaatttgaaaactttttcaaaacaattttgctactggtaatcgattacaacaatctggtaatcgattaccagagggtaaaaactctttggtaaacatgttttgagaaaaatcatgtgctattcaatttttgagaaaaacttttcatacttatcttgattgagccttctcttgattcttgaatcttgagtcttgaatcttgatcttcattcttgagatcttgaaccttgaatcttgattcttgactctaaactttcttcttgagtcttgaattcttcttgattcttatcttggactcttgaatctaaactttcttcttgagtcttgaattcttcttgat

SEQ ID NO: 198133 - DNA, 463 bp, Glycine max
  unsure (1)..(463): unsure at all n locations
agcttgtaagcctaagccaatagtaatgatcacatttcttgcatacagatatgcaagtaaatgaaaattgttttgtaatcaaacctgacacaaatgagggatgcaaataaatgtcctcttataaacaatgcaactgcttatttttcaccaaaatagccttcaaacatacagctacacaacttaaggcacagtatccccctgtgcaatgacctctctaacctccacacaaattcaacgtgtgactcattaggatacaatacaatttcagcaaacttttgatttaagatccaaaccttaatcctaatcacaacaatcatatgcagtggatacaaatacacgcagttttgtgactctcccgtcatctccttcattcctgcttatntcactaaacttcacagtaaatcttatcaatatggcgttnggttttgggtatattgcgatacatccgaatgatgtcattttc

SEQ ID NO: 198134 - DNA, 469 bp, Glycine max
  unsure (1)..(469): unsure at all n locations
nngaaatcatgtctcactagtcctgtagctntagcatgtcagataagttgttgttatatcccggaggacttatgtgagataccacaaataagttctttagggaagtgctcatacacacctcagaaagactgtttgtgaccttcaacaacatttccaaccgacgatagagggaggttgagtatgtattaggatttagcactttacatatctcagtgttattttgtttccgttctatcaagacaaaaacgtgaaaggccacgcaaggtataaataaatggtgataactttaaaagaaaaatccactagtcatttccttattctttaaatttgtacgaatgccaaagtttcttgcccagccacacagggactgtacgtagtctcttcctcctaatgccatgaaggtccttctctgctacaactccacaacaaactccaagcatatatgcaaatgttaaaactattagttgat

SEQ ID NO: 198135 - DNA, 63 bp, Glycine max
  unsure (1)..(63): unsure at all n locations
tagagaggaagcttcaatggagganaagaaagagagagagtgagatatgggcggggggggggg

SEQ ID NO: 198136 - DNA, 474 bp, Glycine max
  unsure (1)..(474): unsure at all n locations
cttaagtcaccgcggctgcagcttgtccctgaacccttatgaaatttgattcttcatgtctcccttcctgaaaacccactaaaaattgcctaacccccttgctgttactccataatttattctgcaataactgcttaaggcagttacatatggtcctaaatcactacacattcagttacgattaaccctttgtgcctaactagggtttctaaacatcacaacaaagacacaccattgaacaatggattntcatcattaacatacaacagagacataccttcgatggaagcgcagacacgaactccacaaacgcgaactcgacaatgtggttgcagtcacggaagcgcagcccagtttgcgacaaacacgaactaatgcagaaggagaaacaacaataaagccctgtgttaaaacgacgaacacctaatgttaaaacgacgaatgcctaatgttaaaacgacgaacgcctaatgt

SEQ ID NO: 198137 - DNA, 456 bp, Glycine max
  unsure (1)..(456): unsure at all n locations
ttccttcttgcacttctttgttacaccaatccttctttgtatgatgcaatcaaattttatttaatagaggctgatattagtaatcaaggaaaaatagacattccttgatttctaatttcattcatttgttacagttttttcccaagatctaagggggtgtttgtttcaaggtttctaattatattccttggattcttattcgtggtagcattactatgagcaagaactccattctctggtattttagggaaaaaaaaccatttgattagtgtaccgtccagatatgtcttgactaagcatgatatggccccttatgaagctccatctgagttcagagcttcaaggactgtgtaccatggcactcggatataactcagtcaaacctgatgtgccccctatgaggctccattgcctctgttgagtaaacagcttggggctttgcatcanttggatata

SEQ ID NO: 198138 - DNA, 325 bp, Glycine max
  unsure (1)..(325): unsure at all n locations
agcttccatgtctcttgtatacttgttatcttgctgnnacttcngcagnatatctcatcaatagccttccatcatcatcttatccatcaagaggtaccttatcaaagatagtttaagaaacttccagattacaagttcttaaaggtctttggctgcgcttgctatcctctgttaaggccctacaaccagcataaactcgaaccacagtctcaaaaatgtctctttctagggtattcactttctcacaagggctacaagtgcatggctgcagatggacgaattacatctccaggatgtgatcttnatgagttgagcttccttttct

SEQ ID NO: 198139 - DNA, 471 bp, Glycine max
  unsure (1)..(471): unsure at all n locations
ntcacagcacaactntcataaagcacatgaatggagaatttatttgacctcatcatcaactcaaaaacctcccatgtaataatgtttggaatctttatgtcccgtgcctccttctcctgtcatacaataaattacttgcatatcagacatcaaatatattatagtgcaaaatatgatttttttttaaaagttcctattgttgaaaggaaaagaaaacaacaaaaataactcaatttgtgtgtcagttacacagcagagagtgttatcagtagatatggttaagaaaagatagattaattacagatatcctaattaactaattaccataattgtgtagatcatataatatggtgagcataaaatcgtttgcctgcagcaaagtatgaaaataccaggttatctacaaatgtcaactaanactacaacactgcattttagggtaaataaatttccaagcaacagtttaacaaa

SEQ ID NO: 198140 - DNA, 79 bp, Glycine max
ggatcttaagtaccgcagctgcacttcagaaagaatggtttgttatccctcccctggctattcctagggagggcctccc

SEQ ID NO: 198141 - DNA, 464 bp, Glycine max
tctactgatgtggcagggcggacatccttcaccttcttgtctccaacgcgaactttgaccattgttcttccttcccgtaatgcttcttttcatgtctgcctgagtgggcttatagcctaaaccatacttcccacgatgtccttgagtatttatcaggctagttatgccgccgttgatttttcctaaacccatcccgggttcaaaaccgttccccaacataactcgggccatcattaccgctgcatcggacagacaaggatgcccaaagagggagtccacggaggaaatgctgaccacctcaaaagactggaaagcagattctaacgattcttctgcggcttccacataatgcatggaggatgggcagcttaccaagatatcttcctcgcctgacacgatgaccaagtgcccctccactacgaatttcagcttgtggtggagcgtagactgcacgactcccactg

SEQ ID NO: 198142 - DNA, 439 bp, Glycine max
  unsure (1)..(439): unsure at all n locations
gaccttagcaccgcagctgcagctgctatgctatactactaagttctttcttgactctgaagaaatctgtcaattgataaatccaatggtgatgtctccgaataagatctttcccatgatgaaatgtgtttggacctgantttttttcttcccttttcaatttcatagtaatttttaccctgacattttttggacaaatagagaacaatttcaagcaattttttgtttttgttaatcattatacaggaaaatgcagagtcagagctgcgtgcacatagtagttctgtcagaggaaataagatactggacaaggctcctgaagaaagcatgccaaaaactggaagacttaaccttttgtcaagaagagcttagttggatatacaatgatgctcatttctctttatttatgagtaactattgttaatattatatataccag

SEQ ID NO: 198143 - DNA, 462 bp, Glycine max
  unsure (1)..(462): unsure at all n locations
tctgngagactgtgagagtacttgagaattgtatgtatatggatatgatgaagatgggaaccgtatatatgatccaatcaaaggagaggcatgtcatcaatgcaggtaatattcattgtatattgattaattcactatgctccttgggatatgccttatttccttgtagggtttattagtttctattcctaaacaatttattttggcaaaagcaattagaagcttgtattgttaaaagaagatacatatatgcttacattagaacactcccgtgtcttctccctgctatttatttattttaaacataatctagttccaatttcatttcctgaaacttttttccctgaatgtttcaatttagatagcaaatcttctttaacatgctnggtatatttgacatgttttatgtttgatctagaacatcacgtgttctgataatgttacctcaatcagatgaaagct

SEQ ID NO: 198144 - DNA, 397 bp, Glycine max
  unsure (1)..(397): unsure at all n locations
accttaaaacatcaaaactcttggtattactcactactctaaatcacttcatcttccttttctaaaattcaagccctaactctcaaactctttgcaatggccacctctaactcacctactatcgagattatcctaaccttggagatctccaccattcacatagacaatgaagcctctattcatgtagaacactctttcaaaatttaggaactcaaaaaagtgggtctaaacctcaatgagactctattattctatggtgccaaacatttcattataaagtngcaaactatataccatgaactcattagaactttttggaggaatgttgagtttgtcaacaagaagacgataacatccaggttttggaagtcaaagttgtgctatccagtgacattat

SEQ ID NO: 198145 - DNA, 459 bp, Glycine max
  unsure (1)..(459): unsure at all n locations
ntgcctttgtagntgggttcatatgagtatatttgttttgtactgaaaaaaaaaatatatactngagctttttgtctcatttttattgtcatttagtttcgttgtatttggttgtatattgtttaggaatgaaaacaaatgttgtctcattttggtttttgctttggactaaaaataaatgtaacctttgtctcattgtcattctcattttgattagtactgtttgacttcttctatatccaatcgtgaagctgtcatttgattcttctttttccaggtttgtgtatggttattgagtttctgtccgttttcattgttgtgttaaaatcttttattacttttgtatttgtttttttttatttcctctggttttgtccatttttttccctggtaccctatactatcttgntgggctttactgacgtgtgttgctattttcttctgtatatgcaggttcta

SEQ ID NO: 198146 - DNA, 280 bp, Glycine max
ttttaatggagagggcgaccactcttgataaacccgaatgcacatcgtcattggtgtactatactaacacatttgggaagccatagaagtaagaacttatcgtcccaccatggtggctggaaatgtcacgcgagataagcctaaataagatcggactgaaaatgaatgattaatattgaactacatattaaaggctacaaacatccttacttctgctctaggaatggatgaaaattttacggctttaaattgggagagtgctaacgatatgtgtcacact

SEQ ID NO: 198147 - DNA, 444 bp, Glycine max
  unsure (1)..(444): unsure at all n locations
tccatcacgcggtnatcaaagcacacaagagcttcttgtttgtgctccttagacctgtattaatttcatgctataccttctcttccatcgctgcttcttcattattctccatggatctccttacatgtcttgcgctaaatttcgctaacatgattctttagagcttccaccgattaaactcgctatagaagctacattggattatatatggttcaaagttcttgctcctgttcttgaaccatgaattgagttgactttaagttcctttgagctttgtctaggtatttactgaggctgatacctacaccataaaactcttacataaatcttacagtagataagatcctcagaaatctggagtgactagttcacctattgcagtcttgtcatataagtcatgaaatgtgtcacataagatttcttatgttgagccgaatttatttc

SEQ ID NO: 198148 - DNA, 151 bp, Glycine max
  unsure (1)..(151): unsure at all n locations
agctgacaattagacatatttganctgctttcccaacgacacaggggngaaactgatgcataatttatctatatacaatcgtctattgcaagcttgaatcttgacctcagatatggtagtgactgcatcaactaggtggaaattcgtatat

SEQ ID NO: 198149 - DNA, 439 bp, Glycine max
  unsure (1)..(439): unsure at all n locations
ggacactataaaactcagcttgccgatagcncaagcagtagaagcgtatacttttttggcngaactatgctgccgtgtgacgacagacacgggcgactctttgattaaatgaatattagactcgggctcaccgcgccgtatcactcttgcataggatgaattcggttcaacagaaaccctgagagaagactattcacgtatatgaaaagaatgtcaacagtgtattgcattcattttgaagaaaatatatatagttaaccaaaccctaacaacaaaataaattggtgcaacataaaaaggcatatgtttcatccacaaccaccacatttagttatgtaattgcggaaattatagtataaactaacattaaaattgtggaagacgcggcgctacatcatcatcaatggcagatatacaaatgaccagtcttgcctctatg

SEQ ID NO: 198150 - DNA, 434 bp, Glycine max
  unsure (1)..(434): unsure at all n locations
agctagcccagagaaagagtccttttaggttatgcttaccacctcgaaagactggaaagcggnttctaatgactcctctgcggcctccacataaagcatagaggatgggcagctcactaagatgtcttcctcgcctgatacgatgaccagatgcccttccactacgaatttcaacttttggtggagtgtagagggaacaactcccactgagtggatccacagacgccccaacagacagctgtaaggggggttaatatccattatttggaaggtaacttgacaggtgtgagggcctatctgtactgggaggtcaatctctcccctaacctctcggcgggtgccgtcgaaagcacgaaccaccattgaactcggctttaggtgggaagcattgaatggaaatttctccaaagtgctcttatgcatcacgtttaaac

SEQ ID NO: 198151 - DNA, 462 bp, Glycine max
  unsure (1)..(462): unsure at all n locations
ntagcatggtctctgggatagaagccatttgatcttttaatgccgataggtcggccttcatctgttcttgcactccctcttcattatccatttttctggatcgagtgttataggggtgcctttgcgctttcttagttatggtgagttccctaaagaaacaaacaatcgtgagtatgccaccaaaacatgaatatgctaatgaatgatcagagcacttggatccacctcaaggcccttttttagataacgtgatgagttgcagaacttctcgttttataaaaaggaacaaagcttttatctagccaagatcatacaaaagtgttacaacagaacctaacggtttctaattatatgggccatcaaatctatcatgtgttgacagtaattgattagcccgtgaatttcctcgggggctgtacacacttcagcgactgcctttgctttggctagtagtcgcgggag

SEQ ID NO: 198152 - DNA, 397 bp, Glycine max
  unsure (1)..(397): unsure at all n locations
agcttgccgacacggattatttctactgtgttctngtgtggaggaacaagctacaaaaggagagagctagatatgaacagccaatggttgatacatgggcggagatgataaggatcatgaggaagcaaaatgtgctggctagttactcaagggatttgaaatttaagctccaaaaactaacccaaggcaacaagggggttgaggagtatttcaaggaaatggatgtgctcatgattcacgcaaagattgaagaagatgaggaggtaactatggctcgatttcttaatggtttgactaatgatatccgtgatattgtcgagttgcaagagtctgttgaaatggatgatntgcttcacaaacaatctaattatagcaacaatttaaaaggaaaggagtg

SEQ ID NO: 198153 - DNA, 461 bp, Glycine max
  unsure (1)..(461): unsure at all n locations
tatgtggagatgacctatagaagtcctaataatgagagtataccaaatggagtgtaaacttgatacaagcccaaataagcctgttattttctaagtgtatctgaggagtgccaaaataagggggattagtgggaaaagtgtgataacaaaatagcggtatgagttgagagaggtgggaggaggtggtttatgatccttgggagagtttatgcctctcaaagtgcctaaggagagtttctcttattgttgtcttccttgtttatttataatgtaaacagtactatatcttangatctggtccttaattccagacctgaatatgtaaataataaaaatactntcagcctttatttctatctttacttgatacctatcaaacccaattgctaggggtagaggagacaaagaaaggagatgtacgtgaaatcatcaagaagaaattagaggtcaaaagttgtcta

SEQ ID NO: 198154 - DNA, 486 bp, Glycine max
  unsure (1)..(486): unsure at all n locations
agctntgaaatataatgtccacatatactttgttgcattctacccttcggcgggagggcgacgcgagggctcacaggtgcgtcttccatgaaaggaaaatgtgtggagttgccaccaacgtttattcgaggaaaacgtcggaaaaactggaaaaggcatggtctacgaactttatagttgaaaggttcgggagttgtatttacgcacgaggaagatattagcaccccacgcgtccgtcacaaagtacggcagcctttaatcaagtgtgcaaatatgacttcaatttgttntatcttccctttnttacgctntttatgtctttttatgccttttatattttntatctttttgtggtcgacaagggtgtttcccttgctcctacgtattcctcaattgtgataaggaaatcacacctacgtagttctttgagaacctaaacgtggttaagttgttttatcttttttgcaagatatatttgatagataa

SEQ ID NO: 198155 - DNA, 389 bp, Glycine max
cttgaaccaataccggtgagagtgtgaacataaactgtgtgttttctattatctgtgagtaataatctttgcatcaatctctgaattttagaatgaaatgtataaatgaggacatgatgaaggccatgattgtgcatacacaagccttttgaccaaaaagcttatcttgaattacaattgtatcatttgcaccctttgtgagctgaatgattttgtcaataattaaaccctgaacctgaatgattatctccagataccttgtttagattctacgagagcatatggttcaaggaaaatttaccccaaacttgggggagtggaactaattgcgatgcaaagaaagagataaagcatcatcacacacaatacataagttgtgtgttaaaaaa

SEQ ID NO: 198156 - DNA, 415 bp, Glycine max
  unsure (1)..(415): unsure at all n locations
agaactgttttctatttgtaaattncaatgtctctgatcaaattaaacatctagtcaagtagtgccactttatataataaatcctcattatatattattataagttaattgtaacttccttctctcccatcatttatgttggcacttcttttaaaaaaatataagaactgttgtaaaaatcggttaagaggataagttttcttatttctctagtaaattctaagaattggtgtgaaaaatatggtgcaagtaacatatttctaaatgcctagcgcanaggctacttctgtggcaaattaacacaaagtgttcctttacgcaccttgttctgacactgacagcacggtccttctacagtctccacgcaactaaacgcaaactttgttgctcccaaagatagaaagaagctacactt

SEQ ID NO: 198157 - DNA, 406 bp, Glycine max
aagttaggagaggaagagataacaggggtgttggtgaataacgaagatattaatagggcaatatgcatggtgatggatgatgatggagaagatagcaatgagagaagagaaagggctaccacactcattgagatggcatagagagcatttgaaaatggagggtcttctcatcttgacttgagtttgcttatccaagacattatgcaacaatctagtagcatggaggaaataatgtcgacgcctaaagagtcacaattttcatgtaacgtttgattttttatttatttttatactatggcgatgataagaaaagagactaagtcgaacttaaattttcatgtatctatgctagctcctactactatgcatatccaatgtatgctcgatattttttatccatatgata

SEQ ID NO: 198158 - DNA, 432 bp, Glycine max
agctcgtctcgcacctgtagaggaaccttttttccatattacctttatctgtttccctaaattattaatgaataaattgcttgctgtcttgagattaaatgattgcgtctttttggccagtctctcaaactattttcttattgaattatttcttgtgggcatcattcacctcacttttggcatcccaggctcatagaggaacttaatttaatttgtttgccacagtatagttaagttcgcacctacattgtttactttaaatcttatgcaccttgatgggaattataactattaaattggcttaatgagtatttcctatggaaaatcattgtacattccctataaatcctatcatgtcttttcttaacggtatattcatatgctgcgggcctgtgatgtgtgggcgtattctaagtgatgaaattcttgcca

SEQ ID NO: 198159 - DNA, 466 bp, Glycine max
tgactttcatgatcatacaaaggatcgatcggatgatgttccgttctttgaacaaaataataaacttcaggtacctaaaattttagaattaataggaaatttcagacactcacattttgcaaataataataacaatattatcaagagcatatccttataatagttaaccaaaacaactgtgatattacatagattcatgaatttcttacttaacacttgacttgtaaaagagaaatgataactcatttagctgttgttcgttttattcttatttgtttaatctttttcactacttgtatctgatgattaaggatcatatgggccttcaatgaaccatatgcttgtattgtggcataagggataagcattacaagcttaatttacttgcaagatattgtcataatgaatggccttgaaatactctatatatagcagtggctgatagatgttggttactaacaatgtt

SEQ ID NO: 198160 - DNA, 485 bp, Glycine max
  unsure (1)..(485): unsure at all n locations
cctgaggcatgcaagctataggcnttggatcttcttcatctatggagtcctttgcttcttgaatnnnaagggcaacggaatggagaagaagaagagttgagaggagatgccacttcaaggagaagatgagtcacgaagaagctcaccaccataggaagtcatggataagagcttgaaggtaggagaagatgaatggagggagaaggggagagggagcacgaaattttatgcctcaaaagaggtctgaaatctgaagtttaattctcaaatgatcaaagttccaaataatgcacacacatgacctctattatagcctaagtgtcacacataattggagggaaatttaaatttctattcaaatctcacttgaattagaaattgaatttgtggagccaaattttggagccaaaatctcacttaatatgattagtgaagtttagctatgggtcagcccactaatccaagatcaattcaagatctccact

SEQ ID NO: 198161 - DNA, 452 bp, Glycine max
  unsure (1)..(452): unsure at all n locations
aagctatcttgagtgatgtatcccttcatcttttttttttagcgaaagccgctactaaatgatcttccctgtcaaccttgtttagatgcaatgttgcagctatgaattctccatattcaattgtgccactgttatcaacgtcatcctgtaaaccaaaacaaaattgggttccatggatcaaaataatatactactaaaagattataccttttctaattttattacgcactatcaatatatcattataataaaaatgtcttattaaatgatacttagaacacctctttgcgcttgatcataatcataaacaatgaatagcaaacaataaattgctcccaggatccatgtgccatgaaaaattagttacgcatccctatttatgcatganatccactttaatgtaattataataatagcataaccagcatatataaataagagacaaatgcaac

SEQ ID NO: 198162 - DNA, 396 bp, Glycine max
  unsure (1)..(396): unsure at all n locations
agcttgtgcaaactcatgtcgngagtttatgggtgattcttggagctcanttgggcattaaaatatagcccaaaaccacactggttgtgtgcatttttggattgtgatttatgcagaacagacctagggcacaatttgtgtcgcacaaccagatctgtgatggtgttttcccagctgtgttttgagtctagacgttctctcattctcctctgttttggtgcaaccaaatttgcatctgtagtggtgttttttcccagctttgttttgggtcttgacattctctcccattctcctctgttttggagccaccagatttgcatttgtagtggtgtntttaattntttagtttttgctatatttctatattatagagtctaaatgttgattatcatgtta

SEQ ID NO: 198163 - DNA, 437 bp, Glycine max
  unsure (1)..(437): unsure at all n locations
actttgctagctctacattacattgatgtttgtatttattggagggggttgtattccatttttgttttaagggtagcatttcttggtaaaaactaactttccaaatgtttgccttcgcaggaatggccccgatgaatcttgcctcaaagatgtccatgaaggacaaggcggccgaatgaactatttccgctccggagtacgacagtcaccgctttatgagcgctgtacaccatcagcgcttcgaggccatcaagggatggtcgtttctccgggagcgacgcgtccatctcatggacgacgagtatactgatttccaggatgaaatatggcgccggatgtggacatcactggttactcccatggccaagttcgatccataaatataccttgagttntatgccaatgcttggccaacataagatggcgtgcgtgacatg

SEQ ID NO: 198164 - DNA, 381 bp, Glycine max
  unsure (1)..(381): unsure at all n locations
caatagtattattggcagtcgcctcattatttccatctcccacagaattataaacccaagagttatgaatcaatggcccaggtgggacatgaaaatgatgagcaaagggagctgtataattataatcatatggataataataattataattagggaatgcctgcaaatataagcattcgtcaaccacatctgattaatagatntagatcctggatgatgatatgcaggtccaacaacaattgaatgatatggattgtaaattgtcatcattgaaactctagcttgtcctcaatttgaggccccacctgcaagcggtgttccgcctacaccactagcaagtgacagtccccaatgtggtgttccaatatatgtgacaatccc

SEQ ID NO: 198165 - DNA, 414 bp, Glycine max
  unsure (1)..(414): unsure at all n locations
ctattcacacaaccccattaccttattgcgatttgtttatcttctcttctttctgactagaagagtgcattatcctacatttgcacctacaataggaaattatcaacaaagccaggatgtgcacttctcaatcaacatatatatacctgaccatctaaaagtatgaaacacagaatatgtagatcctgcaattctactacttattccaacttgcaaagtaattagaattttatgagcatctaccttggactgtagactgtgtgtatgccaacgaaatattgttaaacatcacctatacaacangatgcaccgtccttgctaaataagttcctctgggcactttcatgactacccaattgaactctataaccttcttgctggatgcacttcttgctaataccttctaatataata

SEQ ID NO: 198166 - DNA, 344 bp, Glycine max
aagacatcatttacagggatgcagcatccaataggcataagcttctgtggaaacctctcgggaagggcctgtgctggctgtctcgttataaactctatgagtaaacaaagtctatagtcccattcacatactcacatccatgcatgcattgaaaatacattggctcgttaagctatttatttcgtatgtatcaattaaataggcaacattttcaatatgtaatctggtccatctctatatgtcgaaatagagagttaatatcgcgtcacattaaaattgattgactccatatgatatgactatgtaacaattctcttcatctgtaatgatatcattcttcctaa

SEQ ID NO: 198167 - DNA, 388 bp, Glycine max
tggaagaaaacaaatatgattttgaatacaagttaatcacagtcaaatattgatggccgattgctaaagcacaccactttgtcttgtatacggatcacgtctagtaatataattactagtagaagaataccgctgatcttgcatagattttttcaaatacggttaagttattacaagttgagctaacatgaagcgtgtagtctaatcatccctatatgaagaatatgatgtacgtaacaatgcaattgaatgaaagggatcgatgtagtgagatgcaagctgattcatactatgacaaagaataatggtgagtaatcggttaagaacgtagttgattagtagtgttgaataatagatctaccggggtctgctgacatgaactacaata

SEQ ID NO: 198168 - DNA, 428 bp, Glycine max
  unsure (1)..(428): unsure at all n locations
agcttcatgtctngccttatttctattgttctaaccatgtnncatccaattatntntaaacacccatttatttccaatgaagttcatgtttatggtataaggtatcaattcccatacatcgtttcttttgaattgattcaattcctcatgcattgatatagtccaaaactcatctttgagtgcctttntctatagataatggttctacttctaacacaaatgtaatatgcccacaaaataagttcaaagagtgtctagtagttactccactttctatgtctntgttaatgttgtctataaagagatcccttggtgctctccattccttgggaagatgatgttgttatgatgagggtccttcttgatgnttattgctaacttcctcttcaatccttggagatgcttctccttgactccctacatcatca

SEQ ID NO: 198169 - DNA, 443 bp, Glycine max
tcggaagaaagtgatgaggtacaagccctaaatgtctttcttgttagagcccgggtagttgaagagaagttcaagtccatagccatcaaagtctgaaaagagtatgatgaactaagggacgtcaatatggccacatctgaatccttggaactagaaaccaataatgcccgaatggaagaacacgacctaagcaaagttttgaggggctttatagggcagcaatagtgagctcaagctccgaagaggtgaaaggaatcatcacgggtcgaaggcatgatcttgaaggacgagctaaaggtttgccttaagtcgaaaagaaatttgtcccaacagttaatcgagactgaagggaatatgtgggccatcatcgataagtgcaaagagaagctaaatctatcggcgactcacaagcatatgctatatgatgagtacgccaagatatc

SEQ ID NO: 198170 - DNA, 464 bp, Glycine max
  unsure (1)..(464): unsure at all n locations
agcttgcttgtggagcttctatggaggctgtatctttgatcttcaaggggggcctttaatggtgattntccaccatggagatgcagcggaagacaaaggaaaataggtgagaggaggcgccatccattaaggaataagccatggaagaaggagcttcaccaccaagatgagccttggataagaagcttggagaagatgctccaatggaggaaaagaaagagggagagaaagagagaggggggagcacgaaattgaaggaataaaagaggtatagaagtggaactttgaagtatgtctcacaagactctcattcatcatagttacaacaagtgttacacatgcttctatttatagactaaggagcttcctcgagaagctctcttgagaaagcttcttcgagaaaacttccttgagaagctagagcttanctacacacacccctctcataactagctcacctcttg

SEQ ID NO: 198171 - DNA, 447 bp, Glycine max
tacccatcacatatggtactatgtgtctgtcgggcgatggtgcacaataagttttccacatccacaatgcgcgcataaacccaccatcccctgttgcccacctccaactgagctcacgtactcccacgtagctcatatcctcgtttctctcaacaccatgtccccatcaatcctcccaagcttccccaacatcaaagtaatacaacattcacacagcacaagctatcacagctaatcaaaacagggcaaatgcagaaaactctgcccaaaacaccaaccaatatcacagcttttcacatacaaataccccatatacatttccttcgttccaattcgttaaccgttggatcgactcgaaaattgtactggaagtctctagtacttaagcctacattgtgaccgttgggatctactagcaaacatccagaactcattctgcactacaat

SEQ ID NO: 198172 - DNA, 378 bp, Glycine max
agcttgtagggttaaagtctcacgattgttacatgctcatgcaacaattgctagtcgtggctatacgagacatcttgccaaacaaagtcaggttagccataactcgcctgtgctttttcttccatgctatatgtagcaaagtcattgatcttgtgaagtttgatgagctggaaaataaggccgcaattatactgtgccagttggagatgtattttccccctgctttctttgacatcatgattcacttgattgtgcatctggtcagagaaatcaaatgttgtggtcctgtttatctacggcggatgtacccggttgagcgatacatgaagatcttaaaagggcatacaaacaatctatatcgtccagaagcatctattg

SEQ ID NO: 198173 - DNA, 412 bp, Glycine max
  unsure (1)..(412): unsure at all n locations
acgctggtaactgcagagatnttggaatttcctttgttggccacaacattctttgtgaagctcaagggatgtcaatgacggacaggacaaagtgagatggtcaaaacaattgagtatgtttgtaaatttgtaaggtaagtggatcgtcaattgctggacattgtgtgaggcagcatatctcgtggaccaaatcaagtgtccggattcagcttgatcgatgccggataaacaaagattaagtagtgaaatggaatcatcccggtctgacagaacccgatatacaaatttgttaacgttgattcttcgaaagtgatggaaagtgagagtagtgagacttttccaaatgttattccatcgtttatacaagacacaagtctgaacagcatgtcttgtttccatgaaattcattata

SEQ ID NO: 198174 - DNA, 424 bp, Glycine max
  unsure (1)..(424): unsure at all n locations
agcttccanattattgtaccattctacctgtatctncggccaagctatcctgaaagaagtgtatcaacagcttttcatctttagagtgggcgcccatcatacggcagtacattttgagatggtttttgggacaagtcgtccctttatacttgtcgaagtccggcactttgaacttcgggggaataacaacatcgggtactaagcaaagatccgtcatgtctgcaaacggatagtccccaaatccttccacagccctcaatctttcctcaaggagatcgagcttcctcctttcttcagttgccgggggcggcccttccatggacaaaactattggcgaagctgcgatgttgggttgaggcaacgtgcctggtgccggcccttcggngatcggtggatagaactcgacatcccttcagcataatct

SEQ ID NO: 198175 - DNA, 276 bp, Glycine max
actaagcttgtcttttataaaagaaagtctaaactcttacgtatcaaaaaagcattgaggggatccaagtgctctgatcattcattgcatattcatgttttggtggcatactcaccactatttgttttttaggaactcacctaactaaaaagcgcaatgcacccctacaacacccgatccataatagatggaaacgaagaggagtgaagaacaatgaagccgactatcggcttaaagatcaaatggtttatacggatgcatgctaaacttaaaaaa

SEQ ID NO: 198176 - DNA, 276 bp, Glycine max
agcttgtgctattcgcgcattttccctgtatgtactcaaaaactacactataatatagcctgtttaaagtcatgggtctcaagtattacccctaggacgaattctcatctcttggatgaccatgctcaagcacacctaatgttgtccatctggaaatgcattttagatcgagtggaacaagagacgtgatactaaaacaccctatatcactcgctctacaacgactgacaaatatgctccggaagttccattctaactagctctcaaatgatatga

SEQ ID NO: 198177 - DNA, 353 bp, Glycine max
ttctctttctccagtcacgcacctaagagtttgttgtttctgggaaccaatcttgtatatccatgtcatctcccacgcttatttttctgctgatggaaaagccttatgtaggcacgcatatgttttttccttctgcaactcatttaccgacatgccatcactacaatctcagctaatgcaatgaactgaaatatattaaaggtgactcctgaagacaatggtatgggtacctttgaggaaaactaatgatcatcagcgagcgtattattcatgaacactgtatattgaaccaataatatcaatgatcgtgtgtgaaaaagacaatgcgagaagcatctgatgtactgaatttc

SEQ ID NO: 198178 - DNA, 490 bp, Glycine max
  unsure (1)..(490): unsure at all n locations
agcttataagaacanaattgccttaattatttccaaatatgcatgtgaatcaggacgcatcaacaagaatcaagccaaggctattgtgcaagcaatcaatggggcaaaacacaccaaatgattataatgatggatggctcaaattctcacaaaggtaaaatcatcactttcaaattgagctttcaaaactatcatgacatgtagagaagaatcaaggatttcaagtcacaaaatgtcaagaacttttattttcaaaacaattacccatttcttgaacatatcctataattcaaagaanaacatgcaaagtcgtacgtgcacacgaaattgacccaaaatattaaactgaaaatccgacgaaactaacaacattaacaaattaacaccactaacaaattaacaaaaccaacaaaactagcaaaaccaaagaacactcccncnnccccccatacttaaacaacacnattgtcctcantgtagcacaattaac

SEQ ID NO: 198179 - DNA, 459 bp, Glycine max
  unsure (1)..(459): unsure at all n locations
agacacgtgtnattgattacggatagttggttatcatttatttcaaagagtttatgcattgaagaagtttctaactttagaaacaatcttcctatctctacatgatgatgggtgatgaacatatgaatagattgagactaaggtgcaacaataaatacaaatgtcactcaataagttgggcatgtaaaatgacaaaactctttaaacttcaaaagcttaatctttatgttactccccctatctctaacaagttacagttccaccatgcatgggggtcaggcattgaaacatacacctttctcctatcttgtttcgttagtagccactatctacgtatgatangtatttctttcctattgtcaaagacatttgcaataagaataattttgtgcttatgtacccaaatttatttatgtcctctcatgttagtactaaacgcatcggatgtgactctctaag

SEQ ID NO: 198180 - DNA, 412 bp, Glycine max
  unsure (1)..(412): unsure at all n locations
cctgagggatgcaagcttgcacattatggtccccaggcactttttataatttttcattnanncncgcgacaccagcgaaaagaaactcccatgagaaacgcaatcccaaaaaagttgttagcatctataccagaggaattggtaagagaaaatagaagagtgaaaactataactagcattaatttttaaatgaaaagaacaggaacataaaaaaccgatagcatgaagtgacctacttcctcaattagtttggacacttgaaacgctctttacacttatgcaacaacttgcatatgctcgcttgaatgaaacaagagctttaatgagaaaaaaaacgtataaaccaaaggcagggcaatcaacatcaccttttctgctctttaatccaaacagttgaaaacaagtattgact

SEQ ID NO: 198181 - DNA, 472 bp, Glycine max
  unsure (1)..(472): unsure at all n locations
ggagataaanatcacagttntagtgtcttcttccttcttttctgtatacaatagcgagaagtcagaaaacaaaataaaaaaatttaaacttttgtattgtgagaagtcacaaagaaaacgaacatgtactcatagagttttgagataaaaatcgcacttttaatgtgttcttccaccaagaacatggtatagaaatgcaaacctagagaggaatgcaaatatgatatcgttgtcatggaatttgagataaaaatcatagttttggtgttaaaaatcacagttttagtgtgttctttcaccaagaacacggtatataaatgcttacctagagaggaacgcaaatacgatatcgttgttggttcggccaacaaatatgaaaccaaaatgaatatggaattaaaatggaatatggagacgaatggagaggaacgaaaatggaagatgaagatgatgcanatgtgagtgtatcgcg

SEQ ID NO: 198182 - DNA, 482 bp, Glycine max
  unsure (1)..(482): unsure at all n locations
agcaccgcagctgcaactttcttgtgggttgatgaactttatacgcagattggcatattcgcgggctgacatattctcaattagctcagttgcctcttcagggtcttcaactttatttttccccctgctgaagcatctagcagttgcttggtttgtggtctcagcccatctataaacatattcaattgaattggctccgagaacccatgggtgggagtctttctcaataaacctctaaacctctccaatgcttcaatcaaggactcgttagggaactgatgaaatgaagagattgtagctttcccttccgcagtctttgactctgggaaatatttcttcagaaacctttcaacaatttcttcccaggttttcagacagttaccctcaaatgagtggaagccacctttggcttctcatgcaaaggaaaatgaacatatatngagtctaatggcttcatcaggcacaccctgcaatcttacagt

SEQ ID NO: 198183 - DNA, 404 bp, Glycine max
atggggtacccgtcacatgtggtactatgtggctttctggcgatggtgcaaaacaactctccacatccacaaatcacgcataaacccaccatccccagttgcccaccttcaactgagctcacgtactcccatgtagcccttatcctcattcctctcaacaccgggtccccatcaatctctccaagcttccgcaacatccaagcaatacaacatccaaccatcatgaaccatcaaaaccaagaaaacagcgcataggaagaaaactctgcccaaaaaacacaaaccaataccgcaactttccttactcaaataccccagtaacattctcttcgttccaatttgttaaccgttggatcgactcgaaaattttactggaggtccctagtacataaatctacattttg

SEQ ID NO: 198184 - DNA, 483 bp, Glycine max
  unsure (1)..(483): unsure at all n locations
agcttaagctccttcaactgcacaagggcttttatatattttaaaagtatcccttgggggagaccttcacccgacgaaagacannctgacaaataacttatcttctctctttttggaacaaagtatgacanagcagggggcaagtaatattttcttcccatcaaaccttggatgcaactgtgatcgtatccccatatcagctagatcttgacgggtattcaagccatccttcgtcttgccttgagtgttaaggagtgtcccaatgacactgtcacaaacatttttctccacatgcataacatcaatacaatgtctaacatctagatcagaccagtacggaagatcaaagaaaatggacatcttctttcatatgctactcttactnttatccttcttttggatctttctaaatacaatattcaggtgttgaacccgctggtatacctgctcaccaatcaacggtatcgacgaaatatcatgctc

SEQ ID NO: 198185 - DNA, 399 bp, Glycine max
tgatgcatatgggtttgtagctacctcattctctcctctaatgactatggcatcatttctggcgctaaactgctgtgagttggaggccatcttctcaattaaatttctggcttcagcaagagtcatgtctccaatggctccaccactggcagcatctatcatacttctctccatattactgagtccttcataaaaatattggagaagaagctattctgaaatctgatggtgggggcaactggcacatagtttcttaaatctctcccagtactcatacagactctctccactgagttgtctaatacctgagatatccttcctgatggctgtggtcctgtaagcaaggaaaattttttctaaaaatactctcttaaggtcatgccagctcatgatggacct

SEQ ID NO: 198186 - DNA, 420 bp, Glycine max
  unsure (1)..(420): unsure at all n locations
tgcaagctggcagtaaaatgatctaccccagatattgctcttttncattcttcaaaaagccgaaaagcgatcagaactgggacaaaaagggcctgctgaagcggatgctggagtacgagctacagaagtagaaggaagctcacctggcctgccttgtcctcgcccttctagcctctcggatagaaactataagatcgccaggattccaatcatccttcctgatgtaagccaagttggagacaacccctctggccctacataatgtggtgatcataacacggaacccactcctacaagtgttacactgggctatacaggacatgtggccatagaccaccactcctatgttcatatccaagagaaagacttagccgtagatcagcctagctctgtccactgtcacatcaaaagtacgtgatg

SEQ ID NO: 198187 - DNA, 518 bp, Glycine max
  unsure (1)..(518): unsure at all n locations
ggcctcagcacatagctgatttcctgtttgtttattctatcaatagaccaacaatctttaatggagagggttaccactactggaaaacccgaatgcaaatttttatcgaggcaatagaactaaatatactgggatagccatgtgataatgagggtcacttataatacaccatcgcacacgtangataacgaagttaacatatattatcggtaccttacatcgaagtggataagcattatacgcatatgaaaatacactataagataagattggtcgtgaatcatggattagaaatgcgtagtacacatatcaacactatctatgccatgtatatcatgtatgtaacactctgcgcctaatgaatgtgatcgaatatttctatgagctctacaattgcaaagagtgctataagataatgagggacacatcttctattaacacatgaaggaacttatgatgttaatacatctacgataattgcactaactcacgagtatgaattatgtataacgaataca

SEQ ID NO: 198188 - DNA, 395 bp, Glycine max
  unsure (1)..(395): unsure at all n locations
cttgcatatgcagggggctttctattatttgctgatactgattcaaaattctggatttgttaagagacatacataaattaatattccttagcagagnaaaaagcaatagggttggtatgtgttcccgtaaagtaattcaatgttttttccttgagttatttggttgaatttcttagagagaaaggttaaaaaatctgaatggtgtatttcatattttccaccttgatataaactgaatacaaaagggagcatttatagtagctgccctcatcaatacagctggcgaaggctgaaagcaaaagaatattctgcttgtgtattgaatgaaaagaaaaacagatgaaaaatgaaaacaatatttttatatgatcctaatacccccccgccccccaact

SEQ ID NO: 198189 - DNA, 468 bp, Glycine max
  unsure (1)..(468): unsure at all n locations
atgatcgttgtctgaactcggaagctgngctttttcttttatggccttcttcaagcactcgataatggcatatactattgctataatagctactattgttaccactcctgaaactggaaattgaaatataacaaaaggtagcttttctaatcaaccacaggacgattgtgaggaagaaggatgagaatatataacacatgtttctctctgtaagctatctactctcagtgttacttgcactctgccatattattttgagtatcaaccatttcacttttgaagccaattgtctatatataccgtatatacaaaactacacaatattgcacttaagagtaagataacaaatgcatgaaaaacgctattcatttccattggcggctgatatcctgataaaacacatacaaattgacaagtttcaaccatttcggtttgtaatctaattatccgtttaatcactataattgc

SEQ ID NO: 198190 - DNA, 439 bp, Glycine max
  unsure (1)..(439): unsure at all n locations
agcttatcaatcaatatcaatgcatgcattattgtcttactaaaaaattgtttctataacatctagggaagtttttgcttttagattctacaaaagtttatcaatctagatccttagagtatctttagtgataaaattaattttaagtttttggataatttttaatggatcttatggtattacaggatataaaaactntttttttctttagtgataatagattttactttgaatccttaagtcatttttatggattttacaataaatctcatctagatatatttatcaatcactaagatagagagaggaattattttttttaaatgaagaaagttttgaggaggaatccaacctccttatcgaagatctccaaagcatgtatgtatagtgatagatctagtgaagatgaattcttaaatnttaaaatctagctcaaaat

SEQ ID NO: 198191 - DNA, 471 bp, Glycine max
  unsure (1)..(471): unsure at all n locations
tcaacaagacaacttgaaattacttacaaatcttgtcttgtttaataaaatattngagaagtctagtagtaggtatttgaaaaataaaataaaaataaaaatggttacttaactagaattacttgtgcaaagaatccagtaccttgtactgcgtatattgggatgcacctctaagtaatatgagtcaaatctcattttgatctctaaaatattttttttaaaatttacctatctcttgtaaataaatgctgttaagtccctaaagcttaatcatttttcaattttttatgagttgattcatttaaaattaacattataacatctaattaaactcatcagcttatacaattatccatacaagcaactaaaaaatctagtgcatctatattgagcggtctgttattactttactaaacataattgttaagaaataattaattcaatttcttcattagtttaaacaattgatat

SEQ ID NO: 198192 - DNA, 56 bp, Glycine max
acccccgcggacaaacggcaccgaaaaaaggcccgaaggaaacccacgccagacac

SEQ ID NO: 198193 - DNA, 411 bp, Glycine max
tgcatgtactttattgtttctactgctttaactttttctgattatcctgcagataataaccgtgaaacattccatccaaatcaaacccaaagaattaaagcactaaatacatcacataaaccatatgtgtacacacaacccctatgcacaccttgttattatggatctttgacacatactcatcatacccatcttgttcagccactcttcgagcaataatgccagaacctccagtttcaacctattaaaaacaccatgttaaaagcaaattctttttaaaaatccagttaatcataatggattttctaatgtgtgcccatgtgcaagtaataaaaagtgaacatcaacaaataatattttccatggaaacaaactatgtatcatgtgaaaataactaacgccattcaaccc

SEQ ID NO: 198194 - DNA, 445 bp, Glycine max
agcttaactgggcacaactcacatcattttaccattcattgcataacatcacttgtcccaaggatttaatcacaaaatcacattccacacattcacattaatcacgtgttcaaaacaactcatctcaagcacaatacaacatctcacactcacacaattcattacacatcataacataacaagtcacaaatatcattacacatgcattatgcaacagatacactaagactcagtcctatatgcaatgtggtaccatgtcagtgaaaaacctcattggacgcctaagagtacatgacaagacagaccacacaatggtaagttaggtcactctcactaggtaaaatcatagggagaccagtcagggtcacactgttttgtgagaatgctccaaccatctggatcaatacatgcttataggagcactcaaatcgggtgtatctacccc

SEQ ID NO: 198195 - DNA, 456 bp, Glycine max
  unsure (1)..(456): unsure at all n locations
aactcataagttgttntcatcttattttaatatgttttacaggatagcttatgaaaacaacttacagcttatatgaaaacgaattaaccttattttctatttgattatgaaaaataacttatgtaaaagtgcttatatattatatacttattcaataagtccttaattaagtttagtcaaatgggtccttattgttattattttatttttttaaaaatgaattgttttgatatttgtatatgtggatctgtgttcaaatcataacgagctttggtttgtaattgttgatccaagattaagtactataacgggtgtctatttcacactgttcaaaagggatttactgcccaaactggcgatccaactggcacgggaactggtggtgattctgtttacaagtacgtaactggaactatctgtgcatgtagttagtgtctaacattactgatacttttt

SEQ ID NO: 198196 - DNA, 372 bp, Glycine max
  unsure (1)..(372): unsure at all n locations
aagctctnttctctaccacttttcatncttttatngatggncaaacagaggtagcgaataggtctttgtccacccttttaagggctcttatgaaaggcaaccataactcttgggatgagtatcttcctcatgtaaaattttcctacaataggggggttcatagaaccaccaagcaatccccttttgaggttgtctatgggtttaatcccctcccacttgacacttgttttatacataaagaaggggaatctatgttagagttcgtaaagaagttgcatgagagggttaagaaccaaatacagaaccaatcaatggtgtattcaactaaaggcaatataggaatacaggagctctttcttaatgaaggagaca

SEQ ID NO: 198197 - DNA, 361 bp, Glycine max
  unsure (1)..(361): unsure at all n locations
ctaagcttctaaggaagnttcttaagaaagtttctcattgtatcttcctantctattaatagaagcatgtgtaacacttgttgtaactttgatgaatgaaagtcttatgagatacacttcaaaggttcatttctctccctcttttattccttcaatttcgtgctccccccttctctttttatttcctccattaaagcatgctttcaagcttcttatccaaggaaactcttggtgttgaagctccttcttccttggcttattccctagtggatggtggcctccctctccttttctactttgccgtgccgtgcatcgtcatggttgtaaatcaccattgaaagacctcattgaagctcaaaga

SEQ ID NO: 198198 - DNA, 475 bp, Glycine max
  unsure (1)..(475): unsure at all n locations
ncaagctaacaggtcccaatncatcttgctttgatgtataactaacttaccaaagcactanttggctttaaagcattactctattacaaacatgcaacactaaggcttgagtcctattttaggacaaccttaagatctctggatgtagcctaaaataggaaacacatattcagagcccaaaatcntagtttaacatgttatcttacaaggattcaatagctacctcattcacaccatttgtgcaatcaaccatcatgcgtgcatacaacatcatatccttctagcttccattcaatcacttaatactcaattaaaagcctctaaatcatggatttaagtcaaaaacaaattcagtaaatcactacaaggcactaacaataacaattatctctaggagttacaatcttacattggttgaattgttacagctatctctgggaaaaatcaataatttgaagagaaatgattcaaacta

SEQ ID NO: 198199 - DNA, 352 bp, Glycine max
ctctctgtgaatctcattttcccaaaacatggtcatttttactaatcctgatttcccagcattgttgctctactatctctggtcaatttcttctcctttcttttgctttgcattcacttaattgttcgaattcattgtttttcaattgaaccttctcttatcactttttttagctggttggtattgatattgaagctcaatttggtcccaattctgttataaggttttagtggttgaaaattgagatgttacgtggtttattttcgataaaacagtttccccagggcatagggttttgataaaactatgtctaatgaaggaaaagaagtgaagaacatgaatagcattttca

SEQ ID NO: 198200 - DNA, 474 bp, Glycine max
agcttcctccacgttttcctccatacctataacttcaaaccttcgattctcactcaattcttcaccaaatcacgtcccgtaaagcccaatcttcctctttttcactcctctttcacttccaccgatcaaaatccagaaaaacttcatcaaatggcagagtcatcaaagaagagaaagggatcatcctccaccgctaccgctgctgcccatcgccgtcacggcccatccggagcacccacagcacctattcctccttctttgtcatctccaagatcatcaacactgttttcatccgatgatcaacgtctacggtacctttctcagttttcttctagaataatcttagaccctaagtacctagacgtagagttctttaatgatgaaacgtttgatggttatcaagtgtttcaaaattctggtcttgttgattcatgtcataaaattgcatatatcctgacttgaaaggcttctctg

SEQ ID NO: 198201 - DNA, 379 bp, Glycine max
ccccaaggatccattacgaaattacttgagatttatttccttgagggtgggctcatgggtcactttgtgatatacaagacccttgtcttacttaaagaaaagttttattggccccatatgaagaaagatgtccataagcattgcactagatgtgtggcttgtttacaagccaagtctatggtgatgcctcatgggctatacacacccttacccatcccatctacaccttgtgtagacattagtatggactttgtccttgggcttcctagaacccaaagaggtgttgactctatctttgtggtggtggataggtatatcaagatggcacactttataccatgccacaatgtggatgatgcttcctatatctcaaaactct

SEQ ID NO: 198202 - DNA, 480 bp, Glycine max
  unsure (1)..(480): unsure at all n locations
tgcagctgctagcctaatccaaaatttgttaatagatatataattgcgctnagcattacagggcacgcttagcgcacaacaaaaccaaaaaattctaagtgtctaagaacacattactcccttaacgcacagacgtgcttagcgagttcataagcaattgaactttcaaccaaagaagatgaacgcgcttagcgggacatggccacgcttagcgagttcatctggaaatccagatgttcaacgaaaatgatgaactcgcttagcgcagcaagacgcttagcgcgctcatcgcgatttccagaaaaagcaggggcttctcatccctccacttaggcccctataaggccatntaaccctaatcaaaacaagcacattgtatccacaataaatccctgattcaagtctaacgaacaaataaccttatagaacttagtattaaccagaaatcaacctaacactactataataactaacctaaag

SEQ ID NO: 198203 - DNA, 451 bp, Glycine max
  unsure (1)..(451): unsure at all n locations
ctatggaaaatatgggacctatccatggcagaagtcttctgtgttgccattgcatccctcgcccagtattatgaccagccgttgaggtgcttcacctttggggacttccagctatcacccatggtggaagaattcaaagagatcctatgatgccttctagggggaaggaaaccatacctcttctcggtgttctatccctctttagctagaatttctaagatagtccaaatctcagtgcaggaattagaccacagaaagcaagtcaaaaatggggtggttggaatgttgacaaaatatttggaggcaaaagcaagaatcttggcaggtagaggcaaatgggccccgttcatatacatcctcgcacttttgatcttcggatgggtcctctttccaaatatggatgggttggtggacctggcagcgatcaacgctnttctcgcctatcatgact

SEQ ID NO: 198204 - DNA, 491 bp, Glycine max
  unsure (1)..(491): unsure at all n locations
acctgaggcatgcaagcttagcataggataaggtatagcatctttagaatttgtttttcatggctagggtatcgtataatctggacacagagtgtggtaatttagtttttattatgttgtagtcgtaacgctgttcagttaggttaagttcacaagagacatctgagaacgaggcttaattagaattagtccaaactcacgacacatcagtgtttggtattttagctctcagcatagaacgcagaaataaccttaaatagagaaatacatttaattgcattatgtatttcagtaggaggacccaacgtttttacatatctgttttcacacccacttgctcacatttactgctntgattagaatagaaacaacaattggttttaattcatgatcatcaattcattgcacacatgccttcatactgaatgatgtnnttccaaatgaaacaagttccctaagttcgatactcggttctaccgtttattattact

SEQ ID NO: 198205 - DNA, 456 bp, Glycine max
aagagaagttgcaagagataagacaacagcctcaatgtggttgattctgaagtcatgggatatgacaaagtcccttgcatatcggttatgctcgaatcaacaactgtacaccttcaagatgacagagtcaagaacatccactaaacaattggttgctttcaacaagattcttgatgatttggaaaatattgaagtaaagcttgaagaggaggataaagcctttttgcttctgaattccttaccaaaatcctttgaacatttcaaggatgcaatcctttatggcaaagatcaagacgttaccctataagaagtccaaacctctatatggaccaatgagatgcaaaaatagcaagactccaaatctgatgataatggtgaaagcctgaatatttcaaggggaaggagtgattagaatggaacacgaggaaagaagtctagatcaaggtcaaaggattc

SEQ ID NO: 198206 - DNA, 501 bp, Glycine max
  unsure (1)..(501): unsure at all n locations
agcacctgaggcatgcaagctgggtagcttgatgactagacagaatttatttgttgttatcgtcaaatcagagaattaaacctggacatcttttagaaatgcttgctgaattaagacaggcagaaatccagtgtctccatttgggacaaaaacccattctttgtagcatataatccaaaaaagcccatgagactgagtcataggccttttcaaaatccaccttgaaaaccatagctggccttttgcttctacaagcttcctcaatcacctcattaagaactagtatgccatgcaggatgtgtgttttttatgaaagctgtctgcctctcatcaataagaccagatatcacttgtctcaatctatttgctaataacttagctatcaccttgtacatacatccaatcaaagagattggtntgtantcatcanatgaatgggggtgtttggtttgggaatacagctattaaagaacattattgctttaggaagctgcctgccat

SEQ ID NO: 198207 - DNA, 471 bp, Glycine max
gcttacgttctatgagagcattcatccttagattaactctttttctttatttcctagcttctattagactgccacatacatataatgcacttagcttgagtaacaacacacacaaatttttatttgtgaaactttttttttagcagtttttacttactgcatctgatacaatttctatgtggctgttatttgtcttaccacaattatcatcacccaataccttcccccaaatttggaacaaattttctttgaaccatgatgctctcctacaacctaaagaaaggtagatggagattgtaattcaatatgcttaaggttcacacaatcaatcatatttaagctcaaaatgggtgcaagggattcatcattcatgaacagggtaagctatttggctaagtggttaattcaattaatcacgaacctcatcatttccaaaatcatgcattctttcagtattcagagattcatgca

SEQ ID NO: 198208 - DNA, 491 bp, Glycine max
  unsure (1)..(491): unsure at all n locations
acctgaggcatgcaagcnttgtaataagcagataacatgaatttctatnaatttcatactgcctnggctaccttgtactcattcactgccttgagggaagcataactgaaattcacatcaggtcccaactcggggacaataaagtggctggatcaatgcacataaatcaatcaggtcagtcatggcatcaccagtaattccttcgttttaattataaaactccttttagaaatatatttatttccttntatattttgttttaatttttaaatatattatttatttattttcactatatatctttacttaattattttttttcgaaacattaataagaaacaattaagtggacagagagataagaaaaaaatgtaattgtggcatgatagtataaataattgacagatttaatataattaactaactacttctcttaagagacatgaattaattaaaatgatcttataattanggacaaaaggagtaataat

SEQ ID NO: 198209 - DNA, 465 bp, Glycine max
cttacactcgagttatcaagagattataaatatgtggccatgacttgattttcaagaatcaataatcaggctttcaatcttttctcatcatcattcaatatctttcaactctttctacacaattttctgattcatttctcttcatctttctaaaagtttttgttcaacactttctcttacgagaaaagttctttgttcaaaaacttgtgctattcatctttttcattctcttcttcctttgccaaaagaacgaaggactaactgcctgaattcttttgtgtctctcttctcccttacaaaagattcaaaggactaacagcctgagaattcttttgattattcccttccccttaagcaaaagatttcaaaggactaaccacctgagatatcttttgtttgcccttacaaagattcataggactaaccgcctgagaattcttatcccacacattgatggtacatctt

SEQ ID NO: 198210 - DNA, 457 bp, Glycine max
  unsure (1)..(457): unsure at all n locations
agcttctntntntaacctcttgtcgtgattgtccctcgtngacgncggctancattntttttatcagtattggtgaatcaagttttcttccgaggagggctaatgtattcgttgccgagaaaatgaaaacatgctggtgtcggtcgaaccacaacttcggttgagctcgaacgaaaaaacctagtcgacgtacattgtaaattnttacggcaacaccgaactaaaaagcatcatctaccgtaaaaaaattttatcggccagcgtttgtaaaaaaaattgctcaatgtcgggaggaaaatctgagtcgcgactttacaacgaccgatgtcggttattgtactttcttttcaatccctgaataatatttggacgatatctaataggaaatgttcaatcggcgtcattcggtgacgcttcttttttaaacctcgatcgttgattgtccctcgtcgacgtc

SEQ ID NO: 198211 - DNA, 456 bp, Glycine max
tgtgaatgcaaacattttattggtattttaccaagaaatgctactcttaaaacacaaatggcatacaacctcctttaataaacacaaacatcaatgtaaatttagaataaactcatgcacatactcccttacgaacgttcacttgcacaagatattctcctaactaataaaaatgcacccacgcacaatcaatgcaccttcgtcacctagattatttatatgtacttccgaggtgtatttgttacctacatcacatgtacttccttggctaaatttacacacacgcatactcaaagcattttggctaccaaaaatcgcacacgtgcacattctggtatgtctaatacctatgcatatacaaactctgtgatgaatcttggctatctacacaataaggtgctacatttcatgccttattcaagtgtttttgctacctaaagccacatgcaaattcat

SEQ ID NO: 198212 - DNA, 433 bp, Glycine max
  unsure (1)..(433): unsure at all n locations
gtcacctgcggcatgcaagctngtaatggagaatgttgaactgtatatgaatgttcgtgtnnctccgacctctttgacctattatggattttgcttgggaaatggaatctacacagtaaaactccattttgcagaaataatgtttactgatgataaaacatatagcagtcttggaaggcgtgtatttgacatctacattcaggtccatatttttatcattttcttaagttggtcaaccacatgttaaatattgaacaaatttggtaaaattctctctgggaacttcatgataccaaattaaaatcttcagtataatctttgacataaacaaaattttcttataagttgtaataagttactgaatgaaataattcagtccctactaatttttacaacatttctcaactaagtaccatcatatgtttttgtttga

SEQ ID NO: 198213 - DNA, 391 bp, Glycine max
tgtagggttaaagtctcacgattgtcacgtgctcttgcttctattgttatccgtggctatacgagacatcttgccaaacaaagtcaggttcaccatatctagcctgtgctttttcttccatgctatatgtagcaaagtgattgatccaataatgtttgatgagttggaaaatgaggccgcaattatactgtgccagttggagatgtattttccccctactttctttgacatcatgattcacttgattgtgcatctggtcagagaaatcaaatgctgtggtcctatttatctacggtggatgtacccatttgagcgatacatgaagatcttaaaagggtatacaaagaatctatatcatccggaagcatctattgttgagaggtacattgca

SEQ ID NO: 198214 - DNA, 417 bp, Glycine max
agcttcggaagaaagtgatgaggtacatgttcctaaaggcagagcttgaaagagcccgggcagtcgaagagaagttcaagtccatagccatcaaagtctgaaaagagtatgatgaactaagggacgtcaatatggccacagctgaagccttggaacgagaaaccaagaaggctcgaaaggaagaacacgaccaaagcaaagtttttaggggctttatagggcagcaatagtgagctcaagctccgaagaggtgaaaggaatcatcacgggtcaaaggcatgatcttgaaagacgagctgaaggcttgccttaggtcgaaaagaaatttgtcccaacagttaagcgagactgaagggaatatgtgggccatcatcgatgagtgcaaagagaagctaaatctagcggcgactcacgagc

SEQ ID NO: 198215 - DNA, 464 bp, Glycine max
tccttgtggccatttcctgcgaaggcaaacatttggattgttagttttaccagtgggacactactcttataacaaaaatggcatacaacctcttcccataaacatcaatgtaaatttagagcaagcttatgcgcatatttccttacgaacgttcgcttgcacaagacattcttttaactaagaaaaatgcacccatatacaatcaaggcagcttcgttacctagattatttacatgtacttccaaggtatatttgttacttacatcacacacatctccttggctaaatttacatacatgcatactcaaagcattttggggtgccaaaaattgcacatgtgcacatcttggtatttctaatacctatacatacacaaacttcatgacgaatattgactatctacacaataaagtgctacatttcatgctcttgtcaagttttgctacctaaagccgcatgcaaat

SEQ ID NO: 198216 - DNA, 317 bp, Glycine max
ggaatgatgctgtggttcatatatacctgactagaaatataaccgcagcgttcgcatgttccctgctctggcatcttggtactaatagaaatcctgaaattctaccctgattcgatgatgtccagaatggccctaagtctgcgttgtataataaacataagcacagctatttgtgagcgagtacatgaaagctagcatattggataatcagcacctgattctatccaaatctttgatgaactcgcgagcaaaacctcgatttgcattaggagaggaaatgcccggaattgtatagagagtgaaatgattgtttggca

SEQ ID NO: 198217 - DNA, 355 bp, Glycine max
  unsure (1)..(355): unsure at all n locations
agcttgcactcaaatgtgtttatcacttgtcacgaatttactctggaagagtatgaaaatatatagaacattagaggatatatcacatttcttcagaacacatgtttttaaactctaaaaacttgtttccgaaagaaatgaacacgaaggtgtgaaagcatgggcctatttaatacgcaaataanctcaatanccttaatcccgcattaaaagtccactgggccttatgccctaatttaaagcccaatcactaaaacaattgtcgccgccgccgccgcgcgaaattcaggcttaccgttccacttgatcatctatctaatgcaatgcaccagacgtgtgagtcgcatcttcgttt

SEQ ID NO: 198218 - DNA, 423 bp, Glycine max
gacacttgatctacctttggaacggtgaactcttggaattgctgtttttgttatgacgaacatggcaaccatgtatatgacccaatcgttcgacagacatgccatctacgcaggtaatgttcaaacgtatattgataaactctctatgctccttgggatatgccttacttccttgatgggattattagcttctattaccacacaatttatttcggtgcacgaaattatacacgctcttattgttagaagaagatacatatatgcttacattgaacattcctgtgtctttgccctgctttatatattgtaaacataatctaattgcaatttcattctctgaaacctcattccttgatgtgggaattttaaattgccaacctccttaacatgcttggtatatttgacatgtcttatgtatgatct

SEQ ID NO: 198219 - DNA, 467 bp, Glycine max
  unsure (1)..(467): unsure at all n locations
agctttagttgatgttatttctgactnataaatatttagaggggaatcttccagttttgtaagttaaggacatttttctgaattatttaattagagtaataacttttttgttagaatgaagtatcaatgtctagtttaagtttaatagagcaagcaaatagattttttttatttttatcattcacaaaatatttaactgaagtaataattgttttttttagaaaaaaaatttgaacgtgaagtttaagcgtattaatttttgtaattaggttttttactttgaagttattntaattatgtttaaattatttcaagcctttgttgatggtttttcaggccttacaaatatttacctgatttccttctagtttttttaagttagaatgaaattttaatctgtagtttaagtttaagtttaagttagtagatgaagcaagcaaatacacttattttatttaaaactacta

SEQ ID NO: 198220 - DNA, 317 bp, Glycine max
acaagagtgtacatcagttcctaacaatttctgattatatgggccattaaatctatcatgtgttgacagtaattgattagcccgtgaatttcctctatggctgaacacacttcggccatggcccttgctttggctagtagtcgcgggaggtcttgacttctatttaaggtcaaggcgaacctatccatccacatggtcacttcttgatgcaatgcatcaatcaccctccctcttgcttccttctcggcatatgcttgtgcgaagtcctctactagccctattatagctagcatgcttagcttcgtggcttctaagtg

SEQ ID NO: 198221 - DNA, 393 bp, Glycine max
  unsure (1)..(393): unsure at all n locations
agctngctctatattacattgttgtttgttttatgggaggaggttatatgccattnttgctttaagagtaacgtcccactggtaaaactaactttccaaatgtttgccttcgcaggaatggccccgaggaagcttgcctcaaagaggtccaggaaggacaaggcggccgaaggaactagttccgccccggagtacgacagtcaccgctttaggagcgttgtacaccagcagcgcttcgaagccatcaagggatggtcgtttctccgggagcgacgcgtccagctcatggacgacgagtatactgatttccaggaggaaatagggcgccggcggtgggcaccactggttactcccatggccaagtttgatccaaaaatagtccttgagttttat

SEQ ID NO: 198222 - DNA, 332 bp, Glycine max
  unsure (1)..(332): unsure at all n locations
atagcacgcagagactaacatcgtcttctgggcccgttgtgaatcgnggccgacaagcccgttgacacgcggagatttacgtcatcttccgcgctcacaatacctgtcatactgacatttgaatcacgctgactggcataaatacccgaattggtatccggataaacattcttttttgctgtctgtaagacgaaaagcctgatagcacgcagagaataacgtcgtcttctgcgccaatcgtcaatcgcggccgacatgcccgttgacacgcggagatttacgtcatctttcacgctgacaagatctggcatactgacatttgagtcacgctg

SEQ ID NO: 198223 - DNA, 438 bp, Glycine max
  unsure (1)..(438): unsure at all n locations
agctntcaacatcgcccaattaacatcggttatagctataaccgatgttaacgaaagcggcggggcatttttgtaaataagtagacttagttaacatcggtttttccaaaaccgatgttaactactccatagtaacattggttattcttaacatcggttattttaataaccgatgttactatggagtagttaacatcggtttgggaaaaatcgatgttagtatgcctctgttaacatcggttttgtaaaaaccgatgttatcaagtcgatgttaacatcggttntattataaccgatgttacgtagttgatgttaacatcgtgtatttttaaaaaaatcgatgttgttatcattatatattaaacttctgaaattgcacaacccgcgcgctagaaccctatcgttcttcttctttcttcttgcgcttgaaccctatcg

SEQ ID NO: 198224 - DNA, 314 bp, Glycine max
tggaggaaacaatctttccataacgttatttatatattatatcatggagaaagaatgacgcgctatgttgtgtattgtgtgtacaaaactggacggccgcatgtatctctctttcaattacaatcattgctggaaaagccgttcctatgtgtacgttccttacagggagaataagaaatttgggatattgctattcgtaacctattttgctattatcagtcccacttgtgtatttttccagaaattattattaaacgtgattaaaggatcgaaagcttataccatgtaattaacataacgtgaatgcttggaaa

SEQ ID NO: 198225 - DNA, 493 bp, Glycine max
  unsure (1)..(493): unsure at all n locations
acctgaggcatgcaagcttattgctgacttattatcgataaacttatgcacttgatatttttaatttaatttcaattcttctagcaatgattctaaccatagaatctgacaagcaacttctgatgaagctaaatattctacttcacaagtgtcgagtgccacaacactttgtttctttgaacaccaagatactgatgcattcaaaaacagaaataggtaaccaaatgtgctcctcctatccactttgtcaccacaccaatcagaatctgagtaagcttcaattaatgttcttttattcatttatttctttcttttcatcatttattgattcctccttcaactgggccaggtcctcttccttctcttgttccttctcttcttctgtctattctttaataactaattcttggttctcatcaactaaatctccctcatcttcagcaatgatggccctnctacctctggtcatgacaaccttacactcttccttcgg

SEQ ID NO: 198226 - DNA, 454 bp, Glycine max
  unsure (1)..(454): unsure at all n locations
ctgctacccttattcatttgatgtttgcctcatcattgttggtgttctttgttggagactattgatactgagtattatcacaggtacttttctttgcttggtttatgttacagtccatttntatgtggttttatgtgattaatgactattgttgtgcatatagttaatgtttatcatgagtggaccttagatttctgtttgagattcaatacagtgattcttgtggatagtttgcattaatcgttgtattgaatcttgaatttcccgtttggacaattttgggagactcatatttttatggtagattcatgcattaaggttaagatttctttgttaaattggatgatagttcggtacaatgcatgtctagttgttctcttagtgcatacttgattatcanggaattaatctaactaatgtcatgtcatgtacttggagaccaatgtgaaatgct

SEQ ID NO: 198227 - DNA, 216 bp, Glycine max
ttttgggaggagtaagccacacctcttcatatagccccatctatagcacttatattttccctacctgatggccatgattatcacaaaagaaccattgaaagatggacccgatttactgaaaaggaaaatcaactgaggcgtcactgcctaaaccataacataaaataaaggcccaaacaaacctcatgtacaaatatctaaatggggagtgatatc

SEQ ID NO: 198228 - DNA, 465 bp, Glycine max
  unsure (1)..(465): unsure at all n locations
agcttagcccttagatcacgggacacaaattgattaagtatacatgaatgatattagaaaaaagagcattgcatgtgtaagtttgcactattttcccttattaattattaaaaataaatataatgtattttattaatttcgtgcaggagttttttcttcattgtctaattatacctacatttaggtacttgtaatacacaatattcatgttccatcatcaaccttactttatctaaagtttcaaatcaatcatagtaaataaacattaacttgactgtttcaacttccatgcaaacactataatagtatgtctcttgtgtgtntgcatgaacacactccattgaatactattgaatcatttcatttgatgattatattttcttacttcttgacgtttcttaatggagatttgtngttggtagtttgtatcaatggagattcctgagaatcgaaggtggatgtatc

SEQ ID NO: 198229 - DNA, 442 bp, Glycine max
  unsure (1)..(442): unsure at all n locations
ctgagcttttgaatgacttggatgttgccttagtatctttntgcaagtttcgtgtatggggcgcccacgacggtggattggcgtcttggatggagttttaccagaaccatgtctccttcggtgaagtggagttcgcgatggtgcttgtctgcaagttctttcatgtgttgttgggccttgaacagtttgtgtcgcaagcttttgaacattaagtcgcgatcagttaaccaagtgtcgacaacgtctatatttgaatttctcgccacgtattgaggaaggttgggtggtttcttcccaaaggtaatctcgtaaggagacatgcctgtatcggagtggacatatgtgttgtatgaccactccatccacattatgaagcgaccccatgttgatggtttgtcgtgaacgaatgccctgatgtattgttcaacgactctatttatca

SEQ ID NO: 198230 - DNA, 496 bp, Glycine max
  unsure (1)..(496): unsure at all n locations
agcttatgaacactagcataaaatattatcttatttcataacatgctaatcaatatttttttttatcataattctttatatattctctttgtttttctcctctttttcattgatttgtgagatgctaacgtgctttttaatttgagtgcacatatctaaacaaacttatgtgtaaactctgaaaaaaaaaatataatttatgtagaataaaaacatttattaactaaaatcaaatttcatactcaatccctgctcgtcaccctattttgttttgctcctttcttaatcttgtccccaatcctccataataatcctagagccgccacgccacaccccattcacccttttgttcgtgttgcacatcgcaacccaaagccattggagtgtcacctacgttgatagtagagatccatcgtaatgtngagaaacaattcatttttntaatctcagtctctatgttagaaaaaacattatcttatgaattgttcaaatttaa

SEQ ID NO: 198231 - DNA, 436 bp, Glycine max
cttgcatgtgtaagagccaaaagtggcaatgaataatactgtgttctttgattagtggaaaattggtgggttgctaagaattggacatagtcttgggtttgagatgaaccaatatatttttatgtgtgcttccctttatttctttaactgaaaaagggtgttgaatttgttgttagatcttttatcttgttttgatttatcaagaaaactatttttctcatcgtctgataaagtctgtatcaaaaccttctttatttattttatgtttatcagcatcaaacaataaatgtgattttagtcttagaaaaagttttaaatttctaaaaacacaattcaacccatccttcttatgttatttgtttctacagtttggtatcaaagctcagtctccaaaggttgagcatttaatagtgtgtagaggaaaagatccaaatgg

SEQ ID NO: 198232 - DNA, 375 bp, Glycine max
  unsure (1)..(375): unsure at all n locations
agcttctaaactttgtacatgaatgaagttctgataccacttgttagacaagtggcctcagatatcttaagaaggngggggggggttgaattaatatattccaaactgtttcccctaattaaaaatctatttcactttttactcaagttatgaattcccttaatgacaatcttcttaaatattaattcaacataaacaatttgaatatgaatttatagcaattataaataattgagattaacggatcataaaatgccaactcatttttatactgtttctgccacacccttgtgcctacttccaattcccaatcatccctctttagagtatcacttctcttttaaatcttctttacatattctaaacacacaacga

SEQ ID NO: 198233 - DNA, 472 bp, Glycine max
cttgtagagttatgtctcgtatgggtgtaatcgattattgtatatagatgatggaactcaataaaccaaaaggggggtgaattggttttaaaaaaaaaaagttactttaaaaaaaatagagttgcagaaaaaaaaacttttctaaacgaatcgtatcacaaaacaaatatgaatcgaatgtaatcaatacttaatcaatcattccttacacatgacctttcattaacttcctttctttcagaatcacaaaacttgaatctttaaaaccttgataaaacttgaatgagttgattaaaccttgtaggagtgaaagatatgaacaagagaaaatgacacaatattttatactagttcactcactatttctagagaagcttatctagttatcaaatccacaacctggattatatttccactattgttagacttgtcaatagcgtaccaattggcatggtagggttcacatttataa

SEQ ID NO: 198234 - DNA, 451 bp, Glycine max
agcttccttaagaagattcctaaagaagttatagcttatctacacatacctctctaatagctaagctcacctccttgagatgagaagctagaacttagctacacatcccctataatagctaagctcacccccatgacaaaaaatatgaaaatacaaaaaaaagtccttactacaaagactactcaaaatgccccgaaatacaaggctaaaaccctatactactagaatgaccaaaatacaaggcccagacgaaggaaaaacctattctaatatttacaaatataagcgggctcatacttagcccatgggctcgaaatctaccctaaggctcatgagaaccctagggccttcccttggatctctagcccaatctacttggagtcttctacccaatgcccttacggagtaggatggcatcaagagggcccatcaaccgcccccaactcttaat

SEQ ID NO: 198235 - DNA, 472 bp, Glycine max
ctcaagcttcctttatagataaatacataatatatagaatatttatgtttttcttccctccatttccctccaatcaaacactatcaattcatatatatttttatataaattaatttttaaaattattgtaatattagtgaatctcaatttgaatataatttttaaatttaacatactttatggttgacaaaacattgtagttatcttttaatattttattaaatgaaaaacttatttgactgttctgtacacaagttattttttttaacttctagtgtttcttgtgatattattacaaatcgtattttttaaaatactagtttctagcttccaagttttcatatatatttcttttttgtcattgaatatttattatgtcattgataatattttctatataatgtaagactttattatattttttctgtattcttccactcataggattctattattcttacattttgtaaaa

SEQ ID NO: 198236 - DNA, 468 bp, Glycine max
  unsure (1)..(468): unsure at all n locations
agctagtcctgggntagacatgattgtgttcatgattngggacatgnaggaattcaattgggcaaaattggatgagggaaaaagtggttttcgaaatctgcactttatgcagaattttgctgttgaaatgtgcagcagaattttgtataagtgcataaaaatgcttgtgtatagctggttgtgaaaagggtagtacatatggggttctggatattttctagcagatcccaacggtcaaaatgtagacttatgtactacagacttcccgtaaaatttttgagtcgatccaacggttaacgaattggaatgaaggaaatattacaggggtattngtatgtganaagctgtgtatttgagttgtgttttgggcagagtttctgcctttgccctgttttgcttggtttggtagccatgatgattggatgggaatacctgatgttgggaacttggagatgatgggacccgtgt

SEQ ID NO: 198237 - DNA, 446 bp, Glycine max
gcagcagatgccactctactctaaattgttgttgttatattaataaggaagcacaaatacattcattatgaaaacatcatagtggaaggaaattgcagtgctgtgatccatatgatccttccacccaagcataaagatcctgggagtgtaatgattccttgttcaattggagaagtcaatgtgggaaaagctcttattgacctgtgagccattatcaatttgatgccactctccatgtgcagaagattgggaaagttggaaataatgcccactcgaatgactttacaattagctgaccactccattaccaggccatatggagtaattgaagatgttttggtcagagtaaaacattttatcttcccagcagactttgtggtaatggatatctctgaagatactgacatcccatgtatattgtgaatgccattcatgttgaccacaag

SEQ ID NO: 198238 - DNA, 380 bp, Glycine max
  unsure (1)..(380): unsure at all n locations
agcttggtcttccttgcctctgganaattactgtttgatcattcacattccaacatttccttatgatataagctaagtcaatggccggtcttaggttttcataggaggtaagggcatcagatcccactctcgtcgatctacacaaggctgtgattaaagctgggaagcctaagcgagaagagttagactgagctatcatggtcatttgtccaaagatcaaaccaccaatgttcatgtccatccttgtgattaagccatagaccaacctagctatgtttgtgttcaaatctgaagtgcgggaggtatgagctaggtttgagtacaagaacactctccatgtttgagccagggtgtgaagatcttttctgagatactccatg

SEQ ID NO: 198239 - DNA, 453 bp, Glycine max
ccgcaaatcacaaaaaatcggtgattgttctctcttaaacagtcctatttgcttttatcggttaacatggaccgttcaaaagcataaaatcaacatgtaactttaccatttttgcaagaactacgtaggtctgatttcttcattgcaattgaggatacgtaggagcaaaagccccacttttgtcgaccaccccaagagatcattaatggtccaacgccttaacgtttctctcctttcaaaatcaaaagattgtttaatggtccaacgccttaaataacctttgttcaattaaaatatatcttgcgaaaaaggataaagacaacttatccaacgtttagttctcatagaactacgtatgtctgatttcctcatcgcaattgatgatacgtatgagcgagggaaacacccttgtcgaccacaccatatattataacataatatgcatattatcac

SEQ ID NO: 198240 - DNA, 474 bp, Glycine max
agcttactatcgagtcaatgagtcagcatgtttaattatttataccaaaatgaaagtcattgtgggttgttttttatctgtttagtgttcaacataccttcattatgtatatgagtagtggttggccttcccgatttcatttgggaaaggcacacgttgtaattgcatgcatgtaaggagttcaaagtgctcgaaattgtccgcaatcacacagccattcattcaatttgacatgtcatacctttatctttcttagaatgtgagtttttggcctaactcaaccccaaaagctagctcaaggggtgagggtttcccctcacttatatattctaatttgtctctatctctagccaatgtgggacttgggtgtttcccaacacaccccctcacgcccaacactttttgagcttaatgtgtgaacaacaatatgtgggtgaccctttgaatggatctaggatgggctctgataccatc

SEQ ID NO: 198241 - DNA, 413 bp, Glycine max
gctccattctgtgacagtgctgtttcttccactccaaccattgtttactactctgattcacgttcagtcaatgtcttataagctggctggagcctcaaccaataaccatagtctccaattgctaataacatagcgcatggcctacatatccctctagttcagttatttctacttctacataatatagatattcaaactttaaattcaataatttggtttaagatgaagcaaaattaaattagaaacatcttaacaattgccaccaatcattagggacttgaactatacctttagacaaaataacatttcagtattcatgtagtgagatcttatgatatatcaagacttggaatgattattggaagcagtctgtcaagtggcctcgaacatgactcaccatcactatgtaagaa

SEQ ID NO: 198242 - DNA, 298 bp, Glycine max
actacctggaaaatctgaaaagtttgcttactgttttctcctgagggcattgattgatgtgtatggtatgcatctatcttatcattattggcatcatgcatatctgtagataggaaaagttctaagtaaaaattctctgaagtaaactttgttaattgatacatctatgaatcatacacagtatttaactacaaaaggctatatggtaatcgatacagctgcgaatgtacatatttttgaacatgattgtcatcagatctttttatcgatactggcttatcatactcctttaaaggtt

SEQ ID NO: 198243 - DNA, 467 bp, Glycine max
  unsure (1)..(467): unsure at all n locations
agcttgantgaacagttcacttatatnatttcttggttngatgctaggntttgaaattcaatgtttgtgattggtttgaattgatcaattgtatgaattgagtgaattgaaatgcatagatcatatgccttgaatgagcatgcagtcattaaaagagaaagaacatggaattagaatcatgattgaaaatgtttgttggtttgttaggttgattgtgaaggaacacattagccgctacccggtgagagtgtgatctttaattgtgagagaacgactaacattgagtaatgatttttgcatgaatctctgagtattgaatgaatgcgtgaaattgaagatgatgaaggccatgttttgattgaagatatccacttagccaaaaagcttaccttgtgcatgattgattatccctcgacccatttgagctgaagtatgatgtttgatgaccttgacctatcaattatctc

SEQ ID NO: 198244 - DNA, 412 bp, Glycine max
cttacgattcgacatagcttactttgtgtcctaaccgggaatttcgaattatgagaagtgcttgtttctgactctatggcgttgaaaattattataccatattgtttataatttactactatatatgatactacaccgtgttttcattgcatcaagttttacgaaattttactatattaccatggtaattggtaacaaaggtatgactagtcattacagaaacagaaataatttctaattatagttatgtacctatagagggagacgtgcttgaggttgattaattatactaatcgacatcgtaacgatagtcaaaacgcgaactttcatttcaataattcaaagatattcagcgcgaaggtgaacaaaatattgtgaaacctgagaaatagttggtaatatatatctttat

SEQ ID NO: 198245 - DNA, 455 bp, Glycine max
  unsure (1)..(455): unsure at all n locations
acctgaggcatcaagcttctatagaaggttcgttcctaatttctctacaatttcatcttctctcaatgagctggtgaagaagaatgtggcatttacctgtggtgaaaaacaagagcaagcctttgctttgctcaaagaaaagcttactaaggcacctattctagctcttcctgacttttctaaaactttngagctagaatgtgatgcctctagagtgggagttggagctgtattgttacaaggtgggcaccctattgcttattttagtgaaaaacttcatagtgccaccctcaactaccccacttatgataaagagctntatgccttaataagagccctccacacttgggaacattaccttgtttccaaggaatttgtcattcatagtgatcatcaatcacttaagtacattagagtgcaaagcaagttaaacaagacgcatgaaaaatggtagt

SEQ ID NO: 198246 - DNA, 385 bp, Glycine max
  unsure (1)..(385): unsure at all n locations
ttaactgcacaaggctgtgaatattngatgagtatccttttggaaccttcacctgactaagacactgtaaaaaacttatcttctccttcttggacaaagtatggcaggctgggggcaagtaaatattcttcccatcataccttggatgcaactgngatcgtatacccatatcagctagatcttgacgtattcaagtcatcctttgtcatgcctggaatgttaatgagcatcccaatcacacttgtccaaacatttttctccgcatgcataacatctatacaatgtcttacgtcaatatcacaccatttcggtagatctaagaaaatggacctcttcttcatatacaaatctgactttaatacttttttgggtcgtccaaaaatag

SEQ ID NO: 198247 - DNA, 448 bp, Glycine max
  unsure (1)..(448): unsure at all n locations
agctntattgatacaggagtttatattattagcttatttttaataaattacgtnaaataatttattntgataagctcattgaaataagtttgcttataaattattagttattttttttcaattttatttgtattattttattggaaatttctcttatccttttattgaattttaaaaatcctcttacttttttgttggttgtttgaaaaactcttgtatctatttttttataatcatgcaagtgagatatacacattcaaattcttgtttacaaataaaaaatgaatgttttaaaaaattataaggaaaaacactctttcattnttttaaaataatattattagtaaagtatttaaatgttaaaaaataattttaaacaatataattctaataaagtntatttaatttattttacctttaaaaatgaaaatttgatttatcattttac

SEQ ID NO: 198248 - DNA, 446 bp, Glycine max
  unsure (1)..(446): unsure at all n locations
cgcttgacttgagtcatcaagagattataaatatgtgaccatggcttgagttntaaaaaaacaatcaatcatcaatcatctttgaatcatctatctttcaatctttttcaacatcatctctcaaacatctttcaatcaatctttcaatatctttctacagaatttttctgattcatttctcttcatctttctaaaatttttttatcaacactttttcttccgagaaaagttcttcgttcaaaaacttgtggtattcatctttttcattctcttttccctttgccaaaagaacgaaggactaaccgcctgaattcttttgtgtctctcttcttccctttcccttaagcaaaatatgtcaaaggactaactgcctgagatatcttttgtttcccctctacaaagattcataggactaaccgcctgagaattctttgtcccaacacatt

SEQ ID NO: 198249 - DNA, 473 bp, Glycine max
  unsure (1)..(473): unsure at all n locations
cctgcggcatgcaagccttgatggtgttgagaagaaatcactatgtntgtcatcatantttatgnggagaatgngagtgtatgtatacatgaatttgatgatgtcaaaagaagaatcaaacaaggctcattttgcttcaagattaatacaaacaaagccttgattcaagatttcttcaagatcaagccttgcctcacaatgaaaggtttcaagtcattcaaggcacatgtaatcgattaccaatggtttgaaagtgtgtaatcgattacacatcatatgtaatcgattaccagagactctgaacgttgagaatttaaattttaaatgaagggtcacaactgttcaaaaaaaaaaactgtgtaatcgattacactaattctgttattgattaccagagaggatnttcaaggaatatcgccaacagtcacatcttttcattataattgtgaatggccatcaaaggcctataaata

SEQ ID NO: 198250 - DNA, 450 bp, Glycine max
ttagctgtagtttcactgtggttatttgtctcttcattcaaggaaacttccaaagaaaaacgtccgattgatttttctgattattttattcaaagatattctgattattttattactattttgccatttttggttttaaccgagattactgcgtgaacgatcggttggattttattttaacaatgattaaacatgactacaacacaaatgatcggttgaaattcattttattatgtattaggtgagaaaatgactcatataattggttaaagcacgttaaaagggggtatggaaaacaaacgaaatgataataaatgtacacgatacaagtggggaccactattggtgcatagaatgaattgaaagattcgatttcgggaacttaccggttgaagaccgaataacgacgaagaacaaacgtagaacgatgatgaatgttgacaatatcgc

SEQ ID NO: 198251 - DNA, 456 bp, Glycine max
  unsure (1)..(456): unsure at all n locations
cctgaggcatgcaagcnttgaatgctctattcaaaggagttgttatgaatatcttcagactgancaacacatgcacagtggccaaggatgcatgggagatcctgataaccactcatgaaggaacctccaaagtgaagatgtccagattgcaactattggctacaaaattcgaaaatctgaagatgaaggaggaagagtgtattcatgaattccacatgaacattcttgaaattgccaatgcttgcactgccttgggagaaaggatgacaaacgaaaagctggtgagaaagatcctcagatctttgcctaagagaattgacatgaaagtcactgcaatagaggaggcccaaaacatttgcaacatgagagtggtgaactcattggttccctcacacctctgactaggactctcggaagggctgaaagaatacaagaatctggcgtcgtgtccatgat

SEQ ID NO: 198252 - DNA, 444 bp, Glycine max
  unsure (1)..(444): unsure at all n locations
atttntggaggagtttggcattagctcttgagttgtctctgcatgcacaagagtctggccttggcttgaagcttttacatgtgtacgaagttctagagagagaaaggtccatgttccaaagagtgttgagagatttttctatgtgaagatctgcagagatgagagctcgaagcggaagccattctgagagcttgagatgagtctgtgaatgattgtgagatcctagaggtggaggagacatcctcaccacttgtatttttgcaatctttcatcttgttcttctctgtgttgtaaaggacgctctcggactatggaaagttatatcctctgttggatgttccctgtaggtacctgatgttaatactattctatatatgtaatgatgttatgtgttgtctctgtgctatctgtatctcattccagtatgcctgtaccttgatcacg

SEQ ID NO: 198253 - DNA, 414 bp, Glycine max
atctcgccaaatggtgatccttctccttcttggaaggaaccacaggatatggtactttcgcaccttcattcacaacttattctcttatcttctctctagcttgttcactcctactccacactccattcttatatttcgcattggctcgtactgtttctactacttggtcatttaaatctttattcttgaccattaattgtttttctttttcctgattgcttctcacttctacataatcattcttttcgtaagtacctttcttttcagcagctatcttcttggacacaacactacccttatcctatgcctcacaaacctcttactcttgacaaacacatgtcattccactcggatttcttctatttcacacaaaattgtggatacttgcactatctgctaaccagtgctcactaa

SEQ ID NO: 198254 - DNA, 366 bp, Glycine max
gctctgttcgtgcgtacgcacatttggtcttttgatccgcttatcgcacatgagtgaattgtctcttaacgctcctttctcacttatcagatgggctgaagtggtgtgcttgatgtagatgaaacgttgctctcagcgaacctgtactactcatcttcttccatatccttcctcgggcatatccactaagtgttgcgcttagtggacgctcgtctagccatcaaattggcttagcgaggatgtgaaaaatggcactttgcctaatcggctaattcacctgaaaatgagagaatttgactatgtaatacacaaaatagatagttgatgtgactattacctatacttaatagaaagtacttataatac

SEQ ID NO: 198255 - DNA, 394 bp, Glycine max
  unsure (1)..(394): unsure at all n locations
agctttgtcacatcttcactggttagatttccaatctcatcngnanaaggagaaaatttgttcgagtaataaaaaataaatatattcatcttttactcatgattgtaaccaaccacaaagaataaatatatcgatcttctactcatgattatgaattcgtttttgttaaactaacaatgttttaacttttaactaggaaaatgataagattaatttagaaaataatttgaacaagtagcaatgcatttagaatgttatacaagttaaaatattttcagaagtaaggatatagtcattgtttgaaattgaaatataataacctttgatcaattagaagactatgtgaaacatatatctttataagtaaagatatatagttgatgaaattgataca

SEQ ID NO: 198256 - DNA, 419 bp, Glycine max
  unsure (1)..(419): unsure at all n locations
tgcaacgagaatntattggaatggttgaatccgggttctttcctgatattacaacctttaatatccgtgctctggccttctcaaggatggctttgttctgggacctccaccttatcattgaacatatggaacatacgaagatcattcctgatctagtgacttttgggtgtgtagttgatgcatacttggatagaaggcttggaagaaacctggactttgctctaaacaaaatgaatttggatgattctccgcgattattaacatatccttttgtgtatgaggccttatgtaaagggggctttcaaatgagttccgaagcattttttgagtacaatacgcaaaggaaatggacttaccgttctttgatacaaaagtatctcaagaaacattatcgaaagaaccagatattttggaactac

SEQ ID NO: 198257 - DNA, 420 bp, Glycine max
  unsure (1)..(420): unsure at all n locations
agcttgttaaagaactgattanaaatcattatcaagcttgnacgcacatcgntcacgtgtatgatatccactccacaaggtttgaagtagaggagaacttcaaccttataacgcaacgtggcggacaaaagtgggcagttaacttgaatggtcatcattgtcaatgcggaaggtattctacgcttcactgtccatgttcacacattattgcagcttgtggttacgtgagcatgaactactaccaatatatagatgttgtttatacaaacaagcacatcttaaaagtctactccgcacaatggtggcctcttgggaatgaagcggctattcctccttctgatgacgcatggacacttatccctgacccaactactatttcgtgcgatagggtcggccaaaatcaacaaggataagaaatta

SEQ ID NO: 198258 - DNA, 467 bp, Glycine max
ttaccttgtccgagtcatctctcatacattagttggcttatccatcatctttatccttttatgctgtggcatttctatcaagctaatctgggcaggcaaaaaagaaaattcaattcaggtgtaaagtacaacaataacaaactgaaaataggtatatgccatgaataaaaagggcagccatgtgcacaatgttccaacctaaccgggtctaaggagggtagatgtatgcacccttacccccacaaccaaagagaccatttccaggatttaaacccatgacttacaaaaaaggtcataaggcagcaactttactgttgtgccaaaactatttatatgtatatatgaactccaagggtctaattatgtcattatatcacctatctgaactagtaccagtaaacaatccagcaatgtctttaatggattaaatgagcccgattcataactcaattgcaccgtacataaat

SEQ ID NO: 198259 - DNA, 430 bp, Glycine max
agcttgaggatatggggtcccatccttgtggtatctatgtggcggcgggcgatggtgcacaacaagttttccacatccacaatgcgcgcataaacccaccatcccctgttgcccacctccaactgagctcacgtactcccacgtagcccatatcctcgtttctctcaacaccgggtccccatcaatcctcccaagcttccacaacatccaagcaaaacaacattcacacagcacaagctatcacagccaagcaaaacaaagcaaaggcagaatactctgccaaaacaccaaccaaaaatcacagcttttcccactcaaagaccccagtaacaattccttcgatccaatttgtaaccgctggatcgactccaaaattttctggaagctatagtgcataacctacatttgaccgtgggatctactaaaacat

SEQ ID NO: 198260 - DNA, 454 bp, Glycine max
tccttatataaatttaattggtcgctttttcttctgcataagtcaatcgcaagataataaaattcgatcactacatatatggtttctatttgtcttgggaccaattcagcaacccaaattgtgagtcactaataaataataaaattttaaatttaaaataaattaaaataacattcgttcactattgaataattaatttaaaatataaaataaattaaaataatattaggtcggtatttcgggtgctaaagaataattaattttaaaataaatttttttaaaaatttctttcagtttctagtttagtcgctagttaataattaattttagaatgaaatgtacgattgctaatgtggtcactatttaatttttaaatataaaataattaaaaatataattcgatcgcaaatgtgatagctaaatgaaaatatgttgtatttcttgttttccatct

SEQ ID NO: 198261 - DNA, 453 bp, Glycine max
  unsure (1)..(453): unsure at all n locations
agcttagcccaatgggctttataaattcttctctttggtggagagatttacacaaggtatatgtggaggcaagaaccaaaataaattggtttaatagctaggtggagtggaaaattggtggtggcaaaaaaatcaaaatttttggtcaagagcctcttgcaaatacatacatatcctaggcttttattatattctacacaaaanaaaaaatactgttggaagtatgggggcttggataggtgaaatttgctatggcgtcgtgatcggtttgagtgggaggaaattatggtaaatttgctaggattgctacaaaatgttaatattaaaaaggatgtgagtgatgagtggttttggagggagggaagtctgaactgtacacagttaaatcggcatacactacagtgtgtgaaaaattgatgggaagtcagcatatggaaagttttataacatgga

SEQ ID NO: 198262 - DNA, 375 bp, Glycine max
  unsure (1)..(375): unsure at all n locations
ccatgactttactccttggctatatatagtactatatcatgcttgtcgacttttgngacaccagggcattgtcttgtcctattataaaatatataacaaatttgttatatatttaattttagggaatcttgaaaggtttaatttattcgtaaacgttgaaaacatattttaagaatatgggtttatctagttattaaagacgtatggcatgcaagggaattaaatgataaaaaaaaatgacattcatggccactatattgtcctatgcacatccgatgtggacgaccgtccagtaacatacttaaagatgagcataaaaaattttagacaaaatcgtatttttttgtctctcaatttatcttcagtttcggattt

SEQ ID NO: 198263 - DNA, 365 bp, Glycine max
  unsure (1)..(365): unsure at all n locations
agcttcctaaagagattactctttaagatatttacacagtatgggatcattgtagttaacggatcatgtgccaatgctnaatgacttttcaaatcatgtttattctaggaaaagcctcaatctggcaatttagtccagcctgaagatcacagttgttgacttttcactctgaaatcaattagatacatctctctgcatgtaggtttaaagaccaaccagaaaagatacagaaaaattagtctgaagtgtaaacttttctagtaagattgagttgtgtagagacattaaaaagatacagctntcgtgtataatcaaccttggcatgatatgaagagtgagactgtctgaagacatagacaaactat

SEQ ID NO: 198264 - DNA, 350 bp, Glycine max
aaatgagtttaattaatagtttattcttgatttactttttaaaaaaaataaaacttcagcttgacttatattatcttttaaggatgtaattgatatacattgacttgtaaatattttttacattatcaatgttaatgttattcatgagcttttagtgcattaaaaataattaagaaaatagcaatgtgtctctaatttacggttcttttgtggaaattgtaaataatttcgttcttgtatgaatttataaagtagaaatttcatttttgtgaactaatgttgaatttaactcaatttgtatgctaaagaagagaaggtgtgaaatgctgctgatgaactcgtttatcaag

SEQ ID NO: 198265 - DNA, 475 bp, Glycine max
agcttgcttctacaatctccctcttttttgatgacaaccctgaaatcaagaaacacatacacattctttttcctagtcgatcactcacttaattctccatattctcccccttcgtttttgagtttaagcttcacttgaaattaagttacttaattatgtgagttcttgatttaatccctattttctctccccttgtcgcatcaacaaaaagccaaagtgcgtaaaacatacatgattttacaaaaatgatacacaaagcatccattgtaaatcaataataaaagattctaaactaatcatgaagcaagacatgaatagactaaattaaaatataaaccacatagccatataacataattcataaatgttcagtcatactacgcgaatattaaaagaaatactaaatgttcaatgtcataataatatagcccaatacacggctagaaattcaagtactaataatattaataaatat

SEQ ID NO: 198266 - DNA, 294 bp, Glycine max
cttcttctatggacctgatggggcctatgcatgttggaaaccttggacgaaagaggaatgcccacgctgttgaggatgatctctgcaaatttacccgggtcaactttatcacatataaatcaaacacctttgaattattcagagaactgaatctaacacttctaggagaagaagactgtgtcatcaagataatcacgaatgaccatggcatagatttctaaaacatcatgtttactgaattctacacatcttaatgcatcactcatgagttctctgcaaacattacaccacaac

SEQ ID NO: 198267 - DNA, 494 bp, Glycine max
  unsure (1)..(494): unsure at all n locations
agcttatggtgttcaaggttagcggagccttgggaacatattattgattccctagatntaaactctaaaaccctttgttttttcttttcttttatgtaggcattagtaatgaactnttataatttctttattttctatgttacctttatttttgtctgaaatatatnnttttcttaatgttatttntatccgttgtttctgaaatgcaaaacttttgattctttctttgaactagacaattagaattgcaaagaagttgattttttcattgtgataccacaagtctaaattttattttatttttactttntaatcccaatctaataatttactccattgtttgccttcaggcattgtgtgcacatttactaaatttagacaaagaaagcctggacctttacctagtaccataaacaacaactttcagggactagaatacatatctattgtggccgaaaatggaatataagtaattcgattgggtcatgagtcat

SEQ ID NO: 198268 - DNA, 443 bp, Glycine max
tgaggagacgctaaaccaattcatgcatatatcaatgtctattttcctaagcacaaatacctccatcaagaacttagaaatgcatgtgggacaattggccaaacagatggctgatagaccctctagttgctttggagccaacactgataataaccccatggaatgagtgcaaggccatactgaccataagccattagatagcacaatgagaggcagaagcagaaaaagaccagtctgatgaaggaaggacagacagagatgaagaaagagaagaaggaagatgaggaggaagagaagacggtcttactccctaataacaaaagccagttagcccgagaggctaatatagaagaaccaccagtccctctatatgatcccccattttctttattccgtccatgaagaacatggagcctacttcaagcgtttcttggaaatattca

SEQ ID NO: 198269 - DNA, 432 bp, Glycine max
  unsure (1)..(432): unsure at all n locations
ctcgactatncaaaggagttaactcaaactttacatgttcgccattaatatctcacgaataccttttatatatatatatatatatatatatatatacgaaaggtcaagcagatcaatcatatcacatagcataccacatatcccgcacacaaaagaatgactgagaaaacaaaatggaaacttgatacaagactaccgacctcgttcacagggacatagagacttctttgactnttaaactggaaaaataggcatgcaacgtaggccacaagcatgatgcagctgctgaatctagaaagagacaactctgactccccaacatggaccttagcctgtgtgtagtgagagcagcaggaagatgtatgcccataactgccatcagaataatcctgagttacagaagcaattcctgcatgctaattgaatagctac

SEQ ID NO: 198270 - DNA, 359 bp, Glycine max
  unsure (1)..(359): unsure at all n locations
agaagtcgaagagacacgacgatccatttatagacttgacccggattgatataatgaaatagatatgatactatttagaataaagaataagtcattagaaattaataaatcaagtctgaataacacctatgttatagttgtcattgacttatacgaattaatatatttcatacgttacataataggattaagatggtcataccattaaaataatagttactactcgctacccttagaatggggtgataaattcagaaggcggggcaaaatcctttattatagacatgcaactaattgacttactggcgtttgttacgatgaatcgcaaantatgattaatatattatactattaatggc

SEQ ID NO: 198271 - DNA, 442 bp, Glycine max
  unsure (1)..(442): unsure at all n locations
ctgaggcatgcaagcttgatcaaaacaattatctaatcatttattccactttattttataanngcngattcaaancattcgcataatctcatttcatacaaaacaatccattgcatatccaattcaaccagttcattgttcgaacacgctttctgtacaagcaatcaactcaaagtactgaaatttaaataactgaaatttaaagaactgaaacataaaggctgcaatttaaatgattgaacataaatcataaaataactgaaataaactaaattgttcatgctttccagagnataaactaaacacaatntaaacaacttaacagaatttaaacatcctgctcatcctgtggctgatcttcattaagatccaatgctaaagctgctgatgaatcctgaataggctgctctagctccatgactggtgcaaatggctgggctcc

SEQ ID NO: 198272 - DNA, 386 bp, Glycine max
catggagacaaccatcttagaatgttcgcacattctataagatggtcgttaaaaattatcgtcgtagatgcgttgtttataaattaagaaaaatatgtatttcaagataataatattgattagggaataatgatatgaaaatattttgattctgttttgaattataataaatttattattaagtttttaaatacaacaattgttattagaccgcaaaaatggaataaatatgtgaatatctaattgaaaaatcagaacatcaatcaatttgaatttttttcaaagactaaagctgtaatctttgtgcaacagacgagtatatttttggactcattcaaataaattctaactatgttgaccgattaatgatgtctttccaaaaatat

SEQ ID NO: 198273 - DNA, 437 bp, Glycine max
  unsure (1)..(437): unsure at all n locations
acctgagggcatgcaagcttgtattctgcatgtcatatncatattatagtgttttttaaaannnnagaaagaaccccgcatgagctatggagaaaaagagaaccaaacctgaaatatcttagagtgtgggggtgtctagcaaaggtaaacatccccattaataagaaaaggaaaattggaccaaaaactgttgattgtgtttttgttggatactctatgcatagtactacttatagatttttggtagttaattcagaagtgtctaaaatttctaatggtactattatggaatctagagttgttactttcttagaaaatatttntcctttgaaaaataaattgtctaaatctgtttgtgatacttcttgttctaattngtcttcttggagtaatactaataaggacattgtgtttgaacctatgaggagtaaaagatc

SEQ ID NO: 198274 - DNA, 426 bp, Glycine max
  unsure (1)..(426): unsure at all n locations
gagatgttaactntgtggtccttgtgcagacatcatctgcttttcttgcaagagtcaaaggaaggctagggatgtcggagtatatacatgcgagtgacaattatgtaataaggggaataaaaacaatgacgtttttacatataatccagttgttacttaagttccccctagtacattctaaggcggttcctcaaaaccgtcttagaatgtgtatcataaaaaaaaaattattcttcttaattacgaaactgtcaccgcgtgacattcgaaggcggttatgtataactgtcttagaatgcggcgtcgaaaaatgtaattttttagtagtgtagaaaccaagtttctaacacagttgtgaaaagtcaatactgtccatgatggcagtttcaaaaatgatttataatcgttataaaatatataaaataa

SEQ ID NO: 198275 - DNA, 446 bp, Glycine max
  unsure (1)..(446): unsure at all n locations
agctagtccacanaaatatgtgtttgaatgtntatcatttcagttccttaccaagtaaaatggatcatttttaaggtccaacgccttataatgatcacctttcaagtaaaaagaatcacttgattcacgcataagaaagaactacgtaggtctgatttcctctttgatggagggtacgtatgagcaaaagccccgcttttgtcgacctcaaaaaataaaaagaaataaaagttaagataacacaatttcacaattctaaaaaataggctgttgtcctttgagacaaacgtgagaggtgctaataccttcctcaaacgtaaatacaactcccgaacttataattntcatcttgaccggtttccttctggttttccgacgttttccacaaataaacgttggtggcgacttcgcacatcttttctcctttggaaagcgcacccgtgagc

SEQ ID NO: 198276 - DNA, 452 bp, Glycine max
tgctacccaaattaatcagttcacccgcccagaatgttttttatgggcccaatgctatttacaccccctattttgatgattgcagcccccctccacagtgtcctatatggtcccagatgggcctaatgctatttacacaccccattttgatgagtgcaccccctcaaaatgtcctagatggtcccagatgggcccaatgctagttataccccctagtttgatgagtgcacccctccaaaatgttctatgtggacccaatgctagttacaccccagtttgatgagtgcagcccccctccagaatttcctagatggtcccagatgggcccaatgctagttacaccccccagtttgatgagtgcagcccctattttgtgtgtttggctgatttctcttcaatacatcgtgaaactgtacgggatacacgtgcactagtgttaaacatcttaaatc

SEQ ID NO: 198277 - DNA, 339 bp, Glycine max
agctagattagccaattacttccaagttttgaatgtattcaacatcatccaccaaatttcccactttattatacaatactatgttcaactttccaacatataagaacaggtttaatctcagtttctacttgtgttatcggataagcaaatgattatcacaaaacagactatcatggacaaagttcaagttatgtacccaacaaatttagttaaactaactgttgcaaaaaacctaattacatgttaaatgtacaaatcacgtataaagggatcacaactcacaaggcatgtgtttttttatgagaaaatataaataataattagacaatactacatcaa

SEQ ID NO: 198278 - DNA, 466 bp, Glycine max
ctaagcttcagacctctccaggaattagactcatgtagccttcttttttttcttacacttttctcgttgcaatggcctttccacacattaactcagttagtaacttggaaccattatatgaagacacgatctttattgaactgttgcaaatgcaaggaatatgatactgcactgaatccagttggacattaaacgtgcagattctctcatatgttcaataagactagtggttctgtatttggtcacatgcggaaggtatccactactgaatgaatgaactcaaactcaacatttctacttcctcggttcttcttccactatgttatacaaacaaattgaaagtggactttgttttctatctcgtggggaaattttcagctctaatcgatgttttgtttcaagtcttatcgataatatttatattaagccaagctggctataattataagctcctcacaagtgaccc

SEQ ID NO: 198279 - DNA, 400 bp, Glycine max
  unsure (1)..(400): unsure at all n locations
agcttcagaaaancaagattctttatngcttctcattanaanagaaagccttgcttggggaaaaatagaaaagaatatatacaaactttattaaatccattagaatgcaaaaccttgctcgtggaaaaatagaaatgcttaaatgacccaagatcatgcactgaggcaataacatgaaaatagtgcagaggatgttatgtaaattatttggtgcctattcggagatatatcttgcgattcatgtgtcgttgttgcagtcttctgagcctaattggaatactgtcactgcatggttttttttttttttttttttattgtcacgtgggaagcgtatgtatacgaggctatatttacaagggtaagagtgtggtgttatcatggacttttctgtgtactgata

SEQ ID NO: 198280 - DNA, 420 bp, Glycine max
  unsure (1)..(420): unsure at all n locations
ntagatagcttcttgtattcgattacgacaactctgtttttgattaaaacaaataattatttcctttgaagtaacttttctaacttagaaacttttcttctcactaaccatgatgatgcatgatgcaatatagatatcaaatgtactaatatgcaacatccaatataacaaccaatacaaatgtcactcaagggagtcgggcatgtaaaagccaaaaattcttcaagcttttccttgagcttcaagctatagcctttatgttgttcaccatgttgatcatgttgcttcccctatctctaacaatgttaagcaacatcgtagttcaaggttaagcttcctatcccctttttcctccataacctaattacacaaatattgtaaattctagaaaacgaatattcaatgttcagaacaatatct

SEQ ID NO: 198281 - DNA, 448 bp, Glycine max
  unsure (1)..(448): unsure at all n locations
agctngagtaagaaattctcttgcatgctcctcttataggaataaagctacaaaatgagatagagaagtaaggattacaaaatacttgctaaatgaaggagacagaatagccactggctatgggaatttcaggtgttggtacaagaaagtaggctcctagcagattgaatgagttaattgagattttaattgaacgcatgtatacttagttgaaacttgctaatgctggatgtgtatgttatgtgtgcagtaagaacatatttgcatgtgttttaaactctttaatgggctggttctgtatgaggagaaagttntgtaatgggaagatttcataagatgcaacatgtgtttaatctgtcacaagctttgaatatatttgttttgagtcacagtcctgccgattaatttatgtgctctattcataacttgctaatattgtttgaagatc

SEQ ID NO: 198282 - DNA, 456 bp, Glycine max
  unsure (1)..(456): unsure at all n locations
tttctttcttcattattgtgtaaaaattaatttgtttattaatttagtacttaataaatatatttatgttaaaaagtaaagtaaaattgtaatcaaatatacttttatattcataaagatgtttttaagattgaagatgcaattttttatgatgaaaatgatgactttcgttgaagaaaatttataatcattcacgtaaattcttaaaaattgacattaaataaatgttagatatataagataataatgaacaaagttatattgtttaagtaaatataaaaattaaaattccatttgtctaagtaatgcatacacatgcaagctattaaaaaactattaatgttaagttttaaagcttgaatgtgagtaaataatcaagtttaacaataaacttgatcttgtttaaataaatgagtttgaatgaatatttaatacgctaaattngaataattcaca

SEQ ID NO: 198283 - DNA, 429 bp, Glycine max
  unsure (1)..(429): unsure at all n locations
agctagtaggattatggggtacccatcttatgtggtgctaggaggcggncgggcgatggtgcacaacaagttttccacatccacaaatcacgcataaacccaccatcccctgttgcccacctccaactgagctcacgtactcccacgtagcccatatcctcgtttctctcaacaccgggtccccatcaatcctcccaagcttccccaacatccaggtaaaacaacattcaaatagcacaaactatcacagccaagaaaacagggcaaaggcagaaaactctgcccaaaacaccaaccaaaatcacagcttttctcacttaaagaccccagtaacaattccttggttccagttcgttaaccgttggatcgactncgaacatttactggaagtctttagtacataagcctacatttngaccgctgggatct

SEQ ID NO: 198284 - DNA, 406 bp, Glycine max
aacataccgttaaccccatgtctcattttagtctttttccccaacttaaagttcaagtcatccatgaatcttatgacgcgtgacactaccatagggaataaggatcataaacctttttaagaaactggaagcaaaacagacaagtttggtccaatggattttaatgctcataccattttacaacaacaaattagtgtttcatattctcatgtcatcgtgcatcatatcattgcattgcatttaatcccttataaatttccttggcctatgggagggttttctaacatagaacatgaagttatcaagttcagttcttacatgcaaaccttattttaagtacagtacctacctcacacattttactttcatgttgtaagcctggatacaacaccaacattcgacactt

SEQ ID NO: 198285 - DNA, 304 bp, Glycine max
  unsure (1)..(304): unsure at all n locations
atccttaagtcacctgcggcatgcagctngaagatattcatgttgttgtgtatcctacatcanacaattggattattgatgtttctatcacaatcacgtgattgttgacatctccatgtgtgtgtacaatgtgattatgtttccatttttaggattcattcgaaatattttgnnnngactatgaataaatgaccaatcttctctttatttaaaatgtttgattcctattcaatcgactataatcttttgatgtgctgataatctccacatcatgccttgtttatctgcatgataacctatcatg

SEQ ID NO: 198286 - DNA, 346 bp, Glycine max
tagctccatttatcttaagccttctctttttccctaaccccctaatcatcgtgatcatgtgacctgaacggtgtcgattatgacgccttctttgcgcgcctacgtgactcctattgcacccttcattttcttgtgaccactaccacgcaccccgctaccctatcgaggttgatgggaatgactacatcttcatcatcaaagatgagtttcttgggatggtggaatgggatgagctgctggagcacgctctggtctacagtgactacaagggcatgctgaagtaaaaaaatgcggagtgcctcgagaaggctgtgacgtaattgtgagggttgacattcaaggggct

SEQ ID NO: 198287 - DNA, 418 bp, Glycine max
  unsure (1)..(418): unsure at all n locations
agctntagtatgtatgccactcttcttgtgtggtatacattggaggtttagcaagatgctcatgtgcacataccatggatagcacatactggaggcttgatagtatactcttgaatatatgtcacttgccatgggtgacatatactggaggcatagcaatatgcttatgcgatcatgacgtggatggcacatactaaaggcttaatagtatgctcttgaatacatgtcactcatcgtgggtgacatatgctagagacataattttgtgctcttgcatatgtgtcactagctgtggatggcacacactggaggtttagtggggtgttcgtgcacacatgtcactgcagtgggtgacatgtactggagtcacagagatgatacgttcttgaatgtgtgcactcgctggggtggccatact

SEQ ID NO: 198288 - DNA, 355 bp, Glycine max
  unsure (1)..(355): unsure at all n locations
agagaaatcaaacatcgtggcattcattcgttctattacccaaacgtacttagtattcagagtgtgttaagaaaccacgcaactctattcaaatacttgaaaactctaaatgaaaataatttgaattgttaatttattaattattaatttaagaagcaagagcagaatgngattatggttttcataaatttaagaaaaacccctattgctatcattaaataaaatttcacaaaaaaaggagagaatatattacccctaattacttaacatagtctatctggtaaatatgctagctgcattcaaaaaaagacaaacatttgtcattatcacaaattagttttacaattttacttac

SEQ ID NO: 198289 - DNA, 435 bp, Glycine max
cctgctctaacagcatcatctcacaatatgtgattctactaaatcccttttctacccttaagcataatctcaaaggtaagttggcctcatgattcttcttttgggctattcctcaatctgcaccttggtatgatctgcttgcacctctgctgaatattctatttgtacccctgctctgtggtctgtggtttccctatcatctcgcggcccttgggaaatcaccttgtcctcaaggtgatagtcatggcaaagagtggaccaatcctcccaagatgtatcatctggggataagccatgccattgaaccaagacttcccaagcgtccaaaggggttctgcgataatccacaatttgctgccggagtgataataggttgatcattgtgatatcggtctggtaaaggcgcgggagaggtggtctccagttgaccactga

SEQ ID NO: 198290 - DNA, 382 bp, Glycine max
tttacttaaataaatatttttttgatatttttataaaacaaattctttttataaagtacttattttttaaaaaaaattcaaacataattcacccattaagccgttagagatggtcctatcatctaattgcttaatataaaaataggaacttgaaaactatacccactactgtatataaaataatttatatcctatactcctcttttttcccccttaattattattttttagtccggaaaagggacagtgttacccaaagcacaagcttctcttgtgttgaaacaattgcatcccactttgataagggacagaggcaatacaaatcatttgcatcttgtggaactaatcttaagctatgttatctaatataaaccattagcat

SEQ ID NO: 198291 - DNA, 448 bp, Glycine max
  unsure (1)..(448): unsure at all n locations
agtcacctgaggcatgcagcttattaagaggcttctagcacactctatacatnttctcanagatcccaacgggcagatcatggaaacgtgttttgtgaagtcgcggatcaaatttcgagaagatccaacggtcaatgaaggcggggcagctgttttaccgagacagctccatgtagctttctctagaagcttcattaagaggcttcctctagaagcttcctcgtggcttctttgagaagctttctcaagaggcttctttgagaagctagatccttatctatccacccctctattaactaaattaacttccttaaaaataattacggatgaaaataacgcaacaaataatcaaacatcaaacataattactaataatatatagatatatatatcagggtgttacacatcctacccttcgttctcgtgtaccaggaagaatacccttggc

SEQ ID NO: 198292 - DNA, 424 bp, Glycine max
taagcttagtagcaacagaattaaaattcttcgaattcgaagcttattttcatcctgtttcgaagtagtctcactctgacctaaaatgtggaatatcttccactcccaaacctgctggagctaccagatacttgttcagctgaattagaactatgttccgtcccatcaacatctctaagaaattcaggctccttagtggtaaccatgaagtccatcaagttgcggctgaaccccaaatcagaatacaccctcaaggcatcctagatatgaaaataaatactactagatatagcagtggcagaacattaaaaaaactgatatattgaataatatcacaataaagcacccatatatatgttcatatcctctactgtcaaatcagacaaagaactcatatgactgtgtctcattccttatgcagtag

SEQ ID NO: 198293 - DNA, 481 bp, Glycine max
agtcacctgaggcatgcaagcttcaatttctaagttaatagggactattgtctccagttgcagttctatgtcgcataagaacaaaaaggcactacccgtgcaatttatagaagagaaagaatactataagaataagctaagaaaagagagttggccttacaaactgatatagtatggcaattaagtgtgaaaataaaatctttgacaacagcgccaaaaacttgttgaggtattggcaagtgtaccaaatcgctctaagtagtaaacctcggaagtccgagtatcgtttccacagggattttattgcactatattgagtactcttcaatttgcaagtaaggaataaataataaaacaggaataagtgcaagaatagattgttattactagatcaaatagttttagaaagacaattaatagaaatgccaagaccggacaaacctagttggcctactatgcatgtaaatatgatattcattac

SEQ ID NO: 198294 - DNA, 447 bp, Glycine max
tgaatttatgtcatgtggatatttcttttttcctaagtatatgttatttgtaagtctttattgtaaacatatttgttttattttgacagggtcatgggaacaccaccaccgtcaccctcgtagtcagatgttcagtcagatggtatgtctaggaatactagacaatccacatagctcatactgttgactttaagaacttggattagccgagaccaactctcactgttgatgctgctactatgcgaggatcgggcccacataaatagaagttccacagctatctaagggtcacagccatagaaaaaattccaattttacataacagcttgatatatgtaccggacgcgctaaaggacctagtatatgatgacattttggttagtgacgtcattgttaagcacggtatatttgtgtgccaatttaactgtttacacctttgatattatg

SEQ ID NO: 198295 - DNA, 464 bp, Glycine max
  unsure (1)..(464): unsure at all n locations
cctgaggcatgcaagctntaggacaaaccttcaccaaagcttatataaacttgttgatcctagacaactttcccaaggggtgggaaccttaaacaacaaccatccaagaagcttggaaatttgaaaaccctagcatgggataatctattaggcatcctaagaagttatgaattccatcttcagaactgagataatcaaccaaagaaagatttatttgcccttaagtctagagagacaagctccaaaagattagaaaagaatgcttctctaaatctcttaaagtgaagatagattattctgatgggtcgaaacaatagtttggagattccacatatgatgaagtagctctcatgtctatgaggttcaagcaaatgatgataaagaaagggaagttccaccattcctccaaaagaaaggacataagattcaagatgaaatacgaggaggatagcatngaaatcatc

SEQ ID NO: 198296 - DNA, 459 bp, Glycine max
agttaaagtgtcgtttcggtttaatcaattacatattgtgctttattgattactctgctgttttgagacaatgactaatttttcatgagtctttgctttaatcaattaccaagtgcattaatcgaccacttctctcttttttaagttgttcagagatgaacaagaacactttaatcgattacttaggtcatctaatcgattacatttttcttgaatggttttataagtgctggatgaacacttaaatcaattacttggttaatctaatcgattacttcattgaaataatcaattaccttatagatgtaatcgattacagacgattattactattgtttctatagataaccagcttgtattcacatgtacacatcatgaaatcattagtggatattcagtacatctcaaaatatatttttctttgaatgagcaagattgtgatcgttcattggtaacaag

SEQ ID NO: 198297 - DNA, 447 bp, Glycine max
  unsure (1)..(447): unsure at all n locations
agagacctgaggctgcagctgctctaattacatagaagggttatctanggttggaggttgnacgccannnttgttttaagagtagtgttccactggtaaaactaactttccaaatttttgccttcgcaggaaatggccccgatgaagctcgcctcaaaaaggtccaggaaggataaggcagccgaatgaactacttccgctccggagtattgacagtcaccgctttaagagcgctgtacaccagcagcgcttcgaggccatcaagggatggtcgtttctccgggagcgacgtgtccagctcagggacgacgagtatactgatntccaggaggaaatagggcgccggcggtgggcatcactggttactcccatggccaagtttgatccagaaatagtccttgagttttatgccaatgcttggccacagaggagggcgtgngtgacatg

SEQ ID NO: 198298 - DNA, 320 bp, Glycine max
  unsure (1)..(320): unsure at all n locations
aaatcaggcttgacctggaaatgggaccttgtcacctaccaatactgtgnggatcacactatttgtgaaaaatacagcattatcatggataaatttgcccagttttgtttgacacgcagagacccttcttggtaggtatgtactttgtcattttaattgttttccacaaaatattaacttggtataattcattgtaattatcaatttcattaatgcttgatttttgttggatgtgcagaacaaggcacatgccattcagatacataactctgcccccccccccccccacgtgttgtctcgtggggagtatgaatatttat

SEQ ID NO: 198299 - DNA, 457 bp, Glycine max
cttaagtgacctgcggcagcaagctaggccctaaaggatatgtcttctttgtcacaaccaaccaatacaatggagcataccaactacgagagctggatggcaaagcaatcccccgaacctggaatgccacccacctaaagttctatttcacctggcctacactctaaggccaatattgtactctttttcctactcaagtcttttgtcccaaaaatagaatatctaggattttggcttggagggtttttaatgaggtacatttgggggtaacgaagggaatttgtactcaattaaatacattgaataaaattctacatcccttcttgatcacatttctcttatcaagacaagagcatccatagtcatacctctgaggctcttaaaacccaaagtctgcctatcactagtcaaacgtgggggagacacacggaggagacacacgacacgatcgcaatga

SEQ ID NO: 198300 - DNA, 449 bp, Glycine max
taattaacttgacgctgataatacctctattttatttaaaaatatatacatcaagtgctcagttgataattctcaacaaaggattttaaccctccattactagggagtatctttcacaaataggagaagggtttcagagaaaataccatattacaaagcattggggatgtctcctccacctctacctccacctctaagaacctagaaaataactctaaaatctataatctacctaaaagttaggacctttgcttccttgctcaactgttcctctgttctctacacataattcgcatgcaattcatacctctttcacgtcatcacgctctttctcaattttttatgtgcaaatcatgcttaaaaagggctttctgacctcgaaggcgtgcttagcgcgagtaagtgtgatttggcttattgcccatcttgcacttatcacataagataca

SEQ ID NO: 198301 - DNA, 301 bp, Glycine max
tgcaagcttgaaaagtgttatttttcaccttctcactaatccaatctggtggcttagcgagtgtccgcgaagcgcaacactcatgggctaagcacgaggaagactctgccagaagatgagttgtacaggttcgctaagcgcaccgcttcatctcactaagtgcaccgcttcagttcatccactaagtgagaaaggtgcgcgctaagccgaaattcactaatgtgcgctaagcggtccataagtgcgctaagtgcatgagcacgaacaaggccaccaagttccatagagatttgagagattt

SEQ ID NO: 198302 - DNA, 466 bp, Glycine max
  unsure (1)..(466): unsure at all n locations
taagctctntcaactgcacaaggctcttaatatttgattattttccttgtggaaccttcacccgtcgaagacactgacaaaaaattatcttctcctttttggacaaagtatgacaagctgggggcaagtaaattttctttccatcataccttggatgcaattgtgatcgtatccctatctcagctagatcctgacgtgtattcaagccatcctttgtcttgccctgaatgttaatgagcgtcctaatcacactgtcacatacatttttctcgacatgcataacatcaatacaatgtctaatgtctagatcagaccagtacggaagatcaaagaaaattgtcctcttcttccatatgcaagtctgacttttatccttcttttgagtctttccaaatatagtattcaggtgttgaacccgttggtatacctgctcactagtcaactgtatcggcgcaatatcgtgctc

SEQ ID NO: 198303 - DNA, 451 bp, Glycine max
  unsure (1)..(451): unsure at all n locations
agcttctaattctcccattctatttaatatgactccatctattcccttttcatataaagcatctccaataataacataatttataactttatattttatctttcaatccataaataaattaaggttttgaagataatcgaataatgggtttctccaatcacaagttgtgaatacatttatcttcaaaatttctacttcttccttcaatttttctttaatagttattaaagtttcatttttttaacttaatttattaccagatgcaatttgagccaagtcattagcttctttgtttttctctcaaaacacatgttcaaattcaacttcatcaaatctacttaacaatatggatgcatatgaaaaatatttaagcaaactactcttgatgcacttaatattatgagttaatngatagaggcctaactcaaaatcacctctaatcaatacatgt

SEQ ID NO: 198304 - DNA, 464 bp, Glycine max
cctaattaacctgaaatatagagaaaatgattattattctcacaaaatgaaaatactaagtatttattacctatacttaacaaaaaatacctatatcactacaaaataaccataaattgggagagtttgatacaatttatacaagtttcatacacaaaagttagtcattttcaccgactaacaactcccccaaatttacaattttgcttgtcctcaagcaaaaagagaatagctcacttgtcctcaagtgacaatgacatgcagtgactatgtacaaaggtgtatgcaacaaaagttactgattgcatgataaagggatggagtaaaatgccctcatcacttgtctttcacaaggtatgcagttatccaaagagaagaataaaatgtaacctgaacaaatagatggagttaggcataagacaaatgtcaatgaaagtagcttataccatagtctcacggctact

SEQ ID NO: 198305 - DNA, 411 bp, Glycine max
agctttgtgtacggctggtttctggacgtgtctattttgccaacacatgctgtaaagacatcaacatcttttcgataagaaataaaaataccggtgttgttttgaaccataaagtgaaggtcaacttttccttcttctttaccaaaagatggtggagccattggtggggaacacccggtgaagggagaggctcatcgggggacttgttgagcctgatgatgaccttgactggctttgaaacctcccataaagatgacaaatgcgtgttatatacccacgtcggttggtattattattgtcatatgagtaacgttctttgaaccctatataaaatctgactttcattgtatctttattattcgttagaccccaatctcatactctattcttcatgtatccttaattaacatt

SEQ ID NO: 198306 - DNA, 447 bp, Glycine max
ctgactcgtttgcgtcactctcgtatgaatcagactgtttgtcttattgtacatacgtatgcctgtataccgatggaaattgattggatctttcagttctactgtatcgatattaccatgaaagaatccatgatagagcataattggacaaatacttaatatctgttggaatgcgtgatacttgagaattgtattgtattgtgaatggagcaaatacttgttgaacctgctctgggaagatctctggtattgagccaaacatatccgtccattgaaaaaaccattttgggaagttcgagactacgttcgtcatgaagtatatcaggcataattgctttgagcgattattgtggtgccaatttaccttggtccaagcatcaacataataccgatatgtatatcctacaggatcaaatggaactgaagtatttttgccttgtttaggct

SEQ ID NO: 198307 - DNA, 427 bp, Glycine max
  unsure (1)..(427): unsure at all n locations
agcnttngttccttttttatattaagagatgttctgaaactcatcatgttgnctaaaaaagccttgaggtggatccatgtgctctgatcattcattagtatattcatgtttgggtggcatactcaccactatttgtttctttagggaactcaccataactaaaaaagcgcaaaggcacccctataacacccgacctatcggccttaaaagatcaaatggcttctatcacggaggccatgctaaagattcaaaaaactatagaagataatgctacagcggccgcttccaatacagctagagaagtggaaacggtgctacagccggcaataaacttgggccgagacagaaacacgacgggttttaatcagaggtatagtcctcaagcctacccttatggtttgcccttcggacttcactccccgtacca

SEQ ID NO: 198308 - DNA, 386 bp, Glycine max
agcttcgggattgagatgacatgtcgaattgtgccccccctgccacatcagtaggagctctataagtgtgggtctaggacacgaaggccaagtggtcacgatatgcgaggatgactctccgagtaggtcggattaggtacgaccattccctcctggtttctgactaggaaattggtgagtggaggagcgcctggacatttacgcgacaagcataatgtaaccctttgtggctgttaaactctacgattgggcctaggctttaaagtttccttttgataaggcattatctcttttgtcccaaattataatataaaatcttgcttcatcggtcctgcgcctctacccattctcattcacttgcatggttatttctctacgcttaaaat

SEQ ID NO: 198309 - DNA, 224 bp, Glycine max
  unsure (1)..(224): unsure at all n locations
cacaaaaggaagnacgaagnatttattacctatacttaacagaaaatacttataacactacataataacgataaattggaagaattcgatacaatttacacaaatgttatacataaaagttagtcgttttcaccgactaatagtcatccggcaccacttgcatccatagacggctagtccgatgacacgtggagacaacatatggttatttgccacccttgtca

SEQ ID NO: 198310 - DNA, 457 bp, Glycine max
  unsure (1)..(457): unsure at all n locations
agctngtccctttctggaatgtccctttttggtcacaaccaacttaaacaatggatcattccaactacaagagatggatggcaaagcaatcccacaaacatggaatgccatccacctaaagtnctactttaccttacctacactttaaacccaatggtgtactcttttccctactcaagtcttttatcccaaaaatacaaaatctacggttctggcttggagggtttttaacgacgcacatctggggtaacgaaggggaattgtgcttaattacataaattgaataaaattctacatcccttccttttcacatctctcttatcattacgactctagtgtgtgccacccatggcaagtgacacatatgcaagagcgtataacaacctacccttatagcagcttgctcttcaatcaatctcttctcataagcagaacgcctccttccatcctgaaggat

SEQ ID NO: 198311 - DNA, 358 bp, Glycine max
aactggccacccaaacaccaatggtgtatattaataagctcttacttcttaacatacaatgtcatcccattaatgatttgatgaaagacatggtgcatttcaagttatgtttttaatgttcaaaaaagtaattcattaatactaactcagacttagtcacccagttaatatctttatgcttgaaggcaaagtacaattaaatctattattcatggtttgaaagttgaacttttaattgatattcaagcaccttctcattatcgaagagtatgtaacacatggattttggcacaaatctactgaacttttttgaattgttgatatgctattcttccattactagtctctaaattaatct

SEQ ID NO: 198312 - DNA, 484 bp, Glycine max
  unsure (1)..(484): unsure at all n locations
agctntaaagccacttaatgttaagaatgatgtggtatgttntagtaatagagnttatgtgccactagatacaactaatcaacttggtggtatgtaaagtttagtcaagaattatttctgtcaagaatcgaacttgggaactactcaaaccatttaatcttaactttaacacattaatcacttgtactcaatcacttggttattagaaacttaagatacgaatcaaagaagtggtctcaagaaccaagagaggttctctcacacaaagtttataattctttcaataaaatgagtcttagtcttctcaaagttaaagatagactatttataccatgatctataaaactctaataagaggccccaaaactaataatgtcagcagaggcccaaaaaatagaataagcattcttaatctataaagtngaatcaaattatgatctntaattctcctgcatcatccttctccatanatgaagtcatcttc

SEQ ID NO: 198313 - DNA, 433 bp, Glycine max
ggaaaatgtaattataaaattgagatgcccgtttattcaccatttcttagttaaccatgcattatgtaccatgttcaattattttgtttttaagtgaaacgggtttatgaacccaacatggttggctcctaacacatgaaactaagaatgtagtgtgaagtttcacgcttcccccttctttgtttttgttttgtagaggaaaacgcaaggatgagcaaacatgataacaaatggtatgcaattttgcagatcaaaaagtttgttgaacgcatatgcatgatgatgccatgactcatgcaaaatgtgaggctggaatatgataacggacaaatgcaggatatgtccattatgatgttatgaagagatgcttatgcgatgcatgatatgaatgcattttacggacactatagcccggaatattatctcttcttac

SEQ ID NO: 198314 - DNA, 466 bp, Glycine max
  unsure (1)..(466): unsure at all n locations
agctnngcattggaatagcgaaagcccctctccatcattaggattattacctgacatctcaaacaaacaaatcaaacgtaacaagacaattatagttgctgtttgaatacctcacccactcaagtgtatcacacaattatggcttttctctaatgaaacactcttgccttttaccactctaattccccttgagttcttaggcaattcaagagattatggccacaacaaagaacaattcaccaatatgtgtaaggtaaggctagacaaggaaaaggttaaccaagataaaggctaacaatgtttttaggcacaaatgaaggaaataaaattcagaatttaggaattcaagtaacaatccttcatgcaaccaatatattaccttaaagagttnnttttttaagttcttcaagcatgaaccattcagcccaattttttttnttttttaattttgcttatacgaaattct

SEQ ID NO: 198315 - DNA, 441 bp, Glycine max
  unsure (1)..(441): unsure at all n locations
tagctttgttctcaattntgagtgtctcgatatattacaagactctttctgtcatccaagtaaaaagttattatcgttagaatttgctcagagcttccattttcaattacgagtgtctcgatatattacgggattaattcggacatccgagtataaagttattgtcgtttgaatttgcttagagctttnttctgaaatttgagcgtcttgatatactatgggacacaatcggacatccgagaaaaaagttattttcgtttgaatttgctaagagctgttgttctgaatttgcagcgtgtcgatataccactggccacaatcggacatccgagtaataagttattgtcgtttgaatttgctcagagcttctgttttcaattttgagcgtctcgatatataacgagactcaatcagacatccgagttataagttattattcgt

SEQ ID NO: 198316 - DNA, 440 bp, Glycine max
agcttgtccctgaaaccctctatgtaatattgacagttctatgtctcccttcctagaaacccactaaaaattgcctaacccccttgctgttactccataatttattctgcaataactgcttaaggcagttacatatggtcctaaatcactacacattcagttacgattaaccctttgtgcctaactagggtttcgaaacatcacaacaaagacacaccattgaacaatggattttcatcattaacatacaacagagacataccttcgatggaagcgcagacacgaactccacaaacgcgaactcgacaatgtggttgcagtcacggaagcgcagcccagtttgcgacaaacacgaactatggcagaaggagaaacatacattaagccctgcgttaaacgacgaacacctaatgttaaaacgacgaatgcctatatgtaaa

SEQ ID NO: 198317 - DNA, 480 bp, Glycine max
  unsure (1)..(480): unsure at all n locations
tactatagctntccttcttgcacttctttgttcaccaatccttctttgtattatgctattcaaatttatttaatagaggctgatattagtaatcaaggaaaaatagacattccttgatttctaatttcattcatttgttacagttttttcccaagatctaaaggggtgtttgtttcaaggtttctaattatattccttggattcttattcgtggtagcattactatgagcaataactccattctctggtattttagggaaaaaaaaccatttgattagtgtaccgtccagatatgtcttgactaatcatgatatggccccttatgaagctccatctgagttcatagcttcaaggactgtgtaccatggcactcggatataactcattcatacctgatgtgccccctatgatgctccattgcctctgttgattaaacaacttgaggctttgcatcattttgatatagaatccaaatatact

SEQ ID NO: 198318 - DNA, 203 bp, Glycine max
  unsure (1)..(203): unsure at all n locations
agcttccatgtttgtccgatattgcgattatgcgcgggcataagncgcataaaccaccaattgccacacgatatcaactatacctcacgaggctccaaatctaagattgtttacaatcattacatcacactcgtactttatagccctaagctgcgcttgccctcctccgntaacgcctctccatcagaataatctcgatccac

SEQ ID NO: 198319 - DNA, 488 bp, Glycine max
  unsure (1)..(488): unsure at all n locations
agctgtattaaaaatattatctattaattatttaataatatatacataaacaaattgaaatgcaccgatgatctacagattctttatgttaccatttaatgtaacttgacatataactaaaaatgattaattctataacaattattttaaaagtcatatatccagagtggtttctaattggtttgagaaaatatttatactaacaatatcaaaattaaactcattagtaaattatgaaattattacgaatttaattattgatttcatgggtaagttacagttttggtagttgaaagtcataaatcaatttttacaatcttgagggcaaaggtgctgaagattaatctaaaanagtgtagatgaataattggtagtccattatctagagagtcttacacctatgaagatgttgtagtgtgtagatacttctcgatggatgtagaaaaatatcttattatctagagtcatagaagtacctagaacattat

SEQ ID NO: 198320 - DNA, 454 bp, Glycine max
  unsure (1)..(454): unsure at all n locations
actaagcttctatggcctgctngcatggtgtgatcaacttgttgattctgtcataatcagcctttataattagtcccctgtctaatgcgtaatctgtatatgcctggtactgaatttcaggattggttaacccattgccaatagcaaaaccctgtttatatatgggatcaacggaatcaatacaatgaagaaaaaaaacaattaacctttcatagttatactaaaagttatgagatagtaaagacctttagatttatatgaattccttcttttgctgtgtttccttggtgaaccctggatgcaagagctggaatgtagtgtccagcatatgactctccagtaatataaaagtcattcttagtgagctgatggtgctccttgaaaaatgcctgtcattattgtaaaattaaatggatcctatgatgcacaacggcagatgctaacatataacttg

SEQ ID NO: 198321 - DNA, 464 bp, Glycine max
taagcttccgggagactgtgagagtactggggaattgtatgtagatggttatgatgaagatgggaaccgtatatatgatccaatcaaaggagaggcatgtcatcaatgcaggtaatattcattgtatattgattaattcactatgctccttgggatatgccttatttccttgtagggtttattagtttctattcctaaacaatttattttggcaaaagcaattagaagcttgtattgttaaaagaagatacatatatgcttacattataacactcccgtgtcttctccctgctatttatttattttaaacataatctagttccaatttcatttcctgaaacttttttccctgatgtttcaattttagatagcaaatcttctttaacatgcttggtatatttgacatgttttatgtttgatctagaacatcacgtgttctgataatgttacctcaatcagatgaa

SEQ ID NO: 198322 - DNA, 347 bp, Glycine max
  unsure (1)..(347): unsure at all n locations
agcttaatgattgctattgtttanccttctatataaccttaaaacatcaaaactctggagattactcactactctaaatcactttatcttccttttataaaattcaagccctaactctaaaactctttgcattggccacctctaactcacctactatcgagattatcctatccttggagatctccaccattcacatagacaatgaagcctctattcatgtagaacactttttcagaatttaggaactcaaaaaagtgggtctaaacctcaatgagactatattattctatggtgccaaacatttcattataaacgttgcatactatgtaccatgaactcattacaac

SEQ ID NO: 198323 - DNA, 423 bp, Glycine max
cttgccttagtaggtgggtcttttagtgtatatattctgtgttctgaaaaaaaaaatatatacttgagctttctgtctcattttcattgtcatctaatttcgacgcattaggttgaatattgtccaggaatgaacacaaatgttgtctcatcttggtcttcgctttggactaaaaataaatgtaacctttgtctcattgtcactctcatttcgattagtactgctcgacttcttctatatccaatcgtgaagccgtcatttgattcttctttttccaggtttgacgctggatattgagtctctgtccgctctcattgtcgtgctaaaatcttttactactttagtatttgtgtctttatattacctctgtttctgtccattttattacactgtaccctttacttatctgttgggcgttactga

SEQ ID NO: 198324 - DNA, 392 bp, Glycine max
  unsure (1)..(392): unsure at all n locations
agcttgagtgtatggacgggttgttacattgtcctaaanaagtatatatgagatcctatattatgtcatttttcttatagtatcttccttaaagaaaggttaattttttttcttaaatgtatttccatattaatatcatacatgtatttataattactcatccagtcattctcttattacacaaatgcaatgtttaatgtaaaatactataaaacacaaagggaaggtgatgagttgaggctgaggtgccctctccaactaaagtgattagatattttattatagaatatctcacatgtcaatcaccaatcctaattcttttaattatttggaaaaatggtagggtcatgggattattattattactattactattattattattattatta

SEQ ID NO: 198325 - DNA, 267 bp, Glycine max
atgtggatcatgttgttgaccagggtcatgaacatcctcatgaaccaattacgaatcatgttggtgttgatataaaagggtttccaagccgaccccatgatacatcaatgttgacgtcatatgttgatcatgtgacaactagaagttgggcaagaaaattaattatttgttcgattatataatatttgaataactatttatcattttacttaaactaattaattttaaactttttcaagaatgtactgagttgagttggtctctcat

SEQ ID NO: 198326 - DNA, 425 bp, Glycine max
  unsure (1)..(425): unsure at all n locations
gcttgatctcataatggctgagagtatattgagagagaatatcagcngactggtcatagctctttcagcccttattccgggcttgaaaaaggtcagttcatatgttttctcttgactttttaattgcatgattttttctgtcactagtatccttcgtttaaggtaatattgtttgagacaatgtcggatacaaaatatgagtaccactttactttntaatgacctgattttttctttctcagaagtgtttgttctttagaaataatcctattcgaaacactatggtatacgatacaaaatatgagtatctcactgaaacttaaacattagttcatctcacttgataatagacttgccccttaaattaacctaaacctccattccttctaacagcatgaatggtgactaaactcaaataattttct

SEQ ID NO: 198327 - DNA, 436 bp, Glycine max
  unsure (1)..(436): unsure at all n locations
ctatacagacataaatgaataaanatttgcaagaatcttaatagaanaaatgcaaactaagaggaactaaaataaagtcataaggaacaaaaataaaaaatgataacttacataaaacaaaaacatatttaatatttcacaaaagaaggaggaattaaaaaaaatttaaaaagaaagaaagaaaaggtgctttaagtaaagaaggagatacgaatagcactttaatatttatagaaagttgtagctataatataaaagcccataatacacattaatctccaagaataattaccacattaaaacaaccttatgggttccctaaaatttagtatatccctaaggtcggaataaaacgtgagccgccaagcattaatatcaactaacaacagtatcagaattgtctattnttcttgctttattttattccacacgcatg

SEQ ID NO: 198328 - DNA, 424 bp, Glycine max
  unsure (1)..(424): unsure at all n locations
agcnttttggtgtataaacatgggaccatctcattntatttcaaaaaggaagtcatgtctagtcaaggtcggagggaccatacaagtttcctaacgatttctaattatgtgggccattaagtctatcatatgctgacaatagccgagaagcccatgaatctcttcgggggcggagtaggtgtctgccatcgccttggccttggctaacaatcggggaagttcttgactcccgttcaaggtaagagcaaaccgatccatccacatggttgcctcttggtgtaaagagtcgatcacccttcctctagcctctntttccgcatatacttgagcatactcatccgcgattctatgctcgtgggccgnggctagacctaactcttcttcgtacttggcgatgatactaacatgntggctccgtctccat

SEQ ID NO: 198329 - DNA, 357 bp, Glycine max
tactattatacaaatgtcatccatttttcgccataagaagccctcgttattctctgcaacttttaacaacgccagggaatgcaaatatcaaagttatccaagttacatacataatatggttcactttgtcttgtaaatgaagtatttgaaacacgtaatgatggttaaacattgttcttaagtggttatgttaatagttaacctaaccatgtccttctgcttgagcttgagtatttgaaaaggaaaagaaaaatgcattaaccatatgttaaaatcattggaacattgttcaagaaactattttcgacgatcattcctttgattattgttacataagtgtaggattcataacttatc

SEQ ID NO: 198330 - DNA, 315 bp, Glycine max
atctatacatcttcacttgggcttttttcaatatggggtctttatttggttggaatttgggttggtatttagttcttcaactatcatgcttttcaaaattgtttttatgctgtaatgtacatattggctagcataatgtgaaaacacttatacttagcaactcaatatcaaatggttaagttctccttcatggcaaaaaaagatccctactattttcctcctacattccgagaactcttcacagtcctgaaggggtctaaccttgccctttcgatcaacttatactggtatttcattagatgccctttcatctct

SEQ ID NO: 198331 - DNA, 269 bp, Glycine max
  unsure (1)..(269): unsure at all n locations
ctcttcgtgaccgaagacgatgagcctttccaagataccggccaacctaccctttccccattttccgacgacgaaacgccttncgacacctnctccgctcagataagcctncatgccctgtcgggtcacttagcttccgagaccttacgagtcaatggctttattggtaatcgtggtgtgtgcatattgattgatggaggaagcacacacaacttccttcaccaagctgtggttacatcccttgggtttgctacgacggctactactct

SEQ ID NO: 198332 - DNA, 475 bp, Glycine max
  unsure (1)..(475): unsure at all n locations
agcttatgctgcanacatctacaatagactttctcttcctcagcagcaaaatcagccacagcagaacaattatgacctctccagcaacagatataatcccgaatggaggaatcaccctaatctcagatggtctagccctcaacaacaacaacaacagcctgctccttccttccaaaatgttgttggtccaagtagaccatacgttcctcctccagtgcaacaacaacaacaacaacaacatcaacagaggcaacaatccactactgaagcccctcctcaaccttcattggaagaattagtaaggcaaatgacaatacagaacatgcagtttcagcatgagactagagcctcaactcataagttaacaaatcagatggggcagatggccacccagctgaaccaagctcaatcacaaaactctgacaagctgccttctcaatctgtccagaatcccaaaaatgtgagtgccattaca

SEQ ID NO: 198333 - DNA, 372 bp, Glycine max
  unsure (1)..(372): unsure at all n locations
tgacgttgaaactacctttgaacagtaatttccagattaaattaatagatattttgcatcaattggacactttattataaacatataagcacagtgatttggagaatattgcttcccatagaaccttatctgcagctgaagttcagaccaagagagcattacagcaacagttgtgggacactgcaagtgcctatgaatcccttctgagacagaagtccacggccaagtggatcaaggagggggataggaattccgcttattttcacaagggcattaatttcagaagatgctcanatgctgttcatggagttctcattgatggtgtatgggtccagcaccctcatcttgttaagaatgcaatgcttaagttct

SEQ ID NO: 198334 - DNA, 437 bp, Glycine max
  unsure (1)..(437): unsure at all n locations
attcgggtacgaagatgtacttcttggattggaatttggatgcctataataatccattgtgagtcaatagtgttntgtttataaacagttaggagtatgcatgtgtttcactttcatgttataatggtgattgatgatgttggtatctcaatagcaattgaagattgacatcggataaaatgtgtgctttntcttcttccctgtgatagagatctagcactgcaaactggtcattacgccaattgtagtgtttctgtgtatggaagtgagcacacgtgtgtgcgtgtgtgaagtgatgaaccttntcacgggcatggatcctgtcatgtcaaattntaacatgataaagtcgtgggtatgagaagatccattctcatcttttttatgcttntcacgtgacagcttgattcagtagcttgaattgaacttgaattttg

SEQ ID NO: 198335 - DNA, 466 bp, Glycine max
  unsure (1)..(466): unsure at all n locations
ttgacattattattcctcgtcatcatctaatcatcattaaatttatttaaataaacattaactntatttggccttagagtgggaataggtcacgccggcctacagatatctacgacttgtctacataaagtctgacttatactgacttatttaattaaaaggttaaactcatacttttttaaaagtctattaaattaaataggtcgggcttagacttattaaaaaacattatattatttttttatatcaattatatttatattattttttgggtagaattattttttttaaaactagcagagtttgattatatattactgctccacaattntcattcctataatcaagtaagactttaattacaagttacgtgtttcttctttctttagcttccctaatanggtccctactctagagcacatgaatattanagaattaatgtgaagaagtttttaaaaagactatc

SEQ ID NO: 198336 - DNA, 388 bp, Glycine max
ttatttaaaaatagagacctttacttctcattttgtaaaaaattataattgtaatccctctattttaattagagacatttagttttcacttttgtaaaatttgtgatgttagtctttcaaaaatattaattggtgaaagattaatctaatgagacccaaatttaatgatgtgacacaagattattggtttaatctatatcataatcaacttaatctcttaatagtcaacacttttagtttaactaaataaccaaaatcgtagatttaataaaattaggggttaaatgtctctatttaaaataagataatcaaaatatagatgttaaaaatataacatttagcatttgttttctttgtaaaactattttttgcccactataaatatttg

SEQ ID NO: 198337 - DNA, 394 bp, Glycine max
gcttgagctttcttcaccaatcttaccctcacagattactggcattatgcttgacagctcacatgcccgatagaatcgtagcctaatagactgaatatatggcggagttctcattactaaacaataagttgtaatagccaagacgtatgttatctgaagtgctgatgatgcgccaaaaacttgtttcttctaaattctcacatacctttgaattgttacatacgtccaacaagaagttacatggcattatattaaaaaaactgataaaggagaacatattggctcttttaaccttctacatgtcaataacgcgttcatatatgaagtgacataggagaactctcatatagaaacagaataactatgttatgagcctatgctctactaatataac

SEQ ID NO: 198338 - DNA, 342 bp, Glycine max
  unsure (1)..(342): unsure at all n locations
gtcaatttcgagcgtctcgacatgtgatgcggctgaatccgaccttcgagttaaaaagtagtaccatatgaatatgtcgagagcttactgtcgtcaatttcgagcgtccctatatgtgatgcgccagagtcgaacctccgagtgaaaagtagtgaccatttgaatttctcaagagcttccgttgttcaatttccagcgtctcgatatttaatgtgccagactctgaccttcgagtaaaaaagtatgaccatttgaatatctcgagagcttccactgttcaattntgagcgtctctaaatgtgatgcgcctgaataggacctcgaatgaaaagtatgaccatt

SEQ ID NO: 198339 - DNA, 292 bp, Glycine max
ttatattgtagccgatgctctttctcggcgtcatgcattactttctatgcttgaaacaaaattgattggcttgaatgtttgaaaagcatgtatgaaaatgatgaaacatttggagaaatctttcaaaattgtgaaaaattgtcagaaaatggtttctgtagacatgaaggctctcttttcagagaaaacaaattgtgtgtgcctaaatgttctactataaatatgcttgttggtgaagcacatgaaggatggttaatagggcattttgtggtccaaaagactctagaaacat

SEQ ID NO: 198340 - DNA, 429 bp, Glycine max
  unsure (1)..(429): unsure at all n locations
gctgccagctgaataaatagatatgagtgtgtattgagtttatgcactatngaactatttgaacaaaaaaaaaatacgcaaagctataaaatgtgacaactatcaagttaaaagcgttggggagttcctactgaaatttctcttgttgtataaaaggttttttattctctatttaatgttatcctagtgttcttacattgagaaaatactcaaaccatgattcctcacatgaatgagcctaactctcttagcctttgttcttgattcctcaacaaacttgttctaaaagagttacactaagcttacagtgtaaaatatactagatcactgcactccattcctagacatacagatttttagctggctctatcaagttctaaggttgtaaagcattttccaatattaaaaagcctaactacacatacaaat

SEQ ID NO: 198341 - DNA, 190 bp, Glycine max
atgttgaagactcacaacccggcacacacaaaatgattttaagacttgatattttcttacatgataacagatctagtcctattacaatagactacttattaatttctacacactcacaaatgctacccttaatagacgaactctcatcagacgttcaatcaaagcatggtgatgcctccacttatgttag

SEQ ID NO: 198342 - DNA, 386 bp, Glycine max
ccagtgagagtgtgatcttactctgtgagtgaacgactagctgtgagtaataatctttgcctaaatctctgaattttagaatgaaatgtataaatgaggacatgatgaaggccatgattgtacatacacaagctcttttgaccaaatagcttaccttgaatgataattgcatcctttgctccctttttgagctgaatgatattgtcaaaaatttgaaccctgaacttaaacaattatctcttgataccttgtttagattttaagagagcatatggttcaaggcaaatttactctaaatttgggggagagaagtcaattagaatgaaaagaaaatggttaagcatcagcacacacaacaaataaattgtatgttaaaaaaaagtgaa

SEQ ID NO: 198343 - DNA, 378 bp, Glycine max
  unsure (1)..(378): unsure at all n locations
ttgcatttctatgggttctagagagagaaaggtccaagttctatatagttntgagagattttgctgtgtgaagatctgcagagaccanagcttgaagcacgagccggtttgagagtttgagatgagtttgtgagtgattgtcagatcctggaggtgaaagagacatcctcaccacttgttttttttttttgaaatccttcatcttgctcttctctttgttgtaaagaacgcttnctggtatggaaagctaaatcctctgttggatcttccctttaagtacctaatgtaaatatatttttatctatttaatgatgttntgggtgttctctatgctatctgctnttcactccagtatatctttaccttgatcacgtagat

SEQ ID NO: 198344 - DNA, 409 bp, Glycine max
  unsure (1)..(409): unsure at all n locations
agcttgtattttagacctcgatctttcattttttctggccgacgccgactgtcatttntttcgatcaatatcggtgaataatattcttttgccgaggtgggctaatgttttcctggccgaatgaatgggaacatgccagtttcggccgaaacgaaacatcggttgagctcgcacgaaaaaacctagccgacctacattgtaagttttttatgcaacgccgaaacaagaaaacttcccctgccgtaggaaaaaacattatgggcagcgagcgttattttaaaataaaaaattgcgcaatgtcggctgaaaaatatcagtcggagccatttcacgaccgatgtccggtatagtgttttctattcaatcccttgatgaaatntgcatgatgtcgatccggaaatgtttgatc

SEQ ID NO: 198345 - DNA, 435 bp, Glycine max
ctcagcttgtggaatatgggggacccatcacatgtgggactattttgtttgttggcgatggtgcacaataaaggttccacatccacaatgcgcgcataaacccaccatcccctgttgcccacctccaactgagctcacgtactcccacgtagctcatatcctcgtttctctcaacaccaagtccccatcaatcctcccaagctttcccaacatcaaagtaatacaacattcacacagcacaagctatcacagctaagcaaaacagggcaaaggcagaaaactctgcccaaaacaccaaccaaaatcacagcttttcacatacaaataccccagaaacatttccttcgttccaattcggtaaccgttggaatcgactcgaaaatttactggaagtctctagtacttaagcctacattgtgacccgtgggatctact

SEQ ID NO: 198346 - DNA, 409 bp, Glycine max
agcttgtgaaacatcaagtagaggattcatctaaggagttgaccacaaacaacactataagattcattcaaccccatgagaaattgcatcaacttgcgtcttttgttgtttgctccacatgtgcaaatagcatcattgtaggatcctaactcatcccacaattttttaactttgtatagtatgtagcaactatcatatgatcttgagtaaggcaagcaatttctctctcaatctggaaaatgcgtggtgcgttgctttgaaaaaaatgattttgaagatctttccaaactttatgagcagtgtcataaaaaataagactatatgtaatatcatgggtcaatgaattaagaatccatgacaaaaccatatcattgcattttttccatgttgatagtcttctgtttggttt

SEQ ID NO: 198347 - DNA, 314 bp, Glycine max
  unsure (1)..(314): unsure at all n locations
caatgtttatgacctatgcaatcatggaaaagtttatgagacagagatgcaaaacaagacatagatggttagtttcaagatattangggcctctggattcatgtcctaggccaatcaactgacttgtaccacgttccagtataacaaaggaatcagcatcaaatgtttcagaacaatttaatgattttgtcaattgactaagagaaactaagttgaaaggacaattangaacaaaaagaactagatccaagtttaaagaagaataaatggagactcttctgactcctttagatgtgactttggtgccatttgct

SEQ ID NO: 198348 - DNA, 453 bp, Glycine max
  unsure (1)..(453): unsure at all n locations
ctgcagcttagccaactacgggtaaatttttttagggcagtaagagtacatacaagagaacctcatcttcagatgataatgtcatttctccgatgaaagtggatactaaaccactgttagataactcagatggtgggtttatcaattcaactacgactatggaagtagatacatcaaataaggtaaatcaccaggcaaaagttaaatacaccataatttttgatgacaagggacaaaatgaatctgtgcctggattggaccaaatttcctctgataggatggctgattacaattttggatccctagatttgcaaaggccagggcaaactgacttgacttcaagcatgcggtcttgtcctagttccaatagtattagaagtgaanaagagtctgtgtctcttgagagtgaaattgatgctgagaatcgagctcagatccagcanatgtcagctg

SEQ ID NO: 198349 - DNA, 353 bp, Glycine max
  unsure (1)..(353): unsure at all n locations
acataaaactcagcttggatactactcatgactcatattttaacttaaaatgttctcttngaaaggaactttcaatgctcagaagaaaatgagaagctaaaatcgaaatgatattcttttaagaaaaccattgatgcaagaattcatttaatcattttgaacagtaaactagaagaaagacaactacacaggagttatcttttgatcaaactcacttgaaatgaaataagtttttgaagaaaaagttaaactatcaagattaactacttgtggtggacaagcaacttgataggtattggatccaagagctttatgataactggctcatagaatcctaaagttttaaagctata

SEQ ID NO: 198350 - DNA, 416 bp, Glycine max
  unsure (1)..(416): unsure at all n locations
ctgaaacacaaatttctcacttcaagatcttgcatataggggttggtcagtgacatctaagggttttttaaaacaatttttcaaataagcacttggtgtaaaatgatgttagaaaaaagatatatgaatacttaataaaataatatggagagaagtataacaacttggattatatcggttcgctcaacttgacctacgtctagttctcctttactcactggtaaagggttccactaatcaataactaattacatataagtattctaatccgcaactctctgaattacaagtattcttaacaccacttatagaatcttcctacactcttctctgatctaagaccccaagtattntgaacactaagtcactcctgtcacanacgaatgcttgattggatacaatattcttaacaatta

SEQ ID NO: 198351 - DNA, 423 bp, Glycine max
  unsure (1)..(423): unsure at all n locations
agtcaattcatgcagtctnctcataatgattattggggatgtagtaattcgaattttgagatacattaaaaggaccccaggacaaggactactctatgaagacaaagaaaacactcaaatagttggattttgcgatgcagattgggcaggatcacccattcgataggcgtttcacttcaggatattgtgtctgttgaaggaaatcttgtctcgtggaagagtaagaagcaaaattntgttgcaaggtctagtgcagaggctgaatatagagctatggctatagccacttgtgagctcatttgaattaaacaacttcttcaagaattgaagttngaaaatacccaacanatggaagtatgtngtgataatcaggcagccctacatatagcttctaatccagtattccatgagagaactaaacat

SEQ ID NO: 198352 - DNA, 295 bp, Glycine max
  unsure (1)..(295): unsure at all n locations
aataacccagatactacaatttctaaaattctcaaagctaaatattagttaaatattagatacttggatgccaaactaatgcataaaccaagctatgcatgacatagtaatnttgcttcacatatattggtcaaagatgatattctgtggagaaatgatggtagctccatcaatatctggagccaaccttgtgtgcaagcatcagcaagctcatatatcacttcatctaccccgctcgaacttgacgatcttatagtcagtccactcatcaaccaccaacaacaatgtatgcatc

SEQ ID NO: 198353 - DNA, 451 bp, Glycine max
gcttcttatccaagacactctcttggaggttaagcttcttcttccaaggcttattccctagtggatggtgtctcctctcccctcttctcctttatcttccattgcaactccatagttgaaaatcaacattgaaggaccttactaaagctcaaagattcagcctccataaaagcttctcaagcaagcttccatgaacacaagtttgcccttccatagccttctaaccccaacatagacattgtgtggcgtatagacaaatcttaaaacatgtaatgtccataatactttaaccctatccccctagtcataactagatggataacaataaacatcaaatctttttctcctaaaccctaacaaggcaatacttaaaacctaacagaaacctatcataacataatcaatccacaaatagggtattaatggtatgcaattcaatactagtcataaa

SEQ ID NO: 198354 - DNA, 395 bp, Glycine max
  unsure (1)..(395): unsure at all n locations
gtgggtggtggagaagaatcttgagatgttggggaagggttttggaagaaagaacgagaaaagaatgattgttttccaaggctacacgaaaaataacgtttgcaacacgcgagtgcttttgctctcgggaaaagaaacgtctcgaacacaccagaagtcatatcgcagatctcaacggtcggatcgtggaatgctatcctgtgaacctccagaccaaatttcaagaagatccaacggttaacaaatacaggaggggcattttaccgagagagcttcaggcagctttcttgagaagctntctcgtgaggcttccttgagaagctagagttgtaactaaccacacctctctaataactaaattcaccttcttgaataaaacatggataaacaacaca

SEQ ID NO: 198355 - DNA, 396 bp, Glycine max
  unsure (1)..(396): unsure at all n locations
cacagaggatatgcttaccacctcanaagactggaaagcggtttctaatgactcctctgcggcctccacataaagcatagaggatgggcagctcaccaagatgntttcctcgcctaatacgatgaccagatgcccttctactacgnaattcaacttttggtggagtgtagagggaacaactcccactgagtggatccacggacgccccaacagacagctgtaggggggcttaatgtccattatttggaaggtaacttggcatgtgtgagggcctatctgtactgggaggtcgatctctctcctaacctctcgacaggtgccgtcgaaagcacgaaccaccattgaactcggctttaggtgggaggcattgaatggtaatttctccaaagtgctctt

SEQ ID NO: 198356 - DNA, 339 bp, Glycine max
gtcaaagagaagttcaagtccatagccatcaaagtctgaaaagagtatgatgaactaagggacgtcaatatggccacagctgaagccttggaacgagaaaccaagaaggcccgaaaagaagaacacgaccaaagcaaagttttgaggggctttatagggcagcaatagtgagctcaagctccgaagaggtgaaaggaatcatcacgggtcaaaggcatgatcttgaaggacgagataaaggtttgccttatgtcaaaaagaaatttgtcccaacagttaagcgagactgaagggaatatgtgggccatcatcgataagtgcaaaaagaagctaaatcta

SEQ ID NO: 198357 - DNA, 355 bp, Glycine max
  unsure (1)..(355): unsure at all n locations
tgcagcttgaaatgaactatggcagttatttttattgtgcaggtactcttccttcttcctagtagctaatgcctaaatcatcttcttgttagctccagacattgaccttgctgtccccactgcttttgcaatcaggttactcaacacaaatcttattgacatattgttctttgattntacataaatcaaatgtgtaaacatagattacattcttatccaaactttggtttttagtttttggtcggagcaagctaattgaaattgctaaaatagactctaagatgcagtaccttcaataatttaacacaaattatatgcatctctaaataagctacaggatgcaattctcaaagta

SEQ ID NO: 198358 - DNA, 225 bp, Glycine max
agccttgcttgccacttgtgttcatgtgattaaattctttggaacaaacacaattttgaataaccattgtgagcttgtcacttgaggacaagtgaactgttctttctttgcttgaggacaagcaaaactgtaaatttgggggagttgttagtcgtcatttacgactaacttctgtattgaaaagcagtatgaaatccgtcttttccccaatttatagttcttttt

SEQ ID NO: 198359 - DNA, 281 bp, Glycine max
  unsure (1)..(281): unsure at all n locations
tacaaatttaaaatatctaagaaaatcaatgaagaaaactcaaatacctgaatatcctcccatatcaaatccttttgagcagtagggacttccttccangtgtcatatgtcacgtcgaccttatcacgagcgacaatccncaaatatgttcttaatttcttcttgtggagaccgtcggccttgccaataacaggatcgacgttgaccacaggtctttctgccccatgtggtctagtggccaatgatcgtagccgtgtcgccttgcgtgttcgcttcaacgt

SEQ ID NO: 198360 - DNA, 245 bp, Glycine max
acttgagctgccagatctctccacctttgggtgtattctttgaaagaaccgtgcccctttttgcacatgttctatagttgcatcctattcgagaccatatcagaattcgcctgatactgcctaacaaatgcaagcattaggtccttccaagagtggactcgggaagggtccatgttagcgtactatgtaacagctaccccagtaagaacttcttggaagaaatgtatcacagttcctcatctttg

SEQ ID NO: 198361 - DNA, 442 bp, Glycine max
  unsure (1)..(442): unsure at all n locations
cttaccttgaattaattccttngatagcccttttgagccttgtttccctttccttggtttgaagctcactacaagccttaattgaaaaaccatgatatcaccatatccttaaggaattttggagctttggaatagttttgggaataagtgtgggggggtntttgtttcattggataacttgttttgttggctatacttcatgatgtattttgggccatacttgatgtacattgtatattggttaaatgttggacatgctgaattaaatgctgtttctcaaaggatatagagtaaaaaaaaaaaaatttcgaaaatgaaaaagaanagcaataaagttaagtgaataagatcttaaatggcaaaagaatgatgagactcttggtctactctttatgnttaaatttatctttacttcttttaatttcttaatttttcttatatg

SEQ ID NO: 198362 - DNA, 296 bp, Glycine max
  unsure (1)..(296): unsure at all n locations
atgtttatatgctgaaattgctgatggaaaactgttagagatgaagggtagaactaacctatggttagaaagtgagaatgtgatgttatgagtggaaaaagagtgaggctttgagggttggaaggttaagtctgaattctgtggtaaatggaggttaaagtgagttaatactagcttgaaatgtcatttaggacttgggagaaagcttggactgtgctagagagaanaacanattatcaaagtgaacaaagagccatttcttatggcaaaatgggtgttgaggagtcaaattttga

SEQ ID NO: 198363 - DNA, 421 bp, Glycine max
  unsure (1)..(421): unsure at all n locations
tgctttttcttcatgaagcatctgtgttattgaaacctgacccctatccctaaccactgctcttcttccaacgtctgagccaggcaccaccaagcatcactgtttgaagttctattctctgtgccggccaccatttattctatgttctctattatgttcttctggaggttaagttttatgccttgtaagttgtaacttgtcaaaacttgatgtgctgtgtacttctgttttggaactgttaagttntctactatactattttatgggttaagacttatgaatatgatgcatgacattatggaatatggattatgaatatgatttatgaatacagatngctgtgtacatgtgttttggagttgtaaagttttactaccactgctgtatataatttatagcatatagacatgtatatgattat

SEQ ID NO: 198364 - DNA, 401 bp, Glycine max
  unsure (1)..(401): unsure at all n locations
tgtcagtgcaggtagagagtgctctggagcaaatggattgtatttgtaagataacaggggttattgcctcattgntgagttctcagattcctgtaaggataactgccaagaacttttgttaagtgacagtataatttcaccaccaatttgattattgctctccaattttatcagtgtttgcctgcaagtccaatgggaagtgattatcataggtctgccagtgagagtagttcttttgaaggctcagattttgatcactctgcatatgcagcagagagaagtcttgcttctgtacatcttgagtgcccctcaaggggtttgcagctgcaacaagactggactaaaaagtgagaagccaattcatgtgttacgaagagtttgtgggaacgatanatgtgctg

SEQ ID NO: 198365 - DNA, 407 bp, Glycine max
ggccattcttggatggccttgatattctcaagatccacttggaccctatttctaccaactacaaaccctaagaaaactatattatctacacaaaaagtacacttctctatatttgcatagagggtgttgttcctaaggactaaaagaacttgcctgagatgtcctaagtgatcatctaagctcctactgtacactaaaatatcatcaaaataaacaactacgaatctacctatgaaatcccttaagacatgatgcataagccctataaaggtgcttggtgcattagtgagcccaacaagcattactagccattcatacaaaccaaatctcggtcttgaaagcggttgtccactcatcacccttgttcatctagatgtggtgacacccacgtttaagatcaatttttt

SEQ ID NO: 198366 - DNA, 276 bp, Glycine max
agaaaaagaccgggactgtcctgaaaatagaggctactatctatcctcggaaatctacggatctgtccaacttacttggcagaacttgtaatgctttgaagcccagaacaaataaaaaaatagggctgatattctggaaggagcttgcacctaattgcaattaccaagagaaaaagcagtggagaatactgaaaaaatttggccacaaaacagcgctatactccaacaagtggaacacaacgaggtttctcttgtagcctgtgcaaatgggtcatc

SEQ ID NO: 198367 - DNA, 463 bp, Glycine max
  unsure (1)..(463): unsure at all n locations
agcttaccattaatagagcatctattgttgttaatattntatctttgggagtcgtctagtggttgcatctgacttcccaagagtcttctcaccattagcatatcaccctgcatagcttcctcctcaagctcttcttccaattcttcttcactgattttagattcactggtgatttctccatcttccttcatgatcatggtcctcctagttggacagtcagaagcaatatgtcatctgcctaagcatttgaagcattttatgtttctggtactggctgtggatgatgaggcaaagttatgcttggnttcagcactagacactactgactnttcatgtggtctggacgagttgcctctctccttcttggatttgttggtccagttctacgtgaaaatgttggatgagttccttctcgttgcaatttcctcttcactattgttaacccggactgctatgcacaagc

SEQ ID NO: 198368 - DNA, 373 bp, Glycine max
  unsure (1)..(373): unsure at all n locations
gataaacaaagatgaactcttcaaaaggtttttgactttctcaaattggttttaaggttttctaaaagttataactcttctaaatggtcttcttgaccagacatgaagagtctataaaagccaggttttggtttgcattttcaattcaatcaaattattctttcatactctttacttttccaatcaatcctttacaagccttgaatctctttgaacttcttcttcttctttgtaccaaaagctttctgaagttntctggtttgtcaaaccttgaaaacttctgctattcatcttttcattctcttctcccttcgccaaaaagaattcgccaaggactaacagcctcgattctntttgtgtctctcttctctct

SEQ ID NO: 198369 - DNA, 448 bp, Glycine max
  unsure (1)..(448): unsure at all n locations
agcttatgcgcatatatccttacgaacattcacttgcacaagacatcctatcaactaagaaaaatgcacccatatacaatcaaagtagcttcattacctagattatttacatgtacttccaaggtgtatttgttatttacatcacacacgcctccttggctgaatttacatacatgcatactcaaagcattttggggtaccaaaaactgcacatgcgctcatcttggtatttctaatacccatacatatacaaacttcacgatgaatcttgactacctacacaataaggtgctacatttcatgcttttttntcaagtttttgctacctaaagccacatgcaaattcaagcatattntcctttgctgactaannatgtattcaaattagaaagtatatactttnttgtaatatgntttcttcacataacatgcaacatatntatatata

SEQ ID NO: 198370 - DNA, 347 bp, Glycine max
  unsure (1)..(347): unsure at all n locations
gatgatgacaaaggtgatgacgaanagctcaaaggtcactcaaagaatgagttcaagatgttcaagatagaatcaagaacacttcaagattcaagaggagagttgatttcaagattcaagagatcaagatttcaaaaatcaagatttaagagatcaagattcaagacacaagattcatgaatcaagagaaggcttaatcatgataagtatgaaaatgagaaggttttctcacaaattgagtagcacatggtttttctcataacaagtctaccaaagaatnttcactctctagtaatcgattaccagattgctgtaattgattaccagtagccaaatggatttgaaaa

SEQ ID NO: 198371 - DNA, 460 bp, Glycine max
  unsure (1)..(460): unsure at all n locations
tgcaagctaggagccataactaataataacttctttataccattaaaaacctaattgttcttctgatatatagatggaagtatctgaataagcttatgcatgcttacaattacaagttcctaactcgcaacaaaagacgagttagattttgagaactgaattgataaaggtgaaagcggacctgtcgtcggtgtcgcagaaggaaggattgaagtgtggttgaagagcgagtgatccagcggaaacagcgagcgccaaaggaagcagagaggttggccatgcgttcttcctggttccgtggttgttgaagatggtgctgggtagcgttttgtggagagtgcggtggtagcagtacaagtacttggtcgaaaaacgaanacgagagtaccacgaggagaatattgacatgctgttgacatcanacgaaacgaagaagctcattcactcatagtatttaaaa

SEQ ID NO: 198372 - DNA, 283 bp, Glycine max
  unsure (1)..(283): unsure at all n locations
gcttcatgcgnnggactattaacaaaattgacgagtctgagatagaattaacgagaatcctagggagtagagaagctgaaagctgaggatgccactccaattccttatgatgtcggaaaccacgttaaaggaggctaatagttnttatttgttcttcctgcttgctttccatacttaattttatttttagttggaagagccattacattacttatgcacaaaatcagaccagcaagntaagttaagttttgttctgtctctaaatactaggatatgtcttatt

SEQ ID NO: 198373 - DNA, 397 bp, Glycine max
  unsure (1)..(397): unsure at all n locations
tatatcgaaacgctcggaatagaaaacgaaagcacgtagcaaatttcaaccacaataaaatctaactcggatgttcgatgagtctatatatatcggaccttgaattgaaacagaagctctgagcaaattcaaacgacaataacttnttactcggagggtcgaatgaatccccgaatatatctagaatctcgtaattgaaaaaggaagctctgagcaaattcaaacgacaataactttttgattagatgttcgattgagtctcctaatatatcgagacgctcaaaattgaaaacanaagctttgtgcaaattcaaaccgacataacttttaactcggatgtgcgaataagtcccgtaatatatcgagacgctcggtattgaaaactgaagctctgagc

SEQ ID NO: 198374 - DNA, 409 bp, Glycine max
  unsure (1)..(409): unsure at all n locations
agacacacttttgaccttataattttcgccttttacttgaattgaatgtgaanttacattaaactcaataggaaggcttctactgagcacaaatgaaaacttaactagaaatatttacaatcctaccaaaaaataaccataaattgggagatttatttacattttggaaacttttctatacaaaaatcagtcgtaaaagacgactaacaaactcccccaaatttatagttttgcttgtcctcaagcaaagaaagaacaaatcacttgtcctcaagtgacaagctcacagtggttattcaaaaactatgcttgtccaaagaattcatcacatgacatgaatggcaatcaatgcttncatcaacagcttctcacaagacatgcagctnttcaaatatgtgaacatgattat

SEQ ID NO: 198375 - DNA, 287 bp, Glycine max
  unsure (1)..(287): unsure at all n locations
atttgtcattttacccttatagaccttacctaaaaatgaaatccattaataagaattcgttatgcatacagattcaatcaagcttggacaatttaaataaataagtggatgtcttcaatnggttaggcaaggcaaagaaccaagattttatagttttaactctaggaacacctatccaattccatgttatgctagtgtgatcctgtatctgcattgacagtaagtacctaaagtcacatgcgtcaataaactgattacatctttcacaatgccatgtcccatctgcg

SEQ ID NO: 198376 - DNA, 390 bp, Glycine max
  unsure (1)..(390): unsure at all n locations
taagcttctaagtgaataggggcaccatctcctagagtcttttatttgttgangtgaccatgtctcagnataaaatagtagggaatgctccaatcgaatattcagaataccctcagagatgctcacaatgcataaataccaggatgccactatgcctaataatctataaagttttatcatttacgatcaaaggtgtaatcacctgatgccctagcatgcactatatcacaaatatgtgttctcatagccctacaagggtaaatacactatctcaacattcaaagattgaatttggaggacacctaaatatgaagataccaatattcaacaaatcaagctactatggaactgctaagaagttaaaaaagacataaactgagaaaactataa

SEQ ID NO: 198377 - DNA, 424 bp, Glycine max
  unsure (1)..(424): unsure at all n locations
agcttgactgtaacaggtcacccaattaatttttatccataaaaagaggtaggaaaggtgatcatcaatggacgataaattgtattttagttaaaaataatgctaaaagcatttgtcaagtaaattaagacaacatgaaaacctacatttgcttccatccaaaataaatacaactttaatgtacaaacctgataagcactacaactctagaaagcttactagtaccacaaacaagtaaactggtaaaatgtgagccttctaaagaatctcattcctcatatctcttttcttgacaagaatatagcattccttaaaatttccatcanaataaatcatagtcatgtgaatgtatgaatacatgattctgatgatgtcaaagaataatcaaataaggctgtgttcaagattacttcaacaaacattc

SEQ ID NO: 198378 - DNA, 383 bp, Glycine max
  unsure (1)..(383): unsure at all n locations
gatgacggaaagagtggttttcgaaatctgcactttatgcagaattttgctgttgaaatgtgcaacaaaattttgtataagtgcagaanaatgcttgtgtatggatggttgtgaaaagggtagtacatatggggttgtggacatttgctagcagatcccaacggtcaaaatgtagacttatgtacctgagacttccagtaaaattttcgagtcgatccaatggttaacgaattggaacgaaggaaatgttattggggtatctgtatgtgaaaagttgtgattttgagttgtgttntgggcagagatttctgcctttgccctggtttgcttgantntgttagtccatgatgattggatgtggaatacctggatgtngtggaagc

SEQ ID NO: 198379 - DNA, 426 bp, Glycine max
  unsure (1)..(426): unsure at all n locations
ggtcatgggtcagtttatggattcttatctctattccatacacaangcaaaggataaacgccctgaatgtcaacattacattgaaacatgggttaaggaatccaaaagagagatttgcctaggagcttacttgaatcagtaagtaaaatttatgaaatgcatgtaaagaatgtttgtgttatacatagctaattgttgttgaattcacggcccattggcagttggttgttttgtgtcctacgaaggacattgttgtctgattttgttcgttgcataagaagcctaatattcatatcaaagctgcaattaacaagttaagttttatattataactcatttaatatatcttaaacatcgaaagataaatagttttgtcatcaaatatatagttaatttttgttaaagcagtgcaatgaagacattaaa

SEQ ID NO: 198380 - DNA, 360 bp, Glycine max
gctccctttctagtaggagggaatgtgcctctttctttggcactcttaagatcattccaatactctactagaggatccccatgaatccttctttccctaacaaggaaattccaccaatagagggcatacccttgaaagctaagggtagccaatgtaacttttctctcttcactaatatgatggcaagcaaaaagttgttcaaccttcatttcccaatctaggtaggccttaacattatcttttctatggaaatatgagaggctaatgttagcctcttgaggccttctatccttttctcttctttgggagtgatgtttagtatgtgactgttagtcgatgaatacgactaacttttgtgta

SEQ ID NO: 198381 - DNA, 418 bp, Glycine max
  unsure (1)..(418): unsure at all n locations
tcttacccacctagagtctctctcctctctcctctctcctctagctctaggacaaaactacataatctaattgtagggataataatcgagctaaatcaattacataaaataataactatgaaactaaatcaataaccgtaataaagaagaaattctaatgtaaataaggaaacaatcatatctatagaaaaatgaactgcatttttctatatttgaaaaaggtacaatggtgtgtataaatagggttacaagactgattgtgtacnactaattagaactaataatcacgaaccaaaatccctataattgttgtaactaagaaaggaaagaaataatagcanatcttaattatagctgtaaaatcacaatcacatgaatctgtctaattttcgtaatcatctacacttcccctcaatct

SEQ ID NO: 198382 - DNA, 278 bp, Glycine max
cctgaagatatgtcgcgagggtcaggagaccttggggacgtctggtgcggtgctattgcccaaaaccaagcttgaccaatcccgacccaacccgggcatagtcagtcagtgagaacctgtgatgtacctaagcaggcgagctcctagcagtcaacagataaaaggaactaagaccacaaagcaaggaggcttgtgtggtggctggccagctgtgaaacttgattgatatatgggatgtagcctctggtaatcgattaccaagggtgggtaatcgatta

SEQ ID NO: 198383 - DNA, 446 bp, Glycine max
  unsure (1)..(446): unsure at all n locations
agcttctacttatgtggcaaggcgtgtctttcttactntcttgtctccaacgcgagctctgaccactgtttttccttcccgcgatgcttcttttcatgttcgcctgagtgggcttatagcctaaaccatacttcccacgatttccttgggtttttatcaagctagttatgccgccattgtctttgcctaaacccatcccgggttcataaccgttccccaacataactcgggccatcattaccgccgcatcggacaggcaaagttgcccaaagagggagtccacggaggaaatgctgaccacctcanaagactggaaagcggtttctaacgattcttctgcggcttccacataaggcatggaggatgggcagcttaccaagatatccttctcgcctgacacgatgaccaagtgcccctccactacgaacttcatcttttggtggagt

SEQ ID NO: 198384 - DNA, 347 bp, Glycine max
  unsure (1)..(347): unsure at all n locations
catgggctaagtatgaacccatttatctttgtacatattaaattaagatttcattaattttgggcctttgatttagggctccataatgtaggtagggtaccctagaaatatacgaattttcagcccttgtattttatggcacctagactaagttttgtattaagggtagtttgtaatttcacatgcactaagtgaatatttgatgtgtgttgggaaataaaatttaatcgaattggtagaagctcaatccacatataattttagagggggaggtgagcatttgcttactacacnccattgccacatcatattgtcacactttgtgcatgtccttcattgcttacatg

SEQ ID NO: 198385 - DNA, 407 bp, Glycine max
agcttcattttatcatgcttctattgaatctacatcagatccattgatctgattgcttattacaaaatgcacactttatatatgcttccatagagacagcaacttgcctcacggaacagaatcctcctacccaaaatggaaaaatgtatatttcaattttcaaacacaaaacggagtcctccaataatcaaaattcagcactaaatatgaactcagccatctaagatcacatgatgcagttcttttgttattttcaaataaaaccaatattcataaaatttatatctaaaagaacaggaagaaagtctcacctggccacaataatttctgggaattacatcagctccattctccagccaccatgccacaatctacagaaaacccacagaaataatgaatagtaaaag

SEQ ID NO: 198386 - DNA, 383 bp, Glycine max
gcttagccttgatggaaagttatcattttttatttacaataggaggttgtggaagcaaaattcatactacacagtggtagggatgtctcctccacctctaagaacctaaagatcactctcaaatttagaatcctcttgaaagatgaagattttggtgctcccttgccctgttatgtcgctctattgcataagctctcaagcatatccctacttttcgccaactttagcttttaagggctttctatcctcgaaggctcacttagcaccattttcgtgctaagcgcaagtaaatgatttttcattgagcgagctgggtgcgcttagcgcgagagaagacaaacgactcactaagcaagttgatgacacattgggcgcgtagatgc

SEQ ID NO: 198387 - DNA, 406 bp, Glycine max
agcatatggaagaccaagaactgcattgcctgatttctgataaaaacaaatgaaagaaggctttaaagtaaaaaaaaagtagagaacacaacaatgtgaaagctacggttgggacaatgtagtatattgccagtaatttaggatgatacatagatcaagcattaaaaagaaaagaaaaaaaatgatcatacagataaagcaaaatgaaataaaaaagaatctcattcaagatggcttgatccatatttcttattatcaaaacaaacaagtgtttgatagttgatccacaccacatgatactaacaagtatgtcagagaattaccttgtgaatctcagcaagttaaagaagaactgaagcattctcaactttgagaatgtatttgtagcacatacagaagagggagt

SEQ ID NO: 198388 - DNA, 287 bp, Glycine max
ttttgcgaccttgatgttcactggacatttggggtctctagagcttgctggaagcatacgtagccagtgatggtattcaaggtctagcttatggcattatggcatgcctctttatctgcgccacttaacacacacttgtgaatacatattctattagatataacttatatgcggctccgctacagcttttagcgttgactgtttctattagataaaatctaaatgcacatccatagtacttttagtgatgttctctcatagaattaaagatcacttaagaaattgca

SEQ ID NO: 198389 - DNA, 382 bp, Glycine max
  unsure (1)..(382): unsure at all n locations
ctatgcagcgaatcaaaagataatgaagaagatattgagagaacactgagtgtcataattgataaatgcaaacacatttatgcagataaaagaaataaagcaatggggaagaaatccatttctctccttatgaagaagatatttgtttgtagaagtagaaactgtccaacacctatcctaagagatacccttcaagagtcaagaatggagaaagtacccttttgtttntctgataacctttcattttcctaactagctggacaaaatatcgtatggtatgagatcaccacatgttcatgattcacagtaatctccatgtgacaagtagttgagtttttcaagtatgagagagtaataaacttcgcatgtatcacatacaaat

SEQ ID NO: 198390 - DNA, 334 bp, Glycine max
  unsure (1)..(334): unsure at all n locations
agccccttaggcacttctctctctttctaatttgcttaagaaaactatctctgtgaagaagatccatgccgagggcgcttcgtaacgtttccgtaacgttttcgtgagtgatttcgcgaaggttttcaaccgttcttcgacattcttcattcgttctacatcgatcttcagccttcaacgggtaagtacctcaaaccaagcttntcaattcattctatgtacccgtggtgggccacattttgtttcatgtatttntattctcgttctcatttactttttatacccccctttgacatgcttaagccatctatttaagtcatttctcgcttaatct

SEQ ID NO: 198391 - DNA, 283 bp, Glycine max
gaaaggtggttcacatgagttaattgatccggtgaagctgtttgaggatggccttgttcgcgtgtcttctttcaaatggctgcctcccgggagcacagagactgccgttgcattccgcaccttccataagatttagattgcttcgccgtctcattccaataacgatccttccaccacaaggaatatgttggactccgcaatattttgcactttacaggtgcttaagagttttctatattagaagttgctttcctaatattggaaggttgttccatagtttgct

SEQ ID NO: 198392 - DNA, 470 bp, Glycine max
  unsure (1)..(470): unsure at all n locations
cttcagtatacttctgaatctgctgattatagtcttataacaatatgtacatcttctgggtagtatagttntttctccttcctatgtctaatgattaattgggtgattacagacccacaaattttatttctagatcctttttttagatttttattatttgaacatggtatacatttatctttatttctccattaatttttacctttttggtatgtgtacacaaatctcagaagtacttcaataaatcaaacgcacgacaaatgttatcctaaaactgtggtacaaaaaccttggcttattccccaagttgcattagttcaggataattaattngccgattattttcgacgaaagaaatcatgattaataaaaagagagtataatttggcaaaatgaatttgggggcctaattaaagactagagcattttgtttcaggangggacgaatccagttatcgatgatcttgtag

SEQ ID NO: 198393 - DNA, 388 bp, Glycine max
  unsure (1)..(388): unsure at all n locations
cggtcgggcgatggtgcacaacaagctttccacatccacaatgcgcgcataaacccaccatcccctgttgcccacctccaacggagctcacgtactcccacgtagcccatatcctcgtttctctcaacaccgggtccccatcaatcctctcaagctttcacaacatccaagcaaaacaacattcaaacagcacaagctatcacagccaagcaaaacagagcaaaggcagaaaactctgctcaacacatcaaccaaaatcacagcttttctcatgtaaagaccacagtaacaattccttcgatcccaattcgtaacccgttggatcgacttcaanaatttactggaagtctatagtgtataagcctacattttgaccggtggatatact

SEQ ID NO: 198394 - DNA, 496 bp, Glycine max
  unsure (1)..(496): unsure at all n locations
agcttctatgganggtggatcttagagtctcaatttcgtttttcaatggcgatnntcaggcatggagttgcaatggaagataaaagagaagaggtgagaggaggtgccattcactaaggaataagccatggaagaagaacgttcaccacccagagagtgtcttggataagaagcttatagaggaagcttcaatggaggaagagaatgagaaagagagagagagagagagagagagaanatgaccggggaatgaaggaaagataaggagagaagttaaactntaaaaagtgtgtctcacaagactctaattcatcaaagttatgacaagtgttaaatatgtgtctatttatagtctagcacatgagaaacttccttgagaagctaggaaggtagctttctcgggaagctagaggaagaaaacttttttgagaagctagagggggctactcacacccctccaatctaagctcacccccatgccataatacatgaaaat

SEQ ID NO: 198395 - DNA, 279 bp, Glycine max
  unsure (1)..(279): unsure at all n locations
ggggaacggcnacgaacccggaatgggtttatgcaaagacaacggtggcataactagcctgataaatgccaaaggaaatcgtgggaagtatgggttacgctataagcccactcaggcagatataaagagaagcatcgcgggaaggaagagcggtagtcaaagctcgcggttgagacaagaatgtgaaggaagcccaccctgccacataagtaggagctttataagcgcgcgtctggcggacgaangtcaagtggtcgcgatatacaaagatgatgttcc

SEQ ID NO: 198396 - DNA, 242 bp, Glycine max
ttatgggaggaggttatatgccatttttgctttaagagtaatgtcccacaaaaactaactttccaaatgtttgccttcgcaagaatggcaccgaggaagcttgcctcatagaagtccaggaaggacaaggcggccgaaggaactagttccgccccggagtacgacagtcaccgctttaagagcgttgtacatcagcagcgcttcgaagccatcaaaggatggtcgtttctccgggagcgacg

SEQ ID NO: 198397 - DNA, 417 bp, Glycine max
  unsure (1)..(417): unsure at all n locations
ctctcgacgtcttatgtactcttatcggacatccgtgtgaaaagctatgaccatttgaatttctcgagagtttccgatgtttaatttcgagcggatcgatatattataagcctgaatcggacattcgtgtgaaaagctattaccatttgaaattctcaagagcttccattgatcaattttgagcctctcgacatcttatgcgcccgaatcgaacatccgtatgaagagctatgaccatttgaatttctcgagagcttccgatgtttaatttcgagcgtatcgatatattataagcctgaatcggacatncgtgtgaagagttaagaccattngaatttctcaagagcttccgttggtcaatttcgagcgtctccacatcttatgcgcacgaatcggacatccgtgtgaaaagtatga

SEQ ID NO: 198398 - DNA, 477 bp, Glycine max
  unsure (1)..(477): unsure at all n locations
tgcaagctgtaatcgattacacacatactgttatctattaccataagagatnttcagaaaatatcctcaattgtcacatcttttcatttggttcttgaatggctatcaaaggcctatatatatgtgacttgagacacgaatttgctaagagtttttcagaacaaaaaggtcttatcctcttaaaaagaaaaatcgttttatcctcttacaaattccttggccaaaacacttgtgattcaataaggaattatttgagtgctcaaattgttcaatctatctctttcaagagagatttcttcttctcttcttctttattctgaaaagggattaagagaccgagggtttcttgttgtgaaagacttctaaccacaaaggaagaattgtccttgtgtgtttagaactcgtaaaaggaatttacaagatagtggaactctcaagcgggttgcttgtggactggacgtatgcaccaaggtgtgg

SEQ ID NO: 198399 - DNA, 444 bp, Glycine max
  unsure (1)..(444): unsure at all n locations
ctcagctatgcgctatntcttacaacgtcactggacattatttttattatactaaaaaaaggcacccatatacaatcaaggcagcttcgntatctagattatttacatgtacttccaaggtgtatttgntacttacatcacacacatctncttggctaaatttacatacatgcatactcaaagcattttggggtaccaaaaattgcacatgtgcacatcttggtatttctaatacctatacatacacaaacttcatgatgaatcttgactatctacacaataaggtgctacatttcatgcctcttttcaagttttgctacctaaagtcgcatgcaaattcaagtatatnttcctttgctgactaaaattgtattcaaattaaaaggtatcatttttttgaatggatctcctttacataacatgcaacatatttatatatatatt

SEQ ID NO: 198400 - DNA, 437 bp, Glycine max
  unsure (1)..(437): unsure at all n locations
tgtagcttcaantctaagtccagaggaactaaattgcctatggtagatctatgcatataaaatactaacagacacaacagttatccaattcaataagagaagataaatatgaataaaaaacaaatattcacagataaacaaagaataatgaataaagaatagacacctaaaaatgaactaactntccaaataaaaagaagttccccggcaacggcgccaaaaacttgtatgctntcagcgagtgtaccggatcacgcaagtagtataaaacggtaagaaccgagtatcgaacttctggggaactngtgttacttggtaaagctatttcagtaaacaggtgtctagtgtgaaaagagatgtgtttatatgaacaggtgtgtgaactaactattaaaagggaanagtctcgtgaaaatgatgcgtataaacaagtagac

SEQ ID NO: 198401 - DNA, 361 bp, Glycine max
  unsure (1)..(361): unsure at all n locations
ggtaattgattacacagatactgtaatcgattaccagttgagattttcagattatattctcaacagtcacatcttttcatttggttcttgaatggccatcaaaggcctatatatatgtgacttgagacacgaatttgctaagagtttttagaacaaaaaggtcttatcttcttaaaaagcaaaatcgttgtatcctcttacaaagttccttggccaaaacacttgtgattcaataaggaattatttgagtgctcaaattgttcaatctatctctttcaagagagatttcttcttctcttcttctttattctgaanaaggattaagagaccgagggtctcttgttgtaaagaaatctgaaca

SEQ ID NO: 198402 - DNA, 466 bp, Glycine max
  unsure (1)..(466): unsure at all n locations
actcagctatatcaagatgtcttgtacatttacataaaccattatttatcaattatttatatcccncgnagcaacaaaactatggttattttggatcatctagttacaacatattggaacgtccaaatctaacactttttgtataacatttattttccattttgtatcaatgtgaatggtgtcaattctatcttgatcaaatgggtatttcatccaaaattgtggtgttgaaaccactgcacctaactgattcaaagtcggtcttcacatgattatattgcatggagntgttgtatcaatcaccatatactgtatgacaactatctttgcatcctttcccaagctaaatgtaatttttgagttagaactacctttgaacttaatctattagcctgaaaaaccaataagagatcctangcatcgccataatttctcgcttgacattntcatccttctatagaatata

SEQ ID NO: 198403 - DNA, 240 bp, Glycine max
aagtagtgcactatatgcttccaaaggacaatacattgcctaaaagttactaccaggcaaagaaggtattgtgtcccatgggtatggggtatcaaaagattcatgcttgcccaaatgattgcatactgtacaaacataaatttgaagaaatgtccaaattccctaggtgtggggtatcacggtgcaaagtgaagaatgatgaggagtgtagtattgatgaaaactcaaagagggcccccc

SEQ ID NO: 198404 - DNA, 464 bp, Glycine max
  unsure (1)..(464): unsure at all n locations
tctctgctagcagcttaaaagattaatgcttattatgaaatgtttaaatgaaacagaaaagcaaactagaataaaagaaatgaaaggatttcaccacagaacccattcaatatcctaattctacacgtaatcagttcacatttcttaagtcatttatttatattcatttaaagagaaaatgttgcagcggttgatttaccaatttgacgattagagctttctcgtgacgcaggtgagacaacttttctcgaagctcttcagcagtggcgaataatttaccgccaagatatcctccgtgccctccaacgacagttatcatcttgccatgagacaaaagtcggcaccgcctacacagaacggntcgaaaagtggtggtgttcttcttctgcaacatagcacgcacacaatcagcgtttcgaaattcagcaaaaatgatgcctttcaaattcaacctatattgacac

SEQ ID NO: 198405 - DNA, 400 bp, Glycine max
  unsure (1)..(400): unsure at all n locations
agcttatgcactagcagttgcattagtttttttttatccataaactntggcttggctaatgataattnntattcaagagtacaaaatacattaaaaagtagataaaaagtagcaatgtgcctctaattttatggtttcttatgagagatttgtaaatatctgattttgtgtgagttttacatagtggaggcttcattttgatgattgatattgttattatttggatttttacatagtggaggcttcattctgataaaaagtagcaatgtgcctctaattttatggtttcttatgtgagatttgtaaatatcagcaagccagatcagctaagcgaggcttacccgcttagtgaggaagccagctcgcctagcgagagaagaaccctagagaatgtaaagtc

SEQ ID NO: 198406 - DNA, 344 bp, Glycine max
  unsure (1)..(344): unsure at all n locations
gcccccaattctactgctccgngaggtctgacttcattgattatgaacggccctaaccacttggacttcaacttacctgggaatagccttaaccttgatttaaagagtaatacctgctgccatggttggaattctttcctctgtagcttcttgtcatgatatgccttcatcttttggctgaaattttggatgactcgtaggcattcagtctcatctcttctaattccagcaactgtagcttcctcttttctccgcatgcgttgttatcaaaagtgagtaactcgagagcctaatatgctttgtgctccagctccactggtaaatgacatgccttcccatacact

SEQ ID NO: 198407 - DNA, 123 bp, Glycine max
accactccgactcgacgcgacttagaacattaaagcctcaacactaaactcaacccggccaaacttgttacttggagagattcctcaacgatattctacacaatacgtggtgcaagaaaaatg

SEQ ID NO: 198408 - DNA, 472 bp, Glycine max
  unsure (1)..(472): unsure at all n locations
acatcggagctgagcgaggccaatgcggagctcgaaatgcatatctctacaaagaactagncgaacaggatcttagaggcttcgaagttcaattgatgttgactgaatcttccgttcaaacgctagcggttacttaatactcagtcaatcgatttcttttgatagaattcaattcaattgaacacacaccgacacaggcgagagtatctctaattcaaggccacatctctgccgtcgaatctgatttcgaaactctcagggtgagtctcactctctcactcactctcgccgntggatttcaaatggttttctcttggttataacttgtcatcatcagacttgtttgtgattgtgtgttgtgctatcatgaccaaagagtgaagaagcagctttgcggtaacacatcanttcgttactcgtttccaccatttcccaagttaaaatnngttgttgcttcaatagacttccatgt

SEQ ID NO: 198409 - DNA, 324 bp, Glycine max
ggaacatggttgtggtgatggtaaaggcttaatttttaacgtgggttttctggtttaaaatatactaattacgatatatcttataatatatattgtacgatcaatgatatcaatattaatgtagatataagagtttattcatcatattaaacaattcaacataagagtttattctaataaaaagttcgatcatgaattactactttatatagattactaccttcttccactaaatccaatctttattgtgcatgaaagacttgttatctcctttaacaaaaaaaaaagagagaattttcatacaaactaattattacaaaaaaa

SEQ ID NO: 198410 - DNA, 422 bp, Glycine max
  unsure (1)..(422): unsure at all n locations
agtatatataatcgtgaaactgttgacatggcactctacttanggcctagagttcaagttgaaattaaagctgttggctttcctagttcatcaaaatgtnttccgagataatgtgtactttctgatatctgaatttccaaggtgtttttagtttaatgttgccttttgacattcctagctagtgagataaggcttggttgtgcatcttgtattagacacattatggtctttgcaatggactttatgctattgataagatctgcttacgtgtcttataaaacgttggtgaatnttctctatgaagagatatacgtaagtagcaaggaattggctggtctgcattactgagtgtcaagactgcaatttcgaatggcaagaaataataagacatcatagggacacagtcaatcaatccattaacc

SEQ ID NO: 198411 - DNA, 355 bp, Glycine max
  unsure (1)..(355): unsure at all n locations
cgcaccttcttaaacattcggtcataggacttgctatagtgctaaaattctggataaagcgtcgataaaatgatgcaagaccaaggaaagatctcacctccgaaactgttgtagggctcggccaagtcttgatagcatccacttttgtttgatcaacggatactccatctttagacaccacatatccaagaaacaccacactttcaaccaagaaatcacacttttccctctttccatagagtttttgtgctcttagggtctcaaatatttgtntcaaatgagtgaaatgctcctctatagaattgctatacaccaatatgtcatcaagataaacaacaacaaacttacccaaaaa

SEQ ID NO: 198412 - DNA, 263 bp, Glycine max
tgtttctggcgaataatgggacatgcatttctgcgaatgaaacatccgtggctcgcagaaaaacctaccgactacttgtagttttttgcacacgatcaaaaacttcctgcgtagaaacatttggcacgacgttttttttaaatgccatgtcgtgaaattaatcggcattacacgatgcgtatgattttttcatctgataattcagatgcatagaaagtacgctctcgtgagtttttaacctacgcatttctgctctacatatt

SEQ ID NO: 198413 - DNA, 281 bp, Glycine max
gagaaatttatcgtgaaatccactccgaattaatttgagattctttactaactagttgtgtaagactataccgcgtatatgagaacctcactttcttaaaaattgcaacacattattgaaaagatttgatacaattattaattaactgacacttttacagatagtcctttttgggcaaaatgataccttcaattaactgtcctagagcttgcgtgcgatctataattatatattgacaactgaacccattcttcgagtctatgtaaacactttttctctac

SEQ ID NO: 198414 - DNA, 389 bp, Glycine max
  unsure (1)..(389): unsure at all n locations
ttttttaangcctcangaaagaagaanccagcagcaccaagcattgcccatctggcatgaatcaactcaaatgcctgatatctacattagaccatcaaccaaccaacccaacattagagcacagctaatgtaacatagcacatacatagatatctaaattgtgagtgtttggcatacttggcaaagtcttctggcttcttgctaagaccaaataggggataaccgtagctgcatggacacacattaccaaattaagtaaaacaagaaccaataaacttcacacacattgcttgtctaatgactagcatgttaatgcgaagtaaaagtggactataatagaggagaatccacatactctccacggacttctccggtcaagtactctggga

SEQ ID NO: 198415 - DNA, 310 bp, Glycine max
gcatgactgacaatgttagttagtttgtcagatcgattgtgaaggaatgcattaaccgcatcccggtgagatccttaaattctgagagaaatgactatcattatactgattttgcgtgaatctctgaagtatggactgaatgcatgaaattctggatgatgaatgccatgtttgattgtgatagccacttagccaaaaagctgactatgtgcttgaataaattatctcttgttcccagttggagctgaatgaattattgtatgattgaaccctgagcccatacatgttatttcctgctacttgatctagt

SEQ ID NO: 198416 - DNA, 277 bp, Glycine max
ccataaacatactgtgaggttgtattttacatctacccaaataatacaatcctaagcctctaagaaactatatttgtgcttacaacgtttagaaaacttttatagtaaaaagctataatacttgttactaacaggaatggtactgatagatcaacataacactatcttacatatattcaggtgattatatcttgatcgtggctcttcaatgcaagagcaatccttggtgtaccctgaaataataagcatggcaacttgctcagtggggagctttgca

SEQ ID NO: 198417 - DNA, 293 bp, Glycine max
  unsure (1)..(293): unsure at all n locations
tattcaaaaagttataactagtcaagatctgagcgacaatacaaacttcctagcggtttctaatcatatggtccattaagtctatcatatgctgacaatagctgagaagtccgtggatctcctcgggggcggagtaggtgtccgccactgctntggccttggctagcaatgggggaagttcttgactcctgttcaaagtaagagcaaatcggtccgtccacattgttgcctcttggtgcaatgaatcaattaccctttcccttgcttcgctntctgctgatatcttggcgtac

SEQ ID NO: 198418 - DNA, 394 bp, Glycine max
ttgagccaaaatcctgactcaccataaaccttgacccattgttataatgtctatccttaccctcggaagcaaaaaagaatagaagggaaatttccaatcaaaaaaaaaaaaaaaaagagaaggaaaattcccaatgaaagagaaaaaagaaaagaaaggaaattcccaatcaaagagtgggagaaagcaaaaagaaaagaaagaaaattcccaaccaaagaatgggaaaagtaaaaaagaaaagaagaaagctcccggtcaaagaaactagaagaaatgtgcagaaaggtcttttgaccagacaatatctgaacaatacagaattgtcaccaaatgaacaaaaaaggaaggaaaggaaaccacgacctaaaatggtcttctccctttaattacc

SEQ ID NO: 198419 - DNA, 367 bp, Glycine max
tcaacatgattctgttagggatgctagcccatgaggaaaaccatcaactagctcttttaaaggctaaaatgacgtgtccacttctaagccctgagagcttctacaccttgacttgattggaccacccagaactgcatgtctttctggacacaaaaattgtgtggacgtagtggactattactccagatggacataggtcaatgttctaacctagaaagatgagtatttgatatctttataacttactaaaaatattgaaaaagataaaatatttgtatcttctcaatgcgatgagatacgagggagagctagacaatatctttctgaaaattccgtgaagataattgattcaccatattttgcacat

SEQ ID NO: 198420 - DNA, 415 bp, Glycine max
  unsure (1)..(415): unsure at all n locations
ctgcaagctttatgaaactataagctttagtcttgatgttgctcatgnngctcctcctatctctaacaaaattaacaattntattacatggataatatgttgataaattagttctatctagtaagcaacacccaatgttcttttttatgacaattggatccaatcgcatcacataagtaaggacgtttaagtattttttgcatattcggcaactaaattttaaattttcatttttactttcacgaccaacatgaacatttattctaaaataaaaaatgtatatattgtatataacattatagtaatatctaaattataaaaaaattatacttgtgcactgtaccaaatctagtatttgataaaagcttatataataactccaaaaaacccatctggagaaacaatacatgttata

SEQ ID NO: 198421 - DNA, 242 bp, Glycine max
atcaatattaacacaaaatctaaccgatcggtcatactggaacctcggtttaaccagagaaagtcgaagaataattagattatcaaagtatctcgcaaaagcaataatagtaagatggtgaaagaaatccatcggacggtgatctttgaaagtgtccttgaattaattgactaataacccaagcgaaaccaaagctaaagtcaactcacaaaccaagctgtgtgcgcaaaagatcactcaag

SEQ ID NO: 198422 - DNA, 423 bp, Glycine max
  unsure (1)..(423): unsure at all n locations
gcttagatcagccaagaccatgttatttgtgaagtcaagttaacagttccatgtaatttttttttaggtatttatagttgaaatgttgacatccactaaatggcgtcattttatgcaggccaaatttgatatcccaaaagcctctaaggtcaagaagaaggtgatgtccatggtggccactagatggaggcaatttaagtcttcgctaaccactaaatttgtctatgttgacactgacggtcgagacaaatgagatccttctgtaaaatatggtatggaccaagaaacttgggatgtatttgctgcaagtcgcaagacccctacctggcaggttagatgtttcttacttttnaattaaataagctatagaaatatagcatnttgtttcacttacttacatggaaatgctatatgatgtatcat

SEQ ID NO: 198423 - DNA, 472 bp, Glycine max
  unsure (1)..(472): unsure at all n locations
tattataaatgaatctgtggtacaacatcttttcttcttatatatctcatgataagnntttatttgaatttcttgttaaactaagatcaccatcggcagtaatacataagagccatgaagtaaaaattccagctccatttgctgcttcattttcacctagaggtccaaatacaggatctcaacatattctgaaggtactagtaccaaaagctgcaaaatttcctccattatatagttagtggacttatttttgatcttcttgtaaactaaccataaagttagtatttaagaactaagtgagttttataatctatttgatgcagcgtgatgttgcagctcctgggcattaacatctggcatcttatacaactatgaagtcaattactggtcagaaaggggatacccaattntcagaaattacacttatgtctggaactctatgcatgcctcatgttgctgagtagtgcatatg

SEQ ID NO: 198424 - DNA, 323 bp, Glycine max
acgacgcttaccaagttgagctgcccagagagtataatgtctccttcaccttcaatgtctctgacttatctctttttgatgcagaaggagaatcttattagaggacaaatccttcttcagagggagagaatgatgatgacatgaccaatagcaatggcaaggatccacttgtaagacttggatgacctatgacaaaggctacagcaaggaaagctcatgaagctctttaacaagtgttgtccatactatttgaatacaagctcaagttttaaggagaacagtccaagttgtgagtgtatactggcccacatggagaggataaa

SEQ ID NO: 198425 - DNA, 417 bp, Glycine max
  unsure (1)..(417): unsure at all n locations
ttttgttctcagcatagaacacaggaacaatttcaaatagagaaaaaccctaattgcatcaagtatctcggtggaaggacccaacacttttacttatttgttttcacactcaattgttcatgtttactgtgtctttgattacaatagaatatacctctattttcaattcatgatatttaattctttttacaaacagttgtattttgaatgacgctnttccaagtaaaataggttccctgagtttgatacttggatctttccgttntaattatttacttgacgatctggtgcacttgctggtagaatttgcacccacacaaacaagtagtattcctaggggtggaaacatagtgtcatcaacaaacttcttaacattcaaggcaagacaaatgatggttngaatactcgctaagatct

SEQ ID NO: 198426 - DNA, 268 bp, Glycine max
  unsure (1)..(268): unsure at all n locations
tccacttactcacgctaagcgcgagggtggcgctaagtgcaacgtcacgggtttagagcctatntaaagcattntgggggagtttgttagttgtcttatacgactaactnntgtatagaaagcattttccaaaaacttgtatagttcccccaatttatggttatttagtagtagtttgtaaataaatcttgttttattgttaaagctgtctctagaatatttccatcggatttaatgatgaaatctgtgcaatttcaagtgaaaaaaa

SEQ ID NO: 198427 - DNA, 306 bp, Glycine max
tgataatcttcatgcctcttaagtgcagatgttcaaatgtttgatgccatattatgacttcatcttctatggacgatggacatgtggaagagtaactgggttcttgaggtgtccataggtagcagttagacttagatctgctgcccctcattagaacttcaatcttctcatttgtcaccaagcattctgactttgtgaagtgtacatatgatccttcatcacacaactgactgatgctgatcaagtttgcagtcagtcccttcaccagcagtactctgttcagactatggaagtccatcatggact

SEQ ID NO: 198428 - DNA, 422 bp, Glycine max
ctgcagcttatagcgcggatcggagacatttgtttctttcgcgacatgcgaagatgatattccgagtactttggatttggtacgaccatgccctcctgatttccagctggggaaatggcgagtggaggaacgccccggcatttacgcaacaagcataatatccgatgacgagtcccccgaaggtactaatacctgggacccgtctatcgacttcgagcaagaaatgaatctaacggaagatgaaggaaatgaagatgtgggacttcccccagaactagaaagaatggtcgcccatgaggaccaagaaatggggcctcatcaagaagaaacagagctagtagacttaggaattggcagtggaaagagggaagtaaagataggtacacgtattaccgcacctattcgtgaaaattaataatcct

SEQ ID NO: 198429 - DNA, 429 bp, Glycine max
  unsure (1)..(429): unsure at all n locations
atgagcaatacgtggtttcgtctagtattgcagcaatagcaacattgttcctgtacaacattctttttctcttttccttggcttctttttctccttctattaaatagcttaggagcaacaacaattgcagtctccttatttagctctttctccttgatggctntcaccgaagttaatggaataagacgttgaatgattccaaggtattccttccactntataggttctcgaacaacattgggatgattnttttnttcaaatttgagttaagggaatgagatgttcaatgactccaaggttttgatcctctctggttgttgcaccacttgagctaatggagctttaggttcatcagattcagtagtggcttccacttcgtccactcttttcctcttaagagagtcttcagtttcctcattctaagataga

SEQ ID NO: 198430 - DNA, 417 bp, Glycine max
  unsure (1)..(417): unsure at all n locations
cgcgagctttgaccaccgctcttctttcccgcgatgcttctcttcatatctgcctgagagggcttataacctaaaccatacttcccacgatttcctttggcatttatcaaggccgttgtctttgcctaaacccattccgggttcgtaaccgttccccaacataactcgggccatcattactgctgcatcggacaggcaaggctgcccagagaaggagtccacagaggaaatgctgaccacctcaaaagactggaaagcggtttctaacgtttcttctgcggcttctacataaagcatagaggatgggcagctcaccaagatgtctctctcgcctgacacgatgaccaaatgccccttcactacgaatntcaacttttggtggagtgtatagggcacaacttccactgagtggatcca

SEQ ID NO: 198431 - DNA, 367 bp, Glycine max
gtgcatatagagctacagacgtcttggaattgatacatacagacatcttggggccatttcatacaccttcatggaatggtcaacagtattttatatcatttatagacgattactctagatatgcatacttgtttcttatacatgaaaagtcacaatctctagatatgttcaaaacatttaaagttgaagttgaaaaccaactcaacaaaagaataaagtgtgtttgaccatggtggtgaatactatggcagatacgacggttcaggtgaacaacgtctggggccttttgccaagtacctagaggaatgtggaatcgtcccacaatacaccatgcgagggtcacctagcatgaatggtgtggctgaaa

SEQ ID NO: 198432 - DNA, 366 bp, Glycine max
  unsure (1)..(366): unsure at all n locations
accacagattctgccttcttctattttcatatagggaatgcctctaacagcacctttgtcaatgattttcttcatgcctcttaagtgcagatgtccaaatctttgatgccatatcttgacttcatcttttttggaggatagacatgtggaggagtaactggtttcttgaggtgtccataggtaaccagtgtcctttgatctgctgcccttcattaaaacttcactcttctcatttgtcaccaagcattctgactttgttgaagtgacatngaattcttcattacacaactgactgatgctgatcaagtttgcagtcagtcccttcaccagtcagtctttgttcagactangaaagtcatcatggac

SEQ ID NO: 198433 - DNA, 301 bp, Glycine max
tgagtatgacagccaccgctttaggagcgcggtacaccagcagcgctctgaggccatcaagggatggtcgtttctcccggagcgacccgtccagctcatggacgacgagtatactgatttccaggaggaaataacgcgccggcggtggacatcactggttactcccatggccaagttcgatccacaaatagtccttgagttttatgccaatgcttggccaacagaggagggcgtgcgtgacatgaggtcctgtgtaaggggtcagtggatcccgttcgatgcacatgctatcggtcaactt

SEQ ID NO: 198434 - DNA, 273 bp, Glycine max
ttgagagattgcccatttattaaaactgggaattctcgcgtaaagtgatcaccctgtttggaacactcttctaaagaaagaggtgtataattgtctatgggatgatatgcattacccgggatgatatagagaaataaataattgaaggcatctcttgtgggtgagtctgagaataaagaccttggatccctaaaatatcttctaggaatggagggtgcaagaacaaaataggggactgtggtgtctccatagaagtatattttggacctactg

SEQ ID NO: 198435 - DNA, 207 bp, Glycine max
atgcatatgaatccctgctgagccaaaatctaaacataaatggattcacgaacgtgagtagatatcaacttattgtcacaaagctataaatgtcacaagaaactataatgctcttcacggtctcttcattgacgggaactgggttcaacagcctgaccgaactaagaatgaagcgtttcatcactctcttcatatatattctgaaga

SEQ ID NO: 198436 - DNA, 281 bp, Glycine max
  unsure (1)..(281): unsure at all n locations
ttgcaccggatcgcacaagtagtataaaacggttagaaccaagtatcgaacttctcggggaacttgtgttatctggcaagctatttcgataaataggtgtctggtatgaaaatataattgtggttatggacaactatttaaactatctaggcaaaaagaaagaccatcatgcaagagaaatactgtgtaaaaacaagtagagaaagcgttggtcttcctcataagttcctgatgctaanaaggatgttctctatataacaatgctcatgccgttctatgtt

SEQ ID NO: 198437 - DNA, 431 bp, Glycine max
  unsure (1)..(431): unsure at all n locations
ctaagcttacaattacaaaaaatctgagagactgagctcattttggtttctgactattnttgngngaccattatttagtcaaactcataatataatagtgtagcttcaagtctaatccaaactatttntctgaatcaagagtaaataactatgattgagttaaatgtatatgcattgaacaacaaacccatcggccatcaccacttaaacaagaattattctttgttttgataacagaccaacctctcccaatgtcgtttgtactcattattccaaccatgtatttaagacaaaaaccaacaggcaaaaatatgttaaattgaataaaaattaaaaagagaagaccagaagctttttaccctgtccaacaattgcagcctctcagcgagcataagttctctagcagctacatctttcaacttcttttcata

SEQ ID NO: 198438 - DNA, 370 bp, Glycine max
gccataaaaaccattggtgagcttggacggagtttgactataacccagtcacctcctacatagtgtacttctcaacggttattgtatgcaaaatgtttcattcgagcttgtgcttttaacaatttatgacgtaagctatcaaaaatttcctcccatgtggtgagtaatgtgtccactgcctccactgaagaagagcctatgatatactgaaggattgtcggtggtttctcgtcgtatgtgacctcaaatggggaggtgccaatgctagtatctttggaagtattatatgaccacttgacccaaggtaagaacttaccccacgacgatgagcgatgatgaacgaaggcatgcagaaatggctcaattatgc

SEQ ID NO: 198439 - DNA, 440 bp, Glycine max
  unsure (1)..(440): unsure at all n locations
gtcatgcncaccctcactttaatgctccttccaagccttctggttttaggtaccattcccctcactctttgtttttttactttgtcctatatcattcttggaaaaaagaaagatatataaagagaaaagtaggataaaaattaaattaaataaagagtgtatatcaataataattaattcattattatttttcaaccttttgagccgtgtaactggccggtcttgtccaaaataaagcttgattgccttaaaaaaaaaagttaattaacttatttctttacttatatatataagtgataacagaagaacatgatccactcatagataaaacatcaaaagcttaagctttatgtctataaaacatttttatttgcgattcattttatcaaataagagatctatatattgaaaataatattatatattatccagtaaatatt

SEQ ID NO: 198440 - DNA, 392 bp, Glycine max
  unsure (1)..(392): unsure at all n locations
ttcttccatggcttattccctagtggatggcgcctcctctcaccttttctcctttgtcttccgctgcatctccatggtgtaaaattaccattaaaggacctcattgaagctcaaagatcctgccttcatataagccccacaagcaagcttccatcaagtggtaatcagagcacaagagcttcaagtaggtgctccttaaacctccattaattgtttgatttaccttctcttccataagtgtttcttcattattttctccatgtatctcctcacatgtcttgtgctaaatnttgttaacatgattctttagagttcccaccaattaaacttgctatagaagctagaattgaatttctatgggtcaaatctcttgttcttgttcttgaaccatg

SEQ ID NO: 198441 - DNA, 327 bp, Glycine max
tagaggcccaggggcctgatgtatttgacctcccttttactaattcatcccttctattttttggaattctttttcgaacgttacgaactttacgaatttctaacgatacttatttccttccgcaagtacgaatcttaggatatgtattactctttttactctgaagaagtacggaactacggattggcaaaaccctctttcgatttcgccattcggaattacgattggcagcctgctctttgatttgacggcctggacttattattggcaacaagacccagtattcgagcggcatcaaggtgttatatcaaaatatcctggacaata

SEQ ID NO: 198442 - DNA, 425 bp, Glycine max
  unsure (1)..(425): unsure at all n locations
atgcatgngaacnaggaagcatcaacaataatcaagccaaggctattgcgcaagcaatcaatggggcaaaacacaccaaaagattatgatgatggatggctcgaattctcacaaaggtaaacttatcacttttaaattgagctttcaaaactatcatgacatgtaaaggaaaaacaaggatttcaagtcacaaaatgtcaagagattcttattgtcaaaacaattacccattacttgaacatatcctattattcaaagacaaacatgcaaatgtaacacaatcaaactaacaaaattaaactaatttaacacgactaacaaaaccaaaaccaaagaacacactcctccccatacttaaacaacacattgtcctcaatgtggcacatttaagagattaaaagcaattaaaccatcaaatagaatcg

SEQ ID NO: 198443 - DNA, 245 bp, Glycine max
  unsure (1)..(245): unsure at all n locations
accagcngaacggggggctaaagtacgaggttttttttttcaattggnccagagacacacaccaagtatctgtacccatggtatattatacccactttatgttttatttaaaacacacacattattgccttattgctacacttttattgaaaccattnttttcatcctttcttttttctctttttaactacatgcctgacaatgaccagcgaattacctggtgatgtgtataagtcggcacaaat

SEQ ID NO: 198444 - DNA, 280 bp, Glycine max
cgattcagatctcaaccatcaacaaatcttaagtactttgattgagatatgatttattattattgaaaatgtctgtctagaaaacatataccatttcaaaagtgcatctctggaactataaaatatagtttccaatatatgttttcataataggtatatctaattggacaaatatacttttgggaagtaaaagaagtgtacatctggtagggaaaatggtataatgggtagttgggagggaaaaaggagggtatagagggtgaattaacacatgggagta

SEQ ID NO: 198445 - DNA, 459 bp, Glycine max
  unsure (1)..(459): unsure at all n locations
ctgcagcttgactgagtagcaagagattattatatgtgaccatggcatgaatttcaagaactatcaacaatctatctttcaataattagagatctatcatctatatttcaatatcttctttcatctctttcaacactttcaacatatctttctgatttatttctcttcatctttctaaaagtttttgttcaacactttctcttccaagaaaagttctttgttcaaaaacttgtgctattcatctttntcattctgcttctcccttgccaaaagaacgaaggactaaccgcctgaattcttttgtgtctctcttctcccttacaaaagattcaaaggactaaccgcctgagaattcttttgattcttccctttcccttaagcaaaatatttcaaaggactaaccgcctgagaatatctttggttccccttacacagaatcaaagggactaaccgtctaag

SEQ ID NO: 198446 - DNA, 353 bp, Glycine max
  unsure (1)..(353): unsure at all n locations
ctcagcttgactattcaaataacagtatttttatattgaattgtttaagannggagnnttcaaatgcttggaagcattcaaaattctcatttgagaagaactccatatctatgaatnttgggtctacaatggaacgagaggaaaagaggtttgtgtatcgtatacactgttcctatgatgagaataatgatccacagggaatggagggaggaattggggcttcctgtgacctagaatgccgctgactccgactcgaagttcctttccgctttttcgatggttccgccatttgaagagttntttctggatttcaattggttcaaatgaaagagatttgaaaaagatgaaagttg

SEQ ID NO: 198447 - DNA, 390 bp, Glycine max
  unsure (1)..(390): unsure at all n locations
gagggagagaatgatagacgacggagcactaaactgatggaagaaaaaggcagagaagttgaactttgagttgtgtctcacaagactctcattcatcacagttacaacaagtgttacacatgcttatatttatagactaggtagcttccttgagaagctatcttgagacaacttgcttgagaagctagagcttagctacacacgcccctctcataactaaactcgcctccttgagaagcttacttaagaagattgctaaagaatctagagcttagctacacatacctctctaatagctatgctcacctccttgagatgagaagctagagcttagctacacacccnctataatagctaagcttacccacatgacaaagtacatgaaaatac

SEQ ID NO: 198448 - DNA, 233 bp, Glycine max
atgtgtgactctgtgtgtttacatatgttgaacttacacggactttagcatatagcgaagttaaaattgggcttggggcttaacttcaccctaaaaatcaacttataaaatgaagattggcttccacttattatactctatttcgatcatatcactagtcatgtgagatattcaacatgcgcttcttatgcccacgactactccccacaactaaagtggactcaggatgactg

SEQ ID NO: 198449 - DNA, 389 bp, Glycine max
tatacaccgcttaagctgtttttatgttggctgcaggaaaagggccaaatagaaaccaacaaatgtcaatcaaccctgataagaagatcacattacctcgaaaagatgagtgtatatgatggtgccccatggcaaccgtgattccacatcccagggaaggcatctcaaaacactaaatctacaacattgacacaagccaacatcaagacggactttccatgaaaggctcccaatagtacgctataggaggtgcactaaaccagtccaccataattccacactgtccaagactgatagaaaagtgagaaagtttaacagaatacataaattgcaaaatgagtatcccctgaaacttctcacattcacttttaaatcatgcaaatatgttg

SEQ ID NO: 198450 - DNA, 380 bp, Glycine max
  unsure (1)..(380): unsure at all n locations
cgcgaactgtgaccatgggtcttcctttccgcaatgcttcttttcatgtctgcctgagtgggcttatagcctaaaccatacttcccacgatttccttgagtatttatcagggctagttatgccgccgtgtttnttcctaaacccatcccgggttcaaaaccgttccccaacataactcgggccatcattaccgctgcatcggacagacaaggttgcccaaagagggagtccacggaggaaatgctgaccacctcaaaagactggaaagcagtttctaacgattcttctgccgcttccacataaagcatggaggatgggcagcttaccaagatatcttcctcgcctgacacgatgaccaagtgcccctcactaccaatttc

SEQ ID NO: 198451 - DNA, 495 bp, Glycine max
  unsure (1)..(495): unsure at all n locations
gcgtagcccaccatctnttcatagtagagtatcgattatgtgtctaccatcacgattatcgnctccctttccatcattgggggtaccacttgggccgccagatccctccaccttttaggcgtgttctttgaaagatccgtccccctttttgcaaatgttctatagttgcatcctatccggaaccatatcaaaattgtactgatactgcctaacaaaggcaaccattatgtccttccaagaatggactcgggaagattccaagttagtgtaccaggtaacagctaccccagtaagactttcttggaaggaatgtattagcaattcctcatcttttgcgtattcccncatcttctgacaatacatctttagatggttcttgggacaagtagtccccttgtacttgtcaaggtccagcaccttgaacttgggaggggtgatgatattgggttctatgaacaactctttanggtagcaaagacataatcttcacctcct

SEQ ID NO: 198452 - DNA, 379 bp, Glycine max
  unsure (1)..(379): unsure at all n locations
tgtcgtgtttgaagttcttaacctctatttcactaaatttgattatcaaaagcatactattaggacaagatgaagaaaacaactaaaagtggaaaatggaagaagatgacacaatagatttatacttgttcaccctanacccaaagccacgtctagtccttactctttcagtgagattttcactattacaaccaccattaacacaattcggtttataacaacaatcactttcacctaagtttcaaaactacataggacttcactcaagtcctagcaacacaattcccttaatctcacaacacacttgctccctcaccaccacaccttggtcttggcttggagcctttcaaatgcacaacaagagggttatgtgatcact

SEQ ID NO: 198453 - DNA, 415 bp, Glycine max
  unsure (1)..(415): unsure at all n locations
atatgggagcaaaagacntatttcatatatcatttattaattaatgaaataaaagttatgtttatttataattaagagattaaatttaattaaaaattttagttatagaaaaaaatagctagtatgtaattattaattattaattattaataattaaaaattttagttatagaaaaaaaaatttaagccaaaataataaatagtatgtaattatatttcaatagagtttctaaataaagcatgaaaaatatatgctatacaatntanataattntacactattgtttaatcataaaattttacgtatgataaatttgtagatttactataataccttcaagttatataatattaattttgatggatgcggtgaaatcctttactatgccataaattataaatatacacacatttg

SEQ ID NO: 198454 - DNA, 387 bp, Glycine max
  unsure (1)..(387): unsure at all n locations
gcttctcgatatattatgcgcgtgaattgtgcttctttgtgccangttatgaccatttgaatttcttgagtgcttctggttttcaattcaaagcatctcgataagtgatgcgccagaattcaagttccgtgtgaaaagttatggccattggaatttctcgagagcttccgatgttcaattttgagcttctggatatattatgtacctgaatcagatatccgtgtgacaagttatgaccatttgaatttctcgaaagcattcgtagttcaattttgagcgtctcgatatattatgcgcctaaatcggactctcgtgtgcaagttatgaccattggaattcttcgagagccttcggtgctccaatttcagcttctggatatattatgtg

SEQ ID NO: 198455 - DNA, 323 bp, Glycine max
  unsure (1)..(323): unsure at all n locations
cctacatcaaagttgtaaaatcagcacacatgttggttaggactgaaaaaaaactatataaaacacaagcctgttagtttgccataactcctacaagtgcagtgtctcatttcagcctaaaattgaccctcaaccttattcccncacatgtggacctcatatctcatgcccatgttatcaccacaccaaatgggagtccattgattagcaaaatggaattcttcttctagtctcttatactgcactggacataatggtccacgttttacagaaaagttaaccttgcgggcagccatggctctcatgatataacttctacattc

SEQ ID NO: 198456 - DNA, 405 bp, Glycine max
  unsure (1)..(405): unsure at all n locations
agatgcattgttaccttgtaaaagaatacaaattctatcaaataaaataaactttgatgccaaatattactcgtgaataaaaactaacagtgtgtttggatgaggaaatttaaaattctaaagaattttaaattctgagaatttcaaatgcttcaatttaaattccttcatttctaaaattctgtgtttggataaaaaattagatttcttcatttttaaaattttgtgtttggataaagaaattaaatttcttcattttcaaaattttgtgtttgaatacagaaattgaatttcttcatttttaaaacttcttatttgtgataaataatcaaatgcattctctcttaaaatnttatatttagttaggtgaactgttcttatataacataaagagaacctgagtca

SEQ ID NO: 198457 - DNA, 395 bp, Glycine max
  unsure (1)..(395): unsure at all n locations
aacgggcagaatcgagtatcgaactctcgaggaacttgtgttacttggtcaagatatattcacggaataagtgtctagtatgaaaagagatgtgtggactatgaattggcatgtaaattaactatgaagaggaaaatcacaagagtaatgatgcgtaaagacaagtagacaacatgttggtcttcctattaggtgcttgatgttaaatgaatattctctacttaacaatgctcatatgttctatggtgtctactaaaatgctaaacctcgattcctcatgatactctagcctaatcctgatctagcatcgtcctcggattcctctngtnggactaaactcgaccagaatcacatttagacaaacatacagacgactagggtaccggaccctgatc

SEQ ID NO: 198458 - DNA, 278 bp, Glycine max
cgcccatgcaaaaagcccggcttttaacattttaggccatattaaatagtctctccttcagaccaccagatgttttaacagcattaatgataccagcatatattctggtatatagccgaggaacactacaaaagacagaggttttagagcagctatgtcatccattaatttcatactatccccctggtagaattccactgcaatgccaaaatgtactggcatgacctggtttgcttgcacataaatgtattccaaagggagacaggatagataaacat

SEQ ID NO: 198459 - DNA, 333 bp, Glycine max
  unsure (1)..(333): unsure at all n locations
atgacccttttccaagctacacgaanaacaaagcttgcaacactcaagtgtttctgctctcaggaaaagaagcggttctcacacactatatgacatatcgcagattgcaacggtcagatcgtgggaatctgtcctttgaacctctacaccaaatttcgagaagatccaatggttaacgaatgcctgatggcactcttaccgagacagctcagacaacttccttgagaagctttctcatgaggcttccttgagaagcttcctcatgacgcttcttgggaagctagagtttaactacccacacccttctaatatctaaattcacctccttggaat

SEQ ID NO: 198460 - DNA, 348 bp, Glycine max
actcaccacctctatcatatgtaagaattttcatatttctgtctaattgcctctttacttcattctaataaaatgctaaggcgtgcattggctgagaaatctcacgcggaaagtagacataactgtaacgtgaataatcattaataatagtgataaagtatccttcctttcctaaagaactaacatcaacaggtccacacatatcactgtgcacaatttcaagaagctcagagcttcttgtagcttctctctttgtatgttttgcttggttccctttaatacaacccacacacatatttagatccatcaaatctagataaggaagaatctcattctttattaatcttt

SEQ ID NO: 198461 - DNA, 370 bp, Glycine max
  unsure (1)..(370): unsure at all n locations
gctagagcattcaatatcctgangatgtttttccatatgtcctcaagactggactaatacatttgctgcccaagtttcatggtcttgcagatgaagatcctcataagcatcttaaagagttccatattgtctattcctccacgaaaccccctgatgtctaagaagatcatatgtttctaagagctcttcctcattctctagagggagtgacaaaagattggttgtactaccttgctcccaggtccattactagctgggatgaccttaagagggttcttggagaaattcttccttgcatctacgaccactgccatcagaaaagacatttcaagaattatgcatcttattggagagagcttgtatgagtatt

SEQ ID NO: 198462 - DNA, 234 bp, Glycine max
gcatttcttggtaaaactaactttccaaatgtttgcattcgcaggaaacggccccgaggaagcttgcctcatagaggtccaagaaggacaaggcggccgaacgaactagttccgctcctgagtatgacagtcaccgctttaagagcgctgtacaccagcagcgcctcgaggccatcaagggatggtcgtttctccgggagcgacgcgtccagctcagggacgacgagtatactg

SEQ ID NO: 198463 - DNA, 207 bp, Glycine max
attggagagaatccaatcttgaatggaaacttacctatgaatccattataccagacgtccacgtgagtcaaagaactcattgtcctcaggaaagaaggaattgccataccttcaaaatcattggcgctcaacggcacagtatttacatgctttagatcaacccaacaaggacttatctctccaccaaactggaatcccctataacct

SEQ ID NO: 198464 - DNA, 301 bp, Glycine max
atttaccttgggtgaaaaacaagagcacgcttttgctttgctcaaagaagagcttactaaggcagctgttctagctcttcctgacttttctaaaacttttgagctagaatgtgatgcctctggagtgggagttcgaactgctttgtgcaaagcgggcaccctattgcttattttaatgaataacttcagagtgcgacccttaactacctcccctatgataaagagctatatgtcttaattagagcactcctaacttgggaacattacctatgttccacgaattgtctttcatagtgatcat

SEQ ID NO: 198465 - DNA, 414 bp, Glycine max
  unsure (1)..(414): unsure at all n locations
gcttattctacacgctgataagacgatgagatagttgcgcagaatataacttttctntacanaatncacatacaagaggaccttgttgtagtaattatgacttaccgcagccgcctatccctctttcattgccacctagagcaattccaagacaaacaaatggaagaagcggaaaatgagatcttggagaccttcaagaaagcagaggtgaacatacctctgctagatgccattaagcagattccaagatatgtcanggatgagttgtgcacccacaaaaggaagctcaagggaaatgaaaggactagtatgggcagaaatgtgtcagcatcgataggtgaatctagttctcacatgtctgagaaatgtaaggacccacgtactctctgtataccttgcattattggaaacagt

SEQ ID NO: 198466 - DNA, 84 bp, Glycine max
acacaatttcgcggtgggttggggggggctggaaaccctcccgttggggcaggtcgggtgtacattttatccccacggttgggg

SEQ ID NO: 198467 - DNA, 386 bp, Glycine max
  unsure (1)..(386): unsure at all n locations
ataaacattagccangggaaacaaacaatttcaaacttcttaaggcaatcatcgaattgatcctcaaaaggacaatcaaccaaactcccttaggcatccattacataatcccatgcattttntttaccaaccaggaatttacactttgtcttgacattcttgtcaatgtgaaacctacacaataagttggtacactcacggaatacaagtttcactggattcatcaatgctatatctatgtctacaacaataattccaggagagacatcacgtttgagaaaaatacctcanaaccattctagagcccagaccacgttatttagatgttcttcctccaaataagaaaaatcaacagagaatgtcatcctttgtggtgtcacaccaac

SEQ ID NO: 198468 - DNA, 334 bp, Glycine max
ctactatcattgttatcatttctttctccgtcatagagggaaccacttgggctgccaaattccttcacctttgggcgtattctttgaaagattcgtgccccctttttgaacatgttctgtagttgcatcctatctggagccataccagaattgtactgacactgcctaacgaaggcaaccattatgtccttccaagaatggactcgggaaggttccaagttagcgtaccaagtaacagctaccccagtaagactttctttggaagaaatgtatccgcaggttcctatcttttgcgtatgcccccatctttcgacaacacattcttagatggttc

SEQ ID NO: 198469 - DNA, 443 bp, Glycine max
  unsure (1)..(443): unsure at all n locations
aactaagctttccgcagctccatcagatctactattcgcttgatggntttcttcttggtgcgacctctactgggcaaccctattcttttggtgtatgagatggaagctgtgctcccttttaaggtagagattccttctttgagaattctagcagaatcaaggttgggagaagcaaaatgggccagacatgttttgactagttgaatcttatcgagggaaaaagattggctgccatgagtcatgggtggctatatcagagaagaatgataaatgcattngacaaaagggttcacccatgtgaatttcagcagggggatcttgntntgaagaaggtgtcacatgtntagaaagatcttcaagggaaatgggccccanactatgaaggaccttttttggtgaagaaggctttctcgggtggagcactgatactggnaaacatggat

SEQ ID NO: 198470 - DNA, 404 bp, Glycine max
taaactatcacaaaaaagatgaatttgctaagtatgtgatacgcttgggtaaattcttctcaccacaaactatacaaaggaagatgggttctaccgtgcgaaaggtaaactattttcgcacggtacaaaagttctgtgagttgtaggattaagattacgaaagatagaaaggttgggttcaccggtttggtgagtggttttaatactgacggttgaaacaaaatggtgtaacatttacaatgttagttgttgttgttgtcgctggcattttagattttgtgagttttgttaagtaattgtcgtatgtaactatctacttaaatcctaatggggtttatgtatttaaggtgaattactactctactattacaagaattaaagtatgtggaatgttaaggtggtat

SEQ ID NO: 198471 - DNA, 234 bp, Glycine max
  unsure (1)..(234): unsure at all n locations
aaacttttggttaaaatggaaaaggaaaaagattgggtgtggggactgtgtgccaattgtggtgagttggaaaaaaaagtggaatggtgaaaggttgaaaaaaatagaaagagaaagagtgagaacggagatgcaattggaagaattaaaagctggaaatctattntaatgaaaattntgcttaagccttttttccattagcttaagtgaaaaatagactgaatgtagcatttt

SEQ ID NO: 198472 - DNA, 359 bp, Glycine max
  unsure (1)..(359): unsure at all n locations
ctctcgaaaaatttcaatataatgctaatatacattattttcttaataaatgaatgtggtggttttgtgagacagtaatatatattctcaataaaattcactcttgcttaanaaaataaaattagttagtgattaagtgtgttgtaagtgtatcatttgatgccaagaagttaaatttggagaattggttaattctaattgaaaagtgtatatatgttgcttatgaatcgatctattttttatgtgtgaaaaaaattgagatataatttttccattaaatattcagactttctttgattattacaantatagtttatattatatacaagtntaactngtatcttatttcttatttttat

SEQ ID NO: 198473 - DNA, 355 bp, Glycine max
tgattcaagcttaaataggtggctttgttcgtgcttgcacacttagcgcaactctggatcgcttagcgctcattagtggattttggcttaacgtgtgcttttctcgctcaacggatggactgaagcggtgtacttcactggatgacccttcactcagcgaacatgcacagctcatccttcttccagatctttcctcacgctcagccgaaagaggggtgcactcaacggatgcctcgctaagccagcagaatggcttagcgagagactgaaaatcagcactttacaaacttgcctaattaacctgaaatgaaaggaattgatattaaacacacaaatggaaatacaagtattatta

SEQ ID NO: 198474 - DNA, 226 bp, Glycine max
  unsure (1)..(226): unsure at all n locations
tctattttgcacctcctgtntactaaatgcaccccctttctatnttttttgtaattctttttccgtaacattacgaaactttacaaatttcgtaacaatacatattttccttccgcaaggttacgaatccttacagattatgtatttactctttnttagctttcgaagaagttacggaaactcacggattgcgcanaaacacctcttttcgatttccgccacatta

SEQ ID NO: 198475 - DNA, 450 bp, Glycine max
  unsure (1)..(450): unsure at all n locations
gcaagctcaacacaggaatcacatcgattttccaaaatcttcgttgttacaaatcctgtctcattnttgtaaatatcagtaaaattacaactatgctntttaaaaatgaagtcaaagcctgatattgaagacaattctttggagaactgtaattgaaatcgctaattcaaagacgatttttgaaaatcatctttgaagttcaagtgttatggctcttatactcgtgccctttctttgcatctcacttcgtctcaatagcttgcaccctctcagagtctctntatgccctctctcactcacgtctctgtcaaaggtgcccagcactaccgttgaagcttccttctgccgaagcttgtgtgtggcctggatgtggtttgtntctccctcattccnccatatgaaagagtggggtgggtctaaagatctgttggcttaagtatggttattctc

SEQ ID NO: 198476 - DNA, 427 bp, Glycine max
  unsure (1)..(427): unsure at all n locations
acatanaacacaaaagcataatcgattatagaaacatctttatatgcatcacctggtctgttaaaaaaaacccaacatttttacctactactgtcaattntacttgcatttntactgttnttagcctagacttggtttaatcctattctaaatcatcaattaacaatgtttctttcaacaatgtcttatttctgaatttaaccctgtcttagactagttccctgagttcgatactcggattcatccattttaattttaaatgacgatccggtgcgctttccggcaaaccggatttcccttgaacatnattgtataaagaanaagtggaccaataagtaactgtatgggaaatccaacaatcttcataatatttttatntgccgttttctctttacaaattactctattaaaagtgatattatttcaa

SEQ ID NO: 198477 - DNA, 391 bp, Glycine max
  unsure (1)..(391): unsure at all n locations
tgcaagcttagcctgctgctggaattaatctttgtttcaatcatgtcactgaaanttggagcataattgaacttctcccttactatcattctctttctctgatttttctctctctctagctgccttgggctgatggtggggtaccgtttaaagaacgattctcagaattataccaaatctcttcccaaagattgcattctgttgaagacatggggtacttttccgagcatgggtgggaatggaatttctcttggagacgtaatctatttgatagcgagatgggggtagcatcaactttcttagagactatagctgctattcagaattgtggtaccctgaaagatacctggctgtggngagctgaacctaatggcatcttctctactaaatc

SEQ ID NO: 198478 - DNA, 385 bp, Glycine max
  unsure (1)..(385): unsure at all n locations
tctgatcttagagtgtcaatcatgtcaatgaggaaaacatgttangtcttatttttcaaagagaacttaaacaagatgtaaccttgcttnttccactattcactctaatattgggggtccaagccatgtcacatcttttggcttcaaatattttgctacctttattgatgaatactctagaagtacttgggtttatttaatgaaagatcgatctggaattttacctatattcatgtctctctttaatgaaatcaagaccaagtttgataaagtaattaatattctcaggagtgataatgccaaagaatatttctcctctaatctctcttcgcgtttaaccacacaacgaattctacatcagtccacaagttctcacacaccacag

SEQ ID NO: 198479 - DNA, 366 bp, Glycine max
  unsure (1)..(366): unsure at all n locations
aagagnatccttgtggaaccttcacccgacgaagacactgactaaaacttatcttctccttcttggacaaagtatggcaggctgggggcaagtaaattttcttcccatcagaccttgaatgcaactgtgatcgtatacccatatcagctagatcttgacgggtattcaagtcatccttcgtcttgccttgaatgttaaagagcgtcccaatcacactgtcacaaacatttttctccacatgcataacatcaatacaatgtctaacatcaagatcacaccagtacggaagatcaaagagaatggacctcttcttccatatgcaactctgacttttatccttcttttgagtcttcccaaatacagtat

SEQ ID NO: 198480 - DNA, 310 bp, Glycine max
  unsure (1)..(310): unsure at all n locations
tttttttccttttagaangcagtgccacactatcctaattacaaatcaaatctgggtgacaaagatccatatcaggacctgttctcatggttgtgggctctaactaactcaaaatgtgttgatattgaatacacacacccaagagactttttttgggatatttacttgtaaacaatctaaagaacattttggcaatgtgacaagaaatacatttacgattggatatatggattgtactgaaatacaaccagctgatataacaatatttctgtagaaataattatctacagggacctaaaaaacttacatt

SEQ ID NO: 198481 - DNA, 307 bp, Glycine max
agcttgagggggaatgttggaaaatagttcatgatgtacctagagtggtagcttacattttattattgtcttttgtatacctgctgtaccagctctgtatttcgtacttacctctcttcagcttactgagtaagcttagtttgctaatataatagaacctaagtgtggagaacacattagaggattttcattcaatcatctctagttacattcaagttaaggaaacaaagaggagcttacaaggatataatgttctgaagctgactaagttcttcatgaatcaacccacagagttgattatttgaaa

SEQ ID NO: 198482 - DNA, 369 bp, Glycine max
  unsure (1)..(369): unsure at all n locations
tactcattgacaacaaccccatacgcctgtacatccggcttcatcccgcgactaaccatttncctcaaatgcttaacagcctcatcagactttcccacaatacaaaaccccttcaacaagctagtgtntgtggcaacatcgtctgtcagaccattcaaccgcatnctactcatcatctttcgggcctcgtccacttcaccgctcagacaaagagcttgaaccaaagcattgtaggtcacagcattcggtgaacaccctcgttccagcatctccttcaagcactccagcgcctcttgaatccacccctcttcgaatacccatcaatcaaagtggaaaactcacgacatccggcttggcactctgactctc

SEQ ID NO: 198483 - DNA, 376 bp, Glycine max
  unsure (1)..(376): unsure at all n locations
agcttgaccaatctcgacccaacccgggtttattagtcagngagaacctgtgatgtagctaattatgcgagctcctancactccacagataaaaggaacaaagaccacaaagcaaggaggcttgtgtggtggctggccagctgtgaatcttgtgttatatatgggttatggcctctggtaatcaattaccaaggatgggtaatcgattacaaggcttaaaaatgaagacaggagactaagatggtctctggtaatcgattaccaaggggtgtaatcgattaccaggcttgaaaacgaggtcaggaagctaggagagcttctggtaatcgattaccaaagggtgtaattcgataccatgctttaaaagggaactgga

SEQ ID NO: 198484 - DNA, 329 bp, Glycine max
  unsure (1)..(329): unsure at all n locations
atttggcattttgtgcaatgaatatttgctacagatattggctaatggattctggttatgcctgtacccctaaggtgaagcaaggcctaatttggcaatcttctattgcaggtgagcctcttctttctctaattgtggtctaatacgtaatgaatgagataagagggctttgtgatggccctcttggatctttcttctgtctacacccttgtattgtatgtgtggacctctgtttctgtctgcacccctgtattgtatgcctgcacctctgtctctggcacaaagtataatgaagaaaatttacangataatcatgcttatgaaatatg

SEQ ID NO: 198485 - DNA, 198 bp, Glycine max
ctatacatcttcacttggtcttttttcagtatggagtctttatttggttggattttgggttggtatttgtttcttcaactatcatgcttttcaaaatagcttctatgctgtaatgtacatattggctagcataatgtgaaaacactcaaacttagcaactcaatatcaaatggttaagttcttcttcatggcaagaaa

SEQ ID NO: 198486 - DNA, 414 bp, Glycine max
  unsure (1)..(414): unsure at all n locations
ctctcgcggagacaagtgtgcctcatccctgtttctcttcgtgaccgaagacgatgagcctttccaagataccggccaacctaccctttccccatttcccgacgacgaaacgccttccgacacctcctccgctcagataagcctccatgctctgtcgggtcacttagctcccgagaccttacgagtcaatggctntattggtaatcgtggtgtgtgcatattgatggatggaggaagcacacacaacttccttcaccaagctttggttacatccctcggtttgtctacgacggctactactctgcgggtgaccgtgggtaatggggacgagcttcactgtcatcagctatggtccggagtcaccgtgatcattcaggcgcaaccattcattgccgagtttcacgttctacctca

SEQ ID NO: 198487 - DNA, 111 bp, Glycine max
  unsure (1)..(111): unsure at all n locations
accccgagggcaaggagcggaancgaagagaagggaacgttattttaggcccacggcaatagccggccgaaaggaacacgcggggggacaccaacccaaaagcgacccaaa

SEQ ID NO: 198488 - DNA, 378 bp, Glycine max
tgtattccactcctcggaatttgacggtgaaactacctttgaacagtaatttccagatcaagatagtagatattttgcatcaattgtacactttattataaacatataagcacagcggattggagaatattggcttccatataaccttatctgcagctgaagttcagaccaagagagcattacatcaacagttgtgggacactgcaagtgcctatgaattccttctgagacatatgttcagcgccaagtggatcaaggagggggataagaattccgcttattttcacaaggtcatcaattcagaagatgcccacatgctgtccatggagtttacattgatggcgtatgggatcaccatcctcattttgtaagaatgca

SEQ ID NO: 198489 - DNA, 429 bp, Glycine max
  unsure (1)..(429): unsure at all n locations
cattaactttatttgtccttagagtgcgaataggtcacgccggcctacagatatctacgacttgtctacataaagtctgacttatactgacttattgaattaaaaggttaaactcatacttntttaaaagtctattaaattaaataggtcgggcttagacttattaaaaaacattatattattcttttatatcaattatatgtatatgattatttgggtagaattatttgttttagaactagcagacgttgattatatattactgctccacaattttcattcctataatcaagtaagactttaattacaagctaagtgtttcttttttctttagcttccctaataggttccctactctagagcaaatgaatattaaaaattattgtgaagaagtttttacaaagactatacgttatgcttttataaatc

SEQ ID NO: 198490 - DNA, 415 bp, Glycine max
  unsure (1)..(415): unsure at all n locations
attattttttatttaaaaatagagacattcagttctcattgtttaaagaattataattttaatccctctatcttaattagagacatttacatttcactcttgtaaaatttgtgatgctagtctttcaaaaatattaattgtgaaaagattaatctaatgagacccatatttaatgatgtgacacaagattatttgtcaatctatatcatactcaacttaatctctaaatagtcagcactctttagttaactaactatccaanattcgtgatttaataaattaggggtaaacgtctctttttaaatctgataatccaattattgagtttacaaaattaacattacacatttttttctttgctaaactattttggcccactagaaatttttggacagcactggtgaggactttaaat

SEQ ID NO: 198491 - DNA, 421 bp, Glycine max
  unsure (1)..(421): unsure at all n locations
ttccctagatgagaccttctaccatgactcatatttgcttgagctttcttcaccaatctcagcctcacaattactttcattatacttgacagctcacatgccccatcgaatcttatcctaatagactgaatataggttttatttcttattactaaacaataagttttaatatccaagacataagttttctgaaatgctgatgatccagtcaaaactagtttctcctaaattctcaaatacctttgaattcttacatatgtccaacaagaacttacatggcaatatatttaaaaaattgattaaggagaacatnttgagctctctaacctgctacatgtccataacatgttatatatgaagtgacataagagaactttcatttcaaaacacataactatgtatgagcctatcactacattat

SEQ ID NO: 198492 - DNA, 260 bp, Glycine max
  unsure (1)..(260): unsure at all n locations
atcatggacatgtaggtgtagaataggtagcanaatacctttagcaatttacacctttggatatggaagcaagatacttggatntgtgtacatgtaatttttgggtagtcaaaatgtctcacaaacatgtatatatgttgtatgttatgtaaagaaataccttacaaaaataccttttaatttgaatgcaattttatttatcaaaaaaaatatacttgaatttcatgcagctttaggaacaaaaaccctgaataacataa

SEQ ID NO: 198493 - DNA, 450 bp, Glycine max
  unsure (1)..(450): unsure at all n locations
caatttctataaattgagggagaagtgaagngtaatatggttcagccccttaggcacttctctctctttcgaatatgcttggaacaactgtttccgtgaagaatatccaagccgaggcacttccgaaacgttttcgtgaggaatttcgcgaaggtttcgaccgttctttgacgttcttcattcgttcttcaccgttcttcgatcttcaacgggtaagtaccttgaaccaagcctttcgatacattctatgtacccgtggtggtccacattgagtttcggtattttattctcgttcatttacttttataccccctttgactgcttaaccatttattaagtcattgctgcttacctaaaataaataattccaccgtcgttgaatgtatatcgtaacttcgttaaagaatccaccgtcggtggccgacacgtggaacaaaaaagtcaatatat

SEQ ID NO: 198494 - DNA, 451 bp, Glycine max
  unsure (1)..(451): unsure at all n locations
catgtgaattatatatatgggagncatagctacatccacgaccgtcacgcaacacactacatatatacattaatttatttatttatgttttcttttcctagtgaccaaatntaactctataaatataaaaggataatttatttaatttgctgcttgctatttacacaagaatgggccctncactcctttcatttttctctacataatattatcaaatcatacctcacccgtcatcttttttatcttttaatctttaatctaaaaaaaaaaactaattttcttcctccttgaaaaatatgcatgaaaaaaggcttagatattangtaaaaattcagttgttggtcccttaactttttcagaatntaattattaggctatctaattntttctatcattattcaattactcaaattactccaatataaatgatgaagactaaaatgaacaaata

SEQ ID NO: 198495 - DNA, 442 bp, Glycine max
cacatactaagactggagggattaaatggattgtacaatacaggtatgaaatgaataatgagatgtgtgctaattacacattcgaataacaagtaccaaataatgagctccaatgatatgagatgagtgttttagcttcaaaccactaacacatttatgctaatatacatatacataaaatactagttgagaaaacctgttcaagcccaacctacaactagttactgacataacaaaaatcctaatattcaaaaatctaaaatttcagataatccacatattattgacagaattaccgacatagtgagaagtctttatttaacttcatagtcaattcagcacaaataatgcatagtccaataaactaacaaataaacaatttctttaaacaaacttaataaaattcattgtgaaagccctctccaagtgatgataatcatgc

SEQ ID NO: 198496 - DNA, 488 bp, Glycine max
  unsure (1)..(488): unsure at all n locations
acattgatgtttgtatttatgggatgatgtttatgccatttctgctttaagagtgacgccagtcccactggtaaaactaactctccaaatgtttgccttcgcaggaatggccccgaggaagcttgcctcaaagaggtccaggaaggacaaggcggccgaaggaactagttccgccccggagtacgacagtcaccgctttatgagcgttgtacaccagcagcgcttcgaagccatcaagggatggtcgtttctccgggagcgacgcgtccagctcatggacgacgagtatactgatttccacgaggaaatanggcgccgacggtgggcaccacttggtactcccatggccaagtttgatccagaaatagtccttgagttttatgccaatgcttcgccaacagatgagggcgtgcgtgacatgagatcctcggtaggngtcagtggatcctgttcatgccgacgctatantcagctcctggatatccatg

SEQ ID NO: 198497 - DNA, 440 bp, Glycine max
  unsure (1)..(440): unsure at all n locations
agcttcttctagactcatcttcttcttgaagtggcgtctcctctctctcttccttctccattccgctgccatttatcttccaagaagcaaaggaatccattgatgaagaagatcctaggcctacaagctccaatgaagctttcatcaaaagtcatgcttttatagactcttcatgtctggtcaaagaaaccattggaagagttatgactcttgagaaaaccatgttaaaagttataactcttaactttttctttaaaactattcactggtaatcgattaccacannggngnaatcgattacccaatgtattttatgaaaagatgtgactcttcacaattgaatttgaattccaacgtcctgtttccttttaattggtttctaatttatgcaatccaattcctctttcgaaaccattttgaatgctccaataatttgaaac

SEQ ID NO: 198498 - DNA, 452 bp, Glycine max
  unsure (1)..(452): unsure at all n locations
ctgctctanattgatacttcttcttgtgcataccttttatgaagaggatatgcccattgatgtgtttcttcataactgtcatatgatttccctttagtgcaaaacatttaatgaaaaattcaaagcttctgctttttaagacactgagctaaggaaatcaaatgaagatttgaaaagatgatccagactctagaagaaagtctgagcttggccattaagactagcgaaactttcactgttgataaactaagggaagaagtagcatgtcttactaaagactttgggaagttcttggaaaattcaaagactgtcaccattcttctgaaattccatcaacatcctcatgacaagtctggcctatgctttgaaaatggaacatcatcctccaagtcacagtctgtctcanacaaatatggcttctatggtaagttcggacacttcaagttcacatg

SEQ ID NO: 198499 - DNA, 381 bp, Glycine max
  unsure (1)..(381): unsure at all n locations
ttaanatgtgaaaattatattctaaattagatactacaacaattagggaggtggaggaagtaattcaccacaaattggaatagatttttctctcaagccatccgctgtattgtacttttcaccattaaagctaaagcaaaagtgatcataacaggcatgaaaagtgaaaaaaaaacatgcaatgtcggctttaatcattactttctgttgtctagaagtagaattaatctatacataattcattcgctatttctcatccttaaataagttagatgttaattctaatcttataaattcatccttagaaagagaattatttaataaatggtatgtatttcttaaagattttactttctaatttccattgcgttaaaatcaaac

SEQ ID NO: 198500 - DNA, 483 bp, Glycine max
ctttatattaattcttattcaatggtagattttgtttcaatgaaacagtcccaagttaagggtaagggactacagggcatgacaaattgatgtgtgacctaatccctccttttagtgttaatatctacttaaattcattgctttgttaatatgctaagcttggtgaattcaagatattgtttgttttgactaacggtaaaatggtactttaaactctagaggataagtgtatactactagaaaagtgttcattacatggaaaatttctgtaaattctgcaaaataatcagcaagaaacacgtttcctggattttcctgcggattcaaattcgtagaaacataactgtctcagaaatctaagtttcagattgagagagaacaaaatcaccgaattgaatgtacaactgtatggagaaaatatcagaatacaaaatatgactgcaggacttgtttatgataaaataaaactgcggaattccataa

SEQ ID NO: 198501 - DNA, 65 bp, Glycine max
  unsure (1)..(65): unsure at all n locations
cttccggctgaatatgagtttttttttcaaagcaattcacaaacaaatgatgtaatagnttaata

SEQ ID NO: 198502 - DNA, 283 bp, Glycine max
  unsure (1)..(283): unsure at all n locations
tgcttggaaaggatacgcactgtaaatgttgaagctgattccatctaccaactttacaaggatcccagccctattatggaacctgcttctgttaggaaagacattgttctctcaccttcaaggtataataatgatcagaacgaattgaaggaattcattcagaaaatagaaacatccatcacanaacggtaaccattgatattgctgcatgatattttcctcccaataccatagtttggagtatctaacaaagtttgagctaccacagtttgtatctgctatt

SEQ ID NO: 198503 - DNA, 278 bp, Glycine max
aagctgaaacacaaatatctcactcaaagatcttgcatataggtggctgctcaatgacatctaaggggttcttaaaacaatctttcaaataagcacttggtggtaaatgatgttcgaaaaagataatatgaatacttaatacaataatatggagagaaggataccaacttggatcatatctgttcgctcaacttgacctacgtgtaaatcttctatactcactgggtaagggtccactaatcaataactaatacatataagtattctaatccccactc

SEQ ID NO: 198504 - DNA, 508 bp, Glycine max
  unsure (1)..(508): unsure at all n locations
tatctacgtcactattacaaggccagatatttccttngcagttttattggtgagtcaattcatgcagtctcctcataatgattattgggatgtagtaattcgaattttgagatacattaaaaggaccccaggacaaggactactctatgaagacaaagaaaacactcaaatagttggattttgcgatgcagattgggcaggatcacccattcgataggcgtttcacttcaggatattgtgtctgttgaaggaaatcttgtctcgtggaagagtaagaagcaaaattttgttgcaaggtctagtgcagaggctgaatatagagctatggctatagccacttgtgagctcatttgaattaaacaacttcttcaagaattgatagttgaaaatacccaacanatgaagttatgttgtgataatcacgcagccctacatatagcttctaatccagtattccatgagagaactanacatattgaaattgattgcattttgtccgggagaaagt

SEQ ID NO: 198505 - DNA, 419 bp, Glycine max
  unsure (1)..(419): unsure at all n locations
taccataataaccgtacttgcataaaacaaaaatcaccaacgaattgacagtagacaaaggctcatcaaaccaactcataagtgaattcttatcttaaatactacatatatataactttcttttanactctgaatctacgtatattgggctgatctcccggtcaatcggtactacaccaaacgagggtggtattggaattggaatcataaacaatntttcactcgtaaaacctgtcaactaaagtaattagccncataatcagcaagcaaagaagttcccggtgcttaacctcggatttaaagaaaactaactcagcaattttgttagattcttgcatctcttatttggagtaaatatgaagagttcttatatgattacagtagagacacaaaaatatagaattctataaaactgccta

SEQ ID NO: 198506 - DNA, 415 bp, Glycine max
  unsure (1)..(415): unsure at all n locations
attatttcatattgtaacatgtatgacctacactaattattgttattaaattcatatgttgcaagaaccatcattcgcgcatgtttagcccgcacctgcatttaagcctcctctagttaggcttattgcaccaatcaagatatcattctcagttgaaccttcaccaaggatgatacaacctaactctatgagcttcattcccacactaaggttgtcacgaagggaaaacatgaggaagtgataatatntattgctcttatttcttatatgtatgccgttggaacttcacaagtgtatgatgatcagaatttgagaattccactatgacatctctatcgtgcatttgctattattgtgcttatttgggagggttggcgtactttgctattttgatatgcatatggaatttacatct

SEQ ID NO: 198507 - DNA, 204 bp, Glycine max
agcttctcttcattcttcaatatcattgatagacagttgagagtttattctgcataactgtattctacaactttgactggttacattacctataacttgctctttgttctttttacgtgtatagttagactctagatctatgaacttattatatggtgttaaccaaagcttttaccctacactgtgaggaagctcaaagccagc

SEQ ID NO: 198508 - DNA, 240 bp, Glycine max
  unsure (1)..(240): unsure at all n locations
accttctgcagagaaagaagtgatcatcaagtcttagaagtggatagaaagagcatcacagatatctttgaggatctcacagtgacatcgcgtagtctctaataacatatcatctatagtgatcttgcgctaatcctgtaaacacgctgggagggcgtgaatcgaacgataaaaggatgaccaaatcacgtgctccgcatcatcaaagactatactgtatctatagnaggcgagctcaca

SEQ ID NO: 198509 - DNA, 360 bp, Glycine max
ctccaagaggtaccacaatatggtggtatatatgagcaccgccaccgctccatgccaatacatccacaacaccacatcaacaactaagcctttgccatgaacacgacgaaaggatgagaaactaatgcaatgccacaattttcagaacaatgaagaatgaacgggttacaatcatgaatggcagccatggccatgagagataaataaaccaacccgacatctcaaaaatccccttataaatgattcataaatgtgtggcctacccagttatataagaacttactcatcaatggccttcatggtcattagaagaaaacaagaaccaacctagcattcgaaaagtcctcttaaataatgatg

SEQ ID NO: 198510 - DNA, 471 bp, Glycine max
  unsure (1)..(471): unsure at all n locations
ttagccttagttgcactttggttattagtcaattcattcaagtaaacttccaaagaaaaatgtccgattggattttttgattattntattcaaagatattttgattcttttattattattttttcaagatatttcgattattctattattatttttctcaagctcatttaattattntattattattttgccttnttttgatttaaccgaggttacagcatgaatgatcagttggattttattttaacagtgattaaacgagattacaacacaaataattggttgaaattcattatatcatttattagccgagataacaacttanatgatcggttaaagctcgttaaaaatgaaagacaagacaatcataagtgagcgaaatgaagatgaaagccaacataacaagaaatgaattgaaaggctcggattcaaacacttaccggttgaagaccgaagaacggatgaagaacg

SEQ ID NO: 198511 - DNA, 393 bp, Glycine max
  unsure (1)..(393): unsure at all n locations
tagaagtaanaagccagctatggttggtaaggtggtctttttaaggcctacgactcagtctcatggggtttcttggactacatgctgcaaagaatgggaatttgtcccaaatggagacactggatttcaacctgcctcagttcagcaaccatctccaccctcgttaatggtagccctacaaaggagtttgctcctactagaggctngaggcaaggggatcctttatcccccttactcttcaatatagttggagaaggcatcacaggattgatgagggaagcaattcagaaaaacttacacagaagttacatggttgggaagacaaaggaacccactaatattttacaatatgcagatgacacagtctttgtgggtgaagctcgttgggagaat

SEQ ID NO: 198512 - DNA, 467 bp, Glycine max
  unsure (1)..(467): unsure at all n locations
catgtgttgaatttgggtcctctaaggacttattctaaatatttgtcgactgatcattagaaccaatgaacttagtgacaatctccttggacaaaagcttctctcgaataaaatggcaatcaatctctatgtgcttaatcctttcatgaaagactgggtttgatgcaatatgaagagcagcctgattatcacaatacaacttcatttgcaactcttcacaaaacctcaattcttgtataaattgtttaatccacgagttcacaagtaaccatagccatagatcgatattcagcttctgcactggaccgagcgacaagtgtctgttttttgctcttccaagagataagaattcctccaatgaatacacaatagcctgatgtagacctcctatccatgggacagccagcccaatcagcatcacaatatcctgatagntgcgtattacccttgtcttcatacaacaaccc

SEQ ID NO: 198513 - DNA, 251 bp, Glycine max
  unsure (1)..(251): unsure at all n locations
gtgcaagctaacaaccatgtcgatgaattatgaagcttctatgtgtgctgcgngggacgaaggcagaatgcccagatgaatgcccttagaaaatctatcgacaacaacgagaagcactgttntgccctggaatggtggaagtccggtgataaaatcgagggagagatcctcccatggccgaaaagggaccggaagtgggcaaagttaaccggcagtgcgcttggtttcatacttagtgaattgacattcag

SEQ ID NO: 198514 - DNA, 326 bp, Glycine max
tatacagagagagaagtaaccgaaggtcgttcattcattcagcacgaagcgagagaagcggaatccaaagtagaggcaacatagtcgcgaacgttgctcctcttccgcttcggcaccattttcgttggtttcaggtctttcctaaaagcttcaaggattaggttacgggtttcgtcgatcctgttctctttctgggcctgcgacagcgagtgtgtcacgacgcggaggctctgatcggagcaagcagcaaggaacacgctctggccgtcggagaagctgatctactcgacggagatcacgcagcacttctgccagctgagctcacc

SEQ ID NO: 198515 - DNA, 100 bp, Glycine max
agatgtttggcgtttacatgtccaactcccttgagtggcatttgtattaattggtaacttggtgtgtgcatcttattacatttgatatctattttgcatt

SEQ ID NO: 198516 - DNA, 315 bp, Glycine max
  unsure (1)..(315): unsure at all n locations
atgactcttaaaagttaaaacagaactatacacacgcattggcctagtttcaaatcaaacttctctggcacaatagaaaaaagttaagatgcataaattaattntaatttacaaagttgaattattntaacttctaattttctttttttctttctggtaagcggtnattgagaactntatagnaacttgactgcngncctngntttccaagagaccctatcctataatactcatttcatagcattcaaatttcgacatattgaaattcaaaacggaatgaaaactcactaagtgtaaagaagaaatgcttgctca

SEQ ID NO: 198517 - DNA, 378 bp, Glycine max
  unsure (1)..(378): unsure at all n locations
ttctcaagagcttccattggtcaatttcgagcatctcgatatattataagcctaaatcggacattcgtgtgaaaagttatgaccatttgaatttctcaagagcttccgttgttcaatgtcgagcctctcgacatattatgcgcccgaatcggacatccgtgtgaaaagttatgaccatntgaatttctagagagctttcgatgtttaattcgagtgtatcgatatattataaacctgaatcggaccttagtgtgaaaagttatgaccatttgaatttcacgagagcgttcgtgtgagaagttataccagtctaatatttcaagagcctgcggttgttaactacgagcctctcgacatattatgcgctcgtaatcgaca

SEQ ID NO: 198518 - DNA, 301 bp, Glycine max
actgaattcatgtttttgatttccggcaaataggcatcctgatgcctgcaatttcacatacctacattgaccccaggtgaggtctatgtggtgagctgagaaatgccaccatttctttgaggaaatatagtgcttctcatcattaaatctgacgcatctcaaaatgaatccgtaagccaatattcagtgaccttcctaacaaacatgagctatttttccccactattctgatgctaagtttgaatgtccggcatttccatattctttcttttgtatatatagtcaacaacttcttctttaa

SEQ ID NO: 198519 - DNA, 208 bp, Glycine max
atgacacactggaaagttctcattaagttcaagcaccacctttaacaactactcaatgacaacaatggagctctttcttaaccaatcatatgaaaattatatccacaattgacgtaatagccacagatgatatacgtatgtgtatgaatgttgccttcaaaaatgatcaccacaactggaccatcgatatagtggctacctctgacat

SEQ ID NO: 198520 - DNA, 182 bp, Glycine max
gacgcagagccatggttgcgcatactagtcgcagtggatgctcagatagatatgccaataccctaagaatgctcaaatgcattcacgaacaagatgcacagctatgcctaacgaatctatgaaagggtctatctgtttcatgatcacagggtcgttaaccacatgtattgtccataatcatg

SEQ ID NO: 198521 - DNA, 323 bp, Glycine max
gacgctggactcggacgagggcttcatcaacgctaggctctacaccagaaccgacactcatgtaatacacatcaatccgaccacgagggctagcaacggctgaggccttggatctcatcaccaacagatcgcgagatgcctgcaggagcatgacgctctgaagaagaacagagagggaggaaaagggaatcgcgagcgatcgacacacacggtgctggaaggtggagagagaaagtgccgaaagacataaccaaaagtaaagacataccgggagagaagcaacaaagtgggagagaaaaaaaatcagcccgaagacaacaaag

SEQ ID NO: 198522 - DNA, 202 bp, Glycine max
  unsure (1)..(202): unsure at all n locations
agcttcagaccaaagcacacataatctaggtatccatattccctcaatntaatggattttcaaggtttgagaagtgaaattgagaatggggtaaatttggagcaaactctcacctcacacaagtctataacatcaatttaaacttgctcaaactggatttacacctaaaattccaccgaatcaaaatttgactcctcaacac

SEQ ID NO: 198523 - DNA, 489 bp, Glycine max
  unsure (1)..(489): unsure at all n locations
gagcaaaagatacaagtatcattcagggttatgctattggtcagagagnctgtgtatgtacaatcatggccttcatcatgtcctcatttatacatttcattctaaaattcagagattcatgcaaagattattactcacagctagttgttcactcacaatttaaggtcacactttcaccggtttttggttcaagcttttctttcacaatcaatctatctactgaataacaattctaaatgtaagttcacattcttgttctttctttgtttgacatgcacatttgctcaacttcatgaaaggaaacacaaatctcatcttaagcatgcattcaatttanaacaaagtcatacancccgtttcacaaaaagataaaagtgtttcactgccatgtcatctaaaataagttaaactgttcanaatgcttcaagataagcataataattattcatatataanactagtagtatatatagacataaaggaaatact

SEQ ID NO: 198524 - DNA, 458 bp, Glycine max
  unsure (1)..(458): unsure at all n locations
tgctggtgatgattactttgtttttttacttcatacgccaaaaagggcctgttgctattttgacagcaaagagattcatttaaaacttcttcgtacatctgataactaacagaacaaaatgggcagaccgtccacaaaatatggcggtcaccatattgctgctgctgctgtgctggcttgctagattgctgctgtcgctgccgaacatttgagcttgtacagngggagcttacattngtcctcactgtagaatcaaaacttgacatagcacgcttgttcattggaactcttagcttcatgtcaaagagagaacgttgttctctgtccataagcactctctgagcatcaccaattcacttaaatgcagcatcttgcccaccaaagatgacttctgcaggatgaactctgagatcaaacctcctatattgcttcttaaatcttgatcaccaactggctgt

SEQ ID NO: 198525 - DNA, 322 bp, Glycine max
agagaatttaatttttcgaaaagaaaatgaagaatcgtacttggaggtgttaaaccgcacttaaaagatgcgaacaaacgatcgacgtcgctcatgttgttgttgctgctgctgctgcttgtggttgatgatgacatcttcgttttgtttcgttttctctagtaatcgagagactttgattttccgattggggaatttgtaggttcctactttcctctttcaggcggggatttgaatttcggggagacattatgaaaatggagggttcaaaatcggatctaaccggctctgcttgcatggaccggattggcctgatttatat

SEQ ID NO: 198526 - DNA, 445 bp, Glycine max
  unsure (1)..(445): unsure at all n locations
tcgcccaggcgagctcagctcgcccattctgctgtgttgcttcctccanaaagttgatgcttctggaagaatcttctggagggcccaagtgggcctggttgctatatgcacccacatttttactaagtacacccctctgcctttgtttggtgattctatgttcgtaaagatacggaaacttacaaatttcgtaacgatactggatttctttccgcaatgttacggaaccttgtggattacataatcatcacgctttatgacttacggaatattacggaacctcactaattgtgcgacgatgctgtcatttganttccgatgtgtcacggaaccttacggattgtgcatcaatattttcttttgtttgcggcgtgtcgcggatttcacaaattgcctaatgatgggtgccaagcaccttacaaggaccaaacaaaagttgcatgta

SEQ ID NO: 198527 - DNA, 261 bp, Glycine max
tctaagtacatcaagttagtccaagacacaatcaatgctagtgagaacattaagttggcagcataccaagaatatttacagcctgacagagttcggaaaccaacaggttatctgcaacttcatcaattcaatgcattgttaaataataaatcacatgacaaatattctgattcatagacataatagagaagcaatccctcatttatgttaaaattcaatcggtactgaccctggaaaatgattgtaatgctgttatactga

SEQ ID NO: 198528 - DNA, 377 bp, Glycine max
  unsure (1)..(377): unsure at all n locations
ttaatgctttctttccttctggtaactctactagatcatatgtttgattttcaactagggactacatttcttctttcatgactngcatccatttctccatatcatctatctcaatggcttcttggaaactctgaggttccccatcattagtgagattgacatattcatcagagaaatgcctctttgatggttggctgactctatttgatcgcctcacttgggattcatccttcgtctggatagtctccatctgtgattcttccatcatctgagttagatgctctatccgagattgctccatctggtcaagttgtttatctgaagagctcccctgttcgatcggttccatcatctgacatgattccacccctttataa

SEQ ID NO: 198529 - DNA, 455 bp, Glycine max
  unsure (1)..(455): unsure at all n locations
agctttcacanaatcattaccaaagagttttactctctggtaatcgattaccagtgtttttaaaacattaagatnttcaaaattcaaaatgaagagtcacatctgttaatgtgtaatcgattacaccttaatggtaatcaattactagtgactgttttcgaaaaactcatttccaaaagtcacaattcttcaagtgacttgtttctgaagattctttcaaaattcataactctttaagtaattagttttaaaggaattgccaagagttacaacgtttgacttgagtcatcaagaaattataaatatgtgaaccttggctgaaacacataagttatcgaaccatcatttcttgcaatcattctaatctttcaatcatcattcaacatcctccttcatttctttctacaaaatttttgatcttttttctctttacttctaaagctttgtcaaacttt

SEQ ID NO: 198530 - DNA, 472 bp, Glycine max
  unsure (1)..(472): unsure at all n locations
ttatgangtggatttagccttagtttcactttgggttttattcaattcaattaagaaaaaatctcaaagaaaagcgtccgattggattttttgattattttattcaaagatattctgatcattttattattattttgcctcttttggctttaaacgtggttatggcgtgaaagaccggttggattttattctaacaaagattaaatgatattacaactcaaatgatcggtggaaactcatttttttattgattaggcgagaaaacggcatanataaaatggttaaagcacgtcaaaagggggtacggaaagcaaacaaaataaaaataaaagcacgtgaaacaagtggggaccactaagggtacatagaaggaattgaaggttcgantcaggaacttaccgttgaagaccgaaaacgataagaacggggaaatcttatgaatcgctacaaaacgtctagagcgtacggagtg

SEQ ID NO: 198531 - DNA, 361 bp, Glycine max
  unsure (1)..(361): unsure at all n locations
atacttttaattaatttttgtttttntattcctttattaatatatatgtgaggggtagagggtgtcacaaaagacatggatgtgatgtcaccgacaaaatttaaatattaaacaaattatcaatattaagctgagtaaataagttaaataaattcttcttcttcgtaccccattgtcgagaggctcttctctattctaaggtatggtggagggatattatgaataaaaattaatatttataacttactgatggagtgaacatattattaatgacatcaaaattaaaattgctttaaatgacatactacctatttaaaagtgaatatctcttttatctcttggtaatatgcttgacagacat

SEQ ID NO: 198532 - DNA, 417 bp, Glycine max
  unsure (1)..(417): unsure at all n locations
ttctacagngggaagaagaggatgatcctgcatttcaaccagatccaccacacgaggttgagacagctggtgaccccagtttgcaagatcatcatttgtcttataatgctntaaaaggctcatcaggtcttggaataatgaagtttcaaggatcaataaatggattgcgagtgcagattctactagatagtgggagttcagataacttcctccagcctagactagctcaatgcctgaagttacctgtagaaccaattcctaatttgcaggttttggttggaaatggaaatgcctcgactgctgtaagattaattcatcacttggaggtgagaatccaatgtcataccctgaagctaccacgtgacctactttcaattctctgggctgacctaatgctagtggctgcatggatggcaa

SEQ ID NO: 198533 - DNA, 224 bp, Glycine max
tcctgatttccagctgggaaattggcgagtggaggaacgccccgacatttacgcaacgagcataatgtaaacctttacggttttaaaagctctatagttgggcctaagccttagagtgtatccttttgttaagggcttgcgtcctttgtttttgaatttataatacaaggaatcttttatatctggttctacggtcttacccattctcaatcatttgcaagtta

SEQ ID NO: 198534 - DNA, 432 bp, Glycine max
  unsure (1)..(432): unsure at all n locations
aatgacttagaaagaaagctaaagaataagaaagaaaaaggaaaagaaagaatcaattgatctaagatagaagaagagtaaagggaatttgaaaagaaaaaacaagttctttggaccagacgatgtctgaacaatgtacaaaattattcgaaagaaaaagggagaagagcaatagtaacttggttaagacatggggggtgtaaagtgatcgcctgtctcagntactaactaaagtcttttgtgtgctctcttggtccaaaccatacacactagaaaggaaataaggaatgggaaatgccataacaaccgaagccaaaacttcctacaaaatctgaccttataaagtcctattgatctatgaagataatgcatattatctttgatttgatgtgaaatgacttacaacagtaatttatgacatatcttgtggtt

SEQ ID NO: 198535 - DNA, 156 bp, Glycine max
atacgtaggagcaagggcaacccctctgtcgaccctaaaaaatgttaaaaatatataaagggaaaagtaataattttgaagtcatgttgcgcatactcaattaaaggttgtcatcccttgagacgggcgcgttgggtgttaataccttccccatgc

SEQ ID NO: 198536 - DNA, 306 bp, Glycine max
  unsure (1)..(306): unsure at all n locations
tgctatcatgcgctgagtcttagagatagcataagaatgtctatacggataaccacttatgtatttccgcctgccccctaacttcacgagttagtctcgacagaggttgtctgcgcggaagacgacgtaaatctccgcgtgtgaacaagcttgttggccgcgaatgacaaatggtgcacaagacgaacgtagtctctgcatgctatcatgcgttgactgttagcgatagcacaagaatgtctatactaataaccacttgggtatttttgccggcccnctaacttcacgacttattaccgacagagt

SEQ ID NO: 198537 - DNA, 206 bp, Glycine max
aatttccacttaattttattcgtacgaatcaaaaacaaactaggagatttattataactcacacatttgactcattcaactgagttaaatccccttggtaccatttccactccttatgtgttgagataatatgaccaacatattctaattgttgatatgtaaaggaatattggaccttatatgctacaaattgatgttgtgttaaa

SEQ ID NO: 198538 - DNA, 447 bp, Glycine max
  unsure (1)..(447): unsure at all n locations
cacattctgcagaagacccatgaaatcgtaaacatgttctttcggtgagactcagccgacccttccaatntctcaggggattcgactggttcagaagcacagcttgataacttatccacttcctcagaattttctgctgctccaaaaccagccactgcagcacaatntgcattaacatatggcatcaactatttaatttctaattaagagatataacaacagaaaacatcccatgctatggtcatgtgaaaattcaacatgataagattcactatcaaagtaatgggactaacatttaaaataaggacaataactagatccaactccttaagtgcttttaatgtngttctccaattggaattgaattctacctcagtagcttatgctaacctgtatgtaaaccttactactggattctgggtgaatagagaaagtgccanaacacct

SEQ ID NO: 198539 - DNA, 203 bp, Glycine max
catctagagagacacactcattcatagcatatatactgtttacaaggtattcacaatattaatctacatgtcaagagacagattatccttcttacaacatacctcccaaaagataagggctcattaaggctatatcaatcaatatcatgactacctgcatcaactaacgttttgcataatatactaataccttcaccaatata

SEQ ID NO: 198540 - DNA, 388 bp, Glycine max
  unsure (1)..(388): unsure at all n locations
gcatggtattctttacacttggctctataaaatcatattcaaataggtgattcttattgtagaatactatataaattggttaatagataaccgaaagtagccaacttaattagactccaccgcaggatattgctagctttgatattactattcttggaatgtaattttaaaanatttatgtcgacctgtaatttcaaaatgcctactaaaacttacataaatgaagttgtaaacaatcattacgcgggaaagaactcactgatgaaatntaagaacttgtcaagatgaattacattatgaacttatcataaggaggacgttaaaacttcattattgtctacgtttggttttatataccataattatttagttggccctattaccagca

SEQ ID NO: 198541 - DNA, 271 bp, Glycine max
  unsure (1)..(271): unsure at all n locations
actcttctgaaccataatgtccctttggttactataaanagccaaagaactcggaaatcaacacatttataacaatggagtagcacgatatatgtatcagagtattaaatagaatgaggcacactcataaacaagaaataatcagcaccataattcacatatcatataatgtcaacaaccacaaaacatccaagactgaaatgtataccacaagataaataagcagagtacttatcttaattatgtaaattctaggacactaatatttatg

SEQ ID NO: 198542 - DNA, 460 bp, Glycine max
  unsure (1)..(460): unsure at all n locations
agaacttagganaaatcaagaacaagcatgttctttcatcgttcgcgtgtatgatatccactcgacaaggtttgaagtagaggagaccttcaatcctataacgcaacgtggcgaacaaaagtgggcagttaacttcaatggccattatcgtcaatgcggaaggtattttgcgcttcactatccatgttcacacattattgcagcttgtggttacgtgagcatgaactgctatcaatatatagatgttgtttacacgaatgagcacatcttanaagcatactccgcacagtggtggcctctngggaatgaagcggcaattcctccttctgatgatgcatggacacttatccctgacccaactacaatncatgtgaaaggttggccaanatcaacaacgataatgaatgagatggattggctggaaccatttgaccaccgacacaaatgtagtatatgtgga

SEQ ID NO: 198543 - DNA, 137 bp, Glycine max
  unsure (1)..(137): unsure at all n locations
gtctatgcattacataangcattagaggagaacgaatcaggtcaccatagaatcgtcttgtcatagctactacatcagtaatgggtatgttaaacgaaaacacaagttctcttgaccagaccgatgtctgaacaatg

SEQ ID NO: 198544 - DNA, 256 bp, Glycine max
  unsure (1)..(256): unsure at all n locations
gaccttaagtcacccgccgcatgcaagcttatgaattagcatctaaattttacttattatgccatgatcaaaggggccatttgcttaaacttaaagaagaaatcaataaaataagccattttctgctctgttttaagatgcgaatcctattagccaggttgtttaaacttanaaaaaactgtttcttatataagtgcttatttaataagctggcaagatttgcttcttataaaaagccaaaaagtgcttagtttat

SEQ ID NO: 198545 - DNA, 139 bp, Glycine max
cctacaaccatttacgccatttgcgccattgaaacagttacgaggagggtagaagactaaccttgatggctgagaacacgaacaacaacttctatggacgatgtcaacttcattggaggacacgaactacagcttcttc

SEQ ID NO: 198546 - DNA, 359 bp, Glycine max
  unsure (1)..(359): unsure at all n locations
taaaaaaagcaaatttagtcatcctgcttggacgaatgaganaactggcgcatatgaagatggtgagaaagagggagaaacccttgttgtgactgccattcctatacggccaagtttcccaccaacccaccaatgtcattactcagccaataacaaaccttcttcttacccaccgcccagttatccacaaaggccatccctaaatcaaccacaaagcctgtctacctcaccttctatgacgaataccacctctatcactaaccaaataacacctacataaaggaatttctcatcacaaagcctgtatggttcacctcaattccgttgcctatgctaatcttgatccatattctctcata

SEQ ID NO: 198547 - DNA, 379 bp, Glycine max
tctcacagtctttagatatgggagcctatccaatccttgtgttcggactcttagccacttatgatagccgccgatgatcccattactgcttcccctaagctctctgtcctttcttcacgccgcatcccatgccttgcgaactccttggagtaccctcgcgttgtggtcactaaaacctcgtgcgatgaaaggcgtgatgctttcgtctgatggcactcctctcatgggacatccttcgcatgaagatagaatcctgattcttccttccttctagcgagggaaccatttaacagacgcccctccatgctagccaagagttggtgcacaacaaacaattcttgcgccgctctttcacatccacggtcgacgtgtcatacat

SEQ ID NO: 198548 - DNA, 464 bp, Glycine max
  unsure (1)..(464): unsure at all n locations
tcaacatatttggttgcatganccttctaaaattagactcacatctcataactgctactcccagcaacctaaagcacagtctatcaagttccgaggaatggaacatttgacagacatgctaattcactctaatcaggtctgttgtttcacagagcagaatttttgcaatcgattntgttacattctatctgcataatgttgcatgggcttgaagttgtttattattttttttctaatttttgtaagcttccaatatgctaaactgttgtcttttggttttgcttctagacttctgatattctatactatgaagtattggatatccctctgccagaattgcaatgcctaacaactcttaanattactttccatcatgctaccacggatgaagtagtgcttgtcagtcaccactattaatatttacacaatagatttccatcagtgttatacttctaaccgagtta

SEQ ID NO: 198549 - DNA, 312 bp, Glycine max
caatctctcgagagtttcggcggttaattttaagcgtatcgatatagtatcagcctgagaaggacatccgagcgaaaagttatgaccatatgaatttctcgagagcttccggcgtgcaattacgagcgtctccacatgtgatgcgccttaatcgaacatccgagtgaaaagttatgaccatatgaatttctcaagagcttccggtgttcaatttgagcgtctcgatatatgatacgcccgaatcggacatccgtgtgaaaagatatgaccatatgaatttctcaagagcttccgttgttaatctcaacctct

SEQ ID NO: 198550 - DNA, 433 bp, Glycine max
  unsure (1)..(433): unsure at all n locations
agcttcaatcatatgaaattaaatcaattattcggtatgtgtcacaaattctatggataagaaaattagaaaacttttatattggttcaattaatatatgaaaacatttcggtgtgcaaagcttaacgtgaagtaattttaaatgaaatggtcatatatttttaccaatttcacagaaaaacgtttaactaagagatagtgtagctcagttggttgatagtgtgggtgaattgatgtaaaccactaagtatgaacacgaaatatgttatcggcttatgcatctgcgcccaatgctttctctgtcataaacaaaacagaaaggtcagcgcgtcagccattttatgctatactcnggctgaaaatggtcccactgtttagtgcttatagctacctttcttgcctaattctatgctcctattatatagagagagaa

SEQ ID NO: 198551 - DNA, 457 bp, Glycine max
  unsure (1)..(457): unsure at all n locations
cctctgtacacctacgttcgtatacgaagagaattttttttctctatatacacatgcattgaagaactctntctctctataccgacatggtctatataaaatctctattccttttcaaagatttcttttccccttttcaatatacactcgttgtttatataaaaatttcctttatattcactcattgctcatatacaagaatttcttttcaaacattgtttatatacaaaaatttcttttcttttctttatatacagatatgacattttgttcacaacgcctctttctttctctattcttggcgttattacgacgcttgttcattttattttaggatgacgttcctaaacgaaaaatctacacggttctggaatctcaacaaatattatcaacaataacgatatangcactaacgcaacaatctanacaaaatgtatgcacataacacatgacaatc

SEQ ID NO: 198552 - DNA, 482 bp, Glycine max
  unsure (1)..(482): unsure at all n locations
aagtgggtcactctctattgagaggggtgatttcttatttccatatttctcacacagataacttgtctcaagtctctatcacttggaatgctncaacttaacttcaagatgctccttgttgacctcttaaagctctaaagaagatcattgaagtgtatctaactcaatcaacatacttatagaggaagaagacatagatgacagttgtcatatcatgacaactacaatgtcattctaaggttctcagtttgtggaacctttccaatgagcattctaaagttacattagaatggaatttctgatgttagctaagaaatgatccatactagcagtatatcatcttgatgaagtncaactgatatgactttctgaagtagcacaacttcatcaatcttaacacatctgtcagcacaaagcattttgatagagattgattcataaaaataaagtgaacgatagatgttgtgtgtatcattctatcc

SEQ ID NO: 198553 - DNA, 175 bp, Glycine max
taacaatgacttatttgcctctgacaaccacatataagaactgggattttcaatagcaagctctaccgtgaaggataaccctggtgcctataacaactcaagttgcccgagagcattagacgccatctctaacattgcataaagtgttctctcaagccacatctgcatcattgct

SEQ ID NO: 198554 - DNA, 466 bp, Glycine max
acgattgaggagaagctcaatgttcttttaaaaaggaagaacggaaccgcaacacccacacccacatcaagattcgtgaaattcaaatttgattcaacctcacgttactcaccacctagaattcgcaaaaattggaaaagggaattaggattatttgataaagatgagatgtaaagagttagagagcgtcgactgtcgaatcattattgataggcaaaagctgtgggtttttttagcaaataaatgtgctgataaattcgtccctgaaatataaaatttcaaatcttagtcctcgaaagtgaaaaaaatatgacaagatcattcatctgttaacttctatccgttattgtaataaaagagtacataggacacattcatggacaaatttgtagggctttatacattctggaccaaattgactattatcaaatatatttaaattatcttgttaatagtgcaacataca

SEQ ID NO: 198555 - DNA, 507 bp, Glycine max
  unsure (1)..(507): unsure at all n locations
atgaaacagatgngattcatcatatattacatctctgtttataagaactttcctttcagttggtgaccagatcctatagcctttcactccatcaccataacccatgaacagaccctntctacattaacatgataataggcattgcagccaaatactcttaggtttgagtagtttgttgttttgccattccatatttcaataggagctttaagtcctatagcagtagagggtgttctattaattagaaagcaagntgtattgatagcttcttcccanaaacttctgttgagaccagcataggacaatagacatcttgttctttccaggagtgttctattcattctttcagcaactccattctgctgaggagtggtcctaacagtaagatgtctagcaatcccttcatctctgcaaaatttgataaattccggtgagcanaactccaagccattatcagttctgagtcttgtaacattacttttcaatttgtgtttcaatcagtgtctt

SEQ ID NO: 198556 - DNA, 215 bp, Glycine max
cccccaagagaaaacaccgcagaaaagggtccaacgccgaaaagaaaaagaaaaagaatttaaacacaagaaaaaaacaggggcactccaccggaaaaaaaaaagcataaagggccaaaaacccaaaacaaaggaaataacccacacaaaagtgaaacaaaaaagagaaaggcagaaacgggacggacaaggaaaggcacgggcaaaaaaaaggc

SEQ ID NO: 198557 - DNA, 309 bp, Glycine max
  unsure (1)..(309): unsure at all n locations
ttaagtcacctgcggctgcaactgaagagagttcttgctgctctccgcttcctacgngtatgtagctcgctaagcgagatggttgtctcttctgcgctaagcgcgagattgccgctaagccaaatctcacttactcgcacttagcgcgagaatggcattaaacgcgccttcatggacaggaagccctttcttaagcctgacttacagaaaatgaaggggagggctggaagagagcgctgaatatccgtcagagtttgaagagtgaaatacacaaaggctaataacatagcaaaggagccaagttttgat

SEQ ID NO: 198558 - DNA, 220 bp, Glycine max
  unsure (1)..(220): unsure at all n locations
aagttgtacaggttcactaagcgcaccgcttcatctctctaagcgcaccgcttcagttcatccgctaagcgagaaacgcgcgcttatccaaaaatcactagcgtgcgctaagcggtccatacatgcgctaagtgcacgagcacgaacaaggccacctatnttagcctgaaatcaaatttgtgaacggagtctggattgggattcaaagctctgcatgtct

SEQ ID NO: 198559 - DNA, 431 bp, Glycine max
  unsure (1)..(431): unsure at all n locations
tgaagctcattatcagccttaaatgaaaaaccatgatatcaccatatccttaaggaattttggagctttggaatttgtttgggaataagtgtggggggtttntgtttcattggataacttgttttgttggctatgcttcatgatgtattttgggccatacttgatgtacattgtatattggttaaatgttggacatgctgaatgaaatgttgtttcttaaaggctatagagcaaaaaanaaaaacgaacaacgaaaaagaanagcaataacagtgagtgaataagatcttacatggcacaagaatgatgaaactctttgctctactctttatgttaaaatttaatcttacttcttttatnttcttattcttcttatatgcacttattcccattgctctctatntctttggattaccacttatccatatttt

SEQ ID NO: 198560 - DNA, 417 bp, Glycine max
  unsure (1)..(417): unsure at all n locations
tctcatntgaattctttattccctttctacacaggacatatntatgtgctntcctcaatntttctctttggtataattttttatataatgtatatttaatgtttatttttattagatatttttatgtaaaaataaagatatttagtgttgttaattttttctacttttgataaaatattttattttatgtagtttttaattatggagataataatattctctctttttagatgaaatatttgagtatcatttatttctctttttaatagtatcttcttttataatctcttattttaatacgtatgaataattgtatttgataaagactttgggtgccatgccaaactaatatttaatatttgtaatcttgagtcttttaaaaaactatntagttaccttgtacatacactactaaaa

SEQ ID NO: 198561 - DNA, 453 bp, Glycine max
  unsure (1)..(453): unsure at all n locations
tcaactaaatgacacacccgaaagttcaacttatgctcaggcaccaactttaactgctactcagtgtcaacaattgatctctttcttaaccaatcacatgaaaaccgaatacaccattgatgtagtagccacaaatgttacaggtatctgtatgaatggttgatttaataatgattaccgcacttggatcattgactctagggatacttctcacatttgttgtctcaaagagctgtttgattcatatactaccatttntaactctcatgttcttctgcctaattccacgaaagttaaagtagaaggaatatacagtattaagattaatgaagcccattttcttcataatggtttgttcatacctacattcanatntaatcttttatcccttgtcaccctgattaatgctaatctntntcgaattacatggaacctgactctttatttacagga

SEQ ID NO: 198562 - DNA, 150 bp, Glycine max
  unsure (1)..(150): unsure at all n locations
gtgacttcgataacaaatgaatatacctctattgctaattcatgatattgaagtccttttacaaacagccgctttctaaatcacgctcttccaagtaaaatatgttccctcgagctgattcaagaatgctacncggaccatcatttactt

SEQ ID NO: 198563 - DNA, 193 bp, Glycine max
aataaaaacacaacatctcttgtgttatattatgaaaatgagtgatctaagacccactcccaaaatttgaacctcagaatatttggaggataataaaaagaaatagctcccacaaaaatgtacaggtttttaccaatcaaaatggaaggaagtctattgtattcccccgaaagggaaatatatatttaattaa

SEQ ID NO: 198564 - DNA, 490 bp, Glycine max
  unsure (1)..(490): unsure at all n locations
gatgagaaattcctccacatgtatgattctcttgtgattgcctaatagtaaaagttggaacccctgggagcttagctgcatgaatgcgccagggacatccttcactagcacatttagcagtaaagcgggtcttgtcagattttatagtctgcatctcaaagtgcagagcaattgctgtatccctcaaagcccttcggcaactcttgacatcagggaattcttgccccactgacaattcataactaggactcgcagtacgagcctgaattataaggggtgtagaaacagccacaatgctgtggatgtgaacatccatatcatttgcagaatcaattcccatgtctgagttctgaaccacagacagggccgtgttctcatcaagatcttggttctctgaaacagtcaaatcattgttctctgataggactaaatcatgaatttgtccaggaaagggcangtcgtggtcatcatgttcgggcttttgatccat

SEQ ID NO: 198565 - DNA, 223 bp, Glycine max
  unsure (1)..(223): unsure at all n locations
gcagctgcaccactcgatgccagctcgtttttcgactantgtgcntcctccacaaggtaccgtcttctggagaacttcctggaaggcccaaatgggttcggctgctatttgcaccccctctttactaaatacaccctcgcctttttttgctgattcattttccgtaacgttacggaaacttatgaattacgtaacaatacatgtcttccttctgcaatgttac

SEQ ID NO: 198566 - DNA, 345 bp, Glycine max
gtcttgtcaaagatgacaccctgacacttgagaaggatgacaacattgtgtactaggaacaacttcttgtatgttagcaaaggcataatcttctcctccttgaacgaccctgatcctttcttctatgtgatccaatttctccctttgcgccatggcagaagggactcttcccgccgcaaaatgcaagggttgtcggtgtgagcaaattcgagggccctctatagtgtttggtaggggtacgccaccaactgcttacccctcagtggcatatctgaggcaaggctcgaagttggctagaatatggtagggtacttcatgtgtctccctcattgggttagagacatg

SEQ ID NO: 198567 - DNA, 267 bp, Glycine max
  unsure (1)..(267): unsure at all n locations
gcagctatgaagaatcaagactgaacacagatgtgtaattctataaggcacaacacaatccacgggatcttactttgctcagatgtagaacccatcctgcagcaatgcctgaaataacaatggagaagtttcnaagtatcatgataatgaacacaaagggagcataattggttttattaccatcctaagaacataatagtatacttataaataaactaaagcgctcattttttactgctactttaaagatgatgtgtacaatgcaaa

SEQ ID NO: 198568 - DNA, 288 bp, Glycine max
  unsure (1)..(288): unsure at all n locations
acacgtacaactttctgattcaaggccagctgggttaccaagttaaccaatgcatncatttcgccttcaagcttcttagtttcagatgatgtagatgggtttgtagctacctcatgcactcctctaatgactatggcatcatttctggcgcttaactgctgggagtcggaggccatcttctcaatattatttctgtcttcaccacgagtaatgtccttcacgtgtccaccaatggcaagatctatcatactgttatcacatattctgaatgcctcataaaaatattgg

SEQ ID NO: 198569 - DNA, 407 bp, Glycine max
cacacagatgtccgattcaggcgcataatatatcgagacgctcgaaattgaacaacggaaccagtcgagaaattcaaatggtcataacttttcgctagaatgtacgattctgggacataatatattgagacgcttgaaattgaacaacggatgcgctcgagaaattccaatggtcataacttttcacatggatgtccgattaaggtgcataatatatcgagacgctcgaatttaacaacagaagctctcgaatattcaaatggcataagttttacatggatgtccgattcggccatgattattgtacgctctaattgacacaaaagtctcataatttaaaggtctaacttgccacgatggcgatcaagactattattgaacgctaaatgacacgaactctagaatta

SEQ ID NO: 198570 - DNA, 500 bp, Glycine max
  unsure (1)..(500): unsure at all n locations
gctttacacattcttgatggtagaatgcctatatatatctctatgtgttggtccctgagcttacatctttcatttttgtttgatacaccatctatagagagagaatgagagtttggaagaaccaaaacaaaacaactctttcatgacaatggcttaaggtatattttcattttgttttccgtatttgttaatgacctgtgttttatttgttgtttgttacatcataagtttgatattttagtcttacatgttatacaatatattcaactagttgtcacaattaanagcattacaagatagttctaccattaaattctaatgtgtttccatggaaattcaaaagaatggtgatggtatatactaatatgtagtcattagatccaatgggccataagttgtccgaacaccaaaataaagcaaaggcacataaaaacataatgtcaattctaatgtgtaatatattagaagaactanaagcctgatcaaataaaaataagtta

SEQ ID NO: 198571 - DNA, 252 bp, Glycine max
aagctcaactcattcataccgactaaaccgatcgcttgccgagacgccattgcatagaagcttccgattgattgaatttcagtgcactgttcaaatctacgatagatagttgcgattaaatagagatataacatgatgatcgaagttaattggtagagaatcgatgagcattggggaatatattattgcatgagtttaatgaacgaaagagcgaggaacatacgctatttacgatcgctgggctgatatata

SEQ ID NO: 198572 - DNA, 390 bp, Glycine max
  unsure (1)..(390): unsure at all n locations
aatcgatgacatgtcgcatctaaatattcctactgctttgaaaatcattcattaatatatataatttcatacaaggctagtcgtgagacttagaggaacattggttggtcaagtgacatcccatgtaaaattctatataatctgcgtgcgtgtgaattctaatttaccaattataactganataacatataaacagcagtctggaaaatcgaagtcatacataacatgagaatacttctttaattttgtatacttatatatatatatatatatatatttgtatacttacgtatatttatgcatagtaacacttttacacagctcacatatactttgaacatatactgcagattgaggtaatggaataattggcactaataactgacatct

SEQ ID NO: 198573 - DNA, 421 bp, Glycine max
tgaatgatacccactctccttggcttgctagagtttccgccttctcctccaagcacttcctcagtattcctgctacttcattcctactttgtttcactcgatctaattctcattatgagatcttgaccactcctgctattctcaccatagaacgatattacccacaaaagaggtatggcttccttcctgctatcgagcatcctaagatctcatcaaactcctctatggttagtgctaacggaaagtccccaaaagtatagcatctaagacattgctcatagtcattgagtagagatgtattggcctccattgacacttccatcatattcagatcctagatcctttcatatacctcgcttaaagacttacgttgaacttgatccatctactaccccaggtttgcatgatggctcctctatat

SEQ ID NO: 198574 - DNA, 169 bp, Glycine max
  unsure (1)..(169): unsure at all n locations
agctngntatttaggggggatgcctattntatttattcttgcnggagctgngtcagctatggataacgactcacccgatggaccttgttatttattttgcttctcttgaataagttttggactgtttctgtgaatcaaatgggtagtaaccaagactggaaacattctg

SEQ ID NO: 198575 - DNA, 322 bp, Glycine max
  unsure (1)..(322): unsure at all n locations
acataatatcaatttaactatggggcaaccaaaaatctggcagaatttctcctaaaattngagcaaaatcaactttcaaatttaacctcttcaatagcatatatcctgataatcaaaaccatcatccaaatttcacctcttcattacacagatcaattataaacaacaaccaacaaaaaagctattaaagagtatatcaaggttgtaagacaatgtgcatttcattcgccattatctgatttaacaatataaatntctttctagttggaagatattcatgcaagtctgtttcttgtcaaatgtgatgtggatttgaatagag

SEQ ID NO: 198576 - DNA, 400 bp, Glycine max
  unsure (1)..(400): unsure at all n locations
ttggtttgtttgatcctacatgaacatgcattgcataaaaaacatgtagttttgaagagaaaatggatcttgagaaaaactatcttggcgaatctattatggaaagttggtgcatgcacgtatatatcacttattttgctcttgatttctatatgggaaagcttcaacataaaaaagggactttgcccacattttttcagaatgtttgcacctggtttaaactaaaaaatctgagccatacaaagggtgaaacttgctagacatgtggattctttgaccaatctcagcgtttcgagcgtatnctaatatctacccattaattntatatgaaattagtcatggtttacactataccacaatttgacatcntctctgttgaacccttggagatgaggcaaat

SEQ ID NO: 198577 - DNA, 445 bp, Glycine max
  unsure (1)..(445): unsure at all n locations
ccatataacggtggacctttgcagacttatcttgagtaaaattatttgaaaacttttgacttttggtctgtaagggtattaaaatcaagtgaaagggtaaccaccacgaatattacaaagcaacaacataacaagtaacagaaaaacaaaatttgaatacagatacttaccagaacccttcttggcttcttattcttcgtatttttagacattntgattatgtcatctatcaatatcaacaggtgatggatattagacacgtgagaaagaacaagaagaaaaaatagtcatttttcaaaaggttctattaagcacacctaatgtcatgtccatcttcttctctgtaagcgcaatagcttcggttgtaagaggtttggttgcatctgatatagagacattgaaattaatacaactatggatatccgatcaataagaattaatatat

SEQ ID NO: 198578 - DNA, 416 bp, Glycine max
  unsure (1)..(416): unsure at all n locations
taaatcataatcataaacgtataattgaatttggatttcattatgcagaagcattataaataactagagcccaataagaatcaaactgaaggaagcagaagccacattgtgattccagaaaaatctaatagaaaacacaccaaatggtaaaggaagggaaccgtatgctatcacaatcatcaccacaggatcaagcaaacacaaaattccagattaaggtccaatagtttaacaaatgcatgcatggttgaccttcttgatagatcttgngattaggaattgaaactaagccagaacactatgcatgcatgtagattngataataagcatgcctttaagctctacacatgtgctgagttactgccaataatctgcttgagcttgatccaactattgcaactggatatgttcaattg

SEQ ID NO: 198579 - DNA, 388 bp, Glycine max
  unsure (1)..(388): unsure at all n locations
accaagagctaggngcatcccccttttctcaataaatgcattcaagaaatggtcctatatcatcatcatgctgtgattcatctttcgtctcatcaacaatgccagatagtgaaaagtgtatctcctaatgagacgccacttgttctctctcccatccttaaagaaatggccttataccgttttccatttatatacaaccattaactattaaggatgtgctgcacacatatttcttaatntaatatttacacacttaagataattatatattatcatttagagaatttattatataagctaacaaatcttatgggtcgcaaatgatcacagcgacactattttttcatgtcagtgctacccgcatacctattttccatatttaaaatat

SEQ ID NO: 198580 - DNA, 276 bp, Glycine max
ctgcagctttgatatttatgtaccgagttttatttgttcggcatttattcgcgttgttatttatcccccgtgcggctaagcattacttaagcattctgctaactaaaaataaataattccccgacgtttaatgattatcgtactcgtaaaaaatccgacgtcggcgtgcgaccactggaatcaaaagagtaaaatatataatatcaaagacttttataaataacaaaatcacggactttccttggatttcattctatcgatgtaatacaagtgact

SEQ ID NO: 198581 - DNA, 396 bp, Glycine max
cattgtttaatacaaaacacttgccaccacaaacatgaagatgcgagatgtttggtttcctaccattgaatagttcatatggagttttctttacaattggtattattaaagccctattcatgatataacatgcagtattagcggcttcagctccaaaatattttggaagaggagtatcatttaataaggatctagcaatttcttctaaagacctatttttccttttaacaactccattctgttgagggagtctatgtgcagaaaagttatgttcaatgtcatgcttatcacagaatatatcaatatttttattttcatactcaccccatgatcacttctataaatatatatttgagatttttcttatcttaattacttttgcaagttacttaatgc

SEQ ID NO: 198582 - DNA, 245 bp, Glycine max
  unsure (1)..(245): unsure at all n locations
tctagattcgaatattacctcttcaccatcaaaattgacaatggcctcacgcttagagtcctcatcatctgaacttgttgtcagtggtgatctactttatcggtggacgcatcatccatcaaacacaagttggcttcttccttagtgtcctcatccgacgatgaatngtccagatccttccaagtgctccagaggctcttcttgtgagacttgaagaatttcttcttctactacttttgcttttt

SEQ ID NO: 198583 - DNA, 451 bp, Glycine max
  unsure (1)..(451): unsure at all n locations
tgtagnggtcagcaaaggagcataaaccacagagtctaacaacaggtgcagaattttgattcatagtcagttaggttaccaggttaaccaaggcatctagtttaccttcaagcttcttagtttcagatgatacaaatgagnttgtggctacttcatgcactcctctaatgactatagcatcatttctggcgctaaactgttgggagttggaagtcatcttctcaattaaatttctggcttcagcatgggtcatgtcttcaagggctccaccactggcaacatctatcatacttctctccatgttactgagtccttcataaaaatattggagaagaagctgctcagatatctggtggtgagagcaactggcacatagtattttaaatctctcccacgattcatatagactctcttcactgagtntcctaattccttgaatatcctttctgat

SEQ ID NO: 198584 - DNA, 219 bp, Glycine max
ataatacctccttaactcgtttaattgacaaaaataattgtatttataaaaaaaggtttttatcattgataccaagatcaacaaagtattgtctaatataaacccacaataggtaccaactaactggtctcgggttcttagtgttggtttcgatctcttaatctaaatacataagaaccataatacaaaaaaaaatcttagtattggtttgagtctctt

SEQ ID NO: 198585 - DNA, 436 bp, Glycine max
  unsure (1)..(436): unsure at all n locations
catcttgatcctccacaggctgaaatcatattcccctgtgaacttctccacatcaaaccttgccncatcgcaagatcccttcaagaacctggctcttgataccaatagttgcattgctctgatgatattactgcagaaatggtgatatgcaagcgcacacagcaagaaagctaagaacaaaggtggtaaagaaaagagcaagacagcaagaaaattatcgtggttcggggcaattgagacccctacatccacactgtagccaactctgtcttcattatttgatcacaattacacagcatacagcagcgagacttctagggaagtttacagtagcctctcctcacttgcctcagagttttgattngatcacatgaatctaagaatatttctacagaatacatcacctgaactatatacatcaatttagtacagaaat

SEQ ID NO: 198586 - DNA, 347 bp, Glycine max
  unsure (1)..(347): unsure at all n locations
cctcattgtcaacttacctattcggatgtgacatcatggcacataggtcccaactttccatcggggattcaatcacaaaacaaacttcaatatattggactgtctaacacggggattttagattctattcccacttggttctgggaaccacactctcangtttgcatttaaacctctctcataatcatatccatggtgagcatgtgactacattacaaaatccaatatctatcctaactgtngatctaagcacacatcacttatgtggtaaatcaccctatctttcagatgaagtgtatgagttagacctttcaaccaattcatctctgaatcctgcaagaatttta

SEQ ID NO: 198587 - DNA, 277 bp, Glycine max
  unsure (1)..(277): unsure at all n locations
ttgctaaacttgctgcactaagaagggtacatagcacatgaaatgctatataatatacaaatcctttcttgtcaaagtaatacacactgaatttgtgatctttaattatntgtatggtaacacatacaactaattaaaaccacacaacattgattgattcttggtcgcatacttgggatacttataatatatgtgtgcttttaatgcacaaaatttctatctaaatttaattcgatgtgcctttgaagcgaagctctaaagcttttgtttaaggcta

SEQ ID NO: 198588 - DNA, 406 bp, Glycine max
  unsure (1)..(406): unsure at all n locations
aaactggggcacaataacagaagggtgaaagggagaaacccatgnctgtnngactgccattcctgtacgaaccaagttccccanccaacccaacaatatnctttactcagccaataacaaaccttctccttacccaccacccaggtatccacaaaggtcatccctaaatctaccacaaagtctgtctaccgcacttccaatgacgaacaccacctttagcacaaaccaaaaacaccaaccaagaaagtgaatttgcagcgagaaagcctgtagaattcaccccaattccagtgtcctatgctgacttgctcccatatctactngataattcaatggtagccataaccctagccaanggtcatcaacctccacttttcttaggatacgactcgaatgcaacgtgtgc

SEQ ID NO: 198589 - DNA, 382 bp, Glycine max
  unsure (1)..(382): unsure at all n locations
tcatcctgctgggacgaatgagaaaactgcggcaaatgaagagggtgaggatgaagtagaagcccacgctgtgactgccattccaatacagccaagtttcccaccaacccaacaatgtcattactcagccaataacaaaccttcttcttacccaccgcccagttatccacaaaggccatccctaaaatcaaccacaaagcctacctaccgcacttccaatgacaaacaccacctttagtgtaaaccaaaacaccaaccaagatatgaatnttgcagcgagaaagccttataattcaccccaattccactgtcctatgctgacttgcttccatatctaatggataagtcaatggtagccataatcttataccaatttcatcaa

SEQ ID NO: 198590 - DNA, 202 bp, Glycine max
  unsure (1)..(202): unsure at all n locations
gcttagccctagagggatggactttntcangttttagtgaggatcaataacaatgcctatatgttggacctcctagaagagtatggagtcagcaccactnttaacatttctgatataattcctcttgtaggtagaagtgatattgagaggaggagactaacaaattgaggtcaaatcctcttcaaggggaaggggatgatgc

SEQ ID NO: 198591 - DNA, 410 bp, Glycine max
  unsure (1)..(410): unsure at all n locations
cagaggaccttatattctcttaaggtgctgangtggatcacactgaanatgaggacacgtagccctctaaaggtgagggcgtgcaaccctctcaaggcgaggatgtgtagtcctctcaaggtgagggcgtgcagccctctgttggcgaggacgtgtagtcctctcaaggtgagggcgtccagccctctgttggcgaggacgtgtagtcctccaaaggtgagggcgtgtaaccctacgaaggtgaggacatgcagtcctctgatggcgagggcgtgtagccctctgaaggtgaggacatgcagtcctctgatggcgagggcgtgtagccctctgaaggtgaggacgtgtggtcctctataggtgagggcgtgtagccctactaaggtgaggacatgaagtcctctgatggc

SEQ ID NO: 198592 - DNA, 403 bp, Glycine max
  unsure (1)..(403): unsure at all n locations
agcttgggcattatcttcctttctgatgactcttgcttaagtgcaacttgagtgtagcttaagcgcaaacttataatagctatctcccttgtcttgcttaagcgcatattcggtggtgcttaagtgtggacttacagtagctaactatcctgtctcgcttaagcacaccctangtgatgcgtaagcgtggacttccagaagttagctcccctgcctcacttaagcgcaccttgggtgacgcttaagcgcaacaggtttgcaaactagcctgtgtgatttctgtcaaatctcctctaatggctcctanatagaaattcaacctcaaattatcattttcaaacatgaacatcanactaagacacatttangaaaccaatagccacgattctccacacataaaaca

SEQ ID NO: 198593 - DNA, 457 bp, Glycine max
  unsure (1)..(457): unsure at all n locations
ctatgatcggagaagaatatagttcgtgttttatattggtactatngcaaagaagaactacatatagagacgttagttagtggctttaaaacatgcttgaaaatcttaaattaatacagagcaaagcatcaaatagcccgcataaactattctaataagtacttttgctttaagaacttttgtgtacatgcacttttactttagactggctaggcggtggtgatgctgatgttattattatnttagaaaatgccatcccgcgtcaaaaagcatcttctgagtcaatggcgtgtgggctcataggcttagaaccccccaagtgtaagaagttcacanacattcgtagcttttttctcctcccataaacattttccttcattcaattcaattctgaagaccattggggatttcttttttctgatggagagcctaaccgatagaacagaatggcatcaca

SEQ ID NO: 198594 - DNA, 428 bp, Glycine max
  unsure (1)..(428): unsure at all n locations
atccttatagtcacctgcggcatgcagcttgctctanaatacattgatgtttgtatttatgggaggaggntatatgccattcttgctttaagagtagtgtcccactggtaaaattaactttccaaatgtttgccttcgcaggaatggccccgaggaagcttgcctcaaagaggtccaagaaggacaaggcggccgaaggaactagttccgctccggagtacgacagtcaccgctttatgagcgctgtacaccagcagcgcttcgaagccatcaagggatggtcgtttctccgggagcgacgcgtccagctcanggacgacgagtatactgattttcatgaggaaatatggcgccggccgtgggcaccacttggtactcctatggccaagtttgatccacaaatantcctttgattttatgccantgct

SEQ ID NO: 198595 - DNA, 381 bp, Glycine max
ttacgtcttaatctcacggagagactaagggtactatctagagtggtcttgagagtacttgttgtaaccataacgggcatatataatacctcggttctatcaaagaatggattatagaaatccttcatgattcgaacgacagctggacataaccaagacttgtggtgaactagtatataacatttatgttgtctttactacttctatataattaggtttatcctacaatttacttctacactactgtatccaacgtttgtgaattgtttttagcacaatgtgatttcgactcctttgtgaaaccatcgccatcgatatttttttcgagagacggtcaaagactagtttattataaactttcaccccatctatgtgttaaga

SEQ ID NO: 198596 - DNA, 428 bp, Glycine max
  unsure (1)..(428): unsure at all n locations
cgctcaacaaagtactttcgacacctactgnacgttgatttgaccaatgttgttatgggaatgttgcgacaatccttcaaaaccttattgatacattctgagaggttggttgtcatgtgatcatatccacgtcattctctatcataagtcatcagccatttttcctttgaaatgcgattaattcatgttactatggctggactcagttcacgaaatctttctaaattttgatcaaaaatgtgcttgcaaggagtgtatgctgcataaaattagttatgaataacaattctacgtatatatgaaagttaaataaacgtgaccatcaaatatgacatcatacctcaattcttacacatttctttgtggttgtgattattgaatttccgattgaggttgcttgctatgtgtcgcacgcagtagacatgata

SEQ ID NO: 198597 - DNA, 139 bp, Glycine max
tttcctatttggacgggacatgatggcacactaggcccaacttttcatcggggaggcaggccccaaacaaacttgaatatgtggggctatataacacggcgatgttcgattgtattcccacgcatatgggggacacact

SEQ ID NO: 198598 - DNA, 147 bp, Glycine max
cttctagtaattatgacttaccgcagccgcctatacctcttacattcccacctagagcaattccaaacaaaaaatatggtaaaagcggaaaaggagatcttggagaccttcacgaaagtacaggtgaacatacctctgctagatgcc

SEQ ID NO: 198599 - DNA, 421 bp, Glycine max
  unsure (1)..(421): unsure at all n locations
ttccaccatggagatgcagcggaagacaaaggaaaggaggtgagaggaggcgccatccattaaggaacaagccatggaagaaggagcttcaccaccaagatgagccttggataataagcttggagaggatgtttcaatggaggaaaagaaagatggagagaaagagggaggtggagcacgatattgaaggaagaaaaagggagagaagttgaactttgagttgtgtctcacaagactctcattcatcaaagttacaacaagtgttacacatgcttctatttatagactangtagcttccttgagaagctttcttgagaanacttcctagagaagcttctctgagaaaactttcttgagaagctagagcttagctacacacacccctctcataactaagctcatctccttgagaagcttcct

SEQ ID NO: 198600 - DNA, 143 bp, Glycine max
tctggaatcttagaaatgctatcatttttatggagaggaatgcggactaacggatgtgttatatgataagtattatgactgatatcttcggcagtggttagtaggatatgcaacgtatcaaatcgggtatctcgtattcatct

SEQ ID NO: 198601 - DNA, 390 bp, Glycine max
gaatcataaagatgacatatttctaacctatctatcatgcaactcacccagtcataagtagaacgaaggactaattcctacaacgaatgccaagcaccatatttagtctaataatgtatataaaaatatctaattctacagtaaatcttacctgagctatatattaagcaagcccaagagtctgtacacataaacccatggcaaattttctagattgaaataatgaagagttaacataacatttcactactggaaacaaacaaaagctttatgcttcattgaatgacaagctcaagttctcttctaagcctatgatcataaagaatttactctatcgaatcccgattcaatatctatccatcatcttatgtcataaaacaaaaaaactta

SEQ ID NO: 198602 - DNA, 302 bp, Glycine max
  unsure (1)..(302): unsure at all n locations
agctntagtcaaacagaataatccgaatatgttttataattgggtgttgaaaaagcataacaagactttctgtgattggtttaaagatacaatctntgcagatgagaatgcttcagaaacattaagaaagctagcaaatgggcctaaaagaaatgttataacttgtgaaggatacgacataaacaggtattcattttacacaacagcacaagatgacaaaagtacaatgcataacagcggggtcaccctaagggatgaatctcaacactttgcaagtgtcaatgacgccaatccctgtgtag

SEQ ID NO: 198603 - DNA, 488 bp, Glycine max
  unsure (1)..(488): unsure at all n locations
gtgtgtactagtatactccacaaggtccctgacncgttttctgcgaaaaacaactccttggttaggggttttacgcgagtcgccctaaccccaggactgtgaatttcccctccacggttttgatgtgtaaaaaaatagcaaaatgtatcaaaaaaaccaacacctccacaatcgcaggcaaacgtaggatttatactaattgcaactttatttattcgaacaggtgacaggtgaaagccacaggtcctcacaaccatttaattgtcttacatattacacaattagcgagcaaacacataacactcccatagtgagttagtgatatgtaaaccaaactacatgccaaaccatagcattangttaatttatttcttgccacgcaattntgctccaagagccctctccaacttaccaatatctgctgtttggaatggcttccctgactctactcctgaatcactgagctttcatgatcactgaagtacatg

SEQ ID NO: 198604 - DNA, 453 bp, Glycine max
  unsure (1)..(453): unsure at all n locations
gatgatgacaaanagccaaaagaatgatttcaagattgagtcaacaaatataagattaaattcaagaatcaagattcaagattcaagaataatcaagatcaagattcaagactcaaagattcaaaaatcaagagaagacttaatcaagataagtattaaaaagtttttcaaaactttgagtattacaagaagttttcacaaaatcattaccaaagagttttacactctggtaatcgattaccaaaatgtagtaatcgattaccaatgttttaaaacgttaagattntcaaaatttaaaatgaagagtcacatttgttcatgtgtaatcgattacacctttatgggaatcgattacgaatgactggtctcaaaaaattcatttccaaaagtcacaattcttcaagtgacttgggttctaagattcattcaaaagtcacaacttttctagatgac

SEQ ID NO: 198605 - DNA, 259 bp, Glycine max
  unsure (1)..(259): unsure at all n locations
agcttcacgatgaagaacactatgatctaatttttgacacccgcnataagnccttgaaattgtacacgatattcattgtcccctacctcttttaagcatatagtaactccccttaattgtttgaataacattaaaccctgtacccttaatacctaagaaacacattacatcatatatccctgacactcctgtgagtacttgaanatttcacacgatactcctagtccactacctctttaaaggaactcctttgaacctg

SEQ ID NO: 198606 - DNA, 282 bp, Glycine max
  unsure (1)..(282): unsure at all n locations
gatccttaagtcaccgcggctgcagctatagttcctgggtttgggagagaatgattattcttgaaagaanatgaagaaacgtacttggaggtgttaaaccgcacttaatagatgcgaacaaactatcgacgtcgctcatgttgttgttgctgctgctgctgcttgtggttgatgatgacattttctgttcgtttcgttttctctagtaatcgagagattttgatttctccattggggaatatagaagttcctactttcctttttcacgcggcngatttgaat

SEQ ID NO: 198607 - DNA, 266 bp, Glycine max
  unsure (1)..(266): unsure at all n locations
atatgctctatcttgagctcccactccaaatatgcctccggaacacttttgcctttaaagggaggaatgttgagctcgactccttcaattcggtttggccttggaccaccaccatttcctcctctcctttcttcctcatgacgntcacgattctctaatcgctcaattctttcatacaactcctcgttgatctctctcaataatctttgcatttaagcattgagagcattcaacaagaatctttgtgtcccatacaattgatattc

SEQ ID NO: 198608 - DNA, 358 bp, Glycine max
  unsure (1)..(358): unsure at all n locations
tctcataactaagctcaccttgcttgagaagctccttaagaagattcctaaagaagctagagcttagctacacatacctctctaatagcttagctcacctccttgagatgagaagctagaacttagctacacacccctaataatagctaagcttacccncatgacaaaaaaacctgaaaatacaaaaaataagtcctttcaacaaagactactcataatgccccgaatacaatgctaagaccctatctactataatggccaaatacaaggcccaccgaggaaaaacctatctaattttacaagatagcgggctcatactagcccatggctcgaaactaccctaggctatgagacccta

SEQ ID NO: 198609 - DNA, 163 bp, Glycine max
acaacgtgagtgctgagtgttaaatgatccggatgacccatatgggccaacttgatacgtaatactcaaactgatctaattgcaccccatgacccttttaatgagataaaatatgtgtttatgttccgaaacatgacgaataatatgcagttcatgtgttagt

SEQ ID NO: 198610 - DNA, 362 bp, Glycine max
  unsure (1)..(362): unsure at all n locations
taggaaacttgagaatttancaaaaacacttggtaagctgccaactaaacnttttattggccaacctacacattcttctgttttgcaagttacaggttgtaccatctgtggtgaggcccaccaaataggccaatgtattcccattgaagaaaacactcaagaagttcactgcatgggaaattaacaaagacaaggatatactcaaggaggattaccaggcttccaacagggtccttataaccaacaaggacagtggagatcacaccccgacaatcaattcatcaaagaccacgggagaacatctaacaggccatccaacaagggcctaacatccttcagaggactactaagctggaggaact

SEQ ID NO: 198611 - DNA, 343 bp, Glycine max
tactcacttatgacggggcaccacaatattaaggcttcttgtttggcacaccaattgcatgaattataatgcatacatatgatctggaatgacaagatcttccttcttactcttaagccatggcttaagtacccatggtattatttttgcctttcaagccctttagccaacacttgatttttggacactaacctggaaaaaggttctccttcctttggtaggagaaaaatgtgtttgttagggatctataattggggtaacgcaaggaacaccctatttaattggggtaacaaaagacgcacgataaataaaggtttaggaaaaccgtttttatgtaaccaat

SEQ ID NO: 198612 - DNA, 284 bp, Glycine max
  unsure (1)..(284): unsure at all n locations
gctcttatagnngaccacagagtggtacctggagatatgtcctgggggtcaggagaccttggggacgtcaagtggggtgctattgtccaaaaccaatcttgaccaatcccgacccaacccgggcataatattgtagtgagaacctgtgatgtacctaaacaggcgagctcctggcggtcaacagataaaatgaacaaacaccacacagcaaggaggcttgtggtggctggccaactgtgaagtttaagtgatatatgggttgtggcctctggtaatctattacc

SEQ ID NO: 198613 - DNA, 302 bp, Glycine max
  unsure (1)..(302): unsure at all n locations
tcccgtatcccgcactggaatgatctgattaccgcctttctaatgcaggtatagtacaantctgatatggctgccgaccgcactcaactgcagaatatgtccaagaaagagggtgaaacctttaaagaatattctcagccacagacggaattggcggcacaagtagcccctgccttgggtgacagagagatcatcacccagatggtataacttttccagtggtctactatgcataagctataggtttcatgccggccatctttgcggatctagcggttgccggcgaaagaatcgacgtacga

SEQ ID NO: 198614 - DNA, 325 bp, Glycine max
  unsure (1)..(325): unsure at all n locations
agcttatgctgcaaacatctacaatagacttcctctttctcatcagcaaaatcagccacagcataacaattatgacctctccagcaacagatataatcccgaatggaggaatcaccctaatctcagatggtctagccctcaacaacaacaacaacagcctgctccttccttccaaaatgttgttggtccaagtagaccatacgttcctcctccagtgcaacaacaacaacaacaacaacatcaacagaggcaacaatccactactgaggcccctnctcaaccttcattggaaaaattagtaaggccaatgacaatacaaaacatg

SEQ ID NO: 198615 - DNA, 475 bp, Glycine max
  unsure (1)..(475): unsure at all n locations
cttgaagtactaacattaaagaaagcaatttttgtttgtttctcacatgtattccattccttggtatttgacgttgaaactacctttgaacagtaatttccagattaaattagtagatattttgcatcaattgtacactttattataaacatataagcacagtgatttggagaatattgcttcccatagaaccttatctgcagctgaagttcagaccaagagagcattacagcaacagttgtgggacactgcaagtgcctatgaatcccttctgagacagaagtccagggccaagtggatcaaggagggggataggaattccgcttattttcacaaggtcattaatttcagaagatgctcaaatgctgttcatnggagtttcattgatggtgtatgggtccagcagcctcatcttgttagaatgcaatgcttaagtcttccaggaagatcactgaacaaatcctgtccctggatg

SEQ ID NO: 198616 - DNA, 463 bp, Glycine max
  unsure (1)..(463): unsure at all n locations
agctngcatgattcacattctccccctttgtctttctaattcttttttatatcatcaaaacctgcatgatttacattctccccctttttgatgatgacaagcattatccaaggcttgatctttttgacatcatcaaaatcttcatgatttacattctccccctttttgatgatgacaaccacctgtaggttaggagcaacaacaaagaaaaaatgtctatttgcatatagtttactcccccttggttttgtaatgtttgcttatataaggcaatagacttaaacatttgggaagccgtagaaatagggccttatatacccaccacggtagaaagaaccacaatagatggaagcacaacaatagaaaacctagagatagatggtctgaagaggatagaagacgagttcaatataatttaaaagccaaaaacataattacatcctcgcctgagaatggatgaata

SEQ ID NO: 198617 - DNA, 457 bp, Glycine max
  unsure (1)..(457): unsure at all n locations
tcttctatatatnactntcatctccaagtatatgttgtctctcaatagttggattcttcactctattcttcgtttaaggtcttgagtccattgnggcatttaatgcaaacattaaatacacgtccctttttcatgcaaactccatgttgataggatagtatgtcttgtactttagcaatgaagttacttctttcatcatagcaggtcagcaacaatagagcgcacctgttgatgtggatcagtgtcttcgaaattgtaggtttcatttattcttcattggactttgatagatcctttgagaatgttttttgcatgaaagaatctcagacataaagtattaaatgaagtttaaggtcttgagtccattggggcatttaatgcanacattanatacacgtnntcttttcatgcaaactccatgtngataggataatatgtctggtacttagcaatgaag

SEQ ID NO: 198618 - DNA, 369 bp, Glycine max
  unsure (1)..(369): unsure at all n locations
agcttgatgacaatgatgagggatatgcaaattctgttctggagacaaaagtggaaagtaagcatgaggcatacgctggaccaaccaaacgcggccttccggatggtgggatattgatgagtggatgtcaaactgaccaaacttctgcagatgcaagtcctgcaggcaacgctgccagtgcttatggtgcttttagcaatgcgatacaggctataattgaggagactgatggtgcaatcacaaaccaagaacttgttcaaagggcaagagagaagctgaagaactctcggttcacacaaaaacctggactctattgcagngatcaccatgttgatgctccttttgtgtgtgaactcttctcatcgatga

SEQ ID NO: 198619 - DNA, 213 bp, Glycine max
tctcagctttttcaagctatttgggggaagctctttcatggttttctagggaggccctctctacctctttcattgcttctgctacatctacatgtggaaatcccattaagactattgaacttaaaactacctcctaaagccccataccagtttcatcatacaaggcgtgaaatttctctgccattatcacccacttgcaaatgtaattacaaa

SEQ ID NO: 198620 - DNA, 336 bp, Glycine max
acagaactttgaattcttctaggctacttattaacaccataaatatttagagaagagataaagtaaatgaaatgtgaggaatttaggcttgtagcagagtatggaaacaaagccagagagtcactaatctttttgtgtagaattttatacttccacatccattgatttgaagataagaattcctactggaacaatttgcccctaataggcctatatgtgcgaattgtacagttcttattattatgtgcaactaactttcattaggctgaaattaactctgcacgggacattttgctttgttagcacttagtagttaaaccaaatgctcacaataca

SEQ ID NO: 198621 - DNA, 340 bp, Glycine max
  unsure (1)..(340): unsure at all n locations
ctagcgagccaatcacctttatatgttgggtttgagcgcttagcacatgctaaccttgcttagcgaaagaaggagatgcactcagcgtatgatatgtgcttatccagtggactattttcatgaanatgtttttaagtattttcaatccacctttttaagaacattttaatccaaccccgaatatctatgactcattataaggtgatatcaccctttttcaatgattataaagcaaactttaacgtatgcaatgcatgaaaaacaaaatgaaaggaatcaatactgggttgcctcccacgaagcgctcttttaacgtcattagctggacgcatataccctc

SEQ ID NO: 198622 - DNA, 457 bp, Glycine max
  unsure (1)..(457): unsure at all n locations
agctncaaaantaaatcttgtacttgtacttattatgccactaacatccccaggcctcaaatcaatggttgtttgtttgggatcatataaggtatatggaggtttcatatatttgggtaagtggaaaaacaaattagaaatgtcacgagtctttgaatcacatatatattttagaccataaaatttacatttaacaattgattttggggctttattttttttgctaattttacaaagtactcccacacaatgaaagttctacaaggaccatttgcattagtcttactattcttcaccttatttttacgatgattgttaatgtgaggtgatgtaatgctggttgttcattaagctgtgctccaccacacctnctagtatcggtgtagaattggtggaattcttagcccctgatcattaaattattagggtatatgggaatactactattatttttaat

SEQ ID NO: 198623 - DNA, 436 bp, Glycine max
  unsure (1)..(436): unsure at all n locations
agcttaagctccttcaactgcacaatactcttaatatttaaagagtatccttgtggaaccttcacccgacgaagacactgacaaaaacttatcttctccttcttggacaaagtatggcaggctgggggcaagtaaattttcttcccatcagaccttggatgcaactgtgatcgtatacccatatcagctagatcttgatgggtattcaagccatccttcgtcttgccttgaatgttaaggagcgtcccaatcacaatgtcaccaacatttttctccacatgcataacatcaatacaatgtctaatgtcaagatcacaccagtacggaaaatcaaagaaaatggacctcttcttccatatgcaatctgactnttatccttcttttgggtctctccaaatacaatattcaggtgttgaacccactgatatacctgctc

SEQ ID NO: 198624 - DNA, 241 bp, Glycine max
gcgggacctgcagatatgtctccggggtcatgagaccttggagacgtcgagtggggagctatcgatcaataccaagcttgactcaatccctacccatcccgcgcatagtctgtcagcgagatcctgcgatgttcctcttcatgcgagctcctgtcattcgacatatttgacgaagatataccacataccatggatgctagaggcggctctccgcctgtgaactttgattgatatgtgggtt

SEQ ID NO: 198625 - DNA, 424 bp, Glycine max
agcttggacaaacgctgtgcttcgagcagtttatggaagttaaacccttgctaagaaaaccattccaagtccaaaaacttgggtattctcatattcttcattgggtgtatcatcttgaagtcgttcttattctcgtctgtgaaccatgtatcaagcctgttgagagcaacctaagaacactctccttgcttcctcttggaggacttggcctatttttgagctctggaggggatgttatccatcttcagaagagaaacagatttttcaaaggtagaagaaagttagggattaagaactgggtgattagaggaggtgttggtgtgactgagaagatgttagggttgccttttatagagagataggacgttttggtcagcagaggtaggtggcgggagtaaatgctggaataatagaggttttgatg

SEQ ID NO: 198626 - DNA, 452 bp, Glycine max
  unsure (1)..(452): unsure at all n locations
tatatctntagcaactgccatttaactntgtatcaagtatttatggagtatatagagaatgctgaagccacagaaaaaaccacttttgtggtcaaactcaaaatctcagtcacctccttttgaaagtcaacaatataaaaaaataaaaaagcaacatactctgatgctaataagatgggaaactcaaaactgcaaaacatacaatttgatattaatttatttctaatgattgttacatatttgatgtgctttcctttgaagtaacagaatacataaatgggttacgaagtatcaaagtttggtttttcctttaagcatcagttcactgcttgaaagataatgtatcaattatgaaataaactgaaagaacagacctcaattcgaatgccacagcctcttaaaaggactacatttgctatgttctttccttctgcagcacgtttagcattcac

SEQ ID NO: 198627 - DNA, 402 bp, Glycine max
agcttcgactgtttatgtgtatgatatatttcttttatgccatagagtgtcttaatatgctttcatgtttttgtaatagtattatatgctcatttatgttatcttttgtctgcatagtaagtgcatgattacttgagatgctaagcactgtcaattgatgccccttgcctctttcttatggctttgtagggattatactgctctttgaggcaaatgcttgaggttggttatttccatgccgatcctcatccaggaaaccttgttgcaataaatgatggatctctcgcatatttcgactttggaatgatgggggatattccaaggcattaccggattgggcttattcaaatggtgagaatgcttagatattactcattcttatggatgtaacctaaattgatt

SEQ ID NO: 198628 - DNA, 208 bp, Glycine max
tatcatatattaacctctccatgctctaaattataaccttacaccaattgtcagcaaccctggggggtcattcaatccatatatggttggtaaccattaaaagatgtgtttctaacggccaaaaaattgtcctttaaaagtatgttgatccaacttatttttactttaacttcttaaaaaagaaggtgggcaaaacagaaattaaact

SEQ ID NO: 198629 - DNA, 482 bp, Glycine max
  unsure (1)..(482): unsure at all n locations
gaccgggatcctctgagtcaccgcggctgcagcttaggaaaggccaacttctctttctaatctgatttcaggcttaaataggtttctttgttcgtgcttgcacacttagcgcaactctaaaccgcttagcacgcattagtgaatttcggcttagcgcgtgccttctcgctcagtggatggactcaagcggtgcgcttagcagaatgaaccctcactcagcgaacatgcacaactcattcttcttccatgatagaagaatgaagcaaaatgccctcatcacttgtctttctcaaagcatgcaattattcaaggagaagaataaaatgtaacctatagaaataaatgaagttaggcataagacaaatatcaaggaaagtaacttaaaccacgtctcacggcttctgttcactcaagcacatgtgnttaagatattcattaataacaactagcaagaggtccagtctttgaacttcatctcatgt

SEQ ID NO: 198630 - DNA, 447 bp, Glycine max
  unsure (1)..(447): unsure at all n locations
ctataaatactcagcttgttcctttttataaaagaaagttctgttcttacacgttgnctaaaaaagcctgaggtggatccaagtgctctgatcattctttagcatattcatgtttggtgacatactcaccactgtttgtttctttatggaactcaccataactaaaaaagcgcataggcacccctataacacccgatccaaaagtaaaatggataacgaagagggagtgcaagatcaaatgaaggccgacctatcggccttaaaagatcaaatggcttctatcacggaggccatgctaaagattcaaaaaactatataagataatgctatagcggccgctccaatacatctagggaagcggaatctgtgctacatcctgcaataaacttgggccgagataaaacataatggttttaattggaggatagcctcagcctaccatatggt

SEQ ID NO: 198631 - DNA, 412 bp, Glycine max
  unsure (1)..(412): unsure at all n locations
agctngagagcgggaggaggtgatagtttttctaaaagtacatatttntagtaactttattcatgcacttggaccagcgttcggacatgagatcctttagtcaaagtcaacataaatcccatcatatccttccattgattaagggttgcataacaatcttattggcatactcatgcaaagtgaaagtatctgcttactaagattggatagtaaggataaattaccttctaaatatatcagttttgggcagattgatcactaaagtccaggattatgcaacatctggcatgttgattcacaagataaatcgtatcttggaggagataatacaatttcactgaacattaaaattgaggatctccccatgaagtgtaacaagatatccatggccactctataattgaaaggcatg

SEQ ID NO: 198632 - DNA, 453 bp, Glycine max
  unsure (1)..(453): unsure at all n locations
ntaagccgaanagatatattggacaaggttgagatttgtatgtcagcatgtgaagaagagagtnggcttgaagactataaccgggtacttaaaatctcgcttcggctgtatttctctttcttagtttgaataattggttgtgcacagccgtggatagagaggtgaagtagtagtattatgatcagaacatttactatcatgttaacaaaaattgtaaatcctttaaccagagttaatctgtatccatctttattatatagtctgctagttatcactttaagtgatttgttatttgacaagatgattgaaatgtttcttgccctgtttctggaaatatttagatctttagcattagctgtgctgcaagttatgatctttaaatagttgcctaatcctcctcgtttggattataatgttacactctgacacaacctttgtaaacacgatgagaac

SEQ ID NO: 198633 - DNA, 289 bp, Glycine max
  unsure (1)..(289): unsure at all n locations
cggatccttaagcacctgggctgcagctgaatcttaagagatatgaagatgttgtcttttacatgcccaactctctggagtggaatttgtattggatgttatattggatgtagcatcttantccatatcatatcttatttcatcatgcgtcatcatgagtcagtgaaaagaaaaatttctaagttagaaaaatttcttcataggcaaaactctcggtttaatcgactacagtcttatcgtaatcgattacacaagttgtctaaagcttgtagagttatgtcttgtatct

SEQ ID NO: 198634 - DNA, 115 bp, Glycine max
  unsure (1)..(115): unsure at all n locations
tgtcgccgntcgcgaccccttcggatacagaccataggttattgtaattgataagaaccggactgaggctttcgcttatgaaacctgcgctctcgaccttattgaagcgacttat

SEQ ID NO: 198635 - DNA, 443 bp, Glycine max
  unsure (1)..(443): unsure at all n locations
ttaagtcacctgcggcatgcaagcttctatttctatccctgggcttatgataggtgatcttaatgaagttgcttttattttagaaatcagaggtgtctattttaacaaacaaagagctcatactttttttaatttcactcaaacttgtgctattcatgatattgaagccgagggtaataaatacacctagtatagaaaaggaaaatgaagccatcaacatggctaaaaagcttgatagagtgatggcatatcaaccttggggaaacatgtttccaagaatgtacgctataaacctcactcgtgcatactcaaaccattgtctaatccttcttcatctcactgagcattcctgatggaagcttgcttgtggggcttctatagaggctggattttgagcttcaatggggtcctttaatggtgattntccaccatggagatgcagc

SEQ ID NO: 198636 - DNA, 328 bp, Glycine max
ttgctacagacgaaaaagatgttatccgataccaactcggtatctccggccgtcagcgtgtcttaaatgtcagtatgaccgatcttgtgagcgcgaaagatgacgtatatcttcgcgtgtcaacgggcttgtcggccgcgattgacgaaaggcgcagaagacgatgtcagtcttcgcatgctatcaggcatttcgtcttacagacagcaaaaaagaatgtttatacggataaccactcgggtatctccgcccgtcagcgtgtctcaaatgtcagtatgacagatcttgtgagcgcggaagatgacgtatatctccacgtgtgaacggg

SEQ ID NO: 198637 - DNA, 460 bp, Glycine max
agctgggtaaaacggaaaaaagaaatctttgtgaacgagatgaagatgaaagcaaaaaaaaaagcaagaaatgaattgaaattttcggattcgaacacttaccagttgaagaccgaagaacgaacgaagaacagacgaagaacggtgaagaatggcagaaaatcttcacggatttgctcacgaaaacgtttcagaagcgttacggaagcacctcggcttggattttctgcatgaaaacacgtttttttcaccaaaaacagctgaaatgcataacataggggtcagggacccttgaaactcagcctgctccccctatttataggagaaatggggaggtgcttgccgcccagaggcttctttgtaaagcaagcttcatgatgatgaatcaagttgattcaagtagttttgatgatgacaaagatgatgaccaaaagcccagagaatgatttcagattaagtt

SEQ ID NO: 198638 - DNA, 473 bp, Glycine max
  unsure (1)..(473): unsure at all n locations
tggattttcttcttattattccgagaatatgaaagcaatggaagaaagatattgcatagctaaaaacgtatgtcgtcctgagtatactatacacgttgaaagctgctggtgcttgaagtttttgtaacgtacaaactttacactgtcatattcgagtgaacttcattttagttctcatatatatttttatagaaacatcatgcgtacgtggtattagtattttctaatagacgattatcacatcatccgttaataatgacaaggaccagaatcgtaaaataataaatagtgacaacaacgataataaaataatgtatcaaaattaaaattataatgtaactacataagttaaatatgaacaaaattataataacattcttaagatttggtcanattacataaatattgtggttttttttttgtaactctgggacanatctcttcttattgttgaaaaatatacacggattctc

SEQ ID NO: 198639 - DNA, 407 bp, Glycine max
gcttctaaactttatacaagaatgaagctctgttaccacttgttagacaagcggcctcagatatcttaagaaggggggggggttgaattaagatattccaaactacttccccaattaaaaatgtatttcactttttattcaagttatgaattcccttaatgacaatcttcttaaatattgattcaaataaaacaatttgaatatgaatataaagcaataataaataaaggagattaagggaaaagaaagtgcaaactcaaatttatacaggttcggccacacccttgtgcctacgtccagtccccaagcaacccgcttgagacattctctctctagaaatctctaaacatgcagaagcttcaagaaaggccaaactcctcttccaaaatctgatttcaggcttaaat

SEQ ID NO: 198640 - DNA, 423 bp, Glycine max
tccaagaatcaagatcaagattcaagactcaagattcaagaatcaagagaagacttaatcaagataagtatgaaaaggttttttcaaaaactgagtagcacatggatttttctcaaaacatgtttaccaaagagtttttactctctggtaatcaattaccagattattgtaatcgattaccagtagcaaaatggatttgaaaaagttttcaaatgaatttacaacgttccaattgatttcaaaaagctgtaatcaattacaatgttttggtaatcgattaccaatgcctttgaacgttgaaattcaaattcaaatgtgaagagtcacatcctttcacataaaagctttgtgtaatcgattacactgatttggtaatcgattaccagtgattgtctctaaataaatcacaagatgtaactcttc

SEQ ID NO: 198641 - DNA, 395 bp, Glycine max
  unsure (1)..(395): unsure at all n locations
agctntaaatgagttaaaaatggaactgtgccagaaagcttatctagacagagcgaaccatttggcagttttttacatgaatgggattcaggtttggcttaatcgtaagtgggacctaaggcaaattttaagaaaactattttagttcaaagagaaattatatagtaggtcttttttgttaacatccgagtatttgtagattatatagtaggtctttttccagagtttgaatgtgctcatgaagttcatcaatatctgttgtcaatcattataccactctgggacgatactttagtttccaagctgattactttgttcagtagctcatcaatctgctctgccatttttgccacgctgagtgatgattggagctagtctgaaagtgttctttaatg

SEQ ID NO: 198642 - DNA, 368 bp, Glycine max
  unsure (1)..(368): unsure at all n locations
nctgatgatgcggtcttaccgacgaaaggatcaaagtatgtctaaaaagaggcaaatctgatcatcatgctttgatacatgccaaaaaaaactatggcaaatgaagagggtgagaatgagggagaagcccatgctatggctgccattcctatacagccaagttttccaccaacccaacaatgtcattactcagccaataacaaaccttctcattacccaccgcccagttatccacaaaggaaattcctaaatcaaccacaaagtctgtctaccgcacttgcaatgacgaacaccacctttagcacaaaccagaaacaccaaccaagaaatgagatttgcggcgagaaaagcctgtagaattcacccca

SEQ ID NO: 198643 - DNA, 438 bp, Glycine max
  unsure (1)..(438): unsure at all n locations
acctgcggcatgcaagctnttgtcaatgtctacgcagtgtcaaattgtcataaggatactcttcaaatattaagagtcttgtgcaactgaaaaatctaaggttagttggcttaaagtctcatgattgtcatgtcctgatgcaacatctattagccatggcgatacgagacattttgcctaacaaagtcaagcatgtcataactcacatattctttttcttcaatgtcatatgtagcaaagtcattgatcctttcaagttagatgaattggaaaataaggctgttattatcttgtgtcaattggagatgtagtttcctcctgagcctaactataaaatgtatttattgtatcacagactgaatttgatattcccaaagcattgatttgaggacgaagaaaacaatacttcagaccgtaagagagcagtggaggcaattt

SEQ ID NO: 198644 - DNA, 371 bp, Glycine max
gatcataggcaccactcacatttaacctcaacaaccatgggctctgattccacttaagagattcctcagatcaaatagtgagaagcatgggctctcatataatctttataacgctcaaagacaatctccatgcatatactaggatctattgaataaaccccatgccgaaaggcacgtcgaaagaactaaggcggttgcggtattccacaacaggttcactgcaatcccataaaaagttggcaaaaaaaagctgctctgaatagatatattgtttccgcccactggcccatccctctaaaaacttggtgcaaattctaaggacaaactttccaaatcatgcccctttacattacaaaacatgcggctccccc

SEQ ID NO: 198645 - DNA, 311 bp, Glycine max
  unsure (1)..(311): unsure at all n locations
cttacattaatggataggcgtcctacacaccatttttgagacacttatggacaaggttgggtcttacaccagcaacaaagaaaaattttatctccctgctagcatctggccagtagtgcatcttaatacctggtggagtgcaagaagcattacacatgcagcatggcactgaggagtattgcttttcattcctcttactcaatgcttatgtgatatatttattcttttgactaaatgaatttattgttatttncctctacatataggatagctattgatgccaagtttaataatacaacagctggtgcaca

SEQ ID NO: 198646 - DNA, 470 bp, Glycine max
  unsure (1)..(470): unsure at all n locations
ggatccttnagtcaccgcggctgcagcttctttctctactttaacatttgcttaaacaagtgcaaagatgtttcaaatagcatcttgtccaatgacagtcaacaaagtaccatgatattttccagtgaaaaatgtcttatctacttgcacaatcggcttgcaatattgaaagccttcaatggatggcttaaaagtccaaaatacacgattaagaattaccttagaaaactcatcctcaccatcctctattgaagtggatgttttgtatctaatagttgtacctgatacaaagtgttgaacaacaatcatcgatataggcagataactgtatgattcttctcaactttcaaatgcaatttcaagtgctttctatttagttgtccatccttcttgatgtcacagtataaccaaagtgttgtagcatgtttgcaatcaaggttttgatttggataccgggatttgtttcacta

SEQ ID NO: 198647 - DNA, 471 bp, Glycine max
  unsure (1)..(471): unsure at all n locations
nttctctctgtacacctacgttcctttacacgatatatactnttttctctatatacacacgcattgaaaaactctgtctctctatatcgacaaggtctatataaaatctctattccttttcaaagatttttttccccttttcaatatacactcattgtttcatataaaagtttcctttatatacactcattgctcatatacaagaatttcttttcacacattgtttatatacaaaaatttcttttcttttctttatatacagatatgacattttgtccacaacgtgtctttctttctctattcttggcgttatcacgatgtttgttcattttatattaggatgacgttcctaaatgaaaactctacacagttccagaatttcaacatatattttcgacaataacgaaataagcactaacgcaacatccanaccatatgtatgcacaatacaaatgactatcgtaacaacaa

SEQ ID NO: 198648 - DNA, 223 bp, Glycine max
tcaagccatatactcacattgcgtactactgggcggccataccttgtgatgttgaacctattgatgtaaacaacccacacactgattatgcgatgcatattgatccagccgccatcatttctcgcgccaatatattcacaagctcaatgtgctggtactcaactcaggtccccactggaaacggggaaagcccaccgcttatcctatgggcaatgcatgttgg

SEQ ID NO: 198649 - DNA, 346 bp, Glycine max
gctggcctgctcctgtttagcattatgtctttgtggcatttaaaacacatgttcatggtagctgcacttccaaaaaacccacagttgttgatgcacaatatatgaccttcaggaggagcttggcacccagtcttgtcatggtccatttttttacaacttacctgccccaacgatattcaaatatagaacatctaacatcacgtcatcactaattttcaaaaaaacccaataactaactatgattatagtccaatttatgtaaggcaacaggatagcacccttttcccaatgcaacatattgatgaaacaagcttttgagcagacccatgcaattaaacaagaaatg

SEQ ID NO: 198650 - DNA, 412 bp, Glycine max
taagtagtagtatgtacaagtgtacacatttagcaagagtaattcatccactctaaaacatacagatacatatataatactagaacacagttccatcgcacacataacataatataatactagaacacagttccatcggacacatacatagacacgacagcgtcttttggtttgtttagagtgaacaacttggaagagacagagtttgctaactgggttcagtcggtgccttcaatctcaacgaccctgacattcctattagaagtgggttgatgaaacttgggaacagtgacaaggagaatcccgtgacgcatgttggttttgagttggtcgagggtatccgttgtcggcgatcttatacctcgtcaggaagtaccactctccacgctgacctggagcaccctctgggctt

SEQ ID NO: 198651 - DNA, 431 bp, Glycine max
  unsure (1)..(431): unsure at all n locations
agctntacatcattgcttaaggtgttgtangttatgctttcagaagaaaacacgttgccaaaaagttactacaaggtgaataagatattgtatctgatgggtataaagtatcaaaaaattcatgcatgtcctaatgattgcatactattttgagatgagtttgaagaaatgcataaatgccctaagtgtggggtatcacggtacaaagtgaaggatgatgagtgtagtagtgatgaaagtaccaagaaaggcctcttcatcaaaggtgttacggtatcttcctattattccaaggtttaagcgattgtttgctaatggagatgatgcaaaagaccttacatggcatgtatatgggagaaactggatggaatgttttgccatttggctgattctctccaatggaagaaaaataatcgtctgtatccaattct

SEQ ID NO: 198652 - DNA, 420 bp, Glycine max
  unsure (1)..(420): unsure at all n locations
ctatgaaactaagcttaaagctagttggtagaggactttatattttttatatnaagangagagtatttgtgaagcttaccatatagggaaacaagtaatatgttctttaaagccagaaatgatgttatctcttctaagcgctttaagcttctacaccatggcttgtttggattaaccacaactactgtcctatttgtacatagaaatggtttggtcataatggacgattacaccagaaggacatgggtgagggtgctaacccacattgatgagtcttttgatatcttttataaattctgtggaaagattcacaatgaaaaggacaattgtattttcttcatcagaaatgatcacgtggggaagctttaaaagatctttttgaaaaattctgtgaagagaatgaagttacccttatttttt

SEQ ID NO: 198653 - DNA, 441 bp, Glycine max
  unsure (1)..(441): unsure at all n locations
agcttacctttgtgagaatttgttttattcttcatcataatcttttggggtgttttgccccattgattgcttgcacaataaccttggcttaattcttgttcatgcttcctaattcacatgcatatttggaaatgatttaggcaattttgttcttataagcttctagccaaatggacttaccttgaattaattcctttgatagcccctttgagcctatgttcccctttctttgttttgaagctcattacaagccttaagtgaaaaaccatgatatcaccttacccttaaggaattttggagctttggaattgttttgggaataagctgggaataagtgtgggggggtatgtttcattgaagatatgattcttggccatgcttaatgttttattntggtcatgcttgatgtatatggatattgcctagttcttgctttaatct

SEQ ID NO: 198654 - DNA, 472 bp, Glycine max
  unsure (1)..(472): unsure at all n locations
tctcccncaattntctataaacagggggagaagtgatttataaaagggttcagcccctttgacacttctctctctttcgaatgtgcttagaaaaattgtttccgtgaagaaaatccaagtcgaagcgcttccgtaacgtttccgtgagcgatttcgcgaaggtttttgaccgttcttcgacgttcttcattcattcttcatcaagagtggaggtgaatctgtgatcatgctaggtctctgactagcttgattacagtgaaccctcatctagagcttttctctttgaaaacttattgttgctagtagtccctactgctgcaatatgttcttcaaaggggatgatacctctagagaccatcaagagagatatgaccaccttcggggttatcactataagcctagttagctctctcccttataggtcccttaaataagggcacggagcaaacacgctgctgtaccatttttacac

SEQ ID NO: 198655 - DNA, 458 bp, Glycine max
  unsure (1)..(458): unsure at all n locations
agctntgagccactgaactcccagcacaacttctgcttctcgtatgggcaagacatgcaagtcaacctgaaattcatgtttttgtattttcacggcgagattagggcatacctgattgcactgcaattcttcaccattacctacagtgacccgcaaggtggaggtctcatgtggttgtagctgtagtaatgcgaccaatttctgttgtaggaaattatgagtgctgcctccatcgattagaatctggacgcgatgctcacaaatgaatcccgtaaggcgtaatgtctcaggtgcaccgtgaccagacaaagcatggaggctaatttgcgccggaactgattcctgtaatgcggaaggtaattgcgatggccagggtcactttcccgattatcatcatcatcttccgtgacaaataagaatagggacgaagcacacttatgtcctcttgaagtattttc

SEQ ID NO: 198656 - DNA, 468 bp, Glycine max
  unsure (1)..(468): unsure at all n locations
tgtgggttacccaccaaattactgcanagatcataccatcaactcagtgaatcaagtacatgacacacttgaaagttctcattatgttcaggcaccaactttaacaactactcaatgtcaacaattgatctctttcttaaccaatcatatgaaaattaaatccacaattgatgtaatagccacaaatgttataggtatgtgtatgaatgttgccttcaataatgatcaccacacttggaccattgatattggggctacctctcacatttgttgtttcaaagaaatttttaattcatatactgccattttcaactcgcatgtcctactgcctaattccacgaaagttaaagtagaaggaataagcagtattaagaataatgaagaaaatttcctacataatggtatgttcatacctacattcagatntaatctcctcttctttgtcactcttatcaatactaattcttt

SEQ ID NO: 198657 - DNA, 270 bp, Glycine max
  unsure (1)..(270): unsure at all n locations
agctntactatgcagagaatatccaaggttaatttccttatctgacttagcatcaaattttcctaagttatcttttccattattcaatacaaaacatttacaaccaaagatatgaagatgtgagatgtttggttttctgccattgaataattcatatggagttttctttaaaatgggtcttattaaagccctatttaaaatgtagcatgcagtgttaacggcttcagcccaaaagtattttggaagaggagtatcatttaataatgttct

SEQ ID NO: 198658 - DNA, 444 bp, Glycine max
tgcgcacgggttcatctggatgcaccaaagaagtcgtcgtatttcgaatagtgccccgaaatcggcacctcatgttgccttcgagggtctcccaggctccctctagggactccatctctactcgatcatggattagctgcgtcgccatcacgatctacaaggaagaaaagaaaggggtagactctttcacaagaatctaactatgccgcaacacaatttgtctcatagccactacatacaagtaaaaggggtatcttaaggcttttcatctctggtaatcgattacacagccttggtaatcgattaccagaggccaaacttgaatcacacagcttcaaaacatgaaaacctgaaataggcactgtgtaatcgattacacatacctggtaatcgaataccagtgacccattcctctgtgtaatcgatacacagacttggaatcga

SEQ ID NO: 198659 - DNA, 459 bp, Glycine max
  unsure (1)..(459): unsure at all n locations
agcttcaagaattatggcctcatcaaacnatttttttcccgaggtaaattctataaatagacctcccatctttaatggagtgggttaccactactggaaaacccacatgcaaatctttatagaggcaatagatttaaatatttgggaagccatagaacaaggaccttatgttccctctataatagtcggaagtgcaacaatagaaaaacctagagtagattggactgaggaagaaggaagattagtacaatataatttaaaggccaaaagtattattacatctgccttaggaatagatgaatactttagggtttcaaattgtaaaagtgctaaggatatgtgggatacactacaagtaacacatgaggcacaacaaatgttaaaagatctaggataaacactttaactcgtgaatatgaaacttttaggatgaatgtaaatgaaagtatacaagacatg

SEQ ID NO: 198660 - DNA, 475 bp, Glycine max
  unsure (1)..(475): unsure at all n locations
tctatatctaaacatgttggtttgtcattgtttgttcactttctttntattatctttcccttgtgatataacttttgttcttcctatgttctgacaaaactttacctctaattagttttttcttttgcagtacatattgtggagaataatttatttacgaataaatacccataaataatgtagtggtaacattcttccaacaaaagccatcaaaagtgacatcttattttattttatttatgaattagtgttgaagattacagaaattatgttctatttttgtttcctctgtatcgcaatagtgactacaaggcaaaatttctctattggttatgttctctttttggttaatattgtcagaatacctgttctcatctagtagcatggcactcagagagcaaaccaaggagggtgtncagaatgttagacctgtacgtattgtcttttaaaaacaagttattttgcatattaaaga

SEQ ID NO: 198661 - DNA, 320 bp, Glycine max
  unsure (1)..(320): unsure at all n locations
agctngagatgaggaagtgttgaanggtttatcttcctgcntttattgttgaccacagagtggtacctgtagatatgtcccgcgggtcaagataccttggggacgtcaggtggggtgctattgcccaaaaccaagcttgaccaatccccacccaacccaggcatagtcggtcagtgagaacctgtgatgtacctaagcacgcgagctcctggcagtcaacatataaaaggaacaaatacccaaaacaaggaggcttgtggtggctggccagctgtgaaacttgattgatatgtgagatatggtctctggtaatccattac

SEQ ID NO: 198662 - DNA, 440 bp, Glycine max
  unsure (1)..(440): unsure at all n locations
nttctttctaatcaacctgtctattgcttaacaattctaattgtcaactcacattcttgttctttctttgtctaacatacataccttctcaaactcatgaaaagaaacacaaactccatcacaatcatgcattcaatccaaaatcaattcatacaccaatgttcacaaaaagataaaagtgtttcactgcaatatcatcaaagtcaagtcaaactgttccatatgcttcaaaacaagcatactagctaatcacaaacaaaatataagtgtatataaacattaaccaaaataattaaaaaccaatgtactgaaactataatcattataataataattaagaanaacaaaatcatccagaatttaaaattcatgtgactggtcctgagtatcctgtgtctgaccaccctcctcatctgtcagatgaagtacaggagtagctg

SEQ ID NO: 198663 - DNA, 295 bp, Glycine max
  unsure (1)..(295): unsure at all n locations
actaagctttgcttctgtagacgaaagcgctgatgccgatagattttttcgtcacagcgcccttcgtcaatcgcggacgacatgcccgttaacacgcggagatttacgttatcttccgcgctcacaagatctggcatactgactttcgagtcacgctgacgggcggatatacccgagtggttatcctgataaaactctntgcttgctgtatgacgaaaagcctgatagcacgaagagactaacgtcttctactacgcgcttcgtgagtcgcggtcgacgagcccgttgacactcg

SEQ ID NO: 198664 - DNA, 458 bp, Glycine max
  unsure (1)..(458): unsure at all n locations
agcttgcagcatatgctaacgacaataacttttctctcggaagngccgatgagtcccgnaatatatcgagacactcaaaatttaaaaccgaagctcgtagaaaattcgaacgacaataacatttcactcggaattccgattgagtcccgtaatatatcgagacgctcgaaatttaaaaccgaagctcgtagcaaattcgaacgacaataacttttcactcggaagtccgattgagtcccgtaatatatcgagacgctcgaattttaaaaccaaagctcgcagcaaatgctaacgacaataacatttcactcggaagtccggttgagtcccgtaatatatcgagacgctcgaaatttaaaacccgagctctctgcagattataacgacaataacatttcgctcggaagtccggttgagtcccgtaatatatcgagacgcttgaaatttaaaaccgaagc

SEQ ID NO: 198665 - DNA, 181 bp, Glycine max
ccgagtgaaaactattgtcgttataaattgctacgatcttacattttcagttacgagcgtcttaacaagttacggtactcaatctaaccatctagagataagttgttgaagttcgaaagtggtaacgagctgtcaatataaattctgagcgctttgacattttacatgactcactcggact

SEQ ID NO: 198666 - DNA, 428 bp, Glycine max
  unsure (1)..(428): unsure at all n locations
agccttgaagtatagtagtttgcatcctcntctgtcgcacggattgttagatatttttattcaacaagtattgtaattatttattgcatgattccattggtcctctttcttgtaaggtattaatcatttgagtcatagaagatgtttctttgaccaataggtacataaacacattatgatttgtccttattggttgagaatagtatatgatggtctgtactcaatatagtgaacaattatggctatgccggagatatctcatattgcatgatgattatcataataataacaattataggtataatcataattagaaaggaaggagattgatatttgatacgcacataacanagaaaactaacacacttctacctcaataggaaagaagaaattttactataatttgttgcactcatactataagggaa

SEQ ID NO: 198667 - DNA, 405 bp, Glycine max
  unsure (1)..(405): unsure at all n locations
tctcagcttagtcaacagaatatccgaagtgtcaagtattgtgtgtttgaaaagcataacaagactttctgtgagtggtttaaagatattatctttgcagatgagaatgcttcataaacatctagatagcttgcatataggcctcaaaaaacctggcaaggattctacatatacaattattcattttacacaatagcacaagatgaccaaagtacaatgcagaacagcggggtcaccctaanggctgaatctcaacactttccaagtgtcatatgacgcccatcccaatgtatctttcaatccttaccttggggtcattgttgagaattgggagctttattatgtgaaattacagttgtgtttttaatgtaattggttactcgacattgtgtcgcaccatgatta

SEQ ID NO: 198668 - DNA, 378 bp, Glycine max
cataacccagcagcttatcaagtgcttcgggtgaagcatttaaatcaatatcaccatccttgtgaaaagagaataattgtatcacacaaacaaaaaataacatatcaaagataaaaagttacttttgaatccaaaaacgtacttcaattttaagcttattaactgcatcagctgattgaccaattaattcactgcattcacggtcccaaagcaggaattttgtgctttcatctccgtggttgatcatcacctcaagcctatacctgctaccatatgtaccaatagtgtaaaaaatataaaggtgtgaagaatacacaacattttaaaagacgcaatgacctaagcacaactttcttattgtattttccgcatgcacat

SEQ ID NO: 198669 - DNA, 482 bp, Glycine max
  unsure (1)..(482): unsure at all n locations
actcagcttgtatagacctttcgcgccactgttatttagcattgttaaatagtntggcccaaattcttaggatgacaattacagaatttgcagatttcctaaatccttacaaggtagacaaataatgtttctacaggatgcaacaatgacagcgacacagcatgttgtagctgtgacatcaccaaacagccctccactttgtgttctatgctgtcagaaagatccttaaaagccacgtgtatacttaacactaacaaaatactaacaattaacaactaatatttccggaaaaaaaaaatacttgacactagcagtaaggattacagctaatcaagtatcttatattcaatntaacttgagggttatttcttcggcgcttaccggcacaatctatttacagaatcaaaggactgcattctcacaccacttattctcatccaagtattcataggattcccattgactttaactcttctagtaca

SEQ ID NO: 198670 - DNA, 111 bp, Glycine max
  unsure (1)..(111): unsure at all n locations
gcttctaaactatatacatagaatgaatctcttataccacttngtggacaaacgcgcctcatatatcttaaggaggcggggggcggtcttcttccacctcacctatacttt

SEQ ID NO: 198671 - DNA, 469 bp, Glycine max
  unsure (1)..(469): unsure at all n locations
cgaagtgaggaagtgtggaagagtcagtcttcctacntttattcgttgaccacagagtggtacttggagatatgtcgcgggggtcaggagaccttggggacgtcaggtgctattgcccaaaaccaagcttgaccattcccgacccaacccaggcatagtcagtcagtgagaacctgtgacgtaactaaacaggcgagctcctggcaatcaaccgataaaagaacaaagaccacaaagcaaggaggcttgtgtggatcttgagtgatatttggaatatggcctctggtaatcgattacaaggcttaaaaatgaagacaggaagttaagatggcctctggtaatcgattaccaagggtgtgtaatcgattaccaggccctaaaatggaatcatgaagctgagatggcttctggtaatcgattaccaaggggtgttatcgattaccacgcttagaaatggatacagtatgtt

SEQ ID NO: 198672 - DNA, 453 bp, Glycine max
ctcgccggatctaagcaccgcggctgcagcttggcaggatttaaattcttgtcaataaaaaaaacaagatatgtcaaaaaaacacaagtggcatacaaggagccatctttcataaaccagtactctatcaacaaataaagtccctattccctacgagctataggtaactcttctttgggcaatatgagctaagctggatatggtgttctataacaacaaaatgcgagcagaactttatgctacgagaaaggattgattttagcttaaaattcagttaaccaagttcataatcattgtgctctacctaagtatcgaggggtatctccctatttgaactttgaaatgataccaaacccagaagtatggaataaaaacaaaggacccacattaaaggcaagctagaaaatcatgataagacagtgcaagaaattctgttcatctttcatcaacaaa

SEQ ID NO: 198673 - DNA, 330 bp, Glycine max
  unsure (1)..(330): unsure at all n locations
gacctttaaactcagctttaggcaatcccttgaagcaacatgaattaacggttttnnaagaaagtacttccaggacaattatatctttataaaatgatccaaattgagatccgccattaatttaacagaggattgaagaaacatgaagaatattctgagtaaacaacaattaaaaaacttcgtaccccattgcccacaggctcttggctatgctaaggtatgggggagggatgttgtacgcacccttacccttgcatatgcaaagaagctgtttccggaattcaacccatgaccaacaagtcaccaaggcacaacctttccgctgcaaca

SEQ ID NO: 198674 - DNA, 387 bp, Glycine max
agctggcatgatttacattctccccctttctcaagcaaattcttcttgacatcatcaaaatcttcatgatttaaagataaaactttgtaagacataaaagattttcataaaaataatttccgaagatgaaaacagatattgcaaatcaaacaaagtttttaaataaaatcaaattcaaaccctaggtcagttgaaaatagaagagagatgaaagtagtaagacacatagatttatagtaggtttgtctcaaccactaagactacgtccatttcttagttaaccattaagttccattaactttaataaggtacaagtattaatcactaccacttctagctctacaactcaagctctaccccagcgtgatacaacctattattatttat

SEQ ID NO: 198675 - DNA, 463 bp, Glycine max
tgcataacactatagctatggggcaatcagttttgatgtttatcttgacgctcgggaaatactgtcgaaaatgttgagcaacattgaccaatgctaatgccactttctccattacttgatactgagtttctggatcttgtgatattcagcagacgaagtatattggtcttagctcattattttcctcttggaggaggactgcacttatggcttctgcagagaccgagaagaatactatgagtctcttactagtgcttggtttcaaaagcactagaggggttgcaagcgtaactgtcaactgctgaaacatttcttcacactcatcgatccattgaagtgttttctttctaagaagattcatgattggtttggttatctcgatgatccttggtaagaatctggataatgaggttattcttctagctaacgctttgagcttctttcacgtttttaggactcctca

SEQ ID NO: 198676 - DNA, 204 bp, Glycine max
  unsure (1)..(204): unsure at all n locations
agctngtatttaanaatgtgttaaaaatacttttaattaatattcgaatttttattcctttattaatatatatgtgaggggtagagggtgtcacagaagacatggatgtgatgtcaccgacaaaatttaaatattaaaaaaattatcaatattaagctgagtaaataagtgaaataaattcttctttttcgtaccccattgccg

SEQ ID NO: 198677 - DNA, 416 bp, Glycine max
  unsure (1)..(416): unsure at all n locations
tgagatgaggaagtgttgaagggtgaaacttcctgcttttattgttgaccacagagtggcacctggagatatgtcgcgggggtcaggagaccttggggacgtcatgtggggtgctattgcccaaaaccaagcttgaccaatcccgacccaacccgggcatagtcagtcagtgagaacctgtgatgtacctaagcaggcgagctcctggctgtcaacagataaaaggaaaacaagaccacaaagcaaggaggctngtggtggctggccagctgtgaaacttgattgatatgtgagatatggtctctggtaatcgattaccaagggtgggtaatcgattacaaggctcataaatgaagacagggggctaagatggtctctggtaatcgattaccagcggatgtaatcgattaccatgc

SEQ ID NO: 198678 - DNA, 446 bp, Glycine max
  unsure (1)..(446): unsure at all n locations
agctngagctagctggaataatggttgcttgatctgtanaaatattagtgtttgacctctaatttgagcctcgtggccccatgaagacccagtttatggaagacttcctagcagagtttgttagcaatgactaaaccaccccaaactgctggaacctctacgtggatggagcctccaacgtgaagggaagcagggcagatatcatccttgaagggccctacaatgttacttttagagcaagccctaaaatttagtttcatggcattaaacaaccaggctgaatatgaggtgcttatagtaggcctaaagctagcaaaaaaagttggagcaaggaaactcagttgctacagtgactcgcaacttgtcaacgacaggtggcaaacatatatcaagacaacgaggcagtactactcaagtactaccatgtctaaagaacccttgtgatg

SEQ ID NO: 198679 - DNA, 393 bp, Glycine max
tctctaattaacctaagattgagagaaaaagattatctttcactctatatggaagcactaagtatctattacctatacttaacagaaaatacttataacactacaaagtaaccataaattggaagagtttgctacaatgtacacaagttgtatacacaaaaggtaattgtattcaccgattaacatgtcccttacgccattgtcactgacttatgaagacttcctggcgaggctaggcgtcaagcaactcgtaacctttgttgaacattcctagacaatcggtaggcaaaggcaaccaacaaagttatcgtcagggccatgcacacttgacttgacagtctaatggtctatggaaagaggaactccctagcatactttgggcctatcatagtt

SEQ ID NO: 198680 - DNA, 410 bp, Glycine max
  unsure (1)..(410): unsure at all n locations
agctgatactcttagctgctgtaggtgtgatgacaagacccaaagcagtagtcactttgggagaaatngaaatgtggctcgcaccactatcaatcaacaccaataaatccacattctgtatcttaccttcaaccttcatggtgtgagactcacccatgcttcccaatacccccatcaatttacattccacctccacttcttcttcactttccaccgtcacatcctccatacttagaatttccccttcctctgtcatggnttcatcttctcctatgattagaaccctaagagctcgttctggacatttatgcaacgtagggtggtattttcccncacatttgaaacaaagacccttcgctctccttcttcgaattcatcattgtggatacttcgtattcccttccacctct

SEQ ID NO: 198681 - DNA, 447 bp, Glycine max
  unsure (1)..(447): unsure at all n locations
ntacttgtgatgacaagttntccgctagccatcgttgttctaataagcaacattttgttctacagtgggaagaagaggatgatcctgcatttcaaccagatccaccagacgaggttgagacagctggtgaccccagtttgcaagatcatcatttgtcttataatgctttaaaaggctcatcaggtcttggaataatgaagtttcaaggatcaataaatggattgggagtgcagattctactagatagtgggagttcagataacttcctccagcctagactagctcaatgcctgaagttacctgtagaaccaattcctaatttgcaggttttggttggaaatggaaatgccttgactgctgaaagattaattcaagacttggaggtgaaaatccaaggtcatacactgaagctaccagtttacctacttccaatttctggtgctgatc

SEQ ID NO: 198682 - DNA, 431 bp, Glycine max
agcttctcccctattttgctataaatagggggagaagtgaagaagaaaagggttcagccccttaggcacttctctctctctcgaaattgctgaggaaaattatttccgtgaacaaaatccaagccgaggcgcttccgtaacatttccgtaacgtttccgtgagtaattacgcgaagattctcaaccgttcttcaagattcatcgttcgttcttcgttttcttcagtcttcaacgggtaagtacctcaaaccaagcttttcaattcattctatgtacccgtggtggtccacattttgtttcatgtatttttattcccgttttcatttgctttttatacccccttttgacgtgcttaagccatttattaagtcatttctcgcttaatctaaaaataaaataaattttcaccgatcgtttgaattgtatcatcc

SEQ ID NO: 198683 - DNA, 482 bp, Glycine max
  unsure (1)..(482): unsure at all n locations
tccatcaagtggtaatcagagcacaagagcttcaagtttgtgctccttanacctccattaattntttgctntaccttctcttccattgttgtttcttcatttttctccatgtatctcctcacatttcttgtgctaaatgttgttaacatgattctttagagtttccaccggctaaacttgctatagaagctagatttggttttctatgattcaaatttcttgttcttgttcttgaaccatcaattgtgttgagtttaggttcctttgagttttgtcttgttattttttgtggctgaaacctaaaccataaaattcttacaaaataaagtagaagaaaacctcanaaatctagagtgacttgttcacctattgtagttntgtcatagaagtcatgtctagtcatgaaacttgtcacataagatttcttatgttgngcctgaatttaattttcttggttctttggctaactcattntttcatga

SEQ ID NO: 198684 - DNA, 324 bp, Glycine max
  unsure (1)..(324): unsure at all n locations
ggccttaaactaacgccttcttcacttcttggtttggattcaaaaaagaaacactaacagtaaattccacgttgaatcacttcttcagttataagaagaaaataaaattagtgaatgatgtaacatcgtatttttagcactacattctaaattgttatactaaaaattntattgaagtttttaaaattaagactattcattaactttattttttatctgggaacatattagttttggtgatgcccccatcgatctcttagcttgttattcacaagaatatgcgatcttaagcttggattatcgaatgcttagtttaatgaaaat

SEQ ID NO: 198685 - DNA, 480 bp, Glycine max
gcctgctcatgagtcatgcattgcatattagtggttattgatcaatgacctcagtagacaatgacaagctgacaaccatgatcctcttctttcctaccaacaacttataattagcttttcccaccctattatagatccattacacagaatcaccaacaattaatagggaattagggatatatattactatacaagggaattaactttccacaaaaattaggcttcgtttgaaaagaaagattcggttgctgtctaagtctatcagaactgcatatatatatggaactcgatcgttcattaatatacatcaagttacaagaaatattatagccggaaagatgcagccgacattcactttaattttgcctcttcaaacagagacgaaagaaaagtaaaacttggagaaatggttcttatggctgaagtgaaatgactcgacaatctcatccagagataaagtgcttcattgaaatatgttag

SEQ ID NO: 198686 - DNA, 475 bp, Glycine max
  unsure (1)..(475): unsure at all n locations
gatccttaagtcacctgcggcatgaagcntgtaattattagaaaagtttttctatacaagaaaactaatagctactcttaacactcttcttaacactcttcttaacactcgagtaaaattcatataacttctatatggatctcatcatccctgtgatttgtcacattccaaattgtaacacctacatgaatttcaacgattaagaaaaatacatctaaaaaactagagaatatattgataacattcttcaatagcatagtgttgattcattgacactatctgatacttatatttatctatttcttattacatattcctctctctggatatcgatgtatctttttcccaacaacataaatactcctgacttgtataataagggaggtagggaatacaatcgtcaaaccattgttgctactaccactttgtttattgcagctggtcactaaacaaacttattaaagtaaccgcctgt

SEQ ID NO: 198687 - DNA, 395 bp, Glycine max
atcaaatataaaaaactgtgtaaactcgacaaaccagcatatttaagtagtaataataataataataactattattattattaaataaaaaaatctaaataatcaaatattcgaggtaacctaacattagttgatgagtaatctattacagagagattactacagttatatagcccaaatgtaatctattacaaagtttttaatgtttaagaaaattttccaacataattttgataccaaagtcaaacataataatgttaggaagtgttacattaccgacctcagttgtcggggtgggagttatatatctatggggtaattacttgatgttaattgattttatgatgacatttaacatgggatcggagtgtatagctcatcttggttctcgccta

SEQ ID NO: 198688 - DNA, 423 bp, Glycine max
agcttgcacaaaaagtaactaaatttgtttgtggtacaaaatgaagtaactaactaactttcactaatatatacagttactactcagaaggaagggatgggccttgattaggcctatctaatctacctaattaaactaattacacaaagcaaagcccaaattcgcggcccacttattcaagtgcagaggttttgacttccaaacccaatttgaccctcgaaatggcagaattggccgaaacttatttttgacaaaattgaatatctttttcttagctttccagagactactcacaagctcaatttggagttctgtagtgtgtggaagcaaagcttcatgatgaatcaacaatgattcaaaggtgtttgatgataacaatgatgacaacaaaagatgattacaaaggtgatgaacacaaagctc

SEQ ID NO: 198689 - DNA, 392 bp, Glycine max
catattcttttgtgtaccaagttattgttgctgtgaccacagattatcagaatagtcggtagatcgcacaatgactagcactttattgtcttactgacaggtaagcaggtttcgcacttacaccttgacgacacgaagaacatatgctatgagagatttcctctgctctgctagagttgacacagagagctatctaccaaaagaatttgtatggtgagcactgtagttctctggcgtggcttaccagctcttggtgtttataggtctccttcgctctagcatttgtcgactctggagcatcatatttacgtctttgagcttgcgactgaaactaatggcatgtggtgcattaagtgcacatacttgttcatgttgagaaaccattctgcatt

SEQ ID NO: 198690 - DNA, 454 bp, Glycine max
agctttcttaagagaacttgcttgagaagctttcttaagaaaacttccttgagaagtttctttgagaaaacttccttgagaagctagagtttagctacacacacccatctaaaaactaagctcacctccttgagaagcttccttgagaagctagagcttagctacacacacccatctaaaaactaagctcacctccttgagaagctttcttgagaagctagagcttagctacacacccctataatagctaagctcacccccatgacaaaaaaacatgaaaatacaaaaaaaatcctactacaaagactactcaaaatgccctgaaatacaaggctaaaaccctatactactagaatggccaaatacaaggcccaaaataagaaaacaacctattctactatttacaaagaagagtggacccaaccttggcccatgggctcaaaaatctacccta

SEQ ID NO: 198691 - DNA, 471 bp, Glycine max
  unsure (1)..(471): unsure at all n locations
tgtcgtagcggttatgcgagatcgagaccaacatgtttaccatcgtcagcaagtaccaagaagaattaaatctagccaggcccacaagcacaaagtggcagatgaatatgcccgagtgtacgcggaaaaggaggctagaggaagggtgattgactcgttacatcaagaggcaacgatgtggatggaccgattttctcttactttgaacgggagtcaacaacttccccgattgctggccaaggccaaagcaatggcggatgcctactccgctcccgaggagatccacgaactcctcaactattgtaagcatatgatagacttaatggcccattataataggaaccactagggagtntgtattgtcactcagatcttgactagttataactttctttataanatgagtttgtctcgcgttttactccaaatcagtgcagatcaaatcactccatattgtattcttacatacat

SEQ ID NO: 198692 - DNA, 405 bp, Glycine max
  unsure (1)..(405): unsure at all n locations
agcttgtagaacggatggacatggtatatgtcagggtgttggtctggttcagggataaaagggaatgtcccacattatttccatgacacaaatgcaacaatgatgatttgcacctatgtggacactcaagtgtcgaaatttttttggtcatgtgatgctagggctcataattcattttctctactttagtcaacccagtgtttccaaaatatgttcttctatcaatttgtgcattcatccgagtctatcttgggtgttcggaaaaactttcacagcatttacccttcaaatttgtacacacattnnttttcaaaaatggttatgatcagtgagattttccaaagaaaagccggaagtcattcttttcaaaacatgttggtttttagctagacaactattttcgtt

SEQ ID NO: 198693 - DNA, 355 bp, Glycine max
  unsure (1)..(355): unsure at all n locations
tcatgatgatgaaccaagcaattgtgatgatgccaaataaccaagtgattgattcaagacttcaagatcaatcatcaagaatccaatccaagattctagattcaagagaagaaatcaagaagcaacaagtcaagacttcatataggataagtattaaaagattntttcaaaaactaaatagcacagttttgttttacaaaagaattntcacaaattttttaaagttaccagagtgattactctctggaaatcgattaccagcgactagattggttttcaaaatgttttcaaatgttntgtaacgttcccaaatgaatttcanatagtgtnatcgattacactatattagtaatcg

SEQ ID NO: 198694 - DNA, 300 bp, Glycine max
acctaaagcagtctttgtattcttttaacatgcatgaagatagatcagtctgagaacaattggatttgtttaataaactgatcctagaccttgacaatatagatgtcactattgatgatgaggatcaagctctgttattgttgtgctctttgcctaacagttactctcatctcaaagaaactttattgtttggaagagatcttgtttctcttgatgaagtgcacgctgctctgaattcccaggaattgaatgacagatacgataagaacttctctaccagtggtgaatggctgacaccat

SEQ ID NO: 198695 - DNA, 399 bp, Glycine max
caccctataattcccccaaatttgggaaaatttgctttgaaccaaaatttccttttatgaatgatgctctcctacaacctaagacaaggtagaaggagataaactgtacaagctcaaggttcaataaaacaatcatactttcagctcaaaatgggtgcaagggataaatcaatcatgcacaaggtaagctttttagctaagtggctatcttcaatcaaaacatggccttcatcatcttcaatttcacacattcattctatactcggagattcatgcaaaaatcattactcaatgttagtcattctctcacaattaaagatcacactctcactgggttacgactaatgcgttcctcacaatcaacctgacaaaccaactaacattttcaagcatgatcct

SEQ ID NO: 198696 - DNA, 380 bp, Glycine max
  unsure (1)..(380): unsure at all n locations
tgtgttaagttaaacaatatcttgtaggactntggattttggtggngaatggaaaagcaccgtctcaatatgcaaaatatcccatatagattatggatatttagggaagaggagactacaatattgatatttattattattattattattattattataataaatgataaatttctctctaataatgtgaggcattaatttgaaagtaataaaattcaaaaatatttctgaaagttcctatgttatcactttagtcatttttttatcaataaatattaattctagattntttttataaatgttagttacagggggggggggattcaaagtcatagtggtactactccaactataattcttatatatattattgttatatg

SEQ ID NO: 198697 - DNA, 436 bp, Glycine max
  unsure (1)..(436): unsure at all n locations
agctttgaaggttgaacttcatgatngatacttattttatttggcaatgttcatgcataggttaataagacccgtgatgttgttgtggaagtgtaacacagaattgaggttgagggtgataatgatcgtcctcaagatttggaaaccaagagattcacatatgagtagcctagcatagaaacgctttggagagaaagggctaggggttttgtggcattgtcatggggataaaaataccttatttttccacaaagttgcctctattcgttgtgcttccaaatgattatctactcttcgtaaaggcaaacatcttttggagaatgttgcaaatttagagaataaggtattgaagtatttctcgagatttatgcttctgaaaattgttgtgtgcaaaatgatattatctccaagactgtaccacctcttgttactatta

SEQ ID NO: 198698 - DNA, 458 bp, Glycine max
  unsure (1)..(458): unsure at all n locations
gacacttaaaactaagctaacacattcccaatggcaaactatggtacaatctttatctagatctcttattgagcagtctgggatcaaaccaatgcccatacaagaattactcattgaactagaatgtaatgatgatgattggcaatacaaacttgtaaacaatagagatcgattcttacactgatgtttgacaggatttttgatatgttaacaaagcatcaagacatttttttgcctattctttcttcacgttatataatccaacctttggctaacttgacaccaccaaaaccaaacattgtgattttagctccatacagatagctatacaggaagctccgaagccgtgatataaattacaggactacatttgctacatgtatgcaggcaacccacaatcttacatcctgcatgtcagcttaagatcangaaaccaaagtggtgtgtacaccactcta

SEQ ID NO: 198699 - DNA, 420 bp, Glycine max
  unsure (1)..(420): unsure at all n locations
gatccttaagtcacctgcggcatgcaagcttcttcctctacctcttgaatacggtaantttgggcaaacagaggtagngaataggtcttttccactcttttaagggctcttctaaaaggcaaccataagtcttgggatgagtatcttcctcatgtagaatttgcctacaataggggggttcatagaaccaccaagcaatccccttttaaggttgtctatgggttcaatcccttacacccttagacctcattcccctcccacttgacacttcttttatacataaagaaggggaatctaggtcatagtttgtaaagaagttgcatgagagggttaagacccaaatagagaaccaaacaaatatgtattcaactaagggcaatagaggagacaagagctcgttcttaatgagggggactgggt

SEQ ID NO: 198700 - DNA, 323 bp, Glycine max
tgcttgcggaccttatgtgaacgctggatggcgagagttgatttacgtcccttaatggcgaggatccagcagggttgctgtactgaaaacagtcgattactagcgataggatgcgcgcttctctcatgagctgcctgtggaacactattcttactctgctgaatgagacaaggatttttatctcgtacatgatacttctgtggaggcatagtacgagagataaaatgactgaggggtgatcgcagataaggtttgggcttcctggctaaacatttgacttctgaatgtgtcttactagactgttagtaatcaaagtgtccaca

SEQ ID NO: 198701 - DNA, 448 bp, Glycine max
agcttataagaacaaaattgcctcaatcatttccaaatatgcatgtgaattaggaagcatcaacaagaatcaagccaaggctattgtgcaagcaatcaatggggcaaaacacaccaaatgattatgatgatggatggcttaaattctcacaaaggtaaactcatcactttcaaattgagctttcaaaactatcatgacatgtagagaagaatcaaggatttcaagtcacaaaatgtcaagaacttttattttcaaaacaattacccatttcttgaacatatcctataactcaaagaaaaacatgcaaagtcgtacatgcacacaaaattgacccaaaatattaaactaacaatctgacgaaactaaaacattaacaaattaacaaaaccaacaaaactagcagaaccaaagaacactccctgccccctcccatacttaaacaacacat

SEQ ID NO: 198702 - DNA, 470 bp, Glycine max
  unsure (1)..(470): unsure at all n locations
tccttaagaagatntctaaagaagctagagcttagctacacatacctctctaatagctaagtacacctccttgagatgagaagctagagcttagctacacaccccctataatagctaggctcacccccatgacaaaatacatgaaaatacaaaaaaaatccctactacaaagactactcaaaatgccacgaaatacaaggctaaaaccctatactactagaatggccaaaatacaaggcccaaacgaaggaaaaacctattctaatatttacaaagataagcaagctcatactttgcccatgggctcaaaatctaccctaaggctcatgagaatcctagggccttccctaggatctttggcccaatctacttggagtcttctatccaatgcccttgcggtgtatgattacatcagacggagatggagacatatcaccgtcacagagaggacactcaaacatttatggagt

SEQ ID NO: 198703 - DNA, 442 bp, Glycine max
  unsure (1)..(442): unsure at all n locations
tccttaagtcaccgcggctgcagctcctcggcattactgcgaagcattatntggaaagctagttttaccagggggacactactcttaaaacaaaaatggcgtacaacctcctcccataaatacaaacatcaatgtaaatttaaagcaagcttatgcgcatatttccttacaaacgttcactttcacaagacgtcctatcaactaaaaaaaatgcacccatatacaatcaagggagcttcattacctagattatctacatgtacttacaaggtgtatttgttatttacatcacacacgcctccttggctgaatttacatacatgcatactcaaagcattttggggtaccaaaaacttgacatgcgctcatcttggtattctaatacccatacatatacaaacttcacgatgaatcttgactacctacacaataaggagctaca

SEQ ID NO: 198704 - DNA, 337 bp, Glycine max
  unsure (1)..(337): unsure at all n locations
cgagatgaggaagtgtngaacggtgaaacttcctgcttttattgtcgaccacagagtggtacctggagatatgtcgcggtggtcatgagaccttggggacgtcatgtggggtgctattgcccaaaaccaagcttgaccaatcccgacccaacccgggcataatctgtcagtgagaacctgcgatgtacctaagcatgcgagctcctggcaatcaacatatataaggaaaacaagaccacaactcactgaagcttgtggtggctggccaactgtggaatttgagtaatatgtggattgtggcctctggtaatcgattacccaaagtgagtaatcgatt

SEQ ID NO: 198705 - DNA, 470 bp, Glycine max
  unsure (1)..(470): unsure at all n locations
gatccttaagtcacctgcggcatgcaagctaaagccttttagataacttggataatatagagnnncttatttaacattcaattaattttcaagctttaatgtaaggcttgaagtggtatccaagattaactaaacatacacttgagtatatttcacatctataattgcgttttcttatataatttcctgacagacctttagacaacaattatttccacccaaagaaatcctaaaccacacataactattaacacttatttcctcaccagaggacattttcattatactaagtatttgttcatggtctagactcatttacaagccaattacacaccaattctaaatataggcaaatcccttatgaacatagtcttcagcccattttcagctgttttcctcatgattgagaattaactcaagttgtactaattattaatacaagcgaatacgtcaagttcaatctcccatgt

SEQ ID NO: 198706 - DNA, 417 bp, Glycine max
  unsure (1)..(417): unsure at all n locations
tgacctattaaactaagcttccgccggttcaatgacggacacacgttataactatctccccccgaacattcttagaaatcacaccctattcagtaaaaagtatctataaccaacccttccacgtgaatttgcctcaccgcaccgccgtgacaaacataccattaatttgcggagtccaaccacaaaacacaaccaaccaaccagaacaatctactggcaacaagagtttgagatcttggtgcacattcaacaatcccaggaccaaaatcttaacttgcacgctacccaatttgccgaaataaattctccttctgggtccctgcataggtggcccagaagcccccacctaattcaattgtacccattccaacgacctttcanctccaacggcaactgggtggcatgtgcctctttttc

SEQ ID NO: 198707 - DNA, 456 bp, Glycine max
agcttgttaaagaacttagaaaaaatcattatcaagcttgttcgcacatcgttcgcgtgtatgatatccattccacaaggtttgaagtaaaggagaccttcaatcctataacgcaatgtggcgaacaaaagtgggcagttaacttgaatggtcatcattgtcaatgcggaaggtattttgcgcttcactatccatgttcacacattattgcaacttgtggttacgtgaacattaactactaccaatatatagatgttgtttacacaaatgagcacatcttaaaagcttactctgcacaatggtgaccacttgggaatgaagcggctattcctccttctgatgacgcatgaacacttatccctacccaactacaattcatgcaaaaggtcgaccaaaatcaacaaggataaggaatgaaatggattggctcgaatcatctgagcaccaacaaaaatg

SEQ ID NO: 198708 - DNA, 454 bp, Glycine max
  unsure (1)..(454): unsure at all n locations
ctaagcttacatntctcttcanaggatattgcagccattaatgttgtcagtgtatctattccaagcttccaaagattggaattgcctggtatcatactgagttgtgggcctagaagcagtgctcttcctcttcctggatgccatctataataaaaagaacccatcagtttattagaccagaagttatcaaaattgaaacagaaaataaaaactgaaattggcaatgtgcgtttagcgagacacaactcgcttagcgtgccttatgaaaaacaacacactggcttagcgcaacagggttgcgcttagccaaccatgaaagaatttttctctgcataattggcttagcgagataggcactcgcttagctcatagcacttttatttaaacaatggctaacgagcagcactagcttatccttatgcatgccgcaatgaatagcgcttagcccacaggg

SEQ ID NO: 198709 - DNA, 404 bp, Glycine max
agcttgtacagtctctgattaaccaatttgtgtgtaagtgtgaatgtgaatgggtgattggagcttttaactttcatagttgtgtttggtttacaagaaaaaaaaaatacaaatcgaagaaatttttttgaattaaaatagaatataaaagttctaagttcaaaaaaaagtacaatatttttttccaatcttatttctctccttccttttctaataacatatttggtttaacttgtgcaccttaaaatcagttccctaactgtcctcatagctcacatattcacgaagaaaacttcatatatagaacaagtaaggctagagaagaatgagcaatccctccataccttagttggtgcactaaacaatgaagaagatgagtgaatttcaacacttgaaggctacca

SEQ ID NO: 198710 - DNA, 416 bp, Glycine max
  unsure (1)..(416): unsure at all n locations
ntacttcgatgaattccatatcactaagaatcttcgttagatcaacgcataggacactggctgttcatgactctatcatcatggaggcgcacagatgacgcttcaagcatatccgatttgcacgggactgtgatatatacaatgactccagctctagccacattgaggctgctggcttttctctagcaaattatcttaaagctgtatatctaaagcatagaatgattgcacttctagctttaacaatcaaccttgatctctgctctgagcttaaagattcacacatgctttcttctactttaatagcttctacacagccatgttgaatcaagactgcttccatctagatgctccataaccacgagtcattttacctagatacttgtcagcatttgacttggtgtcacatctttttg

SEQ ID NO: 198711 - DNA, 449 bp, Glycine max
agcttcggcttcaccattctcattgatcgacacgacaaccacatgggtatagagagcctgcaaaggttgcacatttgaaagcaaaagagtttgaggacctctacgaaggaggagtcggggcatgcaacaacaacggtccatgacttgatatgggggatgtatccgaagcggaggatataggtggcatggagggtgtgccggttttgacgaaaaagacaatgaggaggttgaggttgttggcatacaaagtgttctaataaaataattgttaaaagtttgatgctttaaggatttcggagtgactaagatctattaaaagtttgatgttttgaggattgggttatagtttggagtgaatggtgtggtatggcaatcacaatgaattatggttggtgatggtgtcgttgccaaatggtgattgttgtggagtggttgcgggatcaatgtgt

SEQ ID NO: 198712 - DNA, 386 bp, Glycine max
  unsure (1)..(386): unsure at all n locations
tattcatntatccatggttatcaaacttgagttatctcactatctcttacaactatgagtttatttatcctttgcgagtagactcgtgtgcaaactctcttttcaatgtgaaatttatggtttactattttgctttgttatgttgttgaaatgtttaattggtatgttatttataggtattntgttattatttctatatgaagtaaactcataaaagtctacgagtcgagtctttggagctctcacgagtgtagtatactcttgagtgtgataaccttgcatatatattcatatgcatatataatatataatattgattgttggtggacttctgaatttgataggggcgctttgagataatgtgtctgtcaagctcttacttggtc

SEQ ID NO: 198713 - DNA, 411 bp, Glycine max
  unsure (1)..(411): unsure at all n locations
agctngaccaatccccaccctttctgngttattcagtcagtgagaacctatgatgtacctaaacatgcgagctcctggcagtcaaccgataaaagaacaaagaccacaaagcatggaggcttgtgtggtggctgaccanctatggatcttgagtgatatttggtatatggcctctggtaatcgattaccaagggggggtaatcgattacaaggcttaaaaatgaagacaggaagtaaagatggcctctggtaatcgattaccaagggtgtgtaatcgattaccaggcctaaaaatgggatcaggaagttgagagggcttcttgtaatcgattaccaaaggggtgtaatcgattaccagcttagacatagagatagtatgttgaggaggcctctggtaatcgataccaatgt

SEQ ID NO: 198714 - DNA, 364 bp, Glycine max
ctatcaatctcagctcataaggtgctaggcgcattagagattctaaaaggcatcaccagccattcataccaaccaaacttggtcttgaaagcgactttccactcatcaccctgtttcatcctgaattggtgataaccacttttaagatcactatatgaaaagatattggcaccctgcaactcatcaagcgaatatcaagataggaatggggcgcctacactttacatggatgtcgttgatgagcctggaatctgaacacattcttgactgatcaactgttttgggcaccaataacactggcacaacatatgggcttatgctctcttggacccatcccttctacacaattctttaacctgagact

SEQ ID NO: 198715 - DNA, 347 bp, Glycine max
  unsure (1)..(347): unsure at all n locations
agcttcaacctccacctctntagtggctctcaacctcgggagccaatccagaccttatgcgtaggctttcaaccatctacggtagccaccgacggccctgttgctacttcccctgagttccttgtccttctttggcaccatttcccatgccttgttgaccccctgaagcacccccgcgttggggctattgaaacctcgtgcaataaaaggtgtgaggccttcctctgatggtgcccccctcatggggtagccaagttgccttatggcgaggacgagattataattaatgcaacccctcgtccccatcaaggaaacatttggaaatcctccacatgagacgagaatgt

SEQ ID NO: 198716 - DNA, 438 bp, Glycine max
ctcagctttcaacaagagtcttcacaaataactatcatgaagcatataactaacaaaactacccatcatatctcccagaaccccatacccacgaaaatcaaaggagaaagaagtccacccaaacctgaaatttcgaagtcctacacgtagagacgcgcttcacgactccgaaaatgccctcctttcgcgatttggagcagaaatgggcaccaaaggttgaagctttgttgggcaacaatggtggaggaagaaaagaataagaatgctgcgtgagagagagggagagcttctgaaatttcttttgggctgagtgaggagagagagagagggtgcttttggttttaaaaagggttttctctttttctatttatttatataagctatgccacatgtctccatttgagtggagcaaaaagggcccactttctcttttgattg

SEQ ID NO: 198717 - DNA, 462 bp, Glycine max
  unsure (1)..(462): unsure at all n locations
agctnttcccncaccactacactaacacttatttttttccaaagagaaacacaaatcaaaggcaatcccactaaaattttaatggaactccatcatggtttaactaaagagtataggagaatgtaggaaggagatggaataatgaaagtagagaaactcaccaatgcaatggattccctccaagctctagtgtgtaaaaatgtatggaggttcaattttgagagtgtgggattctacttcccgccttaagaaagttttaagcaagataaaaggaaaaaggatggctagtggaggttcaattttttaaatagaaagacttagggaagggaaagttttagggattttaggttttccctctcactaaggataatctagacttatacatacactcgttctcctcattaaggcctgaccacaactcataaacacatgattatcttattacgttctaccaaatcaatc

SEQ ID NO: 198718 - DNA, 443 bp, Glycine max
  unsure (1)..(443): unsure at all n locations
gaccttaaaactaagcttctcccatgctctctatactaggtccctttcctcatttatccaangagtcggttcggagttgaagcatccggccatacactacttgcaagctttagtcacgatgattgcgtcttctcatactagttggataaggcctaaatctatcagcagtgcttcattggtgtttaccacaacgaagtaatgccttcggggagagacttctcctacttcaattggaaccatgacatccatcccataggttagccggaaaggtatttcctgagtggtaaattgtggggtgcatctatatgcctataggacctacgtaagctcttcaacccatcttactttggctccatccagatcgttttttagctcactataaatatcttgttgctgctttaaatcgatattgggttgggggtgtctacaacctcccccatgtt

SEQ ID NO: 198719 - DNA, 141 bp, Glycine max
ctgcactttcccccctcctaacctattatccaaagaaccaatcaagcacccctaaatttaatggactccatctggttacctaagagtataggaaaatgttggagggagatggattatggaaagttaaaaacctccccattg

SEQ ID NO: 198720 - DNA, 418 bp, Glycine max
  unsure (1)..(418): unsure at all n locations
tctccacatgctctctatactaggtgcctttcctcaattttcttanggagtggatgggagttgaagcatcgggccatacactacttgcaagctgtagtcacgatgattgcgtcttctcatactagttggataaggtctaaatctatcattagtgcttcattgttttttaccacagcgaagtaatgccttcggggagagacttctcctacttcaattggaaccatgacatccatcccataggttagccggaaaggtatttcctgagtggtagattgtggggtgcatctatatgcctatatgacctacgtaagctcttcacccatcttcctttggcccatccagtcgtttctttactcacttagaataatcttgttggctggttacattgaaattggtttggggggtctacaacgtcacc

SEQ ID NO: 198721 - DNA, 259 bp, Glycine max
  unsure (1)..(259): unsure at all n locations
agctngcccagagaaggagtccacggaggaaattgcttccacctcaaaagactggaaagcgatttctaatgactcctctgcggcttccacataaggcatagaggatgggcagctcaccaagatgtcttcctcgcctgatacgatgaccagatgcccttccactacgaatttcaacttttggtggagtgttgagggaacaactcctactgagtggatccacgggcgccccaacagacaagtgtagggggggtaatatcca

SEQ ID NO: 198722 - DNA, 446 bp, Glycine max
ggaccttaaaactcaagctggcattcataccctgatgaggatgtcctatatgttcttaaaactggactgatacacttgttgcccaagtttcatgatcttgcaggtgaagaccctcataaacatctgaaagaattccatattgtctgctccgccatgaaacctccagatgtccaagaagatctcatctttctaaagtcctatccttattctttggagggagtgacaaaagattgattgtattaccttgctccaaggcccatcacgagctgggatgacctcgagagagtattcttagaaaaaaatttccctgcttccaagaccacgaccatcagaaaggatattttatgcattatacaactcaagggagagagcctatatgaattctgtgagagatttaataaactatgtgccagttgcccttaccaccagatgtctgagcaacttct

SEQ ID NO: 198723 - DNA, 280 bp, Glycine max
  unsure (1)..(280): unsure at all n locations
ttaagtcacctgcggcatgcaagctttngccttctcctccaagcgcttccttattattccaaccaccccatttctattnttcttcaaatggcctagctcttattccgagatcttgacgttgaatttgatccatccgctgtttttgttctcgtaagctggctagttctaggttcttgactttgacatgatagaacctctttctaaaggagggcacttggtcccgacccatgtttgtgggaatgacaatttcgatgactgatacttccacaccctatcatag

SEQ ID NO: 198724 - DNA, 407 bp, Glycine max
  unsure (1)..(407): unsure at all n locations
aaaactaagcttcaaccaagcaaccaaaatgaagtgtccaaactcctcatttaatggatcttctaggcttgagaagtcaaattgagaatgggacaaatttgaagcaaactctcacctcacacaagtctataacatcaatctaaactttctcaaactggatttacacctaaaattcctccgaatcaaaatttgactcctcaacactcaattttgccctagaaatggatcttggttcactntggtcatttgattttctctctagcacagtccaagctttctcataagtcctaaatgacatttcaagctaggattaactcactttaacctccatttaccacagaattcagattntaccttccaactctcaaagcctcactcttttttcactcataacaccacattctccc

SEQ ID NO: 198725 - DNA, 246 bp, Glycine max
  unsure (1)..(246): unsure at all n locations
agctngtactggatgtctcaactatgcttttatgtganaagcttcaaaatatttgaaagaagcctatattgatgaagtcaatgcttccctttgaagatctaatcttatcatattctaaagacatcaataaggccttacatagaagatttttcaaaggctacaatgagcatacaggatcagaatgaagtttcatcagagtctgcatcaaaatgatgaagaatttgactttacacactgaagttcata

SEQ ID NO: 198726 - DNA, 360 bp, Glycine max
  unsure (1)..(360): unsure at all n locations
ctttcgattcattctatgtacctgtagtggtccacattgtgtttcgtgcatttntattctcgttgtgtttacattttataccccctgttgacgtgcttaagccattttacttaagtcatttctcgcttaacttaaaaataaaataaatttccaccgaacgtttgaattgtattatccgttaacttcagttaaaataaattccgaccgttcggtcgtgccgtaaccacgttggaaatcaaaaagaggtaaaaaataatataattataaaaaagacatcttttagtgaaataaagcggaaaatcaatcggacggtttctctttgggatttctcaatcttaatcggnttgagtaataactaaa

SEQ ID NO: 198727 - DNA, 365 bp, Glycine max
  unsure (1)..(365): unsure at all n locations
gaccttaagtcacctgcggcatgcaagctntngcacgacataacaatagcttcattctcttgaagaggctcacntttttgagtcatcatcttctaattcacctacatccagggactctcaaacatcaaaatttgaagccgaagtcatggctgaaaagcacccttgacaagtgaccttgaaaaataactcaggtccttaatggccccattattcttcaagtgttgcgcggccagaggttcaggcacaaaatttaacttacccaccttcattatacagctaatacagagcaatttgtttcatggtttaccaaatgaagatccatactcacacttgggaacgtatattgagatttgaatattgcaacc

SEQ ID NO: 198728 - DNA, 453 bp, Glycine max
  unsure (1)..(453): unsure at all n locations
agcttgaaccacaacaacgatgtccaacttataaaacattaaagaatatctcttgggaggcaacttagcatttttgaactttgctttttaattttctttttatatttcttgattacatatttattttaaaatatttatttgttaaaaaaattatttaaataattaattaagtatgatcacaaaaaaggggggaaagttaactcgcctgggcgagtggggagctcgcttgggcgagtctatgtctgcagacaaaaataaaaaggggtgaaatcagatttctcccaacattttcatttcaaacttcttctccctttattgtgcacgaatctccctcgccctccttctccaaaactcgcccaactaccttcttttgacaaatccttcattnttcacacaccacttcatctcattcaagtattccatttctatctaattttgcatttcccttgcatt

SEQ ID NO: 198729 - DNA, 480 bp, Glycine max
  unsure (1)..(480): unsure at all n locations
tccttcagaagcaaggaaggtagcttccttctgaagatataggaagaaagcttccttgagaagctagagggggctactcacacccgtccaatagctaagctcaccctatgccaaaatacatgaaaataaaatggaaagcttccttgagaagcatggaaggtagtttccttgggaagcaaggaagacagcttccttgagaagctagaagggggacactcacacccttccaatagctaagttcacccccatgacaaaatacatgaaaatacaagagagtccctactacaaagactactcaaaatgccctaaaatacaaggctaaaaccctatactactatggtacccttaacttgtanggtagggtgcccttaattagtaaggtaccctaaaaacttaaaatggcccaaatacaaggcccaaaagaaggaaaacctattctaatatttacaaagattagtgggctcatacttaacccatggg

SEQ ID NO: 198730 - DNA, 315 bp, Glycine max
agcttccacaacatgcaagtaattcatctattattcatcacaacctaacacagccaagagaatatggcaaagacagaaaactctacctaaaacacaaaccaatatcacaacttttcacattcaaataccccagtaacattctcttcattacagtccgttaaccggtggatcgactcgaaaatttgactggaagtctctagtacataagtctatattttgaccgttgggatctgctaaaaaaggcccaaaccccaataggtcttacctttttaacacccggcctaaacaggctttttctggcactaatacaaaatt

SEQ ID NO: 198731 - DNA, 456 bp, Glycine max
  unsure (1)..(456): unsure at all n locations
cttgtgggcatacagaacaacatacaagaccctccatgacttactcnctttgagttggtctatggaaaatcttgtcacgtacctgttgagttggaacataaagctttntgggcattgaaattttttaacttcaactcaaatacagttggtgaacattggaagctccaactccatgaattggaggaactgaaggttcaagcttatgagaatcccaagctttataagcaaagagtaaaaatctatcatgacagaaagctaccaaaaaggaattttcagtctggtcaacatgtatttttatttaattctcagttaaaattggtttcaggtaagctgaaatccaagtggtccagaccattcatcattgaagaagttaagccacatggagcagtgatattgatgactcaccacccaatgacatgattgtgaaggcagtaaaataaacactacttgtggaat

SEQ ID NO: 198732 - DNA, 83 bp, Glycine max
aacattttctctttctcttaatatgagataaacaacaatctccctctttttcctatgaataataacttttgtattgagcgact

SEQ ID NO: 198733 - DNA, 342 bp, Glycine max
  unsure (1)..(342): unsure at all n locations
tcatgatacaaagataaaataaagaanacagaataaggcattaaggcattgtcaccataaaagtcttacatatacggataagtggatgcactaccacgactatttcagaagaaaactaatggctaggaaagaacaaaatcaacaaatttattgatcctttgtcttttctaatattaatcaagcgtgggggtttctataatcctacttgaaactgtagcagtgtatatattntaacacatatcaataataaggaacggaaaacacacgaaaagatcagagagggaaagaaataagaacacatgctccttttctttctcttttgttcactgtatactattctac

SEQ ID NO: 198734 - DNA, 449 bp, Glycine max
agcttaaagggagtgaaagaattattatggtcagaaatgtctccgcattgattggtaaatttgttccccaaatccctgaaaaatgtaaagatccaggtacattcagcataccttgtattatagggaacaataagtttgacaatgccatgctagatttaggagcttctattagtgttattcctctgtctatttttaattctctatctattggtcctttgcagtcaactgatgtggtaattcatttagctaatagaagtgttgcctatcctgctggtttcatagaggatgtcttagttagagttggtgaactgattttccctggtgatttttatattttgaatatggaggaaggatttctcaaagaaaagatcagttcccatcattctaggcataccttttatgaaaactgctagaactaagaatagatgttatgcagacacactatctat

SEQ ID NO: 198735 - DNA, 448 bp, Glycine max
  unsure (1)..(448): unsure at all n locations
ngcagtcattagaagagaaagaacatgtgattttaattatgaatgaaaatgttagtcagtttgtcagattgattgtgaaggaatgcattaatcgtaacctggtgagagtgtgatccttactcttttgagagaaaacgactatcattaagtactgacttttgcatgaatctctaaattatggattgaatgcatgaatttgaggatgatgaaggtcatcgtgtgatagtgatagccacttagccaaaaagctgaccatgtgcatgaatgatttatcccttgcacccagttttgagctgaatgaatgtttgattgattgaaccttgagcctatacgaatttatctcctgctacctatgcttacggntgtagagagcattatccacagaaaagctgggtcaaggcaaattgtcccaatatggggagcttatgtcatacaaattgtccaaatt

SEQ ID NO: 198736 - DNA, 447 bp, Glycine max
agctggcatgatttacatctctttctttctcaagcaaattcttcttgatatcatcaaaattttcatgatttacattctccccctttttgatgatgacgacaaccacctgtaggttaggagcaacaacaaagaaaatatctatttgcatatagtttactcccccttggttttacaatgattacttatatgagacaattgaagatttcatatttttcatatataaaaagttgtctcataaaacaatagataatttttcttactattttatcttttatctttctctccccctttgtcaacattaaaaacaaatcatgaatagagaagagaaagatgttaccacttgttgcaatgtatgagatcaagtgataccaaaaggcattaacacaatcattcaatattatatcaagcaaaacaagtacaataacacatcaatcaaacacaattaat

SEQ ID NO: 198737 - DNA, 450 bp, Glycine max
tgtccccttttgaatttggaacaggtgatcccagacatttttccatcctaaaactctctagtactttattgatatattctttctaagacaagcctaacagttcatgtgatccatttcaaaatatttctattcctgtgacatagcttgcctcacttgagaatgtatgaatacatgattctgatgatgtcaaagtagaatcatacaaggttgcttcataggagaaacattgcttcaagattaatacaaggttgcttcaacaaacaaagctttgcttcaagattaactaaagatcaagccttgcctcaaaacaaagtgtttccaagacatccaatgctccggtaatcgattaccatacagtgtgatcgattaccagaagataagcttgaaaatagctgtttaaaaggaatattgatttgaattttgaaactgttatcgataccagatgtttgt

SEQ ID NO: 198738 - DNA, 409 bp, Glycine max
  unsure (1)..(409): unsure at all n locations
acttaagcacctgagctgcagctgcattacggttaagttaaactcttgnttaaaatcataatcataaacgtataattgaatttggatttcattatgcagaagcattagaaataactagagccaaataagaatcaaactgaaggaagcaaaagccacattgtgattccagaaaaatctaatagaaaacacaccaaaggtaaagggaagggaaccgtatgctatcacaatcatcaccacaggatcaagcaaacacaaaattccagattaaggtccaatagtttaacaaatgcatgcatggttgaccttcttgatagatcttgggatttaggaatggaaactaagccagaacactatgcatgcatgtagattggatgataacatgcctttaagctttacacatggctgagtt

SEQ ID NO: 198739 - DNA, 341 bp, Glycine max
ctgcacatggccgtactctacttatggtttggttacaatatgatttacaagatctaggtgcgtcctcctatactcaatactcgcattagaacaactggtcccatatcatcctcatgcgatcgagtctactttcgtgacatcaacaatgccacatagtgaatagtgatgctactgatgatacgccacttggtgtctctcccatactgaaagaaatggtgttatacgtttttgcatatagatacaactattgactattatggatgagttgcgcaaatatatttaagattgattgtgtcacacttaaaataatgatagattagcagtgtgagagattattatat

SEQ ID NO: 198740 - DNA, 415 bp, Glycine max
agcttatgctgcaaatatgtacaatagacctcttcatcctcagcagcaaaatcaaccacagcagagcaattatgacctttccagcaacagatacaaccctggatggaggaatcaccctaacctcagatggtccagccctcggcaacaacaacagcagcctgctccttccttccaaaatgctgctggcccaagcagaccatacattcctccaccaatccaacaatagcaacaactccagaaacagccaacagttgaggcccctccacaaccttccctcgaagaacttgtgaggcaaatgactatgcagaacatgcagtttcaacaagagatcagagcctccattcagagcttaaccaatcagatggacaattagctacccaattgaatcaacaacagtcctagaattctgacaagc

SEQ ID NO: 198741 - DNA, 467 bp, Glycine max
  unsure (1)..(467): unsure at all n locations
gggagaggatgcttcaatggcggaaaagaaagagggagagaattatagatgggggagcacgaaattgaaggaagaataagggagagaagttgaactttgagttgtgtctcacaagactcccattcatcaaagttacaacaagtgttacacatgcttctatttatagactacgtagcttccttgagaagctttcttgagaaaactttcttgagaagcttctttgagaaaacttccttgagaagctagagcttagctacacacacccctctcataactaagctcacctccttgagaagcttccttaagaagattcctaacgaagctagagcttagctacacatacctctctaatagctaagctcaccgtcttgagatgagaagctagagcttagctacacaccccctataatagctaagcctacccncatgacaaaatacatgaatatacaaagaaaagtccttactag

SEQ ID NO: 198742 - DNA, 309 bp, Glycine max
ggatcttattttatttttgaatatgaataacataagatttgcacgaattcaaacatggaatcattccaaacataaaaataacattaaattaacttccgcggagtcgaaagaaatagaattagcatccaatacgacaactaagggatgctaattttgtgacaaggacatattatcttccatttcgatgacatgcttactaagaacaggtgaaagttctattggcccaaattttttccagtcgttagaatacactaacaccttcagcacatcatcgttggggttcagttcaataatttcgaatttgataat

SEQ ID NO: 198743 - DNA, 364 bp, Glycine max
tgctaacccatggaagctcctaatatctacaacactttttggtgtgggccattctagaatggccttgattttctcaaggtccacttggaccccatttctaccaactacgaaccctaagagaactatattatctacacataaagtacacttctatatatttgcatagagggtattttccctaaagactgaaagaacttgcctgagatgtcctaagtggtcatccaggctcctactgtacactaaaatatcatcagaataaacaactacaaatatacctatgagatgccttaagacatgatgcataagcctcataaacgtgctaggtgcattagtgagctcaatacgcatcactatccactcatac

SEQ ID NO: 198744 - DNA, 376 bp, Glycine max
  unsure (1)..(376): unsure at all n locations
nnagctataacgagggaacttgtgtgcatttttcttatgcctccgnagttaactttattacttaatagagctttcagcatatgcttagggacgacacactttgtgtggattagctattcaagactgatgctaataatcaacaatagcttgtgatgctgcgttcttgtccaccgcaactatgctctcttttgttagcagatgttgtagggactttgtttaccaagcctgtgttttttttttactttgccactaataaaagaaaaacactcataaggaagataaataagatgtcgttcttttgcaaaaatcaatcatgggaaaggatgatatttttattataatgtataaaaattgaattgtggatttagtgtggata

SEQ ID NO: 198745 - DNA, 393 bp, Glycine max
tgctgctggagcttgcagccaacaacgatgtttcaggtttcttatgataatcgagtgtgaaccttcctccatagacgaggttgggttgtggtatggccgccacaaagagtcaaagatgatggtcaacgagcaaagaacttctttgatgtgtgctgccacctacggttacattgatgtcatgacgttgattctttttctatcagaagctgatgtgaaccgatcatctggccttgacaaaagcactgcacttcactgtgcagcttcaagtgggtctgaaaacgccgtcgatgctgtgaaactgcttctataagcatgcgctgatcggaattctgttgatgccaatggtcgccgacccggggatgttattgtttctccccgaagcttgattatgtg

SEQ ID NO: 198746 - DNA, 343 bp, Glycine max
tcttagcattgctaaccaaataaggctgctgggctctgaatttgctgattcaacaatcgttcagaaaatacttgtaacccttcttgaaagattcgatgctattgtatcttccatggagaatagcaaagatctatcaaaaatcaccttggcataactaaacaatgctgtacaagctcaagaacaaagaagattgatgaggagtgaagattctatggaaggagcatttcaagctaagttacaaagcaatcaacgagagatagacaaaaggatatagtttaagaagaatttcaacccaagtgttacagctggcaaaaaaaagagggactcttcaccttgaaacatt

SEQ ID NO: 198747 - DNA, 439 bp, Glycine max
  unsure (1)..(439): unsure at all n locations
agcttatacttattttaacaacagggcttttttatagaatagtcagagatttctactttaaggggaacatcgatcatttctatatttttagatctttgtcaacggataaaattccttcttctatgcttgtttaattactagtaactccacatggtttgctgctacaactattgcaatttgtttattgacctatttcttttcagtgacattattcttatattttaatgttcatatatcacagtaacaccttttctttctcttttttattttctttctttcttttacgattttaattttttacgttacacatgaattttaattaaaaaaaattagtgttttatttccttttcaaatatccttgaagaagttatataacaaatgaagaaaaaaaagtacgggtggtataatcagtntataatttaaaattaatgagagatgt

SEQ ID NO: 198748 - DNA, 475 bp, Glycine max
  unsure (1)..(475): unsure at all n locations
ntntctcctcgtaatggctgccctttcgttnttggttgtgttgtcatacaaatctacatgatctgtgtttgtaataagatatgtattactcatatggatcaacttgatccctatgagtcataaggatctagttaatccgtatgactcatacgaatctacttgatctgtgtgagtcatacggatcatcttgatccatatgaccctttttaattgaaaaaaaataggtatttatgttttgaaaaatgtttttaaataggtattttatttgttagttttgttttaaaattaggtattgtttgtgtttaaaaaaaaaatatgtatgattgcatggtgttatgacaatagttttaaatttaatagtaaatatatgaatnntgtagttgcttatgtnntatttatttcaatgaaaatagtcatatattatcntaatatgtagttggtattntaattatgaaatttgggtttaattatgtac

SEQ ID NO: 198749 - DNA, 286 bp, Glycine max
tgaatcgtcaatctgcaatcgaccataggacttttttctaatttccttccaaaaaactgtcttacaaaataatttcacactaatcgattcacaccacaatcgaatatgtgacttacgaatgaatttactattaatgattcaagtcgaaatcgaaccacgaaattcacataataaaacgcatgataatcagattttgtctcaaaataaatttgctccatctataaatgggaaataaaaaccataccgctaataaaagtttacatataaaaaaatctattattaacat

SEQ ID NO: 198750 - DNA, 364 bp, Glycine max
tatggtctagattcaaactctgcctttaaccttgagactcaatgctcatacgacgttcacgcttgataactatacatttacacttatggcttacgcattgtgttctaaatctgcatataacatttatgttgaactgagatccagtgccaatgattatatatcatatatagtgaattagctaaacagcatgtataagcaagtattaaatggaatgacgactcgtgatattagaaactgcttgtctagattcggactaagacactgcatcgaacaattctgactgccactccaattattggatttcccgaggatagagacatacttatatctatggttgcgccaatcatgctattctttcccgaga

SEQ ID NO: 198751 - DNA, 347 bp, Glycine max
  unsure (1)..(347): unsure at all n locations
tttctgcaggggagtttcattaggtcccatgtcaaccctctaacatggcaactaaaaaatgagttacgtaaggataggtccttcaagtcttttttctaattgaatctagctagtatcactttcgtacagtatccttcttatcacggtaatacgcagtgatgaataaattaagagggttttgttttcttacaagggcgattaaattgaatgagtctataataaactaaatattattattctaatttntatttgtgagttgtacgtcgtacatacaacttaacttttatcatacaaaatagacaattgatttaatgtattttttaattaataataggcttaaatatata

SEQ ID NO: 198752 - DNA, 376 bp, Glycine max
  unsure (1)..(376): unsure at all n locations
taccttgtgaatgaatgacatatactgtgcactcattattgagctngaaatctgattgttggattgaaccttgagcctatgggttgcatctccatctaccttgtcttaggttgcaagagagcattatggttcaaagcatatttgtcccaaatttgggggagtttattgtgtgatagcttctaatggtaagaaaataacagcacacacagtaagtcaataaggagcaagtaaagagttgttgttaaaaaaaactgtaagtattcaaattaaaagtgtgtgtgttgttatctaagaagaagtgaagctaatggctttaaggcaagtaattgaagctggaatataaaaatagtttatctaaggaaggatgctctcctat

SEQ ID NO: 198753 - DNA, 300 bp, Glycine max
  unsure (1)..(300): unsure at all n locations
agctngatagtatgataggtgttttgtgtgtggctgaaccaagtgggctactggaagaggctgtccaacttttgaataatcaaggcgactctagggtgagtcactaatggagcttggtctgaagggaactctgtgactccaatatggaagaaagtgcttgtgctatctgtcttgaccatttgttgaaccacaataatgttgacagagtcgaggtccctgtcatgggtgccctgtaattgaataacctgtgcttggtgaaaaacccgcttgttaagtcactattcgtcattaaaatgggac

SEQ ID NO: 198754 - DNA, 357 bp, Glycine max
gacacttgaaactcagcttgatgtcgcgctagcccgaacgcactttgttttgtaatatctcaaattaggctatgcgcgcaagcgcaggctaagcgagccatgcattcttgctaagcttgtgatgctcgctaagcggatttagtaagaaatttcctcctacaaaactcgctaagccccatatgacgaactaagcccaataatatctttggagttgcaatttaattatttggacttagcacacaacttctggcttatggcgcaaaaaaaaaatcaaaatttcttgtacttttagtgcacaataggcttaacacgcacttacgcgttaagccctagcgttcttcaatgtttgcatttttt

SEQ ID NO: 198755 - DNA, 463 bp, Glycine max
  unsure (1)..(463): unsure at all n locations
ctcgaccgggatccttaagtcaccgcggctgcaagctgattaaaaatgtttanaaatacttttaattaatatttgaattcttattcctttattaatatatatgtgaggggtagagggtgtcacattgcaagccactaaacatatatagaagatctttggggaatgaagaaaacattgcaggttgtttttggtacacacaaaaggcaaagcccaaagttacaaaagttttggaaaaaaaccatcttttgaggaggaaaaaggcaacaagaaaggaggagggttgaaaaagtttctgccctgccccaatagtaagtaagaagaacaatcatactaaaatttgtttgtctacgcgaatcatcaaatgtagtgcttgcaatcagtttggtcattggagaacggtttaaaactaaagcaaaccaacaggcacaacaagctcaacttgttgagaataaagaacaaattg

SEQ ID NO: 198756 - DNA, 352 bp, Glycine max
  unsure (1)..(352): unsure at all n locations
tgactggtctccttatgatttacctagtgagaatgacctgacttaccagtgtgtggtttgtcttgtcatgaactcctaggcgcccgacatgaattttcactgacattgtatcacattgcatataggattgagtcttagtgtaattgttgcttaacgcttgtgtattgatcgatatggatcgattgacttggtgatattgtgttttgatccttgagtacgtgaatattgtgaaaatgaatgagatgtgttgtgttgtgatgtgatgttgggcgacaaaatggtgaaatgatgtgagctatatttaagtcaattntatcttgtctatatgatatatatacctacatgttatctt

SEQ ID NO: 198757 - DNA, 436 bp, Glycine max
  unsure (1)..(436): unsure at all n locations
agctgtagaatggctagacatgattcatgtttgggtttggnntggctcaaggataaaagggatgccccacattatttccatgacacaaatgcaaaaatgatgatttggaaattttatgcaaaactggtcatgcatgcacctatgtggacactcaagtgtcaaatatttatggtcatgtgatgctagggctcaggattcatttcctctattttagtcaacccaatgtttccaaaatatgttcttttatcaattggtgcattcatccgagtccattttgggcgtccgggaaatatttcacagcattcacccttcaggtgtagacacatttttcaaaaaccagttatgatcagtgaattttttaaagaaaagctggaagttatctcttttcaaaagcatgttgggtttcagctagaaacttattcgctttttctccttc

SEQ ID NO: 198758 - DNA, 354 bp, Glycine max
tccacaatatccaataaatgcaatctcatatatcatgatactaccctaaaccaagataacagagtagaggcagaaaagtctgcccaaaacacattcaaataccacatatttccttactcatataccccagtaacattctcttagttccgattcattaaccgttggatcgtcttgaaaattttactggaggttcctagtacataaatatatattttgaccgttgggatctgctagaaaatgcctggaacacgatatgaactactcttcccaggactagcaatgccaaccatttttctgcactatgttgaaaaaaactgctgcacaaatttgacagcatttttttctgcataatat

SEQ ID NO: 198759 - DNA, 343 bp, Glycine max
  unsure (1)..(343): unsure at all n locations
agctntacagaccagatntgctgccactctgtatgacgaccctaatgggtctttattcaaactcacaacgcggagatgttcagatgtacctggtggagtttaagcacttggccaaccggattgtgggtttgccgccacagttcctcttgagctgttttgtctcaagactctaggccgacatccgctgtgaggttcaggctttgcagcccctcaccttggtccaggcagcggggttggcccgtctccaggaggagaaattgtatgacggtcgtcggccaccacgccctcgatcatatttttgtcttcaccaaccctccccgcccccggtggctgtgcacttttt

SEQ ID NO: 198760 - DNA, 433 bp, Glycine max
agcttcctcggggccattgtctgcgaaggctataatttggaaagttagttttaccagtgggacactactcttaaaacaaaaatggcgtacaacctcctcccataaatacaaacatcaatgtaaatttagagcaagcttatgcgcatatttccttacgaacgttcacttgcacaagacatcctatcaactaacaaaaatgcacccatatacaatcaaggtagcttcattacctagattatgtacttccaaggtgtatttgttatttacatcacacacgcctccttggctgaatttacatacatgcatactcaaagcattttggggtaccaaaaactgcacatgcgctcatcttggtatttctaataccatacatatacaaacttcacgatgaatcttgactacctacacaataagggtgctaccttcatgtttt

SEQ ID NO: 198761 - DNA, 179 bp, Glycine max
  unsure (1)..(179): unsure at all n locations
ngcaccaacattcattagtccagtacacactcaacaaatagtcatcatccatccacaattccaatcattcatgctcaatatgatgcatgcacctgacctcaactctcatatgcaatgtggtaccatccccaaggaaatagcctaagcgtgtccacacgacactctcacttaggaaaact

SEQ ID NO: 198762 - DNA, 460 bp, Glycine max
  unsure (1)..(460): unsure at all n locations
agcttattaaaagataaattgatgtcctatttataggtgttattgcnaaataaactctgaaaaagttattattaaggtaaaattagaccttaaaaataagtttataagggaagagacatttgttaaaagtacccaaagtgttttttaaattaaattaaaaaccaaattcacaaatcattttttcctgattttaaaaatgaatgtaaagatatcttaaatttgagttaaaaaaatcaaaaacttataatcactcccaacaagtccttagctaattattattttttattcgtaaggattgaagaaagataacaagaaatttataatgtcatatactttgctcaatcaactaaactagatctctttgtaactaattaaatctaacattaacctaagtatctaatgtaaccttcaactagttatttccatacatataaaagatgtctaaattctcattatacat

SEQ ID NO: 198763 - DNA, 417 bp, Glycine max
tagacaaaatagcataccgactacaagaactagatggtttagcaagtaaaatcatgacatagcaagttaacgaatttgataagataggaagtggatgaagaaaagaataaatattgtcaaagttacaaggctagtgtggccataaaaccaacaaaataaaaaccaaagagaacacatcctagacattgtccccatcgtcttcttcgtcgtcgatgtcctccttcccatcaacaatctcttcctcgtcaagtagttcaccgtccttcacatctttaaacgggtcaaaaagacttaagtcaagaccctcaatgcagaactcggcttgcctaacagccttgaaaaaccccttctcgtgctgctccacggcttccttttaaaacaataatatctcctgctcaaatacttcactgttttatc

SEQ ID NO: 198764 - DNA, 456 bp, Glycine max
  unsure (1)..(456): unsure at all n locations
agctnttcgattcattctatgcacccatggtggtccacattgngtttcgcgcatttttttattctcgttntgtttactttttataccccctgttgacgtgcttaagccattttacttaagtcatttctcgcttaacttaaaaataaaatcaatttccaccgaacgtttgaattgtattatccgttaacttcggtaaaaatgaattccgaccgttcggtcgtgccgtaaccacgttggaaatcaaaaagaggtaaaaaataatataataatcaaaaaaacatctttctagtaaaataaagcggaaaatcaatcggacgttttctctttgggatttctcattcttaatcgaattgattaataactaagtgaaactaaggctaaaatcaattctgctagtcaagctcgtccacaaaaataggcttttgaagttggtcatttcatctctcactaagaaaa

SEQ ID NO: 198765 - DNA, 437 bp, Glycine max
tctccgaagggcatggctatttgcagtgtagctcaacatatctgacaatctcaccagatgacgatctctttctctcttggaaggtaccacacgatatggtacttccacatcttcatccacagcttttcactcctactcttctttgcattcttattattttttcttctttttcatttttttcattctctgtttctttttctacttctttttatttttctcggtccttcaattctttattcttgaccattatttgttcctctttgtcttgattactttcacctctcacctcatttttcttgccatcagtacctcttttgcagcaattttctttttatgcacaacactatactcatcctcagcttcacaaacctttatttcatgcatcacagtttgcattcctccttggatttattctgaattgccacaaactgtggatg

SEQ ID NO: 198766 - DNA, 213 bp, Glycine max
  unsure (1)..(213): unsure at all n locations
gggatcctaatagtcacctgcggcatgcaagctngaacagtaaagagaatatatgattatataaaancnctggccctaaacgtgtagaatctgataaaaatttatccctggcggataacaattcaaattttaagccctgaaaatataaaataaatgtgaaaaattcttcttctacatttataaaaaaaacctcgcgacacatttaggatgaat

SEQ ID NO: 198767 - DNA, 375 bp, Glycine max
  unsure (1)..(375): unsure at all n locations
gacaaaatcatcactgaatagattatatggaaagatgaaattattctttactttcatctttcattctcttgcgatctaacagttaaagatgacttattagaatcatataattgcgaggaaataaatgattaacacattactaaattataattaactattatcttaagaaatacaccgttgtctaagatactacaaactanaaacaagcatgtatattttaataaatacttatcaagtttgctgatgtacacacanttagttaaaatatgttaacaaattattactaatgagtagagattatattgtctcttctgacgtattccaactaataaaaccaatggtgattatcaaattctatatgatagatattgacac

SEQ ID NO: 198768 - DNA, 242 bp, Glycine max
  unsure (1)..(242): unsure at all n locations
agcttgacaaaaacaaggtcaccaatgactaagtgtctttcaaatctatgcttatcagtaagtttcttcatacaactttgagctttctgtaaatgaaactttagaactctaatcatttcctccctcttgctaaggcttcgatccaccaaagcaaccttggatttaccaagaaggtaaggcaatgaaatgggaagaggatggctatatacaatttcataaggagtagcctangcaaaagtatg

SEQ ID NO: 198769 - DNA, 425 bp, Glycine max
  unsure (1)..(425): unsure at all n locations
cggattgacttgaatgagtgtaaacatgtattgagaagcagatcacagccttgctnatatagactcttaatgtatggccaaaaggaccatttagaagagatataactcttagaataacttaaaaccaatttgaaaaagtcaaaatccttttgaagagttacatcttttgattttattcagaaacaatcactgtgaatcgattaccaatacagtgtaatccattacacaaagcttttatgtgaaaggatgtgactcttcacatgtgaatttgaatttcaatgttcaaaggcactggtaatcgattaccaaaacattgtaatcgattacagcctttttgaattaattggaaagttgtaaatctatttgaaacttgttcaaacaattttgctctggaatcattacacaatttggtatcgagtaccaac

SEQ ID NO: 198770 - DNA, 324 bp, Glycine max
cccgccaccttagagacacctgctgcatgcaagctagacagacttgcagctgtcgcacccgtcttttttaccaccctcgacactaaacgacacttatctatgctcggtgactcgacagactcgtgaacttactacttgtcaaggctactacccttgacactaaacaacctctttcgacaacaagctggctcacagcttgggaggcttatgtactggccaaggttcacacaatggacttgaccaatgacgtggcactccaatgcacacatcatccctctatgtcagacttggcctatgagcaccgacacgtcaccctaaacagtc

SEQ ID NO: 198771 - DNA, 389 bp, Glycine max
tgttcgcacatcattcacgtgtatgatatccactcgacaaggtttgaagtataggagaccttcaatcctataacgcaacatggcggacaaaagtgggcagttaacttgaatggccattattgtcaatgcggaaggtattctgcgtttcactatccatgttcacaaattattgcagcttgtggttacgtgagcatgaactactaccaatatatggatgttgtttacaccaatgagcacatcttaaaagcatactccgcacagtggtggcctcttgggaatgaagcggcaattcctccttctgatgaggcatggacactaatccctgacccaactacaattcgtgcgaaatgtcggccaatatcaacaaggataaagaatctaaccaccga

SEQ ID NO: 198772 - DNA, 268 bp, Glycine max
  unsure (1)..(268): unsure at all n locations
agctntgacaaagctgaagaagatattcttgggagattggtggcgaggtcgtgcctaagtacctcggcgatgacggcgtattgcttctcggtctctccgacactagggcagaggacttatctaatgtagaaaagacacatgggacgacgttgttntattcattggagaaatggcatccagggatcagaatgggtcatcgattggtatggctcctatgctggggcattccgctagcggcatgggacatggagcacatccgcaaggtcgt

SEQ ID NO: 198773 - DNA, 353 bp, Glycine max
gtacactatacaatactaagctatagctgggccacaagcagagagattaacttctatgacaaacaccacgaaaggaaatgacttgctctgttgttactctgcttacacagcagtaaattctaccatgcaccatcggtctatggtacatcaaagcaccaaaagcttcgaccatgatcgaatgaaaagccaacttcatgttccttgttcatcccaatagcccatcaatcctaagccgtataattacttcgagaagcacagaaagagttcagcttcagctgataaacaaaacttgtacgtgccgtaaaaaaattctggtgatgattaccacctttatactcatgctggtgctgatg

SEQ ID NO: 198774 - DNA, 241 bp, Glycine max
atacattccttcttgcctatttgatatttcacaacttgtgcatatgtatgagggtcacaaatggtggacaaggagagtaaatattctgcctgtggcgatgataaatgattgaaggaagtaaattgagaaaagggaaagggtgtaccctgatattaatgtgctccactaaaaagttcgtaaaaattacattgataatcctttcaataaatgggtggattttaattctggtaatattctacaa

SEQ ID NO: 198775 - DNA, 312 bp, Glycine max
tgaacacagccataactgtactgagtcgcatgaccatcaatttctctctggggctttccttaaaaatttacaagacacgtgcatgtggaatcaatcaactccattttacgtacattaatagtttataaaaccccgataatatataacacactcacacaaattactagactatatgagaaaatcaagttagaagttttgtactgcatatgaaatataataagctccgttttgtataagacttgggctgtgcatatactgtcattattatgcataagatggttaattcgtatgtacacgcttgattattctatt

SEQ ID NO: 198776 - DNA, 348 bp, Glycine max
tttggcatcacatttaaacttgatccattgtcgataagtacctttgtgacaacatggtccatacatctcaccgacacatgtaaagccttgttgtgtcctctcccctcaacgggaatctcttcttccgcgaacgcaatataattattgggggttatatgattaacgattccttcgaaaccctccactgagatatcatgggctacatgggcctcgttgaggacctttatcaacagggcacgatgaggctcgaagtttatgagtagttcaagcaacgagatccttgctggagttttattcagttgctcgactaccttaaactcgctttgttggatgaggcgaagaactcat

SEQ ID NO: 198777 - DNA, 384 bp, Glycine max
  unsure (1)..(384): unsure at all n locations
gtgtagaagggaaactttctgcttttattcgttgaccacagagtggcacctggagatatgtcgtgggggtcaggagaccttgnggacgtcaagtggggtgctattgcccaaaaccaagcttgaccaatcccgacccaacccgggcatagtcggtcagtgagaacctgtgatgtacctaaacaggcgagctcctggtagtcaacagataaaaggaacaaagaccacaaagcaaggaggcttgtggtggctggctagctgtgaattttgtgttatatatgggttgtggcctctggtaatcaattaccaaaggtgggtaatcgattacaggcttaaaaatgaagacaggaggctaagatggtctctggtaatcgattaccatggagt

SEQ ID NO: 198778 - DNA, 404 bp, Glycine max
  unsure (1)..(404): unsure at all n locations
agctntatgaatatttgtggttttccaaattttgaaaacttgcgctattcatcttttcattcccttctccctttgccaaaaagaattcgccaaggactaaccgcctgaattctntttgggtctctcttctcccttttccaaaagaacaaaggactaaccacctgaattcttttgtgtctcccttctcccttgtcaaagaattcaaaatgacacagtatgagaattcttttgattctttccattccctaatacaaaagtgttcaaatgactaaccgcctgagaattcttttgtatccccattcacaaagtatcaaaggtttaacagcctgagatctttgtcttaacacattggagggtactcctttgtggtacaagtagagggtacatctacttgggtttgactg

SEQ ID NO: 198779 - DNA, 245 bp, Glycine max
agctttgagccaattcaaacgacaatatttttttacatggatgtctgattgagtcctgtcatatatcgagacgctcgaaattgaatgttgaatctctgagccaatccaaacgacaataactttttactcggatgtctgattgagtcccgtaatataccaaaacttctaaaattgaatgttgaacctctgagctaattcaaacgacaataacttttaactcggatgtctgatgagaccctgatata

SEQ ID NO: 198780 - DNA, 360 bp, Glycine max
  unsure (1)..(360): unsure at all n locations
catgcaagcttctagccaaatggacttaccttgattttatttttttgatagcccttttgagccttgtttccctttccttgttttgaagctcactacaagccttaagtgaaaaaccatgatatcaccatatccttaaggaattttggagctttggaattgttttgggaataagtgtgggggtttttgtttcattggataacatgttttgttggccatgcttcatgatatattntgagccatacttgatatacattgcatattggttaaatgttggacatgctgaatatgatgttgtttctcacaaggctacagagtaaaaaaaatatctaataagaaaaagaaaaaccgtaaagttgagtg

SEQ ID NO: 198781 - DNA, 439 bp, Glycine max
  unsure (1)..(439): unsure at all n locations
gcttcaaatctccccttttgatgatgacatcttattatcttgagaatacatacaagttgtgttctattgttcacccatctctttctccccctttctttttgaattcatgcttaattctaaaactttgaaactgtaatatcttgatttctaaaatacccatttttctctccccctttgacaacatcaaaaaggccaaagtgcgtaaaataaaattatacataaataattttaaaacatacacaaaacataattttaataacatattcataaatttcagtcatagacatgtattaacaacataaccaagtttaacacataacaaaaaggcattanaacaaactatttttgagatacatatccactatcttaatcaacataacctttaaacataatcatcaagataaaatatatcataataactctcaaacataatcaaata

SEQ ID NO: 198782 - DNA, 208 bp, Glycine max
ttcaatggccgtaaaaaacaaaagaaggtgagaaggctacacccattacatactgcggcggaattcatggagttctctaacgtacgttgaacacattgaaatgggggcaaaaccttactaaaataacgagggagggattgctgaaaatacaactccatggcggtctgacacattatttgaggaaaaaaaggaaaatgggggcaaggat

SEQ ID NO: 198783 - DNA, 435 bp, Glycine max
actaagcttctgccatcatgtgatgattccttgtaggatccttctctcattgcttcagccaactttcatttgttttcctaatcctgatcttcatccttccaagtttcgcctttcccagtctctattgatttttctccacccacacctgattcttagtattcgtcgcctaggcatgtgggagctctctctcctcaaggcagttaagatggatttcctattagaaattggttccttatgaatatgtttcacatgttgtcttgttttgttggttcccgtttcttggtttgttcacgaacatcattgtatccctaatgagatgtattcaattcatactccagcacactctcatcctccacctcgctgaatcgaacaaagccaaatcttctcccactcttgttccttcttgatgagatgaaagcatcaataactttaccc

SEQ ID NO: 198784 - DNA, 294 bp, Glycine max
  unsure (1)..(294): unsure at all n locations
agctgangctgacacatgtacaaagatctcttaatctttcagcaaaaccagccacagcagaatagttatgacctctccatcgacacatataatccctaatggaggactcaccctaatctcagatgtgttagccctcaccaacaataacaccagactgctccttacttccaaaacgtgtgtggtacaactaaaccatacgttcctcctccagtgttctacaacaacaacagctacatgaacacaggcgacaatccactactgaagccgctcctcaaccttcataggaagaattat

SEQ ID NO: 198785 - DNA, 462 bp, Glycine max
ttgaagtactaacattaaagaaagcaatattcgtttgtgtctttttgtattccattccttggtatttgacgttgaaactacctttgaacagtaatttccagattaaattattagatattatgcatcaattgtacactttattataaacatataagcacagtgatttggagaatattgcttgccatagaaccttatctgcagctgaagttcagaccaagagagcattacagcaacagttgtgggacactgcaagtgcctatgaatcccttctgagacagaagtccagggccaagtggatcaaggagggggatggaattccgcttattttcacaaggtcattaatttcagaagatgctcagatgctgttcatggaggtttcattgatggtgtatgagtccagcaacctcatcttgtaagagtgcgatgcttatgttcttccaagaaagaattactgaacagaat

SEQ ID NO: 198786 - DNA, 462 bp, Glycine max
agctttaaaattcctaaaaaatcacaatttaattttctttattatgacatttgtctttacaaagccatgcacacattttttctccaaagtcttccacaaaacatctcttaggacatgactataaacctttccaaaatcaacaaaaaccatacacaagtctctttccttacttttgtggttttccatacacttccttataagataaatggcttatgttgtagacatcccttgcataaaatcaaattgattctctacaatccttgtttctattcttaatctatgcccaatcactttttcccatagcttcatagtatgactcataagttttataactctataatcaacacaattttgaatatcttcgttgttcttgaaaattaagactaatgtactcttccttccactcattggcatcttcttagatctcaaaatcccattgaaaagcttaatgagcgacatgaa

SEQ ID NO: 198787 - DNA, 464 bp, Glycine max
  unsure (1)..(464): unsure at all n locations
ctcatggtcgaccatgataaccctcttcagtctctaaaattaatgtatcacggtagtatggtacaactaagactaaaaacgtgccatatatgattgaggaaagttgtttgcagtacatatatagcttgacttttttggtacctagttttcaaatttcattttttgactctccaatatataataggggtttattcacacatatgtatcacttaataacttcttgcaaaatacaaatttaacatatctaattntgttaaattttgtgatattattcaaatcatcatatactaaatttgaataaattaaacatgataaatgtgtaatcagtttttataatttcaaccacatggtcctatttgtttaaactnttaaaagaacaattatgagaagtacactttttttaataaaagtgttnttaataatccgatagaaatacttctntaaaaaagtgaaaaaaatttaac

SEQ ID NO: 198788 - DNA, 325 bp, Glycine max
agcttgactgcactttagatggagaagaaaagttttgctttgatataccaccggggagagcattctataggccttatccttaccactcatatcggtcttaggccggtgggatatcggtgaacggatggcatactaatctttattgtgcacatgcgactcatgcttgctactctaatagtgcttattgcactatacttctgctattcaggatatctcagagatactgattgtgaaaaacaagccaatgccttgcctaaagggcttaatagaaaggtgagaactccggttttcccatacccctggactctattgagtgataaccata

SEQ ID NO: 198789 - DNA, 173 bp, Glycine max
actaagctgcgtatgcgtcgcctatcactgaggtggagcgacctcttctatggcttatatcgtagaggatagcgcctccacataactcttagacatggactgcaggttgatctccaaggttgagacacacctgtaaatgaccctataggacctcttctgtctatgcgccattt

SEQ ID NO: 198790 - DNA, 390 bp, Glycine max
  unsure (1)..(390): unsure at all n locations
tcattatatgagtcattctaaaatacttgattggaactagagctcacttacatccccatgattcaagcaaagtataagatttattntacttgaatttattaatgcctttatgtcctcacttggacataaatatacagcagaaaaatgccatgagggtgtagttactagactcaatattgagaacaaaacaaataataattaaacatataatgatttattaatgagattgcagtttcaattttaaataataataaaaaaaattctcttttatctcttaggtctttttctcctcgaccaatcaggcatttaagtattaagaaaacaacaactaatggtaggccacgtgggtccatactcatcaactagtatcttacttttggatagacttat

SEQ ID NO: 198791 - DNA, 283 bp, Glycine max
tctctcctcttctcctttatcttccgctacaactccatggctaaaaatcaccattgaaggacctaattgaagctcaaagatctagcctccatagaagcttctcaagcaagcttccatcaggctttggctcatattggagaaactattcatgatgaaatcaatctgcaacaagttgcttctgaaatgacatttgtttctcctccaaatgagggaaggtacaccactaaagggacatcttgatgagctaaactctattctaatggagttacgcaacattaatatc

SEQ ID NO: 198792 - DNA, 195 bp, Glycine max
tctagccaaatggacttaccttgaattaattcctttgattgcttctttgagcctattttcccctttctttgttttgaagctcattacaagccttaagtgaaaaaaccatgatatcaccttacccttaaggaattttggagctttggaattgttttgggaataagctgggaataagtgtgtgtggggggggggggg

SEQ ID NO: 198793 - DNA, 376 bp, Glycine max
  unsure (1)..(376): unsure at all n locations
agctntataagcgcgggttcgggatacattatgttagcgttagcgatatgcgaagatggtattccgagtactttggatttggtacgaccatgccctcctgatttccagctgggaaattggcgagtggaggaacgccccggcatttacgcaacaagcataatgtaaacctttacggttttaaaagctctatagttgggcctaggctttagagttttttccttttgttaaggctttgtgtcttttgtttttgaatttataatacaaggatctttcttcatctggtcctggtctctacccattctcattcatttgcatgtttacttctttttctgaaacggcagatccgatgacgagtcccccgaaggtactaatacct

SEQ ID NO: 198794 - DNA, 388 bp, Glycine max
tgacttgtcggagtcatcaagcatacaccttgtatttcattattctctactcaagccatatctaccattcaccactcagcaggaggcccctctcagtctgccacccttgtcagaagaacaccaacccctcattactcctctggtcatccttgacactaagtggactcaattaagggaggacaaggacttacttgtcctcgtgcaatgggctagcttgctgccgaaagatacatcatgggagccttgggcacaattaaaggccgaatataaccttgaggacaaggttattttggaagtgctaggggatgtaagtgtagaaaaacacaagcagaaaaggcagcagaagcagacatagagcaacaagcagctaggaagcaacaggggaatg

SEQ ID NO: 198795 - DNA, 355 bp, Glycine max
  unsure (1)..(355): unsure at all n locations
aactttgagctaaaaaccagactttccttaatttngtcccacggcgagaatgccaatccttaccctccgatgctaaaaacagacacgacggaaaattctccattcaaagagtgggagaaagcttttccaaatgaacggaaactccccactcatatattgggatactgttttggggattaatacaattgcttaaaagctcctgatcacggatcgaaaaaaaccctatgaaatgagcagataggtctctgtaccatacattatctgatccttacactattgccacccaatgatctaaataagatggaaagggaacctccacctaaaatagccttctccctttgatactaaccaatat

SEQ ID NO: 198796 - DNA, 337 bp, Glycine max
agtttccaccaaagaactaagctagccaagtggtgtgttgtctctcttttcaaacatggtcttgtatatgcagaactcgaatctgagatgctggttaatggatctaaactccgtgtcactggagccaacataatgccggatgagattcatgtgggatagatatgcctaaagggaaaagattactaggaatgattgagataatatatgaacatctattaattaagatagtaaatgttattgaacaaattaagcacgtttaagtatacatgagttatatctggaatatgagtagttgctcctatctagcacctgtgtagcagatagcctgagacatgtc

SEQ ID NO: 198797 - DNA, 462 bp, Glycine max
  unsure (1)..(462): unsure at all n locations
agcttctagtttcggaaacttagactaattctctttagncnataaangncatacttaaaatgataaatcatagcctactacatagatatatttatgatggagtagtaaatctatgctttactgtgtgcaatactctcccggagagttatatatgattatgtgaagtgtctggagtaggaggaatgacattgtgtgggaggggacataactgttgaaatggattgtcaatctgttgtcaatagagtttacaatggacatactgatttctctgaatttggtgttactattcagcagtgtcgtttattgttgcaaagcttaccaaactttaaaatttgtttgtaaggaaagagaccgactctcttcctcatagtattgctagggcattcacttcttatgccgcgccccatttctattctgagtttccttcttgtattgctgccaatattgagttagcaataatat

SEQ ID NO: 198798 - DNA, 461 bp, Glycine max
  unsure (1)..(461): unsure at all n locations
tcttccagtggccaatgcactgtgactgtccaaatgtttcggctttttccaattgccaaagcaagaacatttcactgtttcagaccatgcttatatgggattgagagtctaaaaattcttgttggtttatggcccgtgactctaggctataaaatgtttgctaccagacaacgaaaacattatgagtagcacactttccccttccaaataaagcattgaatctctcaagagtagtaaatacaagaagaaaaaaccaactctttttgacaacttaaggctatcccctcaaaaaatcatagtcacagccaaaaaaatgtcctattaggagagattctttcatatgaacagggtttatcacgtgacacttgatcaaaccgtgtacacctgttatacgttacacacagctactagttntacatannatattgtgataattaatttcacgttcctttgacccttac

SEQ ID NO: 198799 - DNA, 424 bp, Glycine max
  unsure (1)..(424): unsure at all n locations
ctttaacatcaatattcatgcacccaaggctggtttaattatttcatggctcccttcgctatggtaggttatttcatgattactctggtgctttcttangaggatatgttttatatgtgggtatctttctttctttacaactgaactagagggagttgttttggctatttctatagctcattccaaaggttagggcaagctttggctggaggtggattcccttttagtcctcaaggcttttagtgttatcaatgtggctccttangatttaagaaatgtctggatgaatactttattctattgtggcccaatggagtttcgtgtctcccatattttctgagatagtaatgtatgcgctgatcatttggctaactatggtgtagagatactctattatgttggaagatnaactctgaatttggat

SEQ ID NO: 198800 - DNA, 318 bp, Glycine max
agcttccatcgcgacccatttatttatttttatctttacaccaatggccttttctaaatacgtaatcaataatgacaacccgatcagattttaagtgagccttcgaatgtagggtttgtttttttttttgaacacccaaactaatgtattttatactttaattactgtgaaattaacttcataaaataatttttctcaaataccaatagtgacacattgatttttaaacaataatgttaggttcattaacaaattacttgtacataattatttgaaaaggagttaactatataaatttacaacggtacgaattaaaaa

SEQ ID NO: 198801 - DNA, 466 bp, Glycine max
  unsure (1)..(466): unsure at all n locations
taacaagtggaatcagaggaaagtctctatggcatgcataattactttaattaattctgttttgacagccttgcctttattttatctgtctttcttcaaagctccttcagcagtgttagtgaggctgacttcaatccaaaggaattttttgtggggaggaggtgctgaagggaaaaagatcgcttggatggcttgggatcatatatgtactcctagaaatcaaggaggtttgggtatcaaagctatcaaggatcttaatagagcccttcttattaaatggaagtggctgatgttccaccaatcaaccaattgtggtgcagaatcctcatctcanaatacaaaggatggagagggttggaagagaattcccacaggcagtctcattccttttggtggtcggatttgaaggctgttntactccatagcagcatggatggggttcgtaaccagaataaatggaagctcg

SEQ ID NO: 198802 - DNA, 358 bp, Glycine max
  unsure (1)..(358): unsure at all n locations
agctagagttgtactntcaatagttgatttgattatatatctgcaggaagttgctgcgctcaaagtctctagatgaagcaacaactagaagaatttgaagtacaccttgatcacattgctctaaaatgtgacaacacaagtgctatcagcctaacaaaaaaaaccttgtcatgcattctaggactaagcacatagaaataaggcatcattttcttaatgaacatgtgttaaaaggtgaattttgcattgagttcattgataagaagcataaactagcagacattttgactaaacctcttgctagagataagttatttttcatttgaaatgaactacgcatattggatgcatctagcat

SEQ ID NO: 198803 - DNA, 308 bp, Glycine max
  unsure (1)..(308): unsure at all n locations
tcgactnttactcgaaggtctctccttgtctcgcaaattctttntttccgctagttgcagcatcttctggattggaaatatcgcttgttgcgtattctctttcaccgaacatgaaacattaactggtatagattaactattttgcatcttattatgctntgcttgcgccattgatgttgaaactccaatcatattgtttaaactttgaagacttattacggagtaaagatcgactatgaatttggggcaatcatttgttccaaaaaatactgagcgtcaaagttaacttgtaggtcaaaagtttagta

SEQ ID NO: 198804 - DNA, 432 bp, Glycine max
  unsure (1)..(432): unsure at all n locations
agcttcatgatgatgaatcaagtatgatttatgtagttntgatgatgacaaaaagcccacaagaatgatgtcaagattgagtcaacaagttcaagatcaagattaaagagaatacatcaagaagaatcaagattcaagagaagatgatttcaatattcaagagaagaaaccaataagcaacgggtcaagacttcacaagggaagtattgaaaaagatttttcaaaaaccaaacatagcacaattttgttttacaagaaaagttttctcaaatttttctaaattaccagagtatttactctctggtaaacaattaccaattacctgtaatcgattaccaatggtaaagtttgatttcaaaagcttttcaactaaattgcaacgttccatatgttttttaaatagtgtaatcgactacaatatattggtaatcg

SEQ ID NO: 198805 - DNA, 355 bp, Glycine max
actcaagcctttctttctcaatcaacatgtctattgactaacaattcttatttgctgttcacattcttgttctttctttctctaacatacatacttgctcaaacttatgaaaagaaacacaaactccatcacaatcatgcattcaatccaaaatcaattcataacaccaattttcacaaaaagataaaaatgttacactgcataatcatccaagtcaagttaaactgttccatatgcttcaaaacatgcatactaactatccatagaagaaaaagaacagaagtgtatataaacattaaccaaaataactaagacactggtccttaaaatattattatattaaaaatattccaaa

SEQ ID NO: 198806 - DNA, 420 bp, Glycine max
  unsure (1)..(420): unsure at all n locations
agctngncgttagtgttagtcgaagagtatgattttatttttgtgtataaaacctgtgtatattgtatcaaactttcccaatttatggttgttttgtaatactataagtactttttgtaaatataggtaatagataatttatacttttgttttgtgcgtttaataatcaatttctctcaatttcaggttaaataggcaactttggcaaagtgttgtttttcactcttttgctaagccaagctgctggcttaacgagaattcgctaagcgcaaccttcagcggctaagcgcgaggaataatccataaaaagatgagctgtcaagttcgttaagcgcaccgttccaggtcatcaagtgcactgcttcagcttatccgctaagtgaaacaagcgtgctaagccaaaattcacttatgcgcgct

SEQ ID NO: 198807 - DNA, 465 bp, Glycine max
  unsure (1)..(465): unsure at all n locations
ntaattacgggtctctgtcagttctacggagtgcctgttactctctcatgggcatcangccccttactaatcgagctttcatcaagaagtactacgtccccaggcaggcgcacggcgaaacaccacagcagcctgcggatggccagcagcgggcaacagacgcatcaccatcacctctagagttcagctcagctcatccacaaaaaggttagagcattgcttacgacccatgtccgaccaataggcgaccaagtccaaagccaaaggtaagcaaagtactatgtccgtgaccgacaagccatcaagcgtccgctcaagacgttaaaaaagcgctactacgaggcaacctagtacctgttaaatctctgcttgtatttgatcactttttgtttctcaagtcatagcaggacacacctagttgctcatgatcctacgaatttaaataaaacaagcacaagctcggga

SEQ ID NO: 198808 - DNA, 445 bp, Glycine max
  unsure (1)..(445): unsure at all n locations
agcttgtagaattcaccccaaatttcggttttatatgctaacttgctcccatatctacttgataatgcaatggtagtcataacccctgccagggttcctcaacctccatttttctgaggatacgactcgaacgcaacatgtgcatatcatggaggagttctgggacattccattgaacactgtatgacctcgaagcgtaaggtgcaaagtctgattgatacgggctggctgaaatttgagaatcacttgtgaatcctagcattgacaagcgacaccatacatggggcaattttgaaagctgttgttagatgtctctaatgactcatcaggattttcaagtttatgtcattattgtaaaccacagttacaatgctaaatgaaataaatttgacatctttgtccatcatcctctcgtaattacatattngcttccactggaatgtgg

SEQ ID NO: 198809 - DNA, 460 bp, Glycine max
cggcattggagaggttccatcaaccgccctaattccttgatgttggtggtatctaagcttttaaccttgacttggtagaacctcttgctggtttgatttattcccatgcttgctaaagtgagacaaaagctggtgcaaatcaaaactccgatatctcatgggtggaatggatgaatgcatgaaggaatgcatataacacagatgcaatctatgaatgtgggggtccggggaattcgtccccttcttagacacaacgtctaggggtagcaaagtgccccaacgtacgtttttaagaaggcgacgcggaccctcgttggtttgtttacaaaagggatcaagacagaacccatatgcgatgcctatgcaaaagacacaatgcgggaatgtacacagtatgacaatattcactgaacataagcaaaaggttatatgatacttatgcatggcagtgtgaaaaatg

SEQ ID NO: 198810 - DNA, 458 bp, Glycine max
  unsure (1)..(458): unsure at all n locations
agcttgtaggccacttctccgactcggtattttttngttacggtccaaaataacgaggtgagactttgggattaatacggcaagccactgtcttagcatgtgagtttggtcctaactcaactccaaaagctatctcaaggggtaagggttgaccctcacttatatactctaacttggctttatctttagtcgatgtgggacttggctttttcccaatacactccctcacgcccagtacttcttgggctgggtgcgtagataacatggagggtgaccctttgaattaatcttggatatactctgatatcatcttatattctttagaaagtgagtttaggcctaactcaaccccaaaaacaaggggtgaggcgtgcccctcacttatatactctaacttggctcagctctgcatcctgctgaatctagttgccaagggtaagaaaatccacccataatgg

SEQ ID NO: 198811 - DNA, 444 bp, Glycine max
  unsure (1)..(444): unsure at all n locations
gttcagcccgtggctgaccctgatcctctntccttctttatctccccttcaaaaagaaccttgtcctcaaggtaaattctggaaattgctgttgaatgcacttttttttatcaacaaaagtatgtatatatattattgaaaatgattgatgattgttagcagtaccacaggtactatttctgtacatactatcatgctattaccatcactgttccgttttgggattcaaatatattctgaatgcagtatatattagagtaccaaaacactgtgatgaagagcatgataaatcccacccacaaaagacctatccccctccacacaaaagcccagctntagtattgctggtccatacgtgataaggtatttcaaaatcctttccatgttgttcagccacaaccaacaaaagtaaatcaccttcacacaaaagcccagctttagtat

SEQ ID NO: 198812 - DNA, 463 bp, Glycine max
  unsure (1)..(463): unsure at all n locations
agcttgtaggattatggggtacccttctcttgtggtactaggtggcggtcgggcgatggtgcacaacaagttttccacatccacaatgcgcgcataaacccaccatcccctgttgcccacctccaactgagctcacgtactcccacgtagcccatatcctcgtttctctcaacaccgggtccccatcaatcctcccaagcgttcccaacatcaaagtaatacaacattcacacagcataagctatcacagccaagtaaaacagggcaaaggcagaaaactctgctcaaaacaccaaccaaaatcacagcttttctcacttaaagaccccagtaacaattccttcgatccaattcgttaaccgtttgatcgactccaaaattttactggaagtctatagtacatatgcctacagttngaccgttgggatctactagaaaacatccagaactcattctgtactac

SEQ ID NO: 198813 - DNA, 475 bp, Glycine max
  unsure (1)..(475): unsure at all n locations
ttgcgagattcctcacggaaaacgttacggaaacgtttcttatgcgcctcggcttagattttcttcacggaaacaatttttccaagcaaatttgaaagagagagaagtgcctaaggggctggaccctttccttcttcacttcctcccctatttatagcaaaataggggaggtggttgccgcccagctcgcccaggcgagctcagctcgcccgggcgagcagggttgcttcctccagaagcaaccgccttctggaggaatattccagagggcccaagtgggcctgggtgctatttgcacccccatttttactaagacacccccctctgctagtttttggtgattctttnttcgtaaagttacggaaacttacgaatttcgtaacgataccttgtttctttccgtaatgttacggaaccttgcggatacataatcatccccctttgacttacngaatgttacggaacctcacttaat

SEQ ID NO: 198814 - DNA, 439 bp, Glycine max
agcttgtcaaatatacttatgaattcttttctgtttagaaattcaaattcatcgagtaatgaggaattggccttttgtattaaatttaacctatattggcaatgtttttcactaatgaaaacaaaacaaataaataaaataacaattttttaatcagtaaaaagtagatgtaaattggtacaagggtaacaaaacccatatacaaaacttgtgaaaccacacaccctactgtccacttcactggttatttaatattttgctcaacacagagagaaaaaatattttccttcataataaaaagttaacgtcttattattatttatttgtaattattttttaaaaaataaattaaaagaaaacgaacaataggataaaaatctgtggaatttatcccagattctatcccgataattgtgaaaatcatctcaccataactaaa

SEQ ID NO: 198815 - DNA, 371 bp, Glycine max
  unsure (1)..(371): unsure at all n locations
tgttcgcacatcgttcgcgtgtatgacatccactttatatgtttgttgtanaggagaccttcaatcctattatgcaacgtgacgaacaaaagtgggcagttaacttgaatggtcattattgtcaatgcggaaggtattctgcgattcactatccatgttcacatattattgcagcttgtggttacgtgagcctgaactactaccaatatatagatgtngttcatacaaatgagcacatcttanaatcttactccgcacaatggtggcctcttgggaatgaagcggctattcctccttctaatgacgcatggaacttatccttgacccaactacaatccgtgcaaaaggtcgactaaaatcaacaaggataa

SEQ ID NO: 198816 - DNA, 388 bp, Glycine max
  unsure (1)..(388): unsure at all n locations
agcttcctttacaacgaagagaagtgatttatgttcgatngaagaaatacaagtagggggaatatctcctccacctctacaacctcacaatcactcacaaactcatctcatgctctcaggatggcttcctcttcaagctcagttctctgccagtcttcacacaacaaaagctctcaaaactctctggaacttggacctttctctctctagaaatctctaaaaatgcagaagctcaaggaaaagcccaaaaatccctctccatttctgatttcaagcttaaataggtggtctcattggtgctctcacgcttagcgcgactctggctcgcttagtgcatataagtgaatttcggattaccgcgcgtcttctcgcttagcggatgcatgca

SEQ ID NO: 198817 - DNA, 468 bp, Glycine max
  unsure (1)..(468): unsure at all n locations
tgtgagtgtgatcatccacactcctcaaccttccagcttggggtaataatacactagaactctggctaaggagattgagtatcactatctagtgttacataaaagatcagttaaaaaagactaaaaacaatgatgaatattaatataagaacaatgatgaattatttgcatcattgaggatgaaagactaaaaaattaagtgtatgatattaatataagaaatatatatgactaaaatatcacatgtaagatacaagatcagttaaaaaagataactaattaaaaacaacatgacaagctactaaggaagaaatgaccaccaaaaatgctaatttagatatccaattatatataatatgaatctgtttgggtttgtcctaaaaatataaattaattcttctttacagaatntattttctttcatttacctacatctttttttcccagtctaaatatggaggagaggga

SEQ ID NO: 198818 - DNA, 370 bp, Glycine max
  unsure (1)..(370): unsure at all n locations
agcttatgaacccaaacttgcagtttattttttttaatcacgcncanggctaggaagccaaaatttggttttagaattacaaaaacatgaaaattaggacttgcttgtgagagtttttgctcgagtttgggctgccccatgtttgatactttacatagaggtagcgtggaaaaagccttgcaatattatgtatacataggtaaatataaggagcatgaaattcctagcaaagtgtgaatgattgtcatcctaaataaatgtatgatagcacgggattcccttttgaatgcaagtatgtgcataatgtaaatatcttgccaatatgcataagtgtgagtgaaacaatgaaagtttgatggttatatatttc

SEQ ID NO: 198819 - DNA, 440 bp, Glycine max
  unsure (1)..(440): unsure at all n locations
ntataagtgcgggtctgggagacgaaggtcaagtgttctttatatgtgaagatgatgttccaagtactttggatttggtccgaccatgccctcctgatttccagctaggaaattggcgagtggaggaacgccccggcatttacgcaacaagcataatgtaaacctttacggttttaaaagctctatagttgggcctaggctttagagttttcattttgttaaggctttgtgtcttttgtttttgaatttataatacaaggatctttcttcatctgttcctggtctctacccattctcattcatttgcagtttccttctttttctaaaaaatggcagattcgatgacaagtcccncgaaggtactaatacctgtgacccgtctatcaacttcgagcaagaaatgaatcaaacggaagatgaaggagatgangatgtgggac

SEQ ID NO: 198820 - DNA, 388 bp, Glycine max
  unsure (1)..(388): unsure at all n locations
agctttgtataatctgagatactattcttttattctccagancgaatnnataaaaccatctttcttaaataattgaggttcataatcattagtttttttttaaatgatatatgaacagtgcagcttttttgtcttggttataattgcattgatccataccacttggttacgagcttgcttaaaaatttcaataattatgagctacttgatattattgtgtaatttttttgaaactgattgcgaggacactgtcagcaactcagcatatattcttcttcttttttcattaactatcagcatatattctatattttcaaattttaggggacgatatataatagtttgatattttgatcatagtctttatgtgcagtgatttatatacatg

SEQ ID NO: 198821 - DNA, 455 bp, Glycine max
  unsure (1)..(455): unsure at all n locations
actaccctctctaatntctnttattattccgaattggaaatgtattttaccttgaaaaaggttttcaatcttatccacatttattttttctcacaaatcggcattagcacgaactttggcaaagattttagactttgctaaatttcattttgttaaacattggcatttggatgatctttagaaagcttccaagtctgtataggaacaacctttagaaaggttttaacttagctaaatttattttattattccaattggcaatggaatgaaccttggcaaaggtttttcaacttatccacatttctttctttctcacaaacagcattagcatgaactttggcacagaattttagacttggctaaattntgttttcttaagcatcagcatttggatgatctttagcaagcctttgtacttggccatattttcgatccttttgtatttaagaatcgac

SEQ ID NO: 198822 - DNA, 212 bp, Glycine max
tgccacacttgatgcctactgaggactctactggattgtactaaattgcttaagcatccactgcctcacaaatctcaggcagtatgatgaccaaaccgtgatgtgaataaacatcgataatggtgatgaaaatacattcctttcctacagacctaaaatcataacgttcacacatctcagtatgcacaatttctagaaactgagagcttctt

SEQ ID NO: 198823 - DNA, 106 bp, Glycine max
ccattgtcatatcagtcgcaccaacacgatatactttcgtagtgcacactttacacggcactccatggaattttatacacaatctttcaccgaacccggttgtgac

SEQ ID NO: 198824 - DNA, 467 bp, Glycine max
  unsure (1)..(467): unsure at all n locations
agcttcaacctccagaatgttctatagtgttattttattctttctggagagtccacttgctctttgatagttgtcacacctctgaacatattcataagcatccttgtgcaaggtaggccaataaaaactagattgaaggaccttggcagtagtcctctctccatcgtaattgccttcacaatgtgaactatggcaatgccacaatatgcttcttgcctccccctaagttacacatcttctcaagagattatctgctccaattttaaaaagattgggatccccccacacaaaatatttagtgtccttgacaaacttctttttttggtaccaagtgagatcatcaggaaatgcaccaattgctttgaaactagtcatctcagcaaaccatggcctttctacaatgttgaatagctnttcatcaagaaactcttctttgaatttaagaccttctgtggtcacctcatcat

SEQ ID NO: 198825 - DNA, 456 bp, Glycine max
  unsure (1)..(456): unsure at all n locations
actataatactaagctattatatagttctaataatntaagagtttgcattattttccgtttgttaaaagttatagctagctatctaacatgcagaaagttaatctgatatattttgaggactagtttgaattgtacttcggtgattaattacaacctagtccaaagtctaaaatttttataatttacaatatataatattcataaaaaactatatacataatgttaatattgctatattatactcacaaatcagattaactcaaatttgttccgtatattntaagtattaattaggttgagttcgagttcaaattaataaataactataaaatttctagtcaaatagaattaaagataaacttatcccacaacacccctacaacctaccctcccatattcttangaaacatattagataaggtacaaaacttttctttttttaaaaaaaatgacaa

SEQ ID NO: 198826 - DNA, 418 bp, Glycine max
  unsure (1)..(418): unsure at all n locations
agctttgaagtcttgaaaaagttatgtttngtatctttanaaaataagttctttacatcagttatttagaactttcaactgatgttgaaagtaccgacgttgaaagtgttatcattaacatcgatttttccaaaccaatgttaacgtaaaataacaacatcggttatttaaataaccgatgttatataataaaaaattacacaaaaaaaggtatatatgttcataccagcgttggcagttaacatcggtttttgtagaaagatgatgttaactgccaacgttaacatcagttttttaaataaccgatgttgtcatcataggttaaaaaaccgatgttgtttgtgtaagttaacatcggtattttaaaaaaccgatgttgttattaggaatttttttcaatacactgtcctgtttttta

SEQ ID NO: 198827 - DNA, 474 bp, Glycine max
  unsure (1)..(474): unsure at all n locations
cgggcagtcctcactttacaagccaatgtggggcttagttatgccctaagcccaaattttaagactttgcaatgccacagacttttgctttatagtttatttctattataagaatcataacaggactgaaatcatattatctcctcacatcagtagaacacaatttttaaatactccattcttccaaatgtgtaactaacagtatataacatgtgcaatgtagtacataacatgtacaacactgcataaatcacatatcagttaggtcagaacaagaacctacaaaataaatatgcaataaaatactcacttgcactaggatgttgatcacagcctataaagtagccagcaccaaatctacttactntaaaaataagtgtgccttccatacaactganacaagttcaatcaaaacatatcaaggggaaatctgaccaacanactcagaaccatataatgaatgcatcaacatca

SEQ ID NO: 198828 - DNA, 408 bp, Glycine max
  unsure (1)..(408): unsure at all n locations
agcttgtgcattgaaagtgttgaccgtnttcntattatgtactccataagggaactgaggtcatgcgacatggaagattcaggtgggtcaccagctcttgttggatgaaattgtgggtgcttccgctatccaccagcaccatgacctggtggccgaaaagcgagcccaacatacgtagtgtttttggtgcgagctgacccgccaaagaatgaaaacttatttgggtcgggcacaggtcaagggagtccacttggcctggcgggtcggggggcgggtcattcaacactatatgagggtcagggttctcgtcctcttctgcgatcagaagaaaaaccctagaggcacaatggtggcctctatgaaatttctcgtcgtaattgaagtagaggtcgccctcccggcgggatg

SEQ ID NO: 198829 - DNA, 469 bp, Glycine max
  unsure (1)..(469): unsure at all n locations
ntacaaattatacagctgataatatccctattgcacatttctttcttaattactagatttctaacaatatacatcaaatagttaactagattntgttatactttctttctggtggcagatgtgtgctaggacttggggcaagtgccctctctaccttaaaatttcttttggaatatgcattattggtccactacatattttaaattgccctcactaatcaataagttatataaacatggaaaaaaaaattctgttacctgcaaactacaagataaaaagttatattgttttgaaccccagacctaagaacccccttactcttttgtctattttgcttttggtatgtgagagtcattgccatgaaataattgtgtcctcgatccattcaccacctaacctaacctctgtcacttgagcatgcctagataactcaattatatatacctttttatgtaaagggaactctgct

SEQ ID NO: 198830 - DNA, 455 bp, Glycine max
agcttcacattgagctacatcaatatgctttgttttttgggaactatatcacaattaacttcatccttatatgtcccaatagagaaaggtactttcacttgttggttaactatcatttccccttgctcattgagccattggaagtttataaggtttttggtggggaatgatagtgaggttcaacttggaaactacttttgtgctataacaattccaacaagatccactatccacaatgagagaacaagttttatttaaaattttgcatcttgtatgaaagatgttctctctttgggattgagatagatcacaagattgacctccaagaagccttccaaccattaggaggtcacattctttgtgggggtagacttcctctctagactctttaccccttacttcatcttcacttccactagagaaaggggaagaagtagtctcctctttactactat

SEQ ID NO: 198831 - DNA, 460 bp, Glycine max
  unsure (1)..(460): unsure at all n locations
tctccgaagggcatggttatttccagtttcgtagaggtgattttacatcctcaccacttgtatttttgcaattttcatcttgttcttctctttattgttaagaaggcttcctagtatggaaagctaaaacctctattggatcttccctgtaggtacctgatgtaaatatatttctatctatttaatgatgttttgtgtgttctctangccatatgattttcattccagtatgcctttaccttgatcacgtagatgcatgctttgttagggtcattcaacagtggaaactggtctgactctaaagtccttatagtgcagggctgagttgtcgtgctttcatgaggaatcggngtgcgataagttagttgagtatgtgtgtattaatgcggccctagttgagtttagtcttacaagaggaatctgcggatgatgctcgatcangattangctaaactatcat

SEQ ID NO: 198832 - DNA, 463 bp, Glycine max
agcttgtccacaaaaataggttttagatgtttgttatttcaatttctcactaagtaaaatggatcattttcaaggtccaacgccttaaaatgatcacctcttaaagtaaaaaaagaatcacttgataagaaagaactacgtaggtctgatttcctcatcgcaattgaggaatacgtaggagcaaagggaaacacccttgtcgaccacaaaaagagaaaaatataaaaagggtataaaggatataaggacttaaaagggaacataaaaaatcaaggtcatgtttgcacattcgattaaaggctgccgtcccttgggacggacgtgtggggtgctaataccttccccgtgcgtaaatacaactcccgaaactttcacttaaaagttcgtagatcgcgtcttttccggtttttccgacgttttcctcaaataaacgttggtgggactccgcgcgtattcctttcgt

SEQ ID NO: 198833 - DNA, 412 bp, Glycine max
  unsure (1)..(412): unsure at all n locations
actaagcttgtcgccatcgtcgcgtgttgaatcactcccaatttntttgtgaggagagcttcaaccctataacgcatcatggcggacaaaagtggacagtaaacttgaatgatcgtcattgtcaatgcggaaggtattctgcgctacactatccatgttgacacattattgcagcttgtggttacatgagcatgaactactatcagtatatagatgttgtttatacaaacgagcacatcttaatagcttactccgcacaatggtggcctattggaaatgatacgactattcctccttctgatgacgcgtggacattatccctaacccaactacaattcgtgcgacaggtcggccaaaatcaacaagggtaagatatgatatggattgtgtcgaaccatctgagcactgaaca

SEQ ID NO: 198834 - DNA, 458 bp, Glycine max
  unsure (1)..(458): unsure at all n locations
agctntctaaactagcctatctatttnttagtgtttaagacctgtaattcctaccctaatgtttagaaaaggcaaagaaatggaaagcaataaacctaaattttcaatcaagagaattagcactctgtttacaatgttatcttggaaattttatcaaatgttcaacatctaaagttaaaacgaaactgaaattactcaaacaaatatgaacgaattacttacttgagatagagaaagtgcagaagtgcaaaagaaaagtgatgttgagaggccaaacaagatgaagatgaagttggtatgaagaacaaatggatttttaaatgatttaggtaaagaaaatgaaagaagaataaaaggttagggttgactcttgaaaggttctttgggcgaaaagggtatgtntgaaagaaagagaaatacaattcaaattaaaaagaaggaaaatgttttagttaccc

SEQ ID NO: 198835 - DNA, 461 bp, Glycine max
  unsure (1)..(461): unsure at all n locations
ggacctaagaaactccgctcttattctcatagatgaacatgaatccgcggcctcctcatggactcctctaaggacaatagcatcatttcttgcactgaattgttgggagttggaagccatcttctcaatcaaattcctagcctcggcagaagtcatatcaccaagagctccaccactggcagcatcaatcatactcctctacatgtttttaagtcccttatagaaatattgaagaaggagttgctcataaatctggtggtcagggcagcttgcacacaatttcttgaatctttcccagtactcatacaagctctctccactaagttgcctatgcctgaaatgtcctttctgatggcagtggtcctagatgcaaggaataatttctccaagaacaccctcttaatgtcatcccagctganaatgggtctaggagcaaggtaatatatccaatcttttgtcac

SEQ ID NO: 198836 - DNA, 417 bp, Glycine max
  unsure (1)..(417): unsure at all n locations
agctngaaggcaaacaggatgcattgttttacttgttaacccagctgaccttgaatcagaaatccgtacctgttgcaagggtttgaggtttgtgctcctctgctgaccaccatacagacctttgcccttccatgtagcaacctggagcaatcgagcagcctgaagcttatgctgcaaatatttacaatagacctcctcaacctcagcagcaaaatcaaccacagcagaacaattatgacctctccagcaacagatacaaccctggatggaggaatcaccctaacctcagatggtccagccctcaacaacaacaacagcagcttgctccttccttccaaaatgctgctggcccaagcagaccatacattcctccaccaatccaacaacagcaacaacctcagaaacaaccaacagttg

SEQ ID NO: 198837 - DNA, 396 bp, Glycine max
  unsure (1)..(396): unsure at all n locations
tctacttatgtggcagggcgggcttccttcaccttcttgttctaacgcgaactttgaccattgttcttccttcccgcgatgcttcttttcatgtccgcctgagtgggcttatagcctaaaccatacttcccacgatttccttgggtatttatcaggctagttatgccgtcgntgttttttcctaaacccatcctgggttcataaccgttccccaacataactcgggccatcattatcgctgcatcggacagacaaggctgcccaaagagggagtccacggaggaaatgctgaccacctcaaaagactggaagcagtttctaacgattcttctgtcggcttcacataaggcatggaggatgggcagcttaccaagatatcttcctcgcctgacatga

SEQ ID NO: 198838 - DNA, 393 bp, Glycine max
ccgaccgcagataatttgcagcttaatgcaggaaaatcggatttcctgggaaaacgtatttctgtggttatattttttccgaccattcaatgcggaccaaaatgcgggattccttgtgtacaataagagtttgttttcaatatattacataaaattttgaatcttcattaacttgctaatcctagaacttatttagcatgttcttcaatatgcatgagtgtatcgggtatctctgtatttcatgtcgcaatgtttttatagtgctttgacttagtgcaattcattttgatttaaagagatagacgagttggtaactaaactggtaaagtagatatgcaggatcggcgtcaggagaaaatatctctgtctcctgactagggggccatgtgagat

SEQ ID NO: 198839 - DNA, 468 bp, Glycine max
  unsure (1)..(468): unsure at all n locations
tcatgatgaatcaagattgattcagagagggnggangtanacttatatgatgacaaaaagcaaagctcaatagtcaagaacacttcatgataacaaagatgatgatctcaagaatcaaagaatgagttaaagattgaatcaagaacagatcaagatttaagactaaagattcaagaatcaagagaagactcaatcaagataagtattaaattttttttcaaaaactgagtagcacatgaatttttctcaaaaaccttttaccaaatagttgttactctctggtgatcgattaccagattattgtaatcgataccagtagcaaaatgtttttcaaaaagctttcaactgaatttacaacgttccaattggattcaaaatgttgtaatcgattacaatgatntggtaatcgattaccaagatggttgaacgttggaattcatatttcattatgaagaagtacatcctttc

SEQ ID NO: 198840 - DNA, 439 bp, Glycine max
  unsure (1)..(439): unsure at all n locations
caagctttacattanactaaaatttatatcattataaattaatatattctaaacaactagagccaaaatcaaattgacaagaaaaaataataaaattatgcttactatttggcgtggaacaagtatgatatgtccagaacaaccgcggtgtgtaagaattgagaagcagaccttgttgaaaattaatgaataagaattgaaagagagagtgtgagaagaggagggttacgtgttttccttattttgctcttttacaaactacaaatgtttcaaatcccctattttgttttcaatcttttacgtattaacatagacttggttgttgagatgatcgaaggatgaaatggagcaacattgtaacaaatgganaaggtgcaattgcttgctgggtgggacctatttcgtatattggtggcaagtggatgtccttgttcatttc

SEQ ID NO: 198841 - DNA, 365 bp, Glycine max
  unsure (1)..(365): unsure at all n locations
tgccacccagctcgcccaggcgagctaggttgcttccttgattcaaccaccttctggaggaatatcctggaaggcccaagtgggcctatttgctatttgcacccccatttttactaaatacaccccattgctcttttttggtgatttttttcgtaacgttatgaaactttacgaatttcctatcgatgcttgttttctttccgtaatgttacgaaaccttacggattacgtaatcatcccttttttgccttccggaacgttacagaactntacggattgcgcagtaaccacttccttttaatttcggatgtcacgaaacttcacggattgtgctacaatgctttttttgactccggcatgtcacg

SEQ ID NO: 198842 - DNA, 468 bp, Glycine max
  unsure (1)..(468): unsure at all n locations
catgcaagctaagcgctgcgacatggctttaatatttcaaaaggtttatgctacttctgagatgaagttttttctcttgcccatagtcagacacataagaaccttcagctacaagttctggagatagatgatgctgaccctactcctatagaacttgaagatgcagtaattcctagtgagtcacctatttctaaacctcaaatctcaatgaatgctcttactggtgttgcaaatttcaaaactatgcgtgtgactggttatcataagaagagggctttgcatatactcattgatagcggaagtacacataacttcctcgatatcaacatggcaaagaagttaggttgtccaataacttccatggatgctacgaatgtggtggtggcagatggcacanagttgcaggttacttcagtcaccaacaacttctcttggacccttcagcaagcaacttttaactcagatatg

SEQ ID NO: 198843 - DNA, 429 bp, Glycine max
  unsure (1)..(429): unsure at all n locations
ggacctatgatactcagctttgacatgggttctttaataaaaaataaatttctatgttctttttcaaaaaataaaactattttttttagtaaaataaatattttaatatgaagctatatatatttgcacaattaattatatctatcatttttaacaaacgttgtaaggtgttaatatcctacataattgtgaacatatatttgattaacaaatgttgtaaggggttaataccctacataatcgtgaacatatatttgatttcaaggatcggtttaagaaaagattttctaacatttttcctttaaaataaatattgatgatgatccattgaaaactatctttgccttgtcaccccgaatntctaatattttgttggttggatttctttaaatctctagatgctgcacaagtaagtgacaggacaaatgc

SEQ ID NO: 198844 - DNA, 255 bp, Glycine max
ggggaggagggcgcacagacaaacaccatcggattgtaccgacaaaatttatttatcacttagtctttccctctaatacgaatgaactgagtcgaaaaatttcttatttttcataccgatttagccaaatgatttttggtgcgcaaaaggatggaggggggctactaaaacatacttcatagtcttcatagcttacgagagtgatcggcctcctacaatcgacgtttcattgccactagatagagacgttgcctt

SEQ ID NO: 198845 - DNA, 346 bp, Glycine max
  unsure (1)..(346): unsure at all n locations
ngaatccctgctgcattgcctattaatcaaaacttatatcttcctccatcttatcataattattgcgtaaaaaaaaaaatgactcattataatcattattttaatgttttaatgtgacatcaaggctaaattactcatctgatttatataatttcacgattcatacctagtttttatagtttaaaagtggcatatgcttagttcttatcatttatatattaattctctcttaattctcataattggcattctaatttgttttactctctatagtttgacaatgatctttttagtccctataatttgtatttaattatctgttagtccttattacacaaaatatata

SEQ ID NO: 198846 - DNA, 363 bp, Glycine max
cttaataacatgtgaagcggtttaaaattttacataccgtcatatttatcattttgaacatactcctttaactgaaatctcaaattatttatactttgatgtagagaacgacgctgggcatacagaactaatcaaagcagtaaagaacgttaaacaagatgggcacaaaatcgccaaaagacattggaaatggctacatctttaaacattccatattaatgttctcataagttatataaaagccactcactttgttattctgagagtggattatattagatatgaaacgttggagcaaatggataaggcgctacgctcgcaggatagacccattctgatttggacccattaaatgtaaagaaa

SEQ ID NO: 198847 - DNA, 466 bp, Glycine max
  unsure (1)..(466): unsure at all n locations
tataagaacaaaattgccttaatcatttccaaatatgcttgtgaattangacgcatcaacaagaatcaagtcaaggctattgtgcaagcaatcaatggggcaaaacacaccaaatgattataatgatggatggctcaaattctcacaaaggtaaaatcatcactttcaaattgagctttcaaaactatcatgacatgtagagaagaatcaaggatttcaagtcacaaaatgtcaagaacttttattttcaaaacaattacccatttcttgaacatatcctataattcaaagaanaacatgcaaagtgtacgtgcacacgaaattgacccanaatattaaactgaaaatccgacgaaactaacaacattaacaaattaacacaactaataaattaacaaaaccaacaaaactagcataaccaaagaacactcccccccatacttaaacaacacattgtcctcaatgt

SEQ ID NO: 198848 - DNA, 452 bp, Glycine max
  unsure (1)..(452): unsure at all n locations
agcttgtatttaaaaatgttttaaaaatatttttatttaatatttgaatttttattcctttattaatatatatgtgaggggtagagggtgtcacagaagacatggatgtgatgtcaccgacaaaatttaaatattaaaaaaattatcaatattaagctgagtaaataagtaaaataaattcttcttcttcgtaccccattgccgagaggctcttcgctatgcgaaggtatgggggagggatattatgaataaaaattaatatttataacttactgatggagtgaacatattattaatgacatcaaaattaaaattgtattagatgacatactacctattaaaaagtgaatatctnttttttctctcggtaatatgcttgacagacattggataaaaccttgggaaaagaatagtgttacaaacgccccattgccattcctgcgtggaggaat

SEQ ID NO: 198849 - DNA, 476 bp, Glycine max
tgagatgaggaagtgttgaagggtgaaacttcctgcttttattgttgaccacagagtggtacctggagatatgtcgcgggggtcaggagaccttggggacgtcaggtggggtgctattgcccaaaaccaagcttgaccaatcccgacccaacccgggcatagtcggtcagtgagaacctgtgatgtacctaagcaggcgagctcctggcagtcaacagataaaaggaaaacaagaccacaaagcaaggaggcttgtggtggctggccagctgtgaaacttgattgatatgtgagatatggtctctggtaatcgataccaagggtgggtaatcgattacaaggcttaaaaatgaagacagggggctaagatggtctctggtaatcgattaccaggggatgtaatcgattaccaggcttgaaaacggagtcaggaagctaagggagcctctggtaatcgattaccagcctgtgtaatc

SEQ ID NO: 198850 - DNA, 318 bp, Glycine max
acctctaatttgagcctcgaggccccatgaagacccattttatggaatacttcctagcagagtttgttagcaatgactaaaccaccccaaactggtggaacctctacgcggatggagcttccaacgtgaagggaagcagggcagatatcatccttgaagggccctacaatgttacttttagagcaagccctaaaatttagtttcatggcgttaaacaaccagtctgaatatgaggtgcttatagcccgcctcaagctagcgaaaaaagttggagctaggaaactcacttgctacagtgactcgcaccttgttcaacga

SEQ ID NO: 198851 - DNA, 436 bp, Glycine max
  unsure (1)..(436): unsure at all n locations
ttcctaattaacctanaatggagagagagagagtattatatattctttaaggaagtactaagtatttattacctatacttaacagaaaatacttataacactacaaagtatccataaattggaagagtttgctacaatttacacaagttttatacacaaaagttagttgtattcaccgattaacatgtaccttacgccattgacactgacttatgaagactttctggcgaggctaggcgtcaagcaactcgtaacctttgttgaacatccctagacaacggttaggcgaaggcaaccaacaaagttatcgtcaggccatgcacacttgacttgacaagtctaatggtctatggaaggaggaactacctagcatactntgtgcctatcattgttgaccccagacaacgaccagaaatactcttttcaactcacatat

SEQ ID NO: 198852 - DNA, 427 bp, Glycine max
  unsure (1)..(427): unsure at all n locations
agcttcagttttcaattatgagcgtctctatctctattgtacacaatcggacatccgagngaaattttattgtcatttgaatttgctcagtgtaacagttttcaattacgagtgtctcgatatatcacgggactgaatcggacatccgattcaaaagttattgtcgtttgaatttgctcagagcttcaatttacaattacgagcgtctcgatatatttcgagactatatcggacattcgagttaaaagttattgtcgtttgcttttgctcaaagcttccgttttcaattacgggcgtctcgatattctacgggacacaatctaacatccgagtcaaaagttattgtcgtttgaatttgctcagagctttagatctcaattacgaccgcctcgatatattatgggattcaatcggacatccgagtcaa

SEQ ID NO: 198853 - DNA, 145 bp, Glycine max
tctctgttcatttacgagggtcttgatatattacgcgactctttctttcatgcgagtaaaaagttattggcgatcgattgttctcatagcttcagacatcaattacgacacggctcgacatattatgggactcactgggacatca

SEQ ID NO: 198854 - DNA, 454 bp, Glycine max
  unsure (1)..(454): unsure at all n locations
agcttcctctcttcatcaacccacatatttatcttatgaccacgaattctttaaaaaatttggggctttataccctggactcatgctactaatagcatcaatcataggttgataatatgtcgagttaactgcattaaatggcattgaagcatctatcatccattttgcaatggctttgtcacacttttctacaatttgcttattttgcaagacactctttaagctaggttgagctccaggagttgttctaggcataaaataatcatctacataaggagtgttctttcccttttgagacttggaagaaattggttttggaggtcttcttaattcctcaactattctcacagtgtcttcatccatttcaaatgtattactttcattaaattgttcctgctgcacttttattntcttgttttttttcaatttgttcaagtagttgcttcatttcatg

SEQ ID NO: 198855 - DNA, 422 bp, Glycine max
  unsure (1)..(422): unsure at all n locations
ntgcagaattggtcttcgccagtgaaaggatcaatgtgggtctgataagaggcaaatttgatcatcctactaggacgactgagaaaactggggcaaatgaagagggtgagaaagagggagaaacccatgctgtgattgccattcctatacggccaagtttcccaccaaacctaacaatgtcattactcagtcaataacaaacctcctccttatacaccacccagttatccacaaaggccatccctaaatcaaccacaaagcctatctaccgcacttccaatgacgaagaccacctttagcacaaaccaaaaacaccaacaaaaaggaattttgcagcaaaaagcctgtagggttcaccccaaattccgttgtcatatgctaaacttgatcccgtatccactcgataattcaatggtagccat

SEQ ID NO: 198856 - DNA, 469 bp, Glycine max
  unsure (1)..(469): unsure at all n locations
agcttacccattcagttttaggggttttatgatgatgcttgtgatgtttatgtgctgaaattgcttatggaaaactgtttgagatgaagggtagagttaacctagggttagaaagtgagaatatggtgttatgagtggaaaaagagtgaggttttgagagttggaaggccaaatctggatttagtggtatttggaggttaaagtgagttaatcctagcttgaaatttcatttaggacttatgagaaagtttgggctgtgctagagagaaaaacaaatgaccaaagtgaacaaagagccatttctagggtaaaattgggtgttgaggagtncaaatttggttcggtggaattttaggtgtaaatccagtttgaacaagtttaaattgatgttatagacttgtgtgaggtgagagtttgctccaaatttaccccattctcaatttcacttctcanactttgaaaatccatt

SEQ ID NO: 198857 - DNA, 466 bp, Glycine max
actttccttgagcttcaagccttggcctttatgttgttcactcatgttgctcccctatctctagcatcttccatagacaataaatgactagcaaatcatggttactcgcttcttggagtgtgccaactcaaggcaacacagagtgcatgcaaatccagtgcacaattctcccaaaagatgtcaagaatttggatttaaactcatcatcattctccttcaataactttttcataatcttgctctttttgaggcatgtgatgtcaaacaaatcaccatagagccttttgctgtcaacatgtacccccaaaagatatgacaatgctcttctatgattagaaccttagtactcttcagaatagcctttaaggtgaagttggtattgtccaccaccagagcaacaaagaaatctttgaccaaccttgcatagacaagttcatgaatatcaaagaaccctatccacttgatc

SEQ ID NO: 198858 - DNA, 455 bp, Glycine max
agctttatgctttgcaaggctaaattgatattcttaaagattctaattggaagaatccaaatattctcacctaacgcaaacaatttcccatctaatagtttcagaaccacgaaattgtaaaacttcaataaactgaaccctgcaagcagaatttcagcccaacaaatgtgtcaaaatccataaaactcaaagagaaagtcagagagaataaacaagggaatttggctatcacagagaagagtgaagggacacaacatgaaaactacacaatgcttatttagacatgattttcctacttaaaactgttttcaagtattcccaaaatgaaaagtaatagctagaacgaagctgacgatgatgcaagtggggtcccatcattctttcagaaaaatgataaagaaaaattgccttggctactgagatgagaacacaaatttgcttgcgtctaatagcac

SEQ ID NO: 198859 - DNA, 460 bp, Glycine max
  unsure (1)..(460): unsure at all n locations
nnggctctactttttaccaacatgtttgattganaatatttatttctattttatgtttaccctttgttttactttttcttatttcactaacatgtaggactatacatcaatttctcctagtgtaaaagttttactttctaaaaccaatttgagattcttattaggaatcttcaggaacctaaactagtaatcaaaaaatggtatccgtcctttgaaactaatggcaggttcatattggatgtaagggagctttatattgnggtcaagatgaangggatggctgattgggcctttgtccttgtcaagccccaatcatgcaagtggacttagtatcccttccaaagtaaaagagataccttaccctattgctgctatatcctgtanggggaatttcacaatggcatgtaagggatctncgaaggtaatttgcacatgctttatataaatntttttcattata

SEQ ID NO: 198860 - DNA, 441 bp, Glycine max
  unsure (1)..(441): unsure at all n locations
ggacctataaaactaagctaataagctttnttatagttggagtttggccgttttatctaataagactntntaaaaagcttgagcttgacctttatagtaaacaagccaagccgagccgagccttacataggccgagccaaaagccctcgacaagctgttcgactcatttccacccctaccgccaaccagtcattgaactctatagtactactgagatccccctccctctgagtcatactcactctctcaaatgggtgcctgatgctgttgaagtcacccaaaatacaccaaaggccagtgggtgccaggctcttaagttgcctaatggatcccataagatgcgcttacaggctgcatcacatggtgcatatacattcacaatgaaaattttctgcatctcttgagtccacgtgccctncaatanggatatatccctaccgg

SEQ ID NO: 198861 - DNA, 457 bp, Glycine max
  unsure (1)..(457): unsure at all n locations
agctnttaattgaagaaaacgaattttcttctttagaaaaatatttacaaaggctcaaagagtctgtcagaaacaaaataaataaaagcataagataaagaccataatataggttaataaagcataaaacagaacttaagctgcttccttaaggcattctaacgggttaatgcactaactaggaaacgacaggccactccgaatggatctcttgtacaagaatcaggtccaagaaaagtgttgaatatgagagaacactaaaaaacatattacatctctttctactattagaaaatatgttttttacatcgattatttatgatttttaactgatgttgaaagtattatcattaacatcagttttttaaaatcgatgttaaccgtaaaatgacaacnatcgatatttaaataatcgatgttatataataagaattacaacaaaaaaaaagtaagaatg

SEQ ID NO: 198862 - DNA, 464 bp, Glycine max
  unsure (1)..(464): unsure at all n locations
tgagctggatggttactttccgaaacatatattntctcttagatccaaatccagcacctacagtgttcaaaaaaaggtcacatgtttagatgaaaaataacacattttgcagggctattaaatggactaacaagaattagatctaacaaaaaaaagtgcaaaattagatctaataagaattagttcaaaagtgatttgtaaagacttctcatcaccatgaaatagatatgatgtaaaggagctgctcactccacataccttgcccaaaaagcatattccttgggaatcctttctatccttatttggtagacaaattttgtggcattgcagacttcatcctgcagatgatgtggcaggagataaaaaatagattaaatatttctttaacaatagtgttaaaaaaaatcttcattaagaaaagttaacatgttagcattcataaaattgtgatacctggttacctt

SEQ ID NO: 198863 - DNA, 461 bp, Glycine max
  unsure (1)..(461): unsure at all n locations
agcttaactttgaaatacatgagtaattaatatttggaatngatgaanacagctgaagggccacattagtatttatcagcttggccagtgtaaataataggaaaaaagagaagagacgttatattctttataaagcaagtaaacaagactagaaatgccctacagaaaaagggatatccaagaaaataggcatcctatagggccccactgcccccacttcgtcttccttctattcatggcaatcccccatgaaaggaagtttacacacttactccaatttgaagaaagcaattcacacttttcctttccctcacttgagaatcccatcaaatgacattcaagttttttttacaactcttggaggcatcctgatttcttgcctttggtagcgcatattctcacgtggaaaacccaatatcaccctcctcttgtgcgcgtaggccatgcagtatagacaagtc

SEQ ID NO: 198864 - DNA, 432 bp, Glycine max
  unsure (1)..(432): unsure at all n locations
tatgttggatattnttttcttctcattgttgggttaagttctattcatatatagnngacgcattaaataaaaatctaagtttgattaaaaatcattattttctatcaatatatgtcattttttttagtattgctcgcgtgcatagaaggctcaattttatgcttatccagtcgtctgctttcaaccatcaagtacaaacattttgaatccatttgtatgtttacgtccaaaacatcattctactctagttaaacaatggatgctttttccattttccctttctctttcgttatcattattagctagggtggttgccagctgattattggttctattattgtttccaaaagaaattgtgtagtgggggtaacattttgtatgctacccaatagaaaacatagggtacatagctatgtatcccattaataccta

SEQ ID NO: 198865 - DNA, 414 bp, Glycine max
catcgcaaaagaagaggttagggcttttgcattactattcttcttagtcataaggtgtaaagtgtaatgtggtctacgaatttgcctgaaaaactaaaatggagagtccgatccatagaccatattccagaatataatgggctaaaactttgcgggggcaagcaattgcttggaatataaacctcaaaatttatggcacttataaatgaaacgtataatttctataggtttttaatatacccactaaaaactgaactgggcccatttggcaaaagatgggaagtctattttttataaaaaaaataaaacatacaccagactatgttctatgattatttattgcatagatgagtccaacaccaccacaagttatcattatctttaataaaatatatttgccaatacaaacaaaaa

SEQ ID NO: 198866 - DNA, 464 bp, Glycine max
  unsure (1)..(464): unsure at all n locations
ctaagcttcgnagttcatcttctcacatctgcagaccattattttatttctgcaagttgagaataatgaatttagaacatataaagctgcgaattgaaggcgagatggtctgtaaaggtaaaaacattggtcgataaaagacttgacaactatgataatttttaaatagatcattgaattttttttcaattgaatgagaacaacagctatccattaaatcctacaattcacatgacataacaaaatcaaatcaaataaataaattttttttcatttgcacctccatttgctccatttgtctttgcatttatgtatgatagaatataacacattactaattcattctcgtattggatatcaattctttaattgtgataaaaaataattaaaattatcttaatttttaagataataaattaaattatacagtgataatattttgaatatatatcattatgaaattt

SEQ ID NO: 198867 - DNA, 332 bp, Glycine max
atacaaggcctctcaacaatgcttcgattctggattgaattcaggttaacattatttccctgtggacgatactcagattcatccattttaattttaaatacttgacgacccggagcactttccggtaaacccccattgaaatttccttgagacataaatgcacaaaaattaaatacaatggggggcgaccaaggacccatgcattgcaattgattaatgaattaaacataacacattttttgaaaaaaaaatgcattaacaaaaggtaaaggcattctactacattattcactggtgcaacttctgaaagaagtttgctaactgtatttgtg

SEQ ID NO: 198868 - DNA, 470 bp, Glycine max
  unsure (1)..(470): unsure at all n locations
tggaacattgaccacccaagagcaaggcctctctcattgatttcagcactcttcaaacacattacaagaggaagcatggcataaagccctacatgaacaattttcagcaacctagctaggcctcatagtggttgcgaaaaaggaatcccgatgaaaccttgtttgcagcaaacactattattcgccttggtgacaaggtgaacctttagagggtacaatattaatatgtaacccccatagttagttgaataattagagagttagttaggggctgagttgaaaaggagttcagagggagatttaactcttcatcttaacgccatcagtactcataacatttcatacaagctactgaaactaccaaaatctttcatcttaacgccaattataaaataaatcaatntactcatgtaattcanataatacctttacaaacaacatacttatatataaattattctccagtttat

SEQ ID NO: 198869 - DNA, 406 bp, Glycine max
gcttgaaggaaaagactcattttttttttgtgctcatgcaacaatggttagccgtggctatacgagacatcttgccaaaacaaagtcaaattaacgataactcgcctgtgcttcttcttccatgctatatgtagcaaagtcattgatccagtaatgtttgatgagttggaaaatgaagccgcaattatactgtgccagttggagatgtattttccccctgctttctttgacatcatgattcacttgattgtgcatctggtcatagaaatcaaatgttgaggtcctgtttatctacggtggatgtacccgcgtgagcaatacatgaagatcttaaaagggtatacaaagaatctatatcgtccagaaacatctattgttgagaggtacattgcacaagaagccattg

SEQ ID NO: 198870 - DNA, 440 bp, Glycine max
  unsure (1)..(440): unsure at all n locations
tgaagtacataagcaatagggttatcaagatgctgtgttgatgaatggcaatcccatatttaagttattccctttatgtaacctacttttgggacacaatactcagcacttgtaatgctatatagttttataggtgctagtaatcttgtggttagattatatactatttttgctatgacaggttaaagagagaataactactttcattgttattaatttgtctttaattatactagtttgcaacccggattgttagatttttttattcagcaagtattgtaattntttattgtatgattccatggtcctctctcttgtaaggtattaatcatttgagtcatagaagatgttttttgaccataggtcataaacacattagattttgtcctattgttgagatagatatgatgtctgactcatatagnaacattatggtatgc

SEQ ID NO: 198871 - DNA, 450 bp, Glycine max
  unsure (1)..(450): unsure at all n locations
gacctgcggcatgcaagcttanccaactaatgcaaactttggtttttatatttatgtgcataaggatgaacatgagggactccttcattgatgagtaacaaggcatcttgagaatccggctcaagatgatggaagtgtagccagtatcatacgcgatgcgaagcctatgatgaatatccaacaattcttcattgaaattaatatttaatgtaaatgcgcaattatcattactagtgaatggctattgtggatgctatctgagttataagattaacgtgatgacggttgaaggaagaaagagaaaaaaagttgtaggtttaagtacatgtattttactaaaactatcaaagtggcaactattattaatattaaaaaaaaatactattatcgatgttattactagcaaacgaccattacaatgatcacatatttcatcatagccctcatata

SEQ ID NO: 198872 - DNA, 387 bp, Glycine max
cttagccatgttgcttggaatttaatcaatgaatcgatcttgtctctgtatattggaacataaatgaacttctcccttactatcattctctttctctactttttctctctctctaggtgccttgttatgttatatatctatctgcatatacaaatgatactctctttttacttcatggtgaataattaacctacctacgtctagaatgaaggactgaaagttccaagaaaaaaagttgaatctaaaaaatatcaattgtggcagcaactaaacttctatattttgctgcaggggccacctctatattaagtgtgccttgatacattgatattggccctacaattaataatgatccagccaaaaagagaaaagatgctattttatata

SEQ ID NO: 198873 - DNA, 461 bp, Glycine max
  unsure (1)..(461): unsure at all n locations
gcatgcaagctnttgctataataaaaaaacaaaagatgcttttatttatatatnaatnnaacaatgccaatcattcaaacaaaaagcttaccttatattataaccaaattaatcatatataataactaggtcacaaaaactacgcaagtggtaacaactcaatcaacttagaacatgtttgaaaatcaagtggaaaacaacttttgagacaaaaatatttttgcaaaagaataaatgcatgtttggacccaagttagaaatgatgtacacatgttacaatgcaaatccaatagataaaaacaaaaacaacaatcttgatcttttagtaaaaatactttttctttaaaagtattttttcacctcattttcaaacatgtacttagaatctttgtttttctttcatttgggtttacctacttcgaatatactagaccacacttgtgtaacaatttaagacaaat

SEQ ID NO: 198874 - DNA, 393 bp, Glycine max
cgtacgtcacaagtcatttctccctgcctctatctcaatactttcactagcatacaaaacaaggaaataaaaaaaaaaatagcgaccgaaatgaaataccaataccacacatccaattagaaaaaataaaaaccgcccctaatttaatttcctgatttctcaatatttattatttaagcggtgggaccctttatatacagtttaattcggccgccagctttgtcgtctctttcgtctccgtccatccccgtcgttcctttgcgtttgactctcattctctttctctctctacacctctctctctctctctgtataatgtctgtatctctgatggtgcgctctctctccaacacttcttcttatcactctcttactcataatatgtgatctctc

SEQ ID NO: 198875 - DNA, 459 bp, Glycine max
  unsure (1)..(459): unsure at all n locations
agctttcaacatatgtcttcacaaataattanttttttgttgaaccctagcaagattacccatcatatctccccaaaaccccatacccacgaaatttaagagagaaagaagtccacccaaacctgaattttcgaagtcccactcgtagccacgcacttcacgatcccgaaaatgctctcctttcacgatttggggcagaaacgggcactaaaggttgaagctttgtatggagctttaatggagaatgagggaggaagaaaggcaacgtgaaggagagagaaagctgtctgaaaaaaaagtgagggctgagtgaagagagagaaaagctttttggttttaaataaaaggttttcctctctttctattattttattcaagctctgccacatgtccctanttgattggagcaaaaagggcccactntctctttttgactgtgacccatactcagtcacaaaa

SEQ ID NO: 198876 - DNA, 456 bp, Glycine max
  unsure (1)..(456): unsure at all n locations
tactcgtaagggtcaagctnttgtgtggggtgcccagnngtagnattttttccgtacccttaaggaaaggttgaccactgcaccagttttagtgttacctaacccgagtgaaccctttgtggtgtactgtgatgcatctaagatgggtttgggtggagtgcttatgcagcggggacaagtagtgccctatgcttctcgacagctcaagatacatgaaatgaattatcccacacacgatcttgagttagcagctgaagtttttgctcttaagctttggaggcattacctttatggatctaaatttgaggtgttagtgaccataagagccttagatatttgtttgatcaaaaagagcttaacatgaggcagaggagatggttagaagtccttaaggattacaattttgagcttatctatcacccaggtaaagccaatgtagtagctgatgccttgagt

SEQ ID NO: 198877 - DNA, 410 bp, Glycine max
  unsure (1)..(410): unsure at all n locations
tctctttttattttgtacaagttggaggggacttttttatacttttattgtatgccttcaccttgttcttctcataaagcctaatgttagttgtaccatagacttataagcataactggtggatcattgtggatattgaattcagttttgttcagtaaaaaattttgcagatccaagtcaagatccagatctccaaattcatgagtaagtgttatctgagttgaattgcttgacattaataacgggaggagtggagcacaattgcattaagattttcttgtcatatgaataatctaagtttttgtgcttatgttaataacgggaggagtggagatgctggcngaattggtttggtttaagcttccgagtgattgtttggatccaactttataaagctatttgtggacata

SEQ ID NO: 198878 - DNA, 330 bp, Glycine max
  unsure (1)..(330): unsure at all n locations
atccaagggaatgggactatgcgaggttcagacaggttgctgataaatgtggggcagtgttgatgtgtgatatggctcatatcactggtcttgtaccggctcatgtgattcgattcttctgcctattctcttggtgccgcctgaattatgtcatcaatattatggctgttatgcccctgatttaaatttctttcgagtgtgtaagcgcttgtcttgtntgctttataactactacatacgggatcttttaagaaaaatacgttctctttacaaagatctttccacctcatattaaacaggtcttacaagcttggtttgtcttcattttgg

SEQ ID NO: 198879 - DNA, 465 bp, Glycine max
ctttcaacgccacctggggctgggatcaatcaattaatttatgcttatagcgagtggagaatgagatagataccaggaggagcggaaagagaattgaagttggaatttagaagggaagggaagctaactaagtagctaaaggaacctgcaagaggtccaagagattttgagcgacggtgtgaacaagagggtcgtgtgagggagtcaaccatgcagctgggtcacgttgtgtgctctcattttcttctcaattctccgcctccaacaagcaaatcaaaatcagcttcatggctccactgcaccgggaacaactaaactgcttccatcctgttagcctctaacaattttaaggaacaaaatagatcataagaattaaaggtaaattatcactctagtcttttgaacttacaagttatcactatttgtattaactctgttttatgacatgatagatctataagtcat

SEQ ID NO: 198880 - DNA, 348 bp, Glycine max
tttttacgagctcacagggggcagtttttttttaaaataattattcatcacaagttacacatttaaacaattttcaaggaataaaaactaaaattcagtccccctttaataaactgtttggatctgtccctataggcatatcatcctagagtggaggcaaaaatcagccttccacgttccatctgtgtgtatggtgcaaagccatatattgctactatacataagattagcttcctttcaaagaaattgtcagttctttcctcaacagctcagctgtgccaccctcaacaaaagaggatgatagcacattgtactttttcaacaacactactaatatacccaatccaa

SEQ ID NO: 198881 - DNA, 465 bp, Glycine max
  unsure (1)..(465): unsure at all n locations
tcanacaataatncaccagctgtataatactgaagattgattcttgggaggggaacttgataagtgaatcatgcaattcatccgggaaggctcagcttcaaggtttagtttttgtttaacgatcataacttaaaagaagggacgtatccagagtatccaagaaagagagaaattaaggtaaataaattttgacatacaccattataaagtagtctcgtgtaaattgttggatacagggtttgtcacctttgctaaaataagtacaattaaactgaagtaaaaattgaggatttgaaaccattttttcgactttcagtcacatctcgcatcacacgggcatgtatatgcatcatttctttctgaagtttgccgaacactcttctttaatagatgataagagtagagacgtntctcttttgtcactgacgataatgggtccagaatttctgtatagcatgatgatgt

SEQ ID NO: 198882 - DNA, 452 bp, Glycine max
  unsure (1)..(452): unsure at all n locations
catgcaagcttattactgcttctaggatgtttactttattatnctttcaaatngcgaaaaaccccaaggatcaggagaagacggccttcacatgcccttttggcgtctttgcttacagacgaatgtcatttgggttatgtaatgcacttgccacatttcagaggtgcatgttggccatttctgtagatatggtggagaaaattatcaaggtattcatggatgagttcttgatatttgggaaagtgtcatttcatggttcgagaaggcatagtcttgggccacaaactttcagcccgaggaattgaggtagacctggccaagattgatgtcattgagaaattgccaccaccatcaaatgctaaaggcatcaagagcttccaagggcatgcagggttctacaagagattcatcaaagatttctccaaaattgcaagaccattgagcaatttgct

SEQ ID NO: 198883 - DNA, 416 bp, Glycine max
  unsure (1)..(416): unsure at all n locations
ntgagccaaaatcctgactcaccataaaccttgacctagtgttataatgtcaatccttaccctcggaagcaaaaaagaatagaagggaaatttccaatcaaagaaaagagaaggaaaattcccaatgaaagagaaaaaagaaaagaaaggaaattcccaatcaaagagtgggagaaagaaaaaagaaaagaaaggaaattcccaaccaaagaatgggagaaagtaaaaaaggaaggaagcccctggtcaaagaaaatanaataaatgtgcagagaggtctttggaccggacaatatctgaacaatacagaatgtcaccaaatgaacaaaaaaaagggaaggaaaggaaaccacgacctacaatggtcttctccctttaattaccaaccaaaatcccgtgcgctagcgacccttttt

SEQ ID NO: 198884 - DNA, 211 bp, Glycine max
cgcgtctatgatatctaatccaccaaggttttaagtaaaggaaatcttcattctattaccccaaaggggaggacaaaagtgggcagttaaaatgaatgaccattattgttaatgcggaaagtttatgcgcttcactatccatgttcacacattattacagcttgtggttacgtgaactacttccaatatatagatgttgtttacacaaatg

SEQ ID NO: 198885 - DNA, 436 bp, Glycine max
  unsure (1)..(436): unsure at all n locations
cgaactactcttgggctattctaagcaaatcaacagagtatttttaaaataaaaataaaagggttacgatgagaaatcgtggcttggtggatcaatcgaatacttaagttactttgtgaaagaaaccatcatctctcaccatttgattagtggttgtaggtgcctccttgaggttctccttccccttgttctatacgaccaaaagaacaaagagaatggatactgaaactgttaagaacacgtgagtgagagttgaggtgtgtgtgagccttgggtagaagggaaaaaagtgagaaactgtatttgtgtgccctctgtggaaacctatagagaatgaagagttgtttctttagtttataactttttagagagattaaaatgagtgaaatgagcatgtttgtgagatggnggttataaatttggagtagtaattaat

SEQ ID NO: 198886 - DNA, 360 bp, Glycine max
agcttaagccatcatctgatacataattttatagtgacatttaatactttgtgtctagattcattttgcagaaacgttttcctaggattttttgaaatcctatgaagaataaatgaagcccaagatttgaaagtattgatctccatcaaaatgtgtgctttgatgtgcagactttctctgacgaatgagaagtgacgaataaatgaagtgacttttctgacgaatgagaagtgactttgggatgggtgaccttccaggaagtttctcggaaagtgtgtgaatgaggagaaagtatcctaaaacgtcttgcgttggtttgtgggatcaatcattgattctggaaacaggtagagctaattt

SEQ ID NO: 198887 - DNA, 433 bp, Glycine max
taagatgaggaagtgtagaagggggaaatttcctgcttttattcgttgaccacagagtggtacctggagatatgtcgcgggggtcaggagaccttatggacgtcaggtggggtgctattgcccaaaaccaagcttgaccaatcccgacccaacccgggcatagtcagtcagtgagaacctgtgatgtacctaaacaggcgagctcctggcagtcaacagataaaaggaacaaagaccacaaagcaaggaggcttgtgtggtggctggccagcggtgaacttggattgatatatgggatatgggctctgtaatcgattaccaacggtgggtaatcgattacaaggcttacaaatgaagacaggaggctaagatagtctctggtaatcgattacattgaaaacgaagtcaggaagctaggggagcttctgtaatc

SEQ ID NO: 198888 - DNA, 324 bp, Glycine max
cacaatccctagggctgtcctgaaattcattgtcaacatatttgatgaacaaaagacagagagagtctcgaaagacaacaaggaagaagcacaaaatgatggatattattgatcaccagagtactgaattacaaatttagtccaaaactgtcttatattcctgctacaaacgacgagagagactagttaactatgctagttaactaactgcagtaacattaactaactacagccaggataaccatctatagctaagacccccccgcaagttgggagaggatgttgtacattcccaacttggagaggaatgtgtggaatgaacca

SEQ ID NO: 198889 - DNA, 375 bp, Glycine max
  unsure (1)..(375): unsure at all n locations
ntagatatgaggtctatattgcttgaatattttttcgtattanacatgggcctttactctggttttctgattataattataacacttcagatcttctatttgattacttggctcaaagatatctgtcatctcattcatggcaactagtaagtgaaacacatatattttccctatatgttcaatctgtaccttttaccaagcttatctcatacatttctgttggttaatgtctctattactttatactcttctttggtgaaatcatttttactttttaaattaatattgaatgactatgggcttctgcaggacttcacttcgaaaataattgtgaaggtggaaccttctctaaacttaccaacgcctactgtttgg

SEQ ID NO: 198890 - DNA, 314 bp, Glycine max
gctgcagcttaacaaggtggatggccatcttattctatttgtagacaaagacgcggctaaaattgccgttctttccatgaagggtgttgaccaatcctccgcttatgcctctgagttaattctttctgatgcagatggggaatctgccttcatgacaaatcgttgtcaaaaaggagagaatgctcatgactgtgtccttaactggggcacggatccactatggggactggctggacctatcacaagggctctagacaagaatgccatggactctgttcaaaagttgagtccatcaatcccaatcctgcttaagt

SEQ ID NO: 198891 - DNA, 409 bp, Glycine max
tgcattaggagaggccacactcaccacacatacggcgttgatgtctttgtgctctgcgcataacgacacgaacattggtcaaacactattacaccgtctagattgcgtcaccatgcttactggagggacacacacctgtacctattcagaactacactctctcgtgcatggaaactgtgactgcgagaacggaatgcatatgactctaatgccaactcatgatgctgaggtcctgtgacaaacagccgtattcagaatcaacctctaccgagagcgatatgccccctcacacggatactagaatgctacacggacactctttacttggcgatctggtgcactagcacggagaccatgcgccctgactatgcaaacgactcactgcgggtgtgagcacattgtgaccata

SEQ ID NO: 198892 - DNA, 427 bp, Glycine max
  unsure (1)..(427): unsure at all n locations
ctctgaaaccaacttgcaccacccaactcatccaaaagctagtttatggtgggtatcggaaatcaatctttaatggttagagcgtttaaggcccaacagcctacgcaaaaacactaagagtcgtctcgctttttaaccaagagcaccgacgacgagaacgggcttgtgctcggccggatgatgccgctttgaagcatggtggtgacctangcctcaatttcctgtttttggtagaatgggtatctatagggcctgacgttaactgggctaactatggggtgaaggtgaatgtagtgatctgttgggcgggatggggtagagtagttggtggttggaagatgggagcaaatntgtggagtagagaatgaatttcaagggatgggttggggattgtcggcggtggaggttcaacgtgaatatggaagaa

SEQ ID NO: 198893 - DNA, 420 bp, Glycine max
ggatctataatacatttggaatagatcttattgaactgcctacttacattaccaacacatacccatcaaaaagagattttttgagagcataacttctaaaggtgggggagaggaacagggaggttgttagatcaccccatagtttgcaaaaaatttctaactaggtgaacaagtaaaggtagcacctatagtatttcaagagacaatgccaatgtcattcttacaaatggccactatgaacaggtaagattgccagaaattttcagcctattaatatgctgataggaggaatttctagcacctaaaaatcaatgcctgaaaatcattaacagaaagaaactgcatacctctgctgaaccaggagctattccaatcaaaaccaaccactgttcattaggatcacaacgataactaataatt

SEQ ID NO: 198894 - DNA, 472 bp, Glycine max
  unsure (1)..(472): unsure at all n locations
cgcatcttgatggattctagttactcatcattatgaaatattattattagctacaactgacactaggaaagtagaaactgataaatttgttttcaaaagtattaccatttaatatagcatcaagatttggtcactgtcttaatggggcagaggataattaacgtgttgctttaaatttatcaacatttgacctacacaccaaaagttaaatttaatggctagattagtgacatagatttgttaaactgaatttttctcacataaaatgtcacatataaaccagtgatgatggatgagcaaaaggaatctgaactgttgatgagctcaccaaggccataaatttcaaacctgacttgcaaatgcttcatctccgagcagcattntatgaggcaataggggaactatcatcagctcttcaagattgtcaggcagctctatgcttagaccctaaccatacagacacacttgatct

SEQ ID NO: 198895 - DNA, 393 bp, Glycine max
agcttgaggaatcttaaggaactattatatacttttctatcactgagagactacacacgtgagcctgcttagaggtaatatatgagtttatcacaattggtaatagaatgaacatgtgtagggatccttaggggatcaaattgggatttatttttggatatttatttaattataatttttctttatgattataaatatgatattgttgtgtttgacggaccaactgatgtcttaatgcgaattggttgataaaattgagtgttattggtgttttcatgtttttaacctaggattttgattcattgaatttgatatgattgtgcaaaattatttgaggggttttactctccatattgtgagaagaattttgtataaattatctgtactttggac

SEQ ID NO: 198896 - DNA, 451 bp, Glycine max
  unsure (1)..(451): unsure at all n locations
actaagctcgtcccatactcgcagattacatgagtaatccaatgtttttattattaattcattatgttaagattttcatctttaatttacgttgctatcgttaattcgttatgtttaaaatattaatatattttagtgtgatagattttattttaaaaaataaatctatttttttcttctaattttatacatttttcacttttttaaaaatatcttttttctaccataatttatttttcaaattattatttggacctaccagctagtttgtttatctacatttgtaggccgaatacaaaccttaaaaaaataatttatttgcaaactaagcttatctgatccatctaanacgctgctggctttgcaaactgagtcttatatagatcacactagtccgtatatccactcctacatgatgttaaaaagctatacgtctaggctttgatatttg

SEQ ID NO: 198897 - DNA, 253 bp, Glycine max
gcttaggcacatgtattattgctcacccatcggcattaacactaactttggctcagataacagaccttgctcaattacatttcgtaaacattggcatttggatgatctttacaaagcttccaagtctgtttaggaaccacctttagaaaggctataacttatctaaatgtatccaactattccaagagacgacggaatgatcctcgccctaggtttttcaacatatacacatatattgttttcttacactcac

SEQ ID NO: 198898 - DNA, 459 bp, Glycine max
agcttggcaagttattaaaaagctttaattctattacttttaaaagatatgaataaagtcaaggtatatctagagtaatcctctacaataacctaagcatagtaattccctccaatgctcatggttctagaaagaccaaaaaaatctaaatgtaaaagttcaaaactctggaggtggaaactacatttttggatttgaaagcatctaatagttgatcatagttatcatcatcttccaaatcagaaacggttacctcactttcagcttcattgtttaccatcaagcacaaatgttgttcatcatcttcactattgtcgttggaagttgttgattcatcgtcatccaaagagatatatgtctttgtattcttttggaatgaacccatattcttcttatctccttggtgcttcttttgggagaggggacaatctacttaatatgacctgtctctttgcactc

SEQ ID NO: 198899 - DNA, 466 bp, Glycine max
  unsure (1)..(466): unsure at all n locations
taagccttaagtattcaactcaagccaagctcaatctttatttgctngacttggcttggctgggctcatttccacccctagtggcagggcagtagttgggtcatacaaatccatgatttcctgattatcacctgttattggtatctcacttctagagaagaatgtgtagatgttccttataactgacttaacatcaaagcgaacaaaatctgcttctgccctcccagcctcctgaatattgttaatcattagttcatacaattagcctaagttttcactagcttgaatcaaaagggtgttggtttttcctttgcgtgtgatataaccacataagtatatgagataaatcaaacatgactttagttttctatcttgggctctttattatgggtgtgcttatatctgagacaagatttaatggaaaatttggtgagtaaatttgttaatttcacaattgtctatgaat

SEQ ID NO: 198900 - DNA, 371 bp, Glycine max
agcttgttgtggttgaccggcactttttgatatttcacaggcctgtgatcaaagcaggaaaccctagggccctattggacctctccaggtccactgggtgtcgaggaggcgctatccctgcaaactgatacatagcatctgagatcaactgggaaatatgtacactcacctgagtcaggatggtgtacaccagctgacacttcagcaggaggaggtctgagttatggtcgttggggagaatgttaccaagcagcaacatcatccaaatttgtgtgagggtggtcatgctggtacgcatgatctgcacctctcttcccgctacgctctgggcaaaatcctgccctggaacacacaacaactggctgatagcc

SEQ ID NO: 198901 - DNA, 458 bp, Glycine max
  unsure (1)..(458): unsure at all n locations
tcttagtttcagatgatgcagatgggtttgtagctacctcatgttctcctctaatgactatggcatcatttctggcactaaactgctgggagttggaggccatcttctcgattaaatttctggcttcagcaggagtcatgtctccaagggctccaccactggcagcatctatcatacttctctccatattactgagtccttcataaaaatattggagaagaagctgttctgaaatctgatggtgggggcaactggcacatagtttcttaaatctctcccagtactcatacaggctctctccactgagttgctaatacctgagatatccttcctgatggctggngtcctggaagcacggaaaatattttctaagaatactctcttaaggtcatcccagctcgtgatggaccttggagncaggtaatacaaccaatcctttgccactcctctaatgaatg

SEQ ID NO: 198902 - DNA, 424 bp, Glycine max
agctttacagtagatattagtaattaccttttatctctagaattaaaataacttaatgccattaacctaaggaattaaaacaaactaaatggctgagtgtaactgaaattgttggcaaccaaaagtcacccccaacagccaacaagtcagtcaccatttggtctcccaaaaggctgatgcctaggttgccaattgggcccttattacaacttgaactaaagcccttttagttgattaacccaaaacatatttttggtcagccaactttacaaggattgggccattatttagacaaactaaacactctaaaattgaaataaagtggtgtcatttagtcctccatatgggccatgatacaactcacaaccttggacttttctccttgaaacttgggcttgtattcaaatagtatggacagcacttg

SEQ ID NO: 198903 - DNA, 419 bp, Glycine max
cgaatcggacctcagtgtgaaatgttatgaccattttattttcacgagagcttccgctgttcattttcgaacgtctctatatgtgatgcgccttaatctaacatccgtgtgaaaagttatgaccatttgaatttctcaagagcttacgttgttcaattatgagcctctcgacatattatgcgcccgaatcggacatccgtttaaaaagttaagaccatttgtatttctcgaaagcttccttggttcaattccgagcatctcgacatattatttgcccgaatctgaccttcgtgtgaaaagttatgaccattgaatttctcgagagcttccaatgtttaatctcgagcgactcgatatattatatgcatgaatcggaccttcgtgtaaaaagttatgaccatttgaatttctcaagagct

SEQ ID NO: 198904 - DNA, 458 bp, Glycine max
  unsure (1)..(458): unsure at all n locations
agcttaaaacatagaagcatgnnattaatttgtttttngnagaaaaaataattcttgtaaaagaagagaatgcataggagcttgttaaacttttatccttggacattatatgtagacttttagtgtcacaaaattcaaataccaacaacaccccgatcttaagataaaactggtaacatccttaagttcaggtaatgaaaataatatccttattatctttatctatacaacatcctataaatttgaaacataacaaaaattcttaagaactagattattcattttcaagctgcagacatttaggtatttcaacattattgtcatttaaactagattattctttctaagtatatattgacatgaggtaatcaacactggtgcatgcttgcttagttctgatacataatgagattgagagctntatagtntattgaattgatatctttattagttccctg

SEQ ID NO: 198905 - DNA, 459 bp, Glycine max
  unsure (1)..(459): unsure at all n locations
tccagaatggtgtaccacgccacgggtgctccggttaatctgtcttgaaagaagtgcattaacagctcttcgtccatagaatatgtccccatccttcggcagtacatccgaagatgactttttggacacgtcctccctttatatttatcaaaatctggtactttaaacttggggggaatgatgatgtctggtaccagacacagatctgccaaatccgtgaacggacagttgtcgaggccttctaccgctctcagcctctcttcaagtagatcaatctttcccttgtcttttgcagagggaacgagttcctaacgggtgcggatggagacgggacgcggcgaactatgtttggttggggtaacttattacgagccggttccttgaggggaagtanagggcctaaatgggcatctgcttcatcatcttcttacagaggatagtcagcatgaggagggagct

SEQ ID NO: 198906 - DNA, 465 bp, Glycine max
  unsure (1)..(465): unsure at all n locations
agctnttgctttaagacattagntcttgttagtattgcttctttattantttctggaaattgttagtttagtataggtccttgatttttgttttatttgtaataaatgtgtactccttgtgtttgaggcttaaagcttaagtatagagtagttgctttcaagaatagtgttgctatggaaatttcctttaaatttcgcggcaacgtcaaaccaaaatcctacccaatgttttgaaatccatcatactgcgcctttagaattcgaagaatggacaatgattttaatgggtcccaccactgtgttatactgtattaaatatccaataaatatacataaataatggaatcacgtcttaaacagaaatgttacataacaatactacaaataatcacatactactatgctacgaataatcactgatctgtttttttttcttgggggtgtaaaataaataaatagttactg

SEQ ID NO: 198907 - DNA, 452 bp, Glycine max
  unsure (1)..(452): unsure at all n locations
tacggacctataaaactcagctntaagtatgggtacattagtattttctacatacttcatttntagtatatagatattgattgtgtctgagtaatgtcttatatgctcctaatgttgcacaagccttggttttttctcaattagttatgcaagtctaaccaagtttttttttttattaaggtctaaatgaaggaaatgcatcattgcgagttgcttactccatcaatctcttctcatgcctactcaattcagacttctacctcctttcgtcattggcatcaaagactcggtcatcccattcacctctcgtgtccttcattgtgcgcctcaagtcaacaaaatttctattcttgtctcatctggagtcttgtaattaataagagtcataaattaccattcaatgaatcttctttganccgcaccaatcctttagatattatgtatatagtctg

SEQ ID NO: 198908 - DNA, 403 bp, Glycine max
  unsure (1)..(403): unsure at all n locations
gacctgcggcatgcaagcttgaatgacaggantattatatatctgtttgcgcctctccttccgcgggggaacggaaaaaggcattgcaatatttgactatgagattatttgtaatgctttgatatattgttgtagattcttacgcttctacaatttggaggatatacactagtgcaaaattcagttgatctgtatcgaagctttgggtttgatacacagccagtcctcattgggctcatcatatttcaggtatttttcaaaattatggtctttccatctaaataaaaaaatttagaagattatctatttcctctaatcatgcttgagaaagcttaaaatatgatattaaattgtatataatttgagaaagcgactagcactcagctatatccatctcttactt

SEQ ID NO: 198909 - DNA, 326 bp, Glycine max
tgaatccactagaagagaaagaatatggtattataacttttattgaaaatggtagtcaatttgtcagattgattgtgaaggcatgcattgactgtatcccaatgagagtgtgatccttaaatgttgagagaaacaactatcatttagtactgactttgcatgaatctatgaagtatggactgaatgcatgaattaaggatgatgaatgccatgtttgattgtgatagccacttatccaaaaagctgaccacgtgcttgaatgaattatcccttgcacccagtttgagctgaatgaattactgattgttgaaccttgagcccataca

SEQ ID NO: 198910 - DNA, 417 bp, Glycine max
agcttcaacattcaattttaggttctttaatattacgggactcaatcggacatccgagtaaaaaggtattgtcgtttgaatttgctcatagcttccgtattcaattgcaagcgtctcgatatattacaggactcaatcagacatccgaggaaaaagttattgtcgtttgaatttgctcagagcatcaagattctatttcgagcttgtcgatatattaggggatgcaatccgacatccgagaaaaaagccattgtcatttgtatttgctcagagcttcaacattcaatttcgagggtctcgatatattacgagactcaatcagacatccgagtaaaatgttattgtcgcttgaatttgctcagagcttccagatgcaatttcgagcgttctgattattacgagactcaatcagacatt

SEQ ID NO: 198911 - DNA, 392 bp, Glycine max
  unsure (1)..(392): unsure at all n locations
ntgacaaaattcaaacgacgataactgtntactctgatttctgattgagtcccgcaatatatcgagatgctcgaaattgaatgttgaagctctcagaaaattcaaacgacaataactttttactcggatgtctgattgagtcccgtaatatatcgagatgctcgaaattgaatgttgaagctctcagcaaattcaaacgacaataactttttgctcggatgtctgattgagttccgtgatacatcgagacgctcgaaattgaatgttgaagctctcaacaaattcaaacgacaataacttttttatcagatgtctgattgagtcccgtaatttatcgagacgatcgcaatagaattctgaagctctgagcaaattcaaacgacgataacttt

SEQ ID NO: 198912 - DNA, 397 bp, Glycine max
  unsure (1)..(397): unsure at all n locations
gcaagcttgaataagttttgaagatgttttgtctttttcntgtccaactccctttagtggcatttatattggttgttatcttggctgtcgcatcttantacatatgatatatgtattgcatcatgcatcatcatggttggtgtgaagaaaagtttctaagttagaaaaatttcttcaagaggcaaaactctctgttttaatcgattatagggttatcgtaatcgattacaacaagttgtctgaagcttgtagagttgagtctcgtatcggtttaatcgattacaatagtgtcataatcaattacactgttgtttgagacaatgactgacttattcaagagtctctaccttaatcgattaccaagtggattaatcgattacttctttctcgtttagtt

SEQ ID NO: 198913 - DNA, 280 bp, Glycine max
  unsure (1)..(280): unsure at all n locations
gcttctagccgaatggacttaccttgaattaatacctttgatatccctttttagccttgnttccctttccttgttttgaagctcactataagccttaagtgaaaaaccatgatatcaccaaatctttaaggaattctggagctttggaattgttttgggaataactgtggggggtttttgtttcattggataacatgttttggtggctatgcttcatgatgtattttgggccatacttgatgtacattgtatattggttaaatgttggacatgctgaatg

SEQ ID NO: 198914 - DNA, 368 bp, Glycine max
tggccttgaatcagaaatctgtaccagtcgcaagagtctgtggtttatgctcctctgctgaccaccatacagacctctgcccttccatgcagcaacctggaataattgagcagcctgaagcttatgttgcaaacatttacaatagacctcctcaacctcagcagcaaaatcaaccacagtagaacaattatgacctctccagcaacagatacaaccctggatgcaggaatcaccctaatctcagatggtctagccctcaacaacaacaacagcagcctgctccttccttccaaaatgctgctggcccaagcagaccatacattcctccaccaatccaacaacaacaacagccccagaaacaacaacag

SEQ ID NO: 198915 - DNA, 443 bp, Glycine max
tctcagctacaaagggtcgactaacctcgacatcgcacttagcaccattctcacgcttagcacgagtaagtgaagtgtcgctcagcgccaaagacacgctaagcctggaaggtgacaaatgactcgctgagcgagctgataatgcgctaagcgcatgcttgcatgacagattctcttgcagagtcctcctatccactaagcgcgttgatgcctcacttagtagatgacactcgctaagcgcattgagctttcttagcgagacatcaactttagcacttcttcaaaataactcatttttgcctgaaattgaagagaaattgcattaattccatacacaaggattctactgagcacagataaaaacaaagcaaaagttatttacaatcctactaaaagaaccataaattagaataaatatatacatcttggtaaagttttctata

SEQ ID NO: 198916 - DNA, 465 bp, Glycine max
cctgaggcatgcaagcttctcttcaactccttattctcttaacaacttattttaaagccttagaagagtaaattgtttaattagtaaaggtttagtaataattaattcaaccctccttcttagttattctgaggccactcgatccaacaagtggtatcagagcaggtttcttgtagaaagtttaaccacttcaagattaatggcctctttagattctttgtctttcaaaagtattttcaggaacaggttattccaagatcatgatgaagaccaagtcaacttttgtctcatgacaaaatctcatgaaaacaacaaagaagaatctgtaaggaagaagtggtacatcgacagtggatgttcagaaaaatggacatgttacatacggcgttaacaatatcagtaaaatctcaaaagatgtaacatctaagccatctctatgaattaaggtatgattagtatttacag

SEQ ID NO: 198917 - DNA, 348 bp, Glycine max
  unsure (1)..(348): unsure at all n locations
tgggtggcctagacgatcatgcaaaagtttgggatttgaaattgcatattaggaaacagaanagttgaatttcaggtagtaaagtcctcttgattcacgtccttctccaatcactcgacctgtgccatgttcctgaataacacaggaattagaagtaaatattattgaacaatttaatgaacgagttaactgaatcaatgaaattagattacagggacactgaggaataaataaaacataatccaactctaatgaggaagacaaagagactggaccacttccttaagctgcanatttggaaccattagctacataacaaaatggggaatttttggaaaagacatgaat

SEQ ID NO: 198918 - DNA, 464 bp, Glycine max
  unsure (1)..(464): unsure at all n locations
agctntacatgtgaactccacatacaacagtacttcttttcttttgttatttcttgaacagtaaggttggctatacacatatattatcttgctctgcgatttggtcggttcaaaaccccgccttaaaaagtttttgtggtcacattcttatccccgtgttttcctcgccacgtacatcctatttttattctattaatttccctatacctttgtcctgatcaggaaaaaccatgtataaaatttcctatggttcgtgattatataaacagaaagaccataactataaacagaacaaaggtgggtgcgggtaatgataccatcccttcctttaaactccacaattaatataatgacatattcatcacccaccaacaatattttgatatatanttgaccaaagttgcgtaattaagttttgagctccacaattaatatttttttgataaaaaaaattaatttgagct

SEQ ID NO: 198919 - DNA, 452 bp, Glycine max
  unsure (1)..(452): unsure at all n locations
ntggaataataaattatcaactctcgacttctcatacatgttgcgtgtctgagtctgtcaatgccaaatgggaaatggatgtgcatgtacaaggcacttccaaagaacaagtccactcgttgaaaaattccgaagggaagtttgaaaaactagttgagtgccttttgacaaacatgattcattcacatttaagggtgtaagcttaaaaaaagggataaaatggatagcataagagagattgataaaattaggaaaaaataaaaatgttatatgaacacttagaaagacaaaaaaaaaatataaatgtaatatgattatgatgtaataaaaaggaagagataaaaaaaatgttaatgtgatgtttaatataatagagtatttacatataaattataaaattagtatgtgatataataattaaaaaaatatataaagagatagaggatgttaac

SEQ ID NO: 198920 - DNA, 456 bp, Glycine max
  unsure (1)..(456): unsure at all n locations
agcttggtttgtgagttgatttanccttattttattttgattatcagtcaattcattcaaggaaactttcaaagaaaaatgtccgattgattttttttattattttattattatttttttctagatatttttattattttattattattttgcttttttgatttaattgaagttacaacgtgaataatcggttggattttattttaatagtgattaaacgatattacaacacaaatgattggttgaaattcattttatcaattattaggagagataatggcttaaataaacggtaaaaagctcgttaaaagcggaataaaagaaaatcgaaagtgaacgagatgaagatgaaaacaaacaaaacaagaaatgaattgaaagtctcggattcaaacacttaccggttgaagactgaagaacgaatgaagaacagacgaagaacggtgaagaacgacg

SEQ ID NO: 198921 - DNA, 476 bp, Glycine max
tctgatccacccaaggaggaatacatacatgttagagctcgtctgggtcaagcaacaaacagccatagccttgcagagagagtaagattttgtgagaacttatctgtaatgaaaatgaagtttttgtatgaagaattttaaattagattttcactgcaggtgaggagggaaaagataagtgagagaatgaagtttcttcaagatcttgtacctggatgcagcaaggtggcttctaagtttgaacccacaaaattcactatgtcatattgttatttgtgtttatgtatcacatccttttaacattgttatgtttacttctatgcttttaggtcactggcaaggcagtaatgctagatgaaatcatcaactatgtacagtcacttcaacgacaggttgaggtatggatgaaaagcttatcttcctatttgccacatgtgattcttaagtcatgtaactgatttgccctgtatagtctg

SEQ ID NO: 198922 - DNA, 390 bp, Glycine max
  unsure (1)..(390): unsure at all n locations
agctnggaccatgaacagaatattaanaatccttatcacgcatttattattattcaacaaaagctggtagctagagggggccaataatacagataccaaaacaagataacgtcctttttctttttctctttttcttggttgcgaccaaatctgcaattgctttgctttttcattttcataaaaatgaagggctgtcatccatttggtacatgcctagatggcaaagtttgcgccttagcctgccaaatgtgaggcaaggataaccaccacataaaaagggaaaaagaaaaattcctaaggtggtgtaattccacggcatctttgtcatcaaaattcaaataatgtcaaatatgagaatttccattttcttaactcttctcatttggatct

SEQ ID NO: 198923 - DNA, 433 bp, Glycine max
  unsure (1)..(433): unsure at all n locations
nttctttgtgttagcgtttatcttctttcttccattattttctttgtgtctgcttattcttcatcatttcttcaaacgttcctaatctccttttgtctcttcttattcttagtgcagctgttcttcttcttcatgcgttcaatgtgtcttgtgctctgattattcaaaatttcacaatttggctctctatttttttagaatttcacaatttaattctctggtcttttagaatttcacaatcatgttgttcatgctttattgaggagatgggagctttgaagaatattggtgggaatggaactttaaaggaggaggaacctattcgacaacgagattgatatggaagccagctttctatgtgaggtggaacgcacccaactacatattaacagaagagatgagtggactcggctcgcagatactagttgtgaat

SEQ ID NO: 198924 - DNA, 444 bp, Glycine max
  unsure (1)..(444): unsure at all n locations
agcttttaactactatagttctgcattctttctctgtacgtagcaaaaggtcctgttgttaaaatnttatttatgtatagaagcaaagtattctttcaccttaagtctcgatcatatcgaaaattttgaaatgttaaacacggtcaaagccgaaatggttttcttcttttgtgaatcgtggacaacgttttgcttattatatatggaattcggagttttcaaaccattgacactttttttataaactcaacggaacttaccttgttcaatggaagcacctaatcccgagtttaatttcatgcaatgaggaggccaataaaaataataaaaacataaagtgctgagcaagtggtttctgccccaactcaaataaatatgtacgaaaaaattataccattggaaggagtgatgcgttgagccaactaatatattaattaattactg

SEQ ID NO: 198925 - DNA, 436 bp, Glycine max
ggcattctaagcattgacttcgaagaatttgcagattattaacacaaattcaaaagaaatatcaccttgtttccaaataataatttattttttttaaaggcaaaataataatttctttgacaatcacaagattcacatcgaaatgtaagcttatctagtcaaaatgcatggcaacgaaatgctgtggttttgtctagttattacttcatcattaatttacaacgtcattgatttgacacaaattgatgatgatcgatgtaaattgttttttcacaacaaagcaaagagattgttcaaaggttttaataggaagaattttcggtcaaaaagtttttatatcgttaatcaataaacaattattcttaacatcattgtaaaataattattataaaattaaataaacttatgatatcttatagttaggatataatataaa

SEQ ID NO: 198926 - DNA, 422 bp, Glycine max
gacctgcggcatgaagctttggacatgcagctaaacactcgttcctttcctgcggcctttgtgacatttgcaaggtccctactcagtccagccacaacctgcaatcctttctttctgaactcatcctcgttgaattgggaattcgtttggttttgaacattgcagtttgcagattcaccgcctgttccttcagatctaatgatctcttggaccacaaagtggagcagggttgtcttcccatctgtgccctttatgtctacaagttttagaagtgtgtccagcttgaaagatatagcgccaccgcgatttgtgccaacattcattctggttcctgtccttagaacagcttcaagaagtttgaggaataaccgactgttctttaattcctcactagccacctgacagatatcaacaactgattg

SEQ ID NO: 198927 - DNA, 472 bp, Glycine max
ggtttactaaacactctaacaagctgttcagccaatatttatttatagaaactagctaaaatgtcttgttaaacactttctatattacatccaacaacacacatattttttttttaaatgggacaaaaaaatagtctataatatttttacaaaacaaaaatattataaaattttacaaaatacataatcttatacctttaaatatgtgaatcaactaatatgagattgcttaaacttaaggttatttttgacattactaactaaaaaacaagttgaaagttgtaaagccaactaaaagctacaaaattagtgatagctgaaaatttttaagttaacttattaaattataaatgttcaatacaattatatgttaaattagctaaacaaatataaataacataaatgaacataattatttgatatttttatataaattctaattctattctatgaatacaaatattctttgagg

SEQ ID NO: 198928 - DNA, 438 bp, Glycine max
agcttgaaatgtgtagcttacttcttttatagtagaatactggtaatgggtctactatcattgttatcattttttctccatcatttgaggtgccacttgagctgccaggtctctccacttttggaagtattctttgaaagattcgtgcccctctttgcacatgttctgtagttgcatcctatccggaaccatatcaaaattgtactgatactgcctaacgaaggcaaccattaggtccttccaagaatggactcgggaaggttccaagttagcgtaccaggtaacagctacccccgtaagactttcttggaagaaatgtattagcagttcctcatcttttgtgtaagcccccatcttccgacaatacatctttagatggttcttgaggcaagtagtccccttgtacttgacaaagtccggcacctttgaacttgggag

SEQ ID NO: 198929 - DNA, 397 bp, Glycine max
  unsure (1)..(397): unsure at all n locations
tgtacgggcagccgctctaacatctaatctttgttattttgggaaagngatccatccttgttgccttgttaagaattttataatctatgtacattctccatccggtcattgttgttgtgcgaattaattcatttttctcattcttaacaattgtcatgccacccttcttcagatccacttgcactcaactaacccatgcactatccaaaattgggtaggtcattctagcttctagaagtttcaaaacctctttccttaccccttccttcatcacaagattcaatcttctttacgattgagccactatttaaagtcttcctccataaaaatnttatgcatgcaacaagaaagatgatgtagctccatgtaaagactgtatgcattggatattcttcat

SEQ ID NO: 198930 - DNA, 447 bp, Glycine max
cggcatgcaagcttccatctgtgagtttttttttttctatcttttcacgctttaattcattccccacaagtaagtgcaatttcctttgtttatttggctctccattgatgtgttttggtcctttaatggctcatttttgtgaaattcgtgaagcaattcacgtctgaatccatgctcgttttgtttatttggctctctagtaaaagtgaacaagcaaaaggggaagaatctagtgaagagatctacccccaagaagaagtacaacctttaatggttaaggaggagtgtatggaggtaagtgtctcctccaagaggttatctaagaaggaaagacatcttgaaataaagaccaatattaaagaaatttccttcttagacaacctcctcatttctcctttgtaaaacacacttgttgcattgcccatttcttaagcttgagttatttct

SEQ ID NO: 198931 - DNA, 374 bp, Glycine max
tgactttttttttagagctatccgcattgcccgtgtatatccgactgaccataatgctatgcacgcaccccattttagaacttgccaccacctgtatcgccccacaatcatgtcataatatgacgggactacacgtatctgatacaatgaaagttgattcacacatgataatctctctcaccgatcaccctatcgcctgactagagacttttaaatcaccctaacgccttaactaacccactattggcaacctgaataatataatctgtcccacgcctgtggttaggcgaaatgctataagaagatatttctgaggctccatcatttccatattccatgcgaccttggttgcatgcatatatgcttcaccttgt

SEQ ID NO: 198932 - DNA, 288 bp, Glycine max
cccaccagcaacgaaggacaacaacacaatacccaaaaccagaagaatggtgggagacatacaaacaaaggacacacaggcgagaaagttcaccacccaattagcaaccaacggtggaacgaacaacaaccgaaaggctaaaaaaaaaacaaatgccgaagacgggccaccggccacacaacaaaagaccgaggactcgacgtagcgcacaagagaacagaccagtcacaaccacgaaagacgacccagaaaccgcaacaaactcacaagggcgacccagaacagacg

SEQ ID NO: 198933 - DNA, 324 bp, Glycine max
  unsure (1)..(324): unsure at all n locations
ttatcacnccacaggacaagggngaactctccctggtaataccctcactcaagaccaatgtgggcctccttacaagccactgcaacaagggcctagactttatgacagaacgactacactggaagagactcttgctcagttcatgcgcttatccatgtgcaatcaaaatatctcaagagcagccatcaacaagttataactccactggggacaattggtaaagcgactggcttaccaaccgttaatcangcttggagccatctacacaacaatcctaacgaggagtgtgatgttgttatgactagaagaaaaatggtgaccctg

SEQ ID NO: 198934 - DNA, 350 bp, Glycine max
tccaagcacactttatggccaagttaattagcagaggaatgcttgactaaaagacagaacgttcatggacaatgttccttgattgccactgatatacctcctcaataagctcacatccatcacatgaatctacacctatatgtatgtaccattatgcgtatatatgtatgtacaagagaatcaacgaataagaatacttctttagcatacacacatgagtggacggctttactttcttaaaatgcacggatatcctttattgtcgaaacccttgactatgtatcttatttcttctcacaaaaattgatacctggactgcgaatctattattcattaattgattgtttaag

SEQ ID NO: 198935 - DNA, 319 bp, Glycine max
gattacacatagacaatagaagacaatagctatgttgtatatggatgccttctatatcaggatctttcgttcttgcgatgttatggaactcaaaaaagacacatcaggaggaacattattaaggtaaaaagctcaagcaagaattctttcactgctttcttatttatactacgtcaagttaattacaatgacaactctagatacaatcgaaatgctaaacgcaatgatcactacaaaagctcgagatatgtcaataaaacttatgtactcataaggtacacagagaatgatttgtcgagtttctcaccaaatacctaag

SEQ ID NO: 198936 - DNA, 474 bp, Glycine max
cttgatccgtcgagagatcccaactagttattggctaatagcttttgcgtttgacacgaggccgctattgtgtagagagagggggaaccacaaacactttttgcaagatatcttcagagaagtacaatctatcagtgttgcctagtactcaaaactgactttcagcatacaattcaaaagaaacattaataacataagacaaaaggaattaagaatatcaaaataagacaatttaaatcttcccttttgtgcactatggcatgagtttctcactgagcctatgacattactttcttgtgattgtttttaatactgaggatcgagtaactgctccattgcttttctactatgagacaagtgctaaagcacttgtcttttcatgattggttactaaagtagtatcgtccaatgactaatactttgcctatcatctagatatattttggtcatgctcttttcttatatctcataaag

SEQ ID NO: 198937 - DNA, 463 bp, Glycine max
  unsure (1)..(463): unsure at all n locations
agctntgctaaagctaaagactcgctcttgctcttctattctctcaaaacacaacaagaataaaagcttccaacttaaggtctaaaagaaagtacatatagccttaggataagtaactgccagcatgttttgatcacgactgtggtgactttttgtactcaattttgcatttggccgagatcgaaggatcatggcttggataatcgtcaactattttccaatgttgggccatgatcaaaccatcatagccttggtgacttccaggttgatcacgactgtgatgactgatcacaaccatgatagagtagccagattcctcacttcatcaatttggcctattttgagccttttttctcaccaaattctccctaatcacttggttaacaaatctaattataaaccatgacttttgccaacaaattatatcataaatgcacacaataggcctataactacacatcaa

SEQ ID NO: 198938 - DNA, 432 bp, Glycine max
  unsure (1)..(432): unsure at all n locations
actaagcttntanacttaatacatgaagctctgataccacttgttggtcttatgttctcagttatgttaagaagggggggttgaattaagatacaaagactattccccaattaaaatttcactctctttttttggattaacaatgcacccttaacatgagttactcaaaagacaattcaaaataaacttcttaaaagaaaaagataaatagaaataaataaaagaattttaagggaagagaaaaatgcaaacttgatttatactggttcggccacttccagtgcctacgtccagtcctcaaacaacccacttgagattatccctctctttgtaaaactccttttacaaagtctgaaccacacagggacaacccttcccttgtgttcaggaatcctttacaacaagagaccctcggtctcttaatcccttttc

SEQ ID NO: 198939 - DNA, 434 bp, Glycine max
  unsure (1)..(434): unsure at all n locations
agctntgtgtaatcgattacacttatttggatatgtattccagngctagnnnctgaaaaatctaaagatgtaactcttcaaaaaggttttgactttttcaaatgggttttaagtttttctaaaagttataactcttctaaatggcctttttgaccagacatgaagagtctataaaagcaaggctttgttcttcattttcaatcaatctttctaacaacaatcttgaatacttttccaatcatttcattacaatcctttacaagccttgaatctctttgaacttcttcttcttctttgtaccaaaagttttctaaagttttctggtttttcaaaccttgaaaacttgtgctattcatccttttcattctcttctccctttgccaaanagaatcnccaaggactaaccgcctgaattctttttttgtctctcttct

SEQ ID NO: 198940 - DNA, 473 bp, Glycine max
  unsure (1)..(473): unsure at all n locations
tagaggaacactcaaactcggtatatttaccctcaaggtctatactccgaagagtctgtcaaaccccctccctcctaattaaggtccaacccataaaatattttaacatgcagactctatctatgaactacacaaagcaaatgactcttcaaatgttctcaaaataattttaactcgtcgcgcctcaaagtgattcaactcattgggttcccacagtggatcccatcacaatactcatcgcgcattaactcattgcctttataggttcttacattcgtgcgattgtacggttcatagctcataactcaatgcaacatctcaatacacgtgtgatctcacaatttaacacatactcaacttgtcacttacacacagttcatcacactntcataatcccaagacatcacgttatcatgtctcatgtatcatatacatatcacacagtaataatattaatatgttatgttcatatg

SEQ ID NO: 198941 - DNA, 429 bp, Glycine max
  unsure (1)..(429): unsure at all n locations
agcttaaaaagaagtgtttcctttagttttatgtcgaaaaaacacaaatatttactggtctaaatttaaactcgttaaatgtgtaaattgtttaaagtgcaaagtcaatatgtaaactcattgtaatctataaaaatattaacatatacaattcttttagtttaatatttatgcaccggtaagataaaaaattttatacaatcatttaatcataattcaccatatataataaatttattaacttttaaaataattatcttaaaataattcaaataataatttataattaaataataatataaaataattttatatcatatatgtataaacattaaactcttattttaaaaatcaacaaatgtatcatatataacaaatttatcatatataataaataaacatgtttaanacttgttacccactcagtat

SEQ ID NO: 198942 - DNA, 300 bp, Glycine max
aaagtccaattcatggattatcctatgactctcactaatgaatagcccagaacattatgtttgttttctttccctcgaacaacttattaatccttgattgaaaatgcacacttatataatatcagactcattgatatggatttgcagagcaagatcttcgagacattagacgctccattcacaaagaggggattgttactaaagattttgatcctgggaggtggttacaccctggcatacttgagtgccacagcgtcaggtgacatctaccaatcatgaatggcccactacttccaccaa

SEQ ID NO: 198943 - DNA, 430 bp, Glycine max
ggcagcaagcttttctgataaaagaaagaagatctttatcattcccattatctcagacaaaaacagaactacattgcttgaagatccacttccaactcttgaaacagcaaaaaagaactgcatgcaacccaaaaaatgaaagttaggctttataataagtcaacaatacaaactgtatctcttactgtatttagcgaagccaaactatacctgaacacatgatattaggactagatataatcctagccaaactctaaatacacaagataaatctcaaatcaaccacatatgaagaaacatccttgaaattatactcaaaactaaaagaagacttttcatggtttacaccaaataataaagcttgtccaagcacaaatccttctaaactaaccataacccatatggcatatagtaacttgctataacttca

SEQ ID NO: 198944 - DNA, 435 bp, Glycine max
  unsure (1)..(435): unsure at all n locations
tgcattcataatttcagagacccataaaatataatgctcatagtgatgaagttaaggggaaaaaattcagaaaaatggaagtacccaacgctttcaagaattagactggcttaattaactgcatgaaccttaaacattttcaattcgtcctccatctctgtatatactagtaaaactcgaacctcgaaaaacaccccgtatgattaagaattagtgtaatagggaattaaatatcaacgtattagcattaccgttttagacttcaagttaattaccagtaatgctaaattaattagatcatgacaaacttattaanaaggtactatcatttaattagatgcgtgtatgcataacaagtgcgaatgcttactattggttcgccatgtgctagaaaccaattagtttcttaagggcattcagcatcccctttggact

SEQ ID NO: 198945 - DNA, 453 bp, Glycine max
agcttgccaaactgttcaaacgtatcctttatctttgtatcagatagcgaccacgcaaggccgccactgaaacatcgatactcttccacgtcagacattttaaactacataaatgcaggaagacaagcattagcacataacgtttgaattaactatgcaggataagccatcccaccatccacacaaataaggggcagaactatcccctgttaataaaaacaattaacttccaaaattttaacaaatgggattctttctttatgaaacaaaagacagcctaacataaggattaaaagtcgaaaatagcaaagaaagcaaagctgccacccaacttcctgattattagcatctacacttcaaaggcataaaaggatgcaagtccatgttctataaactaaatgattaaatatttggcccataaaggcaatttgggggttcctggattattgataa

SEQ ID NO: 198946 - DNA, 342 bp, Glycine max
  unsure (1)..(342): unsure at all n locations
ggacacataaaactcagctctcctctctcacngcagagcttaactaggttctttatgaaattccacccacaccgccagggaccacatcacttattccaattctgcggggtcctgctcctgccatatggtagcaccatctcagcgctctgagaggagtttcgttccattttaagagtaaagagaggtgccatgagggattattatttnggtgttttcttaccattggagctccttctattctatgtttgactttgaagtagataccatccattttgggagtgacttgaacctatttaaggttgtacccgcattttcattatattatatatgagtctatttatt

SEQ ID NO: 198947 - DNA, 455 bp, Glycine max
tcgactccctcacaaagatgactatactcttctggattttaatcccatttttcatcacttgcaccaccaaagcaatactcctccaaatttggcacaccaagctgaccctacttaccatcctaggcctgtggcgtcaacagacccatctcagcccactcactcctttacttccggtactgtcacattgcacgctcttgaccagcagcctggttcgcctccttttttccctatgcaaactgggccagtccaccagcaagcccatcatccctccccagatcggcctacaaccattcccacaccgttgccaagtctacccctcatcccatgacaactcgagctaaaaatgggatctacaaaccgaattagaaatatttttctaattttcatgccatgagtaccactactatatctcccttacccaaagatccagctagtgctattcgtgacccgaattg

SEQ ID NO: 198948 - DNA, 460 bp, Glycine max
  unsure (1)..(460): unsure at all n locations
agcttgtcactatagaatgggattttgtgttgtttcccattaaagaaagaggtctcgggcttaggtctattgttcttatcaataatgcggcctcccttaaactttgctaaaattttgtccatgcagatgaggaatggacgcattttctgcaggccaattttctcaaaaacacaaaccatctatccttttacaagaaatcctcgctttggccttccctcaataggcactttgaggaggtttgttccaatattggttgggtccttagtgcaggagctttaactaacttttggaacaattattggtgctcgctctctcctttgtttgcagctctttaacctcccccccctcggtcagcaagttgttatccttctcgatacaggattttagattagaaagaagttggaatatcccgcctanttatttagccaagcttcctgccattcaggaggccatcaataat

SEQ ID NO: 198949 - DNA, 404 bp, Glycine max
tgggttcctaggcctagaattgcattcgggcactcattttaatttcttcatgctgtccctatacatataaaacagtcccacaacccaaagctctcaaaaccatgctcatatctcgttgaggcatttcaccgagcacttggtgggcacatgtttaggcacgaatatcaagagaatggggacaatgtggcatgcgccatcacttcagaatacaccctatgccaaggccatcccttacaacccctcaatccaacaaaaacaagcaacaatctgaggataaatccctcacgtttcttagcaaacacatgcaatttgagcaccaaaatacatcaatggaaagctagaaagcccaagaatgaggtacttacttgttggagacgaataatagagcaaaacggaatcaaaaa

SEQ ID NO: 198950 - DNA, 459 bp, Glycine max
agcttactaaaatgcattatgagtttttctctttttctaacacactctactagttaaaatttattgaaaattacatcaggagagacttgttaaataagtaggacaccaaaaaatttgtgatttccaataaatttcaaccaatagtatagtatgtttgaaaaagtgtgttaaaagagtgcattatcatttctcaaagcattatatatcagaatatagaggcttcattaagcacatttcatcaacatacacttacaagtttcaaccattgatggtaggtctccgtaatgtttgttctcctccaagtttcaagatcaataatattcatgccatagagccatgcacactgatcaccgctcaagtttgatgcaacaagaggatgtgaaaagttcaagtagtttatgtatttacttccagggcagcagccgtgtcacaccacgactggaatacagaaccaatgac

SEQ ID NO: 198951 - DNA, 396 bp, Glycine max
  unsure (1)..(396): unsure at all n locations
nngtgactatatttgtgttggatgcacgtacgttatgataatgcaaggagatacctaactagcatgaggaaaaagcagcctgtgccatttgctcaaaaatttcccaatgcagaccctttagcactaaggctactggaaaagttgttggcttttgatccaaaaaaccgacctactgctgaagaggtatgctacattgtgctctattgcttatttatgtgcattgaaatgtatcgtagttgaatccttgactagttcttgagtttgtcttttcatttggacagtaaaatgtataaagaatcataacattgatagcactttataatattgggtcttgactttcatgctcaagaatttnttaaatgtttgtgttgttaggctttggctgatccttacttc

SEQ ID NO: 198952 - DNA, 104 bp, Glycine max
ttggtaacccactaaattggggtacctgaccatctttatggacaaccaggcttcactacaaaaactgctgctttagataacctaaaatagctatttttaaatac

SEQ ID NO: 198953 - DNA, 317 bp, Glycine max
  unsure (1)..(317): unsure at all n locations
tccactctgtagactcacacaaagtcaattatttatttatctcatacaagaaaccatganataggggacattgctactttatgccttttaaatgcatttagtactcttgaatagaaattatcagtacccccttagggacaaccacctatctgcaataaacttttaacaaacataatccagcaccttctcactacaaggaatggtcgtggaagcgttaacacccatgcctatataacatgaaatatattttagtgaccagtggtcacacacaaaatatggttgtgtacacacaaaaattttacctttatacactttta

SEQ ID NO: 198954 - DNA, 357 bp, Glycine max
  unsure (1)..(357): unsure at all n locations
agcttgcttgtgaggcatctatttttgttgtatctttgagcttcaaggaggccccttaatggtgattntccaccatggagaggcagctcaatacaaatgagaataggtgagaggaggcgccatccactagggaatctgccatggaagagcgagtcttaccaccaacacgagccttgtataataatcttggaaggatgctttcttggctgacatgaaacagggatataaagagagatggggggagcacgaaattcaccgaaaaaaaagggagagaagtggacctttgaactatgtctgcaacactttcattcatcaagattacaacaagtgtcccacacgctcttatttatagactat

SEQ ID NO: 198955 - DNA, 421 bp, Glycine max
  unsure (1)..(421): unsure at all n locations
actaagcttatcgaatactttctataacggggaagagtttgttggtttcttgcgtccgacanaaagccatcctaagccatatcccacgggcaaaaacgttcgaattgcgaagatagcttcattcaaatttgcaattatgtttctacctacaatcaaattgacagcttgcaaaagcaaaaattaaatattgttacgtacaatttcaaagattaccatacattttattagattatagttaacgacgataaaattatcaaatactaccaaacattttatggctatgactttctacaactataagcccttctaatattagggataacaacattatccaaccttaaatataatataataatggaagtgtaacatggatatgtccatatatgaaacaaatcttgttacatattctcaacaatcaatt

SEQ ID NO: 198956 - DNA, 436 bp, Glycine max
agtccacggaggaaatgctgaccaccttattttatttattgcggatcctaatgactcctctgcggcttccacataaggcatagaggatgggcagctcaccaagatgtctttcttgcctgatacgatgaccagacgcccttccactacgaatatcatcttttggtggagtgtagagggaacaacccccactgagtggatccacggatgccccaacagacagctgtagggggggttaatatccattatttggaatgtaacttgacaggtgtgagggcctatctgtactgggagatcgatctctccctaacctctcggcgggtgccgtctaatgcacgaaccaccattgaactcggctctaagtgggaagcgttgaatgataatttctccaaagtgcttctaggcatcacgttcaatctggaaccattatcgatgagca

SEQ ID NO: 198957 - DNA, 430 bp, Glycine max
  unsure (1)..(430): unsure at all n locations
agcttccatcatcaatctttgaaagaagatttattttatttatccaaccaacattcagacttaaagaactacgtaggtctgaattcctcatcgaacctgaggatacgtaggagtgaggaaaacacccttgtcaaccccaaaaaaagtaaaaaaaaaaatataaaagggaaaataaatataaacagaaaaataaatgatattaaagtcatgatttgctcactcgattagaggctatcgtctattgtgacgagcgcgtggggtgctaataccttccccgtgcgtaaacaactcccgaaccctcatttcaaaactcacaaaccctttttggttnttctagcattttcctcaaataaacgttgtggcgactccacttgttttctcccttgtagacaaatgtttatgccatttattttggcttttacaccccacc

SEQ ID NO: 198958 - DNA, 476 bp, Glycine max
  unsure (1)..(476): unsure at all n locations
ctaacccatggaagctcctaatatcttgcacactgtatgtggtgtttcattctaggacggccttgattctctcaggttccacttggacctcatttctaccaactacaaaacctaagaagactatattatctacacaaaaggtacacttctctatatttgcatagagggtgcttaacctaaggactgaaagaactttcctgagatgtcctaagagatcatctaggctcctactgtacactaaaatatcatcaaaatatacaactacaaatctacctatgaaatcccttaagacatgatgcataagcctcataaaggtgcttggtgcatcagtgagcccaaaaggcatcactagccattcatactaaccaaacttggtcttgatagcggttttccactcatcaccctttttcatcctgatttgggataatcactattaagatcaattnttgataagatattggcaccatgcaactcat

SEQ ID NO: 198959 - DNA, 351 bp, Glycine max
aaattagcggagggctgacttatgagatctgcatcttttgaaatccaggagatttgcgagttctcttttttaaattcttgtttggattgtaattgaaagaaaagcttttacttcataaaatatacctgattattttggtggaacattcacttttctgaaaaacctgcatgagccagacagtgagtgtgttaggggttcaaccaaagttccttacattttgactatactttcttgggtgagtctttgctacttagaggaacatagtcctgaattatacgaagcatatttggttgcaatgttaatataacaagaaaatattaacccctgagcacggtatttattgatatttta

SEQ ID NO: 198960 - DNA, 435 bp, Glycine max
  unsure (1)..(435): unsure at all n locations
actcagcttctggtctcagactcaaatcgggagcgcgattctctttatgaatcgctntcactagaactgaggtatacgtatagccactacgtgcgtgttgaacttgaacttgaacttgaatttctctcttattcagtgaaattagttgattagtttggctcaaattttacgtcgatgcacaacgaggtggaggagattgaggaatcgcgcgtgaagagagactactattaccaggcaaagaggatggaaatgaaggagttcaaggagattgcggagaggtttgtagtaaaatgtacagaggaagttcacagtgtgaggaatagagtacacgaggtaactacgtcatgattgagagtaaacagttcacttgcttcaattcgcggaatgagaacaaatgagtaatttaccaaggatattgtaatttaccacgagtca

SEQ ID NO: 198961 - DNA, 420 bp, Glycine max
  unsure (1)..(420): unsure at all n locations
ttaagtcacctgcggcatcaagctgctgaaacaaagttgaatttcacttctcttttcaactncnagaataactaaaacaaaatgtcaaagaaaggagaagtaacaatgaccacctttttatagagaaaagagggcccattggccaagggttaaaggcccatcagggaagaaatctaatggtcttgaaagggcatgatgaaacaatctaacggctagggaaggcacacacaacatgaataatacccatcattgctatttcaaaaaccatcatgatatacatagatagtgaagcaaagtgccacacaacttgccgtcaacccaaatcgtgagccaacacaattaaagttgaagtaacgatcacctttaagcatttgcgccaataggctcaatgcttgaggggttgtacaccatccataatgg

SEQ ID NO: 198962 - DNA, 467 bp, Glycine max
  unsure (1)..(467): unsure at all n locations
tggagaggatgcttaatggaggaaaagaaagagggagataaagatataggggggagcacgaaattgaaggaagaaaaagggagagaagttgaactttgagttgtgtctcacaagactctcattcatcaaagttacaacaagtgttacacatgcttctatttatagactaggtagcttccttgagaagctttcttgagaaaacttccttgagaagcttctttgagaaaacttccttgagaagctagagcttagctacacacacccctctcataactaagctcacctccttgagaagctntcttaagaagattcctaaagaagttagagcttagctacacatacctctctaatagctaagctcacctccttgagatgagaagctagagcttagctacacaccccctataatagctaagctcacccncatgacaaanatacattgaaataacanaagagtccctattaca

SEQ ID NO: 198963 - DNA, 409 bp, Glycine max
  unsure (1)..(409): unsure at all n locations
ggatccttaagtcacctgcggcatgcaagcttcatgatgaatcaagagtgaggactgtatgtangcacgggttgttgccgaaccagtataaaaacttttgtgtgtttgtctccttcttccctactcttttaatttccgatgtgcactttaattaccgcttttacttttggttaaatttcttttctattcttcattcacttaacaacatactaaaagcctcagaagagtaaatttttaattagtaaaggtttaggaataattaattcaacccccccttcttaattattctgaggccacttgatccaacagtagtgtagagggcacacccgatagatttcaatgttggcaagccattgctgccaacgttgtttagttgtaacacttcggacctgcatactacaatgtcaca

SEQ ID NO: 198964 - DNA, 463 bp, Glycine max
tgcatgatccaaagcattactgctgctccatctgagattttggaatcaaaagatcaagaaaacacgtcatgcgtttcaatgtagttggcaaacgctactcctgtgctggccgagaacccaatactaacccgagcattctccaagttcactgtctcggagaggatatagcttgctctttgtgaagcaaccaacaggcttgtggatcttgggaataaatttgtatgtccaccattcaagtcatcatgtaatcaattctagttgtaataataaaatattattttgttatcattatcatatttcactcttagattaaatagtccatttgataatgttcttaattaaaattaaagacttgttattataatagagattatgataatgagaaacaagttttctaattttaattcacattgttcttggcataagattattgtaataagacatcatgtggacatgtggcctc

SEQ ID NO: 198965 - DNA, 174 bp, Glycine max
  unsure (1)..(174): unsure at all n locations
tgagaaatcccaaagagaaaacgtcctatctgatttccgctttattttgctaacagatgattntttctattagcatatcatttcttacctcttgttttctatctccaacgtggttacggcacgaccgatcggtcggaattatgttaaccgaagttattcgataatacaattcaa

SEQ ID NO: 198966 - DNA, 399 bp, Glycine max
tgacaggctcaagcgcagatgctgctactggaggatgcatctcaatttgcttgccaaacctaatagtgatggcactcacattatttggattctacacagttttgcgaaggcaatttgtcataatttggggattgagcttgtttcaaatgaatagctatctgccccatctgatttgtcatactatgaatagaggctcttgtctcttgctgaaattgcatattctggattgtcattttcctcactaactcatctaattgcttgttgtctttgttgtgactgttgctgatgaagctgcattggaggatgaacatatggcttgattggaccacaatattctggaaaggaaggataggttgcttctgttgtgcaggacttgtccatctcatattttggatgatt

SEQ ID NO: 198967 - DNA, 361 bp, Glycine max
aacaacgcggagaatcaagaccactagggaagactctaagaaactaatcactgccaagcgtttctaattcgtgatcgacaaagaaacagcgatggtttcacaacattgaagccacatgtctgtgtatggcgcgttgaatttgatactacgatagtcgctatagatttatgtttcttcacagatgtttgtcaaacacaatgaaaaccttttattgaaatctcaaatgggtatcctaaaatttctgaacttgtcatgtcatacgtatatgttgactcttcaaataaatttggttgtatcgtgaacaactatgtgctacattaacgcgcaagctgcatgcagtttgaaatataatatctttcat

SEQ ID NO: 198968 - DNA, 423 bp, Glycine max
  unsure (1)..(423): unsure at all n locations
agcttaaaaggctctttatggtcttaatctatcacctcgcgcctgagttgatcgtttcagttcttttcttcttaaatatggtttcttttgtagtaaggctgatccatccttatttatttggcactcaaatattggatcactgattcttcttctttatgtagatgatatactcctcacgggatccattaccactctagtttctgacttcattaaacttctacaatccgaatttcccatgaaggacttgggtcctctccatcacttccttggcattgaaatactcaaaacaactgataggcttcatctatcgcattcacactatgcccttaccattctcgaacgagctaacatgggtgattgtanaccaaacagcacaccacttgaagctaagatgaagatgacatccaataacactccccttga

SEQ ID NO: 198969 - DNA, 462 bp, Glycine max
gttgacttgagtcatcaagagattataaatatgtgaccatgtgcatgagccttaaaaataattatcattatctctctcaatcaatctttcaatatctttcatctctttcaacagaactttctggtttcatttctcttcatctttctaagagttttttatcaacactttctcttccaagaaaagttctttattcaaaaacttgtgctattcatctttttcattctcttctctcttttccaaaaagaattcaagaaggactaatcgcctaaattctttttgtgtctctcttctcccttttccaaaagaacaaaggactaaccgccagaattcttttgtgtctccctcttcccttctccagagaaatcaaaaggacatagattgaaaattctttgattcttcctctcccttaaacaaagatctataggactaaccgcctgagatatctcttgttccccttacaac

SEQ ID NO: 198970 - DNA, 405 bp, Glycine max
  unsure (1)..(405): unsure at all n locations
gagtctttttcactccttaaaccctaacctttgtgtctttggaagttaggcttcattgcatgttgttgtgatgtttaaaatttggtatctgctgtcatgaatggagctggatgatatgttgcttttctggaagttaaaggttaaaaatgaattttttgagtgttaaaatatagggttagccttaaatttcacttaaatcagagttttctagccaaagtaatgaataaaacaagttttagaactgtttatcgaataaaatctgtcacaaaaataatctggcaatgagagctttgagggataatttattaaatttttgacccttaaaatgagcttgtaggtgtgaaaatgtacggtagcatataagaattgtgaacaaccgatttccagaacacctnagaatttgaa

SEQ ID NO: 198971 - DNA, 451 bp, Glycine max
  unsure (1)..(451): unsure at all n locations
ntgtgccagcatagctggtgactgcaactatccnctattttcttactgttatataatcgccatttccaattctgactntggtgatattggttggcctcaaatctctaaaaagtgttttgtcaaaagtcatatggttggtgcaaccactatcaatcaaccaactttcacttgattcactactcaagtaacaggtggccacaaacaattgatcttcctcttcctgattagcagtctgagctccttcaccttgaggatttttattgtggcaaatcacagtttcatgccccatttggttgcacttactgcattatgcatctggtctctttcagcatctgaatggagggtgacccaatttgcctcaatgctgacaaggagggtaactntccttattaccatttcctttgttgtgattatatgcactgctatcattgctgcgtggatgattcttctt

SEQ ID NO: 198972 - DNA, 421 bp, Glycine max
  unsure (1)..(421): unsure at all n locations
cctgaagcacggattcgggggtgtatacgttgcatattaccataagaagacaattcaagttttttatttatatttttttggtcaatatccgtgattttatacatgaattgctatgaattccgatcaattacttatatttaacataccatcaaatatcaaagactattgagacttaaatgttttcccaaaaatgcatcaacgtaaaaaataatcggagctcgactacattcaaagttcaatattaatacgatgttttagtttacgtattaaaaaagtagttatatatgatagtacacatgcagntattatatacttntcatnttttttccattgatggatttgtggtatatcatattacgtattaantatgacatttttcaagaggttatagacaacttatttagactatattacaaatact

SEQ ID NO: 198973 - DNA, 450 bp, Glycine max
ctagagcttgtctttgtacgagtcgaacgtgtcacttacttatacttataaattttgaaaaataactatacgtaacctaagtggtagaaaggaagcaatataaattcttgtgtgttattctttactgcttttctttgcgtttgactaataaaggctttaaatttgcttttagatcttatatttgttttgatataataaagaaaatcattgtttgataaagctctttcaacatccttttatttgttttttttttgtgaaactagtatacaacaataaatgtgtttctggtcaaagaaaaagtttaaaatttctaaaaacacaatttaacctctcattcttatgttattcgcttctatgctagctcttcaactaatattgtcaaatataacctacaaagttactaagaaactactaaaataatgtttatctaccgaacgatcaaataagttt

SEQ ID NO: 198974 - DNA, 210 bp, Glycine max
cagcaaaagtccacctccccctcttaaaatcaaacagagtgggcttccctccaatcacacaaattgagttaacacacacatcaaacattcactcaatgacggggaaaacaccaaactacccccaaaacaaaaactaggctaggtgcccctaaatacaagggctggaaaaacctacatttctagggtaccctacctacattatagagccct

SEQ ID NO: 198975 - DNA, 495 bp, Glycine max
tcgtgacctatgaaactaagcttgagggatgtggtcttgccagggaaaggatcaatgtgggtctgtattaatgcaaatttagtcatcctgcttggacgaatgagaaaactgtggcaaatgaagagggtgagaaagagggagaaacccatgctgtgactgccattcctatacgaccaagtttcccaccaacccaacaatgtcattactcagccaataacaaacctccaccttacccaccgcccagttatacacaaaggccatccctaaatcaaccacaaagcctgtctaccgcacttccaatgacgaagaccacctttagcacacaccaaaaaacaccaacaaaaaggaattttgcagcatatagcctgttaggttcaccccacattccgttgtcatatgctaaacttgatcccatatccactcaataattcaatggtagccataacctcaacctccattattctgatgatacgactcgaacgcaacgtgtgctta

SEQ ID NO: 198976 - DNA, 374 bp, Glycine max
  unsure (1)..(374): unsure at all n locations
aataataagttaaccaaattccttgtcttaaatttgagtctaaccaatttttggtagatcgtatttgactttggtctaaatcatgcttaatttgagtctaacaatttttttggtcttaattaaagggtactttaggttcctaattaatcacactcaaattaaacaaattggtttttccatttttagagctataacactatatgtccacacaaacatataataattcctagttatgaatntccagggtgtcacataaaggagtttattagggagaagaatgaataatttagtgatttggatgaagctaaatngagaagagaaattatatcttcacctatctatctatatacacaagaaaagtaaacttttatgag

SEQ ID NO: 198977 - DNA, 484 bp, Glycine max
tggctcctagagttaggagaaaggtttttcctaatcatgttattttttgtataagagtttttttgcagcataaaaagagagagagttttgcagaaaaatagagagttcaatggagaaagagagctaagagattgtgagaggttttgtaaaagagaaaccaagagagattaagctagctgctgcttgtattgaacttgtaatgtttcatgatcaatgtgatgatgatgagatgtcatttctcgtggatgtagacacattgctgaaccacgtaaatccggtgtagattcttgcttgatgatatgttgcgttttctgttttattggtcttgcgcacgttctattggtgtaaagaactgataaaagaaccaacacatgaaatcttgtacaagcattaatgagagttgggtcgcagctctgcaacacgatgctatggttagaaagcctgcttctcacagcatgcagagcgtttcctacacagatacacg

SEQ ID NO: 198978 - DNA, 318 bp, Glycine max
ctgttttagggttttgagatgatgtttatatgctgaaattgcctatggaaactgttagagatgaagggtagagttaacctagggttagaaagtgagaatgtggtgttgtgagtggaaaaagagtgaggctttgagagttggaaggctaagtctgaattctgtggtaaatggaggttaaaatgagttaatcctagcttgaaatgtcatttagaacatgtgagaaaggttaggttgtgctagagggaaaaacaaatgaccaaagtgaaccaagagccatttctagggcaaaattgggtgttgaagagtcaaattttgatt

SEQ ID NO: 198979 - DNA, 395 bp, Glycine max
tacacaaactcttaaagattgatgcgataatatggcattcgccctctgattgaacctaaaaatataaactgaagccctcattgacgatcattggataattgctatgcaagaagaactaaatcactttaaaagaaacaatgtgtgggaactagtatataaacctaaaatctaccccatcatatgaacgaaatgggtattcatgaataagtgagatgaacatggcacacacccttgagactacgctacattacttgcaaaccgattcaatcaagaccatagtctagattatgaataaaatatgctccagttcgcagagtagaagccattataatgctctatgcttatgcatacataatgaatttcaagctctatcaaatggatgttaaaagtgcttt

SEQ ID NO: 198980 - DNA, 456 bp, Glycine max
  unsure (1)..(456): unsure at all n locations
agcttgcacatgcgagtagaagaatttttttatttgttaaaccttctaattgtcttccaaatcccacaaagtttccatgagtttatttcttcttttctattttgagtgtgaccaagtgagctcacaatggtaaggttggagcgtanttcgttttgatggaatgtatttggtaattaatgtgggataataaaagctaaaaatatgcatggtcatgttgccacttgccatgttggcttggcaagtttcatatgaagtccaccgctggtagaattgttgaaatttgggccccaattaactgtggggtatacttaatattgttaccgattgcaatgagaggtggctcaccgttcaaagattaataaaagcttctcacatgaattctgtggtcgccatcaagtgatggacaacacagttaaaactttgagaagtagaagttatgtgtgaatagtctgatac

SEQ ID NO: 198981 - DNA, 428 bp, Glycine max
  unsure (1)..(428): unsure at all n locations
agctttgagcaaattcaaacgacaataaanttttattctgatgtcnganngagtcccgtaatatatcaagacgctcgaaattgaataccgaagctctgagcaaattcaaacgacaataactttttgctcggatgtctgattgagtcctgtaatatatcgagacgctcgaaattgaataccgaagctctgagcaaattcaaacgacaatcactttttactaggatgtctgattgagtcccgtaatatatcggaacgctcgaaattgaatgttgacgctctgagcaaattcaaacgaacaataacttttcctcggatgtctgattgagtcccgaaatatatcgagacgctcgaaattgaataccgaagctctgagcaaattcaaacgacaataactttntactcggatgccgattgggtctcgaatatat

SEQ ID NO: 198982 - DNA, 100 bp, Glycine max
actcagcttaacattcatttcagcgtccgaatatacgggactaattttacatccagcaaaagctattggcgttgagcaaatccaccaccatacttatact

SEQ ID NO: 198983 - DNA, 378 bp, Glycine max
  unsure (1)..(378): unsure at all n locations
gccatcacngaccacacgaagagccttatttccacttaagagctcaacaagcacaacaccaaaactgataacatcacttctctctgtcaactgcccatacacagcatactaaggagcaacatagcccgttaatccagccactctagggctcatatgagtcattcccccaggattaaactttgctaattcagaatcctgaaccttgcgcttaaaatagaggcccacaagtatgctactagatttaatatacatatggatgatggaaggacgagctccatagtgcaaattagccaaccccctagcggtcccgcaagcaaccatttgacgaattgaccaacagagtgtcttcttgctgaacccataattgacacacgactc

SEQ ID NO: 198984 - DNA, 356 bp, Glycine max
  unsure (1)..(356): unsure at all n locations
agctttaaactgagctntacttgttatgactatactttcttaaaagggggataatacatttaataaaaaatccaatgcaatgaccatggtaatcaaaatagaaagtttacttcttaggtaagagttgcagagattcctttctcacttctcacttattacagctagaacctatgtctagctgttggttctatcggctntgatgtaaaaattcactagcaccctgtatctaatataaaagttgacaaattcagaatttttattttaaaccacgtaaagaataatatgcatatttgacaataaagaccaagagaaactcaaatagcacaatccagtggtagagaagcaacactaatttt

SEQ ID NO: 198985 - DNA, 462 bp, Glycine max
  unsure (1)..(462): unsure at all n locations
tctaaactntgtacaagaatgaagctctgataccactngttatacaagnggcctcagatatcttaagaagggggggttgaattaagatattccaaactgtttcccctaattaaaaaaaactatttcactttttactcaagttatgaattcccttaatgacaatcttcttaaatattaattcaaatgaagcaacttgaattatgaatataaagcaataataaataaaggagattaagggaagagaaaatgcaaactcagttttatactggttcggccacacccttgtgcctacgtccagtccccaagcaacccgcttgagagttcccctatcttgtaaattccttttacaagttctaaacacacaaggacaatccttcctttgtgtttagagatcctttacaacaagagactcacagtctcttaatcccttagagaatgagaagaagaagaggaacaaatctc

SEQ ID NO: 198986 - DNA, 395 bp, Glycine max
  unsure (1)..(395): unsure at all n locations
agcttagncttcttataagctccttttttttattgacacnngnatagacgggggcattgtagtctctatattttcatttgtacattatgcatcatcatataaaggaaagaagattgtttctaaagttagaaacttcttcagtgaacaaaactctctgttttaatctattacaaggataatcgtaattgattacacaagtgtttgtagcttgagagagattctcgtttccgtttaatcgattactagttaatcgtaatcgattacacagttcagttaagaccaagtatgatttttcatgagtctttgatttaatcaattaccaagtgatcataatcaattactttactcttaagaagtgctctagaagtgatcaagaacactttaatcgctacatc

SEQ ID NO: 198987 - DNA, 460 bp, Glycine max
tttaacttattctctaacaccatgctttccattcttgattgtccctctcggcctttctaagcttgatctcgttactgctgccccacagagcccctcggaacttgttcctgctccattcttcatttcgggccctttttgtttctcgctctaacgcttcaactgtggtcatgttgatatccttcaattcatcacactcttttttgaccctagtgactttcgtcttcagcttctctttcaccactcttgtctttctgagttgtactttcaaagcttgcacttcttcactttccttaggaatttcagcctttttcccacttagacattttagctttgggagccaagtcatcccttgcgttctagacttcaaccacttgtgatagccgccgatgacgccattgctacttcccctaagctccttatcttttcttcccactctattccacaatctacgaattttctg

SEQ ID NO: 198988 - DNA, 363 bp, Glycine max
  unsure (1)..(363): unsure at all n locations
cttgagccaaatcccaataccatatttcttaattttgtgagaanatcaatccttgccctcggaagaaaacacaaaaagaaggaaaatccccaatcaaagaaagggagaaagcaaaaagggaaagaaaattcccaattaaaagagggagagaaagccaaaaaaaaaagaagaagaaagaaaatccccgatccaagatcgaaagaaaatagaagaaatatacagaaaggtctttggaccatataatacctgaacaatacagaattgtcaccaagaaaacattgctaaccaaaatcctgtgcgtcggtgacttctggcttagcgtcagtcatgctcgctcagtctggaggttcaagcagtgcacat

SEQ ID NO: 198989 - DNA, 475 bp, Glycine max
  unsure (1)..(475): unsure at all n locations
tcaagcttctgcttatgagtgcatagctctntcaagaatgtagcatatcttgtaattttctttattgcatccagcagaggtatgtttacctctactctactaaatgtttccaagatctccttctctgcctcttccatttttttgttggaaattgctattggagggaatggaaaagggatatgctgctgttgtaagtcagaattaccagtagaagattcacctgcatagaaattgttaggcaacttactctttaaatttttgtcatcatctttttctggagtacagtgaagttgggcaggttcatttgcagatgaggaagattgctactggtgaggtccttgatactgctttcccgacctcaatgtaatggcactcacatttttgggattctggacagattaagaaggcagcttgtcagagttttgtgattgagcttggtcagctgggtggcatctgcccatctgattgtaaactc

SEQ ID NO: 198990 - DNA, 460 bp, Glycine max
  unsure (1)..(460): unsure at all n locations
gcaagcttggntntgggcaatagcaccccacctatgttttcaaggtctcctgacccccgcgacatatctccaggtaccactctgtggtcaacaaataaaagcaggaagactgactcttccacgctttctcacatcaagcttattggattatgggcacccgtcatatgtggtactaggtggcgatcgggcgatcgcaaatcaactctcccatttccacaagtcaggcataagcacaccatccccagttgcccacctttaaattgagctcacgcactcctacgtagcctttatcctcattcctctcagcaccgggtccccatcaacccctccaagctttcccaatatccaaacaattcaatttcatttgtcatgaaactaccctaaaccaagaaaaacagagtggaggcagaaaattctgcccaaaactcattcannattcacagnttttcctactcacata

SEQ ID NO: 198991 - DNA, 413 bp, Glycine max
  unsure (1)..(413): unsure at all n locations
aatagatgccttggttgacctggtaacccaactgttcatgaataaaaaatctgcacctatcgccagactctgtggtttatgctcctctgctgaccaccacgtagacctttgcccttttgtgcaacaatctgaagtaattgaacagcatgaagcttatgctgcaaacatctacaacagacctcctcaaccttatcagcaaaatcagccacaacagaataattatgacctctccagcaacaggtacaatctcggatggaggaatcatcccaaccttagatggtcgaatccttcacaacagcagcagcaacaacaacaaccttatttcaaaatgttgttggcccaagcagaccataagttactccaccaatccagcatcaacaacagcaacagcctcagatacagcanacagttga

SEQ ID NO: 198992 - DNA, 388 bp, Glycine max
  unsure (1)..(388): unsure at all n locations
aattatctttttaatagaggtgttagtaacaaattttctaacgtatcttttaaatacatttgtattacttatcaaaatttgttaaaattataatactaagagtgagatttaataaataaaaagtgagacaaaaatcgtaagtaaaaaaaatatttgttaaaagaaattaatttttataaactaaatttaatattttgacaaactagccgagtagttcttgattttcggccaagaaataccttaatttaacaaaaaaatgagacaaacataaatttataatataattttcaataaatctaaactaataggacagagaatatctacaanattggtgttaaacacttcataacttagtataattatttattttaaaaaccatttttattaa

SEQ ID NO: 198993 - DNA, 387 bp, Glycine max
  unsure (1)..(387): unsure at all n locations
tagggccttagaaagaaatnatatctgtgaggaagagcttagtgttatattatttttcgggcaacctatgtattgcttcagaaagattgggttgcttgtttgggatgaaaacaagagaaggaacgattaatatttgcttggcttattggttagggggagtcaggcatggtgtgtaagttgaagtgactctttatggttaaaaatcttctcgagtttggtttgacaagttagttattgcgcataaaatagaaattttatatgatttcgcgagaagctaatcgcttagttatcttattgacacatattcagtagatgcatctatctggttgttatgcggatgatatatatatatatatatatatattagttattacatatgatgatcac

SEQ ID NO: 198994 - DNA, 456 bp, Glycine max
  unsure (1)..(456): unsure at all n locations
agcttggaggantatggagtacccatcatatgtggtactaggtggcggtcgagcaatggtgcaagacaattcttcacatccacaaatcacgtataaacccaccatcccctgttgcccaccttcaattgagctcacgtactcccacgtagcccttatcctcgttcctctcaacgccgggtccccatcaatcctctcaagctcccacaacatccaagaaattcaacatcccatcatcacaaactaaccaaaccaagcaaaacagggcaaaggcagaaaactctgcccagaacacaaaccanaaatcacagctnttcacatacaaatactccagtaacnnatttcttcgttccaattcgttaaccggtggatcgactcgaaaatttactggaagttctagacatgagttacatttgancgtgggattactagcaacgtcagactaatatgactaccttt

SEQ ID NO: 198995 - DNA, 475 bp, Glycine max
taaatccacttactcgtgctaagcgcgagggtggcgctaatcattatgtcgtggatttagagcctatttaacgcctgttttgtgtagaattagggttcataatttcactgatagcttttgcaaagaatttcatagcacaccatagtgcctattttgggaaaagagctctggaagcagcaagaggagcaaattttgtagagagaccaaggttttgtaattagagagagattagtgagttgtagagtgattttgagatgctgagaaaaggaggagggatcccccttcttgtgtaaggagtagttattctctactcttaatctcattattattagggtttttctgtaatggctggctaaacacccttgttggggatttctaaagaacagctgatgtaattactcttatatataatctatggcgtttcttgtgttcaatgcttctttcagtgcttaaattctgtatgctctcggtctga

SEQ ID NO: 198996 - DNA, 383 bp, Glycine max
  unsure (1)..(383): unsure at all n locations
agctggggaaactaagagatgtctaaggattctatttcttatagattgttctaaaggtactattgggttatcacaaaatagctatcaatacattntttgatagattaaacatgaaaaattataaataaagtggtgtgccttgttttaaaaagagacaaagtttagtcttaaatagttccccattagtgatattgagaaagattccatttgcatcagttgctaggagcctcatgtgtatactcaagtttgcacctgtcgcctttatagtgggcgtcctaggtagatatttgagcaatcgtgacatgcaacataggacaacaattgaacacttgttacatgctcactcaaatgtgatatggcagtttagggataattaggtattc

SEQ ID NO: 198997 - DNA, 439 bp, Glycine max
gcttgtccctctttgccgcaatgccctccaccttgccgactattgtccttttctctacctacaagtccttgcaatgtttgaacaattcatcaccatccaacctgttgtgcagcaactaggtcaacacacatccaactttggaagacaccttacggtctcagcaaaggcaatggttgcattatccatcttaaggcgctgcactctctaaacagtgcaagtaatagccctccatttggagacctctgccgccaaggactctaccttgtgcaaagcctcttagtaccattgttcattctcctccagaatcgtcaaacttttctggagaaaggctttggcagaatccgtagcgttctacaccctagccgactaatacaattatttgtcaaaggctgacataaatccagtcaacgtcttctgctccatcttataactggcaccc

SEQ ID NO: 198998 - DNA, 222 bp, Glycine max
atggaagcccttatacccaaaacaccaccagcgactaactacaccaaagccttgcaacctttgtccctatggccctaagagcaaggggcactgacatcccacataaacctgcgaaacaaacgaaacctaacaataaaagagaaaaaaaaaaaaaaaaaacaaactagcccccaaacccgcagagggcccttccgggtctgtagagagcataaaccacaccca

SEQ ID NO: 198999 - DNA, 455 bp, Glycine max
  unsure (1)..(455): unsure at all n locations
tggattctnttaaggcgctagtagatatctttttcttcttctttctccaaaatatagagttctagcagtcctactggcttgcatgttccttgaggaatctggctccactccactaaattgtgaaattcactttggaagataaagtggagagggataattgttgtttataattgttggcaccactcccaattgttatttagaatttttttaaataatttcataattttacacacacaaatattttattataatattaataaattatattttaattaacgattaccgctttatcctttattttttcaaagttcaactttaaaatagatgaattcataaatgtgttgcaatatccccttcaccctatctctgttactgtctcttatttgcatatttctcttatcttgtaaagcacgggtacacttctatgtttatttatgtgcataccanacctgact

SEQ ID NO: 199000 - DNA, 440 bp, Glycine max
  unsure (1)..(440): unsure at all n locations
gaccttagagcgacctgcaggctgcagcttacaggatgaggccgtcgtttntttctgtcctacatcatgcaaatttcgttcacggattgaattgaaaactcaataactgacatcggtcatgaaataggcccgaatgatatttttcagccgacattgtgcaatttttttaaaaaaacgctcgctggccgataatgtttgtgtttacggcagaggaagttttccatttttggtgttgcataaaaaatttagaatatacgtcggctaggttttttcgtgctagcgcaatcgacgttttgtttgggccgaaactggcatgttcccatttattcggccaggaaaccattagcccatctcggcaaanaaatattattcaccgatattgatcgagaaaaatgacagtcgacgtcggcctagaaacatgaccgatcgaagtctaaaaa

SEQ ID NO: 199001 - DNA, 468 bp, Glycine max
  unsure (1)..(468): unsure at all n locations
tcaccggatgacgccgatcgaacatttcctaaccgactgtantgtttatttcgttcagggattgaattgagaactcgttaggcgacatctgtcgtgaagtagcgaccgatatttttcagccgacattgcacaattctttttagaaaagctcgctggtcgataatggtctttttacggcagagtaagttttcttgttttggtgttgcataaaaaagttacaatgtacttcggctaggtttttcgtgcgagttcaaccgacattctgtttcggccaggataacattagcccacctctgcaaaaaaaatatttgctaaccgtcttcatgcatatttcattcaacgatggaatagaatactcaatagccgacaacggtcgtgaaatagtcccgactgatatatttcagccggcattgcgcatttctttttaaaaaaacgctcgctggcagaatatgtgtttttcaccatcga

SEQ ID NO: 199002 - DNA, 397 bp, Glycine max
  unsure (1)..(397): unsure at all n locations
actaagcttgaggcgtgatgggacccgggctgagaggatctatatttggctactangagacgtgagctcagtgggtgggttatgtttgattgtgaaagagggagagttgatttgcgccatcgcccgatcgccacctagtaccacatatgacgggtgccccataatccactaagctcgaggcgagaaagcgtggaagagtcagtctttctacttttgtttgttgaccacagagtggtacctggagatatgttgcacgggtcaggagaccttggggacgtcacgtggggtgctattgtcctaaaccaagcttgacctaatccgacccaacccgagccatattcatgcantgagaacctgtaacgtaccttaacaggctagctcctgacagtcaaccaat

SEQ ID NO: 199003 - DNA, 348 bp, Glycine max
  unsure (1)..(348): unsure at all n locations
agcttctcccattcaagtctctagttatttgtaacgaaancagaagctttctccaagtggtcatgatgaccttgatcgaaaaaccaaagtaccacggaagcacaccatgagggataattcttccaattcagcttaacagtaatgatggtcggagtcccaaagaaggagaaaacgggtccagaagtatccattttggcccacaagatgaaaccctaaaggggtaaaaaagagagaaaaatggggtgatacgttccaggcaacaaaactcaaaactgagggctggaacgaactcagaagaggccgacgagcagataggtggcggcacggcgcaattcctgtgacggcatg

SEQ ID NO: 199004 - DNA, 468 bp, Glycine max
  unsure (1)..(468): unsure at all n locations
tcctctctaagcttcttatccaaggcactctcttggttgtttagcttttccttccatggcttattgcttagtggatggcgcctcctctcacctcttctcctttatcttctgctacaactccatggctaaaaatcaccattgaagaaccttattgaaactcaaagatccagccaccatagaagcttctcaagcaagcttccatcaagtggtatcaaagtacaagagctttaagtaagtactccttaaacctccattatccttcattgttatttcttaatttttctacatgtatttcctcacatgtcttgtgttgaatgttgttaacatgatcctttagaatttccaccgattaaacttgctacaaaagctagattttattttctatggttcanaattcttgttcttgttcttgaaccatgaattgtgttgagtttacgttccttcgagtattgtattgctatttctttt

SEQ ID NO: 199005 - DNA, 320 bp, Glycine max
  unsure (1)..(320): unsure at all n locations
gcaagagctgggaacagatcaatattggtatgtgttgaagtgcgataatcaaagtgcaatttacttggcaaagaactcaacatttcattcccgcacaaagcacattgacataaggtatcattggatctgagctgtcctcgaggaaaagaaagtacatctggacaaggttcacacaagcgagaactggtcagacatgatgaccaaagtactaccaacaaagaagtttgaagattgttgccaaggtgtcggtttgctactacnccccaattaagtcggaagaggaagatttgttggaatccctccttaattggagaggttct

SEQ ID NO: 199006 - DNA, 391 bp, Glycine max
  unsure (1)..(391): unsure at all n locations
gctgagaacaagagaggagccaaagggatttttgttagctganccgaaggaaattctgttctgaaacccacactcagtctctctctctaaacaataaacactctctttctctctctagaaaatagacagaagtgaaatgagcgtgttgtctaacgagtgtcttattggaatggtgaaattaccgctgccacgctccctggtggacgcggttactactctaccatgacatgctgcccatgttcgatgttgtttaataatggagtgcttattatgttatatgtacctgtgcatactcgtctatgcccccgcgttacaacacgtcaattattggtcaaagtagcacgtgttcttgcatatataggcaagacgatccttcgcgtgtgtgtcgtct

SEQ ID NO: 199007 - DNA, 379 bp, Glycine max
  unsure (1)..(379): unsure at all n locations
tgatgataacaatgatgataacaaaagatgatgacaaaggtgatgacaaaaagctcaaaggacaatcaaaggatgagttccagatgttcaagaaggaatcaagaacaaggatcagttcctgatgttcaagaaagaatcaagaacaattcaagactcaagattcaagaatcaagaaaaggctattcaagaatcaagacaaagcttaatcaagataagtatgaaaagggttttcaaaaactgagtagcacatgaatttntctcacaacatgtttaccanagagttttactctctggtaatcgataccacatttattgaatcgatacctgtagcgaaattgtgtgaaaaagtttcaaatgaattaccactttcaataaattc

SEQ ID NO: 199008 - DNA, 365 bp, Glycine max
  unsure (1)..(365): unsure at all n locations
taagctccttcaactgcacaaggctcttaatatttgatttgttccccgnggaaccttcacctgacgaagacactgacaaaaacttatcttctccttcttggacaaagtatggcaggctgggggcaagtaaaatttcttcccatcagaccttggatgcaactgtgatcttatacccatatcagctagatcttgacgggtattcaagccatccttcgtcttgccttgaatgttaaggagcgtctcaatcacactgtcacaaacatttttctctacatgcataacatcaatacaatgtctaacgtcaagatcacaccagtacggaagatcaaagaatatggacctcttcttccatatgcaactctgac

SEQ ID NO: 199009 - DNA, 284 bp, Glycine max
  unsure (1)..(284): unsure at all n locations
gaccttaagtcacctgangcatgcaagctagtaatgtagaattatttttgtttcctccccggaaggcgatggcgcaacatatctctttggactaatacgaactccaatatatttacagctcctaatgttatgaatggttggcccaccttcacatgtaactcagcaattcctctttactatgcctgcacattggcctcatcaagactccttaattttctatggcttcctcttggacttttatgtggggacagggtgcgatctgtgctgggccatataagggcctt

SEQ ID NO: 199010 - DNA, 358 bp, Glycine max
  unsure (1)..(358): unsure at all n locations
actcagcttattgcagtcaaatgggcaaacttttatttaaaagacagnccaaaatgatcacaatagaataaaaagattcccacgtgactgctttaaccccaccttcaaaaaaggaattgtttatatgggagatctaggacatttgcaccatatgctgaatgaggatagaaaggaattctacaacctatctaacttggctgaagaatgactattgtgtatcattttcaagtaatgtggacaatgtgacaagggggtagtaagctactgccattggctaataagtttacctttcctgtggggatgaaaacaattaatgggatcttacatttgtctagaaagaagttttaattactaagag

SEQ ID NO: 199011 - DNA, 402 bp, Glycine max
  unsure (1)..(402): unsure at all n locations
cgagctgcactgccgacaaatactaaaaggatttttttgttctatacctcagnttttctcaccatgtaaaatgggtcattttaaggtccaacgccttaaaaggacctccttccaagtaaaaagaatcgcttacttcgccctttagaaagaactacataggtctgatttcctctttgatggagggtacgtaagagcaagagccctgcttttgttgacctcaaaaataaaaaagaaataaaagtttaggtacacaatttcacacaattctaaattaaggctgtcgtcctttgggataaacgtcagagatgctaatacctaactcaaacgtaaatacaactcccgaatctggaataatcttcatgaccgcgttcctttggtttctcgacgtttcaacaaaaaacg

SEQ ID NO: 199012 - DNA, 464 bp, Glycine max
  unsure (1)..(464): unsure at all n locations
ctaagcttagacaaaattntaaaatgatccaacggttaacgaatctgtgatcgtgtttttactaagataggtttgggacaattctaaaatctcataatttcaacttagttcaacaaaactccacaaactcagcatccacatcaataaattcatacacgactaactcaattcatacctcagatcattcaagtcaaccatatagtcaaataacaagataaatacaattaaacatcaatttataactataaatatttcagggtgttacactagaggttatcatggtggctaacgagaatgagcctacagaatagacgaatgggaaaatccatatagatgtatgtgtttgcaaacctacagaggtaagccaatacccgcacttgtctatattcgataaaccacacctcctccgtaaggtctaagagactctcggatggtcagagtgtgagtaccatgttaggggatga

SEQ ID NO: 199013 - DNA, 458 bp, Glycine max
gcttagtcaagtcagtaagaatctctattgtgtttatggggcgacatggaagtggaatggcaggaaacacaagctaatgacactacaggtgggctactttggctttggaagaaagaagtttttattaaagatataaaggaatgccatggatgaactcaaataaagaaaaagagatagcttgtgaagaaaattattggaatagaaagaatatttgatcatagaaaatggttcagaattattattacaagagtatcatacaaagtatctttcattacttatatacactctataactaccataacagaaaactaaccacctctaactaacctctaactatatataacagacttagttagttaggtaattaataactaacaaacctaagtaggtatgatgggtaatatcccccttaaagctagagaatgtatatctgacattcctagcttacactgaagaaa

SEQ ID NO: 199014 - DNA, 474 bp, Glycine max
cgggaagtttaaatcataagcaaatggtgcttgtgcaaatataatttaataaactgatcaacagttgtgtcattattcaatccctgcttatgaccaactgaatcactttatcatggtcatacacaagtcaaataataggaaaagctatagtataaaacaaacaaccttggttgcctctcaaaggaattttttaaaattacccgccaattatgaactttgaaaaaaaggtttgatttcaaaaatgaaaacaaattggaaatagctagaaagaaattctaatgcactaaaagcaaccaatccattgattaatttcaggttcaaacaagaattaattggacatatgaatgatgcatcaatcaatttcaagagaaaacctatggaattaagtattctaactttgatcaaatcgggttagatgatcaatgataattaccacttttactcgctttcttgcaatatattttggtatcatta

SEQ ID NO: 199015 - DNA, 379 bp, Glycine max
aatgcacaaaatggaattactaagtatttattacctatacttaacagaaaatacttataacactacaaaataaccatgaattggaagagttttaaacaatttacacaatttttatacacaaaagttattcatattcaccgactaacactgagcgcaaggaagaatctggaaggaggatgagttgtgcatattcgctgagtggaggctcatctcgctaagcacaccacttcagtccatccgctgagcgagaaaagccgtgctaagccgaaatttactaatgcgcgctaagcggttcagaattgcattaagcgcatgagcatgacaaagtcaccttttatgcctgaagcagattctgagggagtttgcctttttgaacttt

SEQ ID NO: 199016 - DNA, 451 bp, Glycine max
  unsure (1)..(451): unsure at all n locations
atactcaagcttgtcggccgcgaatgacgaacgatgcagaagacgacgttatgtttctgcgtgctatcaggctcttcgtcttacagacagcaaaagaacgtttatacggataaccactcgggtattatcgcccgtcagcgtgactcagatgtcagtatgacagatcttgcgagcgcggaagatgacgtaaatctccgcgtgtcaacgggcttgtcggccgagattgacgaacgatgcagaagacgacgttagtctctgcgtgctatcaggctnttcgtcttacagacaacaaaagaacgtttataccgataaccactcgggtatttccgcccgtcagcgtgactcaaatgtcagtatgacagaacttgtgaaggtggccgacaaaagcgaggctcttgctcctacgtatactccaatgaggaactcagacctacctaatacttgataactt

SEQ ID NO: 199017 - DNA, 452 bp, Glycine max
  unsure (1)..(452): unsure at all n locations
agctnggaagaaaacttacgattcgacaatatcttataattttgacctaaccgggaatttcgaattatgagaagtgcttgtttctgactctatggcgttgaaaattattataccatattgtttataatttactactatatatgatactacaccgtgttttcattgcatcaagttttacgaaattttactatattaccatggtaattggtaacaaaggtatgactagtcattacagaaacagaaataatttctaattatagttatgtacctatagagggagacgtgcttgaggttgattaattatactagtcgacatcgtaacgaaagtcaaaacgcgacttttcatttcaataattcaaagatattcagcgcgaaggtgaacaaaatattgtgaaacttgagaaatagttggttaatatatatctttttattttgcaaagaaatgataaatg

SEQ ID NO: 199018 - DNA, 466 bp, Glycine max
  unsure (1)..(466): unsure at all n locations
nnttgctgcanaantcctntttgatggtgttgattggtttgtgtttaatgtggtcttcgacattggaagtgcggtagaaagactttgtggttgatttacggatggcctttgtggataactgggcggtgggtaaggaggaggtttgttattggctgagtaatgacattgttgggttggtgggaaacttggccgtataggaatggcagtcacagcatgggtttctccctctttctcaccttcttcatttgccccagttttctcagtcgtcctagtaggatgatcaaatttgcctcttttcggacccacatcgatcctttcactggcgaagaccaaatccgggaagctttgagggtgcgcagcccaccaccttttcatagtagagtatcgataatgtgtctaccatcacgattatcgtctccctttccatcattgggggtaccacctgtgccgtcagatcccttcacct

SEQ ID NO: 199019 - DNA, 319 bp, Glycine max
taaaacaaagattttgcctactgaagaaatctcctaactttaaaagatgacttacgatgtaaataaccggttgaaactttattctacattggtaaaccgagattacggcacaaacgatcggttgaaactttgttttacaatgataaagtgagatcactgatggtagaagaatgaagatgaagatgtgaaaaagcaaaaggagaccactaagggtgcatagagtgaagtcaaaacttcaaaaacaaaaactaatcggtcgatgaacaaagaacaaacaaagaacggtgaagaacgatataggaatcaatcatgaaagcga

SEQ ID NO: 199020 - DNA, 481 bp, Glycine max
  unsure (1)..(481): unsure at all n locations
tatgcacggaanatgtaattatgaaattgacatgcccgtttaaacaccatttcctagttaaccatgcattacgtaccatgttcaattattttgtttttaagtgaaacgggtttatgatcccaacatggttggctcgtggtgcctaacacatgaaactaagaatgtagtgtgaagtttcacgctcccccctttttttgtttttgttttgtagaggaaaacgcacggatgagcaaacatgaaaacaaatggtatgcaattttgcagaccaaaaagtttgttgaacgcatatgcatgatgatgccatgaccatgcataatgtgaggctggaatatgataacggacaaatgcaggatatgtccattatgatgttatgaagagatgcttatgcgatgcatgatatgaatgcattttactgacacgagagcccggaaaattatctcttcttactttgcgcatttggggcgcagtgccncatgtgtac

SEQ ID NO: 199021 - DNA, 381 bp, Glycine max
  unsure (1)..(381): unsure at all n locations
agcttccatagtattgtgatgatgttctttattattaaagattcattcaaacaagattaaagaatcaagaagattcaagtgaagattcaagagaagactcaagatatgcaagaacctcaagaaaaacatcaagataagtataaaaagaatttttcaaagaaaagattgaataacacaatttgtccaaaagaatttttcaaagaaaaatcttttaccagagtttttactctctggtaatcgattaccataaggcagtaatcgattaccagaagcccacaaacagtttataactatnttacaaagtaataatcgattacaatgggcatttaatcgattaccaatgcttttgaacattgaatttcaaatctcaagagtcacaac

SEQ ID NO: 199022 - DNA, 456 bp, Glycine max
  unsure (1)..(456): unsure at all n locations
ggctaacccatggaaactcctaatatctcccactctttttggggtgggccattcttggatggccttgattttctcagggtccacttggacccgatttctaccaacttaaaaccctaaattgtcaattacaaaatagtcctcaattttggtggttgtgctctctttggtgattcactcaatttggagtgcttcttagtcaaatagctcttaaggtggttggcccatttcttcttgactcaaattcttcaagggatgacaccaatcctcctttccaattccctacatggcaattcacacacaaggaaacaaagaggcaagcaataaccaaagaccaaaaaaaaataaaatgaaagctaaaccaatagagttgtaagaagacaatttcaaggattattcaacaattaaagcaatgaanaacacataaaagcagctaggactcatagagaaacctagaat

SEQ ID NO: 199023 - DNA, 416 bp, Glycine max
  unsure (1)..(416): unsure at all n locations
agcttttgaagcaggaaccatttattctatctccgtcagccaaagggagagtcccgtccaggtagtcccaaagaaaaccgacctcaccgtgataaaaaatgagaaggaagagttgattcctactcaggtgcaaaacagttggagagtttgcatcgactataggaggctgaaccaggttaccaaaaaggaccattttcccctaccattcattgaccagatgcttgaacacctggcaggtaaatcttactactgtttccttgatggttcttctggttatatgcaaatcattattgctcatgaggatcagganaagaccacattcacctgccctttcaacacttttgcctataggaggatgcctttcggcctgtgcaatgcccctagtaccttccagcggtgcatgattaatattttta

SEQ ID NO: 199024 - DNA, 458 bp, Glycine max
  unsure (1)..(458): unsure at all n locations
tctagtatgttgctcatatacgacagaagatctgagttttatactctatctagctcccttctattgtctccaatgtgaatagggggcattttatggaatatcatggtgtttagtaataaaattccagtgtcttgttagggaactctaaggtagaatatttatattatatagtggtccctttgcccttggttcttgaaggaatacatacatattatgtaaatttgttgcgtaatggatatcaaaacgacattgtactcatgaatcatgataataattaagctaaacatttattgaggttgccaatcaaatctctcttgcgtttcaaatgtgtttgaaatcatggctttccttcattntcgatcctcattttgtacaatctcacttagctgctgcacccaccaatcaaactctgatngattatgatttctccatctaccctaaccctagtagcatgcata

SEQ ID NO: 199025 - DNA, 354 bp, Glycine max
agctgttaactatgatgagagggttttttcatattttccacacaacatgaaataaaaaacccaagatcaagcttaaaaagtagaaaattagaaaattctaaacaaactaagcttttattcaaaacttaagaggaacacaaagctcaaaaacataaaagatagttcataattgcccccaaaataacaacaaaatgtaggaatatatgacaattatcactctccattctcatatagcatttatcagctcagaaattggcttacagacataataatgataaaaaaaaaaccattttccctcatataaacgaatttagcttttagttcaagtggttcgttggcaagttgcaagaagga

SEQ ID NO: 199026 - DNA, 459 bp, Glycine max
  unsure (1)..(459): unsure at all n locations
tatganaatgacttgaccttgtaagagtatgactattgttgttttattggcttattgaaattaattaattatgctcccattcactnttggaccacactagctgttactttcatgaccaatttcattcttggattcttttttgtgtagaatgataacaacaaagttaaaacctaaaatcttatatatactattccaatctcaaatcctagtgaatttcaagggagagggtggaacattacatgaccatgggatgaataattggtcatagtggtccactacgagtacgaggatgggaaataattgcatgacagtttaattacatccaaaattacagctactacaatttgtaggcttgcagcacaattgtctagtctccattagaacatctttggcgactaatgattgttttatctttctttctttcttggcctattttagntatggattgtaaaatggtgc

SEQ ID NO: 199027 - DNA, 413 bp, Glycine max
agcttcctttgtaaaaccttagagaataatctttgtaaacgttatcctttcatgaaatgcatgttattttcgtaacctacactaaaccccggtcacattggcgtggtcggaatttccaaatgatgttcctttgtaaaacccgaaatgctctcagctctttcatgtagtgatgtgggtgtttgacccagagcaatattactagctttgttttctgaaatccatactaagtctccttcgttttggcatagtagaggcttgcgtggaatcaatgagcaaggacgaaaaggaatcttcaagtgacgcgacgaggaatccgtggggtagctcacgataggtaactcacgataggtaaggggagtttattataaaattaccgttttaacatcatagttagggtcagggaacctagctat

SEQ ID NO: 199028 - DNA, 470 bp, Glycine max
acactatgaaactaagcttctggtgctgctgagctgattcttggctgctgtctctttaaaaaaaaggaagattgagtgagatccgtgcatattagcctcccaaataagcataaaattaaacagaaaactaggaacaaacaaaagtacaagcacccagtttttaatctaatattaatattattctcttttatttatttattaatttttatatgtgtaaaataacctaaaaaaatatttattttagaataaaaagattacctcctaattgatatttgagtctacaggttttcctttgctttgaattggacatcattccttccctttatattatatttaaattaaataaataagactcataattcggtttgtaagaaggagggaagaaataagggagtaaataaaaaagataagcacatcgcatagtcacagataatgttccgtaatttaatcaattaatatgctaacggaat

SEQ ID NO: 199029 - DNA, 385 bp, Glycine max
  unsure (1)..(385): unsure at all n locations
agctggagcattcaatatcctgattagggtgttccatatgnncncaagataggactaatacatttgctgcccaagtttcatggtcttgcaagtgaagatccttataagcatcttaaggagttccatatttgttggttcaccatgaagccccctgatgtccaagaagatcatatctttctaaaggcttttcctcattctctggagggagtggcaaaagattggctatactaccttgcttccaggtctattttcagctgggatgatcttaagagggtgttcttggagaaattcttccctgcatctaggaccactgccattagaaaagacatttcatgcatcacgcaacttgggggagagagcttatatgaatactgggagaagatta

SEQ ID NO: 199030 - DNA, 439 bp, Glycine max
tccttttagtgcgtcacgtttaaaaccgagctctattgttgtgcgagcctttgatggtactcggcgggaagtgatgggggaaatcgacattcccattcagataggcccccacacttgcaatgtggtgtttcaagtaatggatataaatcccgcctatagctgcctcttgggaagaccttggattcatgccctgggagtggtcccttcaacgcttcaccagaaattgaagttcacagtgggtggacttttagtgatagtgtcgggtgaagaggatatgttagtgagctgcccctcctccgcaccgtacgtataagcggtagaagaatcattggaaacggctttccaatcctttgaggtggtgagctgcgcctctgtggaaccaagtccgtcgctaccttctctctccaaagtggccataatggtggtgcatgttatgctc

SEQ ID NO: 199031 - DNA, 304 bp, Glycine max
  unsure (1)..(304): unsure at all n locations
agcttcaaaggagctagcatcacttctcttgttgntgagcgcgaggaagaatctagaagaaggatgagttgttcatgcgcgctaagcgagagctcatcccgctaatcgcaccacttgcatccatccgctaagcgagaagacgtgcgctaagccaaaattcacttatgtgcgctcagcgagccagagtcgtgctaagtgcgagagcaccaatgagaccacctatttaagcctgaaatcagaaatggagggagagtgtgggcatttctcgaagcttttgcatgtttagagatttctagagagagaa

SEQ ID NO: 199032 - DNA, 384 bp, Glycine max
tctctggtctatctctacgaggaatcataagttcaacgtttgtcttttggacttacaagacctggcacgaacatccacgtggagactagtatacctactcgatcatgaaatggttttattatctcatgacctgccaataggccatatgttcaagaacataaactaagcaatcacgcacctctaaacactgatccaaagctgttatgttgatcacaagtgatacatcatatattaagccacacattgatactaaatgcactaaggctaattaagtttacattctgacaatattggtatacgataatatgtctgactagcgtgctttcatatagaatggttcgtgttatcgtgacaatccaaatcttcacatgaaatactcagcac

SEQ ID NO: 199033 - DNA, 445 bp, Glycine max
gcttcatgatgaatcaagattgattcaattatgttttgatgataacaaagatgatgacaaaggtgatgacaaaaagctcaaaggtcaatcaaagaatgagttcaagatgttcaagatagaatcaagaacactttcagattcaagtggaatgttgatttcaagaatcaaggatcaagattcaaggatcaagattcaagactcaagattcatgaatcaagagaagacttaatcaagataagtatgaaaagggtttttcaaaaactgagtagcacatggatttttctcaaaacatgtttaccaaagaagttttactctctggtaatcgagtaccagattgttgtaatcaattaccagtagcaaaatggatttgaaaaagttttcacatggaattacaacgttccatttgatttcaacaagttgtaatcgatacaatgtttggtaatcg

SEQ ID NO: 199034 - DNA, 466 bp, Glycine max
  unsure (1)..(466): unsure at all n locations
ntgaagaggtggaacttaaaggaattcggagatataattattaatcaatttgatgttcaattggagatgaatagtctgaatttttggaggaagaaagaagtttgagtgaggaaggaaagacaagaaaaatacattctcaaggtgaatttcagagattagcgaaattgaatgagtccttgctaattcaaaaatcaagaattacatgggctaaagaaggagattgcaactcgaaacttttccactccaccatcaattcgagaaggagaaagaatggtctcaatggaattaaaatgaatgaggaatcgattgaggaaccatgtatagtgaagaccgaagtaataaagtattntgagtggcactttctagagaaaatatatggaagacctaaattgactggatcggaatttccttcgctttccaatgaggataatgcaatgctcatacaagactatgaggtggaagaaat

SEQ ID NO: 199035 - DNA, 441 bp, Glycine max
  unsure (1)..(441): unsure at all n locations
agcatcgtgttcatcgcactcgagcatggtgacaactttgtgtcttttctccttcgccacctgacctaggtatgtttcgtctaatcctgtataaatatttgattgcattcatgtatcgcacacttagtgaactaaacatggctacggtatctcatatttaactcgagcatcatgacaactctgtgcttcttctcctatgtgaagtttcccttacccttactgtgttcttgtaacagtttaagcggatctgttaatgccaactataatttaagaactgatagtatcttactctcgtagtgtgtcaacaaatatgttgttaacattcttaatacaaaagtgctctcccactcctgtgtttgctaacaaggaaaaagccgaatgcacccatttgacgagccctctgatgaaaccatganaataagtctataaccaatgaatatg

SEQ ID NO: 199036 - DNA, 351 bp, Glycine max
  unsure (1)..(351): unsure at all n locations
gatggcacaacgctcatacgncatgatcacttcatgataacaacatatgatgaccattcaatattgattcctggattgtttccagaacacttgaaggatcaagaggaaatttgtttgcaggaatcaagattcaagtttccagaatcaacaataatcatgttgaagattcatgagtcaacaaaagacttcaatcaccagaagtactactgagttcttcaaagtatcgagtagcacatgaatgtttcacaacacctattactcaatgagcttttactctctggtaatctagtaccagattattgtaatcgactaccattagcagaatcggtttcagaaagctttcatctgagt

SEQ ID NO: 199037 - DNA, 272 bp, Glycine max
gaagctttgaccagaaccaacggggagaaccacaaacccacggaaaccagaaaaccaatcaaagaaacaggacaggaaagaaggaaaaacgggggggaaagtacacgacaaaagaaagcggcaagcacagagcaaagggctacggaagaacaagaaacggcaaagtggacagcgacgaaagtgaaccaaagcgagagaagcaacaaaaaaatcgcaaaagacaaaacgaaaagaaagcaaaagggaggaaagactaaaggacaaacgagaac

SEQ ID NO: 199038 - DNA, 380 bp, Glycine max
gatccttaagtcacctgaggcatgaagctgccttcaagtaacaagatttttttttcaaattcatccattgaggagcgctctgattttattaggtaactggaaaagcacgtgcacacacacatgcacacataatccatatattcaattacaaagtacatcattatgattctcaaatataattgtattattcaggagaaaatatgagtttctacagtttttggatattgaagaaaatttgtcttgtccctttgtaccatctcatgcaagatgttcatcatattcccagcgtagttcctcgagcaacaacttcccacaagacaaataacattatgataaacaagaaactacaagtcttatggtgagcacatttcgaaatagtt

SEQ ID NO: 199039 - DNA, 340 bp, Glycine max
  unsure (1)..(340): unsure at all n locations
agctttccctcttttgaacaaaacttctgttattttatgttatnngaagcatacaattccctaatgttatcaaatcctaaaatttgagctccttgggagaaaaacaatgtgtgcctcctaaagagggcatcgactaccacattttttttcctttttgtatttgataacatatggaaattgttttaggtactctatccattttgcatgccttaagtgattcatgatcactatgaatgaaaaattcattgtaaacaacgtaatgttcccaagtttggagggctcttattaaagcataaagctctttatcataagtggggtagctgacggtggcatcatgaaa

SEQ ID NO: 199040 - DNA, 90 bp, Glycine max
  unsure (1)..(90): unsure at all n locations
tctaaactntatacaagaatgaagctctgagacctctngttatacaagtggcctcatatatcttaagaaggggggggggagtagctcatc

SEQ ID NO: 199041 - DNA, 317 bp, Glycine max
  unsure (1)..(317): unsure at all n locations
cctaaacgcgaagaacctgataaaaatttatccctgcacgataacacttcaaattttagtccctgaaaatataaaataaatgtaaaaaatcatctcttaccattaataaaaaaaacctcgcgacacatttaggatgaatttgtcaacgttctacatattcaagcatgaatataatcatttatccaaaatataattcaatcttcatcttctntctttcttaatccttgtaagcgttacaatanacacttaaaaaataagaaaacaacataggaaaaccaacatctattagaacacatattattatattatgaatgaaa

SEQ ID NO: 199042 - DNA, 418 bp, Glycine max
  unsure (1)..(418): unsure at all n locations
tccgcaatangggacgacgaatacgctataacttaatatactccgaggggagaaaaagcgaaaaaaagagacaattacagaattatataagatgaaaattgcacctaaacttctgttgccctttatacaaatcgggaaatacagatcttatatctgagacgaacacagaaatattaaaggaaccaacatgcaacacagggccactaataaagtaataccactttccatcgcgatgcaactgatagccacatatcacaccaataaaagaagaatgccactaactggtggacagtgccctcaatacgagacgctctgtacatacttctatgtcacgctcacaaaactataataaattaataacgttgggtccctcgcaataaaagaacggcgaaaaacataacgccggttatgtgaacta

SEQ ID NO: 199043 - DNA, 319 bp, Glycine max
  unsure (1)..(319): unsure at all n locations
cgagangacacaccaaagcagaggaggcgagagtattcttctctactatgcgcattaacattgagtaacttgagagatatgacttgtgtctgtaacaaggagccacaagttccatattacccacacttagcgtcactttatattggccactgcgatagactcaaaagattatcctcactttcttctgctaaaattcctggaaaactcaaactactcaaaatgcgtggctgtgagaaaataagagaggtgatatctactgataaagatgaaaaggtgactacatgttccctaaaatggaatgccttgaactcaacgatct

SEQ ID NO: 199044 - DNA, 356 bp, Glycine max
  unsure (1)..(356): unsure at all n locations
nngcaagcttctccactaagaggccagatgtctttatgtttntncncaaggcagaggtcctagatgcatggaagaattcctccaagaacactctcttaaggtcatcccacctggagatggatctgggagcaaggtattacaaccaatcttttgccactccctctagtgaataaggaaaagcctttataaagatatgatcttccaggacattatggggcttcatggtgaaacaaacaatatggaactccttaagatgcttataaggatcttcacttgctagaccatgaaacttgggcagcaaatgtattatttcagtctagagaacatatggaacatcctcatcagggtactggatg

SEQ ID NO: 199045 - DNA, 354 bp, Glycine max
tcctcggaagtacgcgaagccggacggggacgagatgattatgtgatactcggcgcgctccgctgattcgacgcgtgctgctggcagaagctacaaactacacggagtaagttcttccactgccaaacgagcatcgtcgtcggccgtgtatccggcgagcatggtgtccggaattgaaccttcggtgccgtttaacgaagtccctaaagctgagaagatgaacctgtttgtgagcaaatagagcctatgatgagacacatgtgaaatcactgaccacgcggagagcattgtagataaagatgagaaaaggaagaatatggatgagcctgccgattatgaggcttgtggacaatg

SEQ ID NO: 199046 - DNA, 305 bp, Glycine max
caagcttggtctctgcagatctttatatattttatatctctcaaaactctctggaacttggacctttctctctctagaatcactagacatgcaaagcttcagctctcagcccaaactcccttcacaaaatctgattttaggcttaaataggtggccttgttcgtgctcgtgcgcttagcgcaattctgaaccgcttagtgcacattagtgaatttcggcttagcgcgtgcgtttctctctcaacggatggactgaagcggtgcacttagtgagatgaagcggtgcgctcagtgaacctgtacagc

SEQ ID NO: 199047 - DNA, 458 bp, Glycine max
  unsure (1)..(458): unsure at all n locations
ntgtaagaagaaaatgccagtctccgattttatttgagttttatcacgagcgagtatgagcagctacgttctgagaatgctgccctcaacgtgattttgaaatgttgatatgttttgattattgtcttttttgctaattggcaagcactgttgcccataccaagttatacctactatcaataacactcatatttgaaccctggtttggatagaaggaaaaggcctaaatggactaatatgaccattctagttttcaaattccgctcctactaccataaaaggttcattcaaagactgagccagctatctgattacaggatagacttgtggagatacctggtgtcacgacacctgngaaggacgatcttacgtctggccagaatgatcagcatgtgagtaatgacactcaacatagtggtcagacagatgttgtgcatggtgttcattaggatcttgct

SEQ ID NO: 199048 - DNA, 447 bp, Glycine max
agcttgaatcttgaaactagattctagaaattattatttcctcttgaaccttgaagtgttcttgattcaatcttgaactcattctttgattcttgagatcatcatctttgttatcatgaattgttcttgatctttgagctttttgtcatcacctttgtcatcatcaaaacttctttgaatcatcatgaagcttgcttttacaccagtgactgatttcgaaaaataaatttccaaaagtcacaattcttaaagtgacttgttgctgaagattttttcaaaagtcacaactttttaagtgactagttttcaaaagagtcacaatttttaaaaggtgactagttttaaagaaattaccaagagtcacaaactttaacttgagtcatcaagagaatataaatatgtgaccatggcattaatttcataacatctttcatcatctttcaacaa

SEQ ID NO: 199049 - DNA, 469 bp, Glycine max
tgcatttattgctgaacaaatctttagtcttgcatgtatattagtgttttgcactcctatgatcagattgtattgatttttcatttctcaagctcaagggagtttttaactattagatgctataagattttttattgatgtgcaatatcgattgtattcttaagaaatgcagatggaaatttgtttagcatgtagtttacgactgacataattatgtctcccatgtgttactttacttcatataactgttatggggaaaactctgctgcttgtttgacatcaatataattattaatattgttgctttactgaggatggaaatgtgaatttcagaatcacataaaatttattacacgtcagaagcgtgctgacgcaaagaaagcactcaatagtcttctttacaataatggagcctctaaattttcttttgagggtatgtttttaagatcttacttgtgagaaactttgt

SEQ ID NO: 199050 - DNA, 396 bp, Glycine max
  unsure (1)..(396): unsure at all n locations
agcttcttanagaagtttctcaaggaagtttttttttgtatgctaccaaggctataaatagaagcatgtgtaacacttgtggtaactctgatgaaatgagagtcttgtgagacacacttcaaagttcaacttctctctctttcttacttcaactttccatgcaactttctttctctgtctggctgtctctctctccctctctccctcattctcttcctccattgaagtttcctctctaaacttcttatccaagacactctcttggtggttaagcttcttcttccaaggcttattctctagtggatggagcctcctctcccctcttctccttagtcttccgttggaactccatggttgaaaatcaccattgaaggaccttagtgaagctcaaagatc

SEQ ID NO: 199051 - DNA, 456 bp, Glycine max
  unsure (1)..(456): unsure at all n locations
ggaccttgaaactaagctntatagtgcgggttcgggagacataggtcaagcgttgtgatatgctatgatgatattccgggtactttggatttggtacgaccatgctctcctgatttccagctgggaaattggcgagtggaggaacgccccggcatttacgcaacaagcataatgtaaacctttacggttttaaaagctctatagttgggcctacgctttagagttttcattttgttaaggctttgtgtcttttgtgtttgaatttataatacaaggatctttcttcatctgttcctggtctctacccattctcattcatttgcatgtttacttctttttctaaaacggcatattcgatgacgagtcccccgaaggtactaatacctgngacccgtctatcaacttctagcaagaaatgaatcaaacggaagatgaatgagatgagggtgtgggact

SEQ ID NO: 199052 - DNA, 407 bp, Glycine max
attattatgagaatcaaacattggactaatgcggcaatataattattaagtaatgattatagtggcatgattcattttatttcagccatccaaaagaaatggcatttgggggtcctcaacaggtcagttgtcagtcaaactgtatagcaaaaagaaggggtgaaaaaataaaattcagagtagtcccacagaacaaccgtgcgtacgagtatgtacaataataataaataggccaaagtagaaatggtatactagaatgggaattgttctttcattcatgcattgcatatcttgcttaattctgggaggtttatctggtggggcagttgacgctatttcttccttgtgaacttactttgtccgtgatggatagcacatatgaaacacatatttgcttttgactgtcc

SEQ ID NO: 199053 - DNA, 340 bp, Glycine max
tgcgtaagaactagaagcgaagcttacacaacgtagagaccatatacgaacgacaaatataaaaaggctcgcaacaaaacttactctggaagagatcgaaagggaattaacgaacaaccaatatcaatgaataaaagttattaatcagtgcaaagacaaaaagggtaataacaaataaaccatacaagtcatcgataaagcgcatataattcatcgataaacgccgatagtgacgaatgctacataatgcaatatccatcatgttgaaagaagagttaacattgaataaggatttcataaaagaggacaaggatattatactgcgaataacatacgacat

SEQ ID NO: 199054 - DNA, 371 bp, Glycine max
  unsure (1)..(371): unsure at all n locations
gccttattatgctaatttccttctaacggcctttgtccttttgtgccaaggacaattcatttgcaatcattggatcaacaaaagttgattaccctatcccccaatacccaaccattacaacgaattggcaaaaaggaaaaaaggcaaaacaaatgcaatatggccactcaggttagctcctccctcttggtactgctttagacatagtcactaagataagagggccttgtgagggtcctcttaatcctagctgctatctgcacctctaggttctgcttctgcacccctgatagtgtgttctgcacctctgctcatgtgcttctttcttctgcttctccttgcttcgtatcacatattannncatttttttg

SEQ ID NO: 199055 - DNA, 416 bp, Glycine max
tccatgcaaaaacatctgaattcatttcggttttgggaaagtcctttattgcttcattcttaatgttttcaaaaaattcttttgttgtgttctgataaaaaaatatgtttcaaaaatactggttatttgattctttcaaagcatgttatgttcaaggaaaaatctctatttaagtcccaaaaagagttataatctataactatactaacaaaatatcacaacacacacaaattagtcaaaataaactatccgtagtaaataaggtaatatagtaccgaattttaatacacagcgataaataaacataaagacaagttcatgagtttttgaagatcatggttgatgcactcagtctccttcaatgaaataatcaactaaatctaccatgtcttcattatcctcagttcttacttcat

SEQ ID NO: 199056 - DNA, 397 bp, Glycine max
catattgtctgactatatgccctttcgatccaatttaaggagttatgccatatggaaatactgttgccataaaaaggcttatctataacacaacacaatgggcagagcatttcttcactgaggtcatatagatcagtggctatcatcacaataatctagtgaaacttatatggtgcagcattacaggacctgaaagccttcttgtatatgaatatgtgcctaaccagagcctccatgatcacttttttggttgtgactttacatctaatatccagtcttaagagaaatctcctttacattaacttttagcttattatgttccatgttaacttctctagttagaacgactttctatccgcttgacttggaaattgaggcatataatataatacaattg

SEQ ID NO: 199057 - DNA, 407 bp, Glycine max
catcaagctatgctgaaacattacaatttatttttctttatcttacaacaaaatcaaccacaacagaacaattatgacctctccagcaacagatacaaccctggatggaggaatcaccctaacctcagatggtctagccctcaacaacaacaacaaaaacaacctgctccttccttccaaaatgctgctggcccaagcagaccatatattcctccaccaatccaacaacagcaacaaccctagaaacaacaaacagttgaggctcctccgcaaccttccctcgaagaacttgtgaggcaaatgactatgcagaacatgcagtttcaacaagagaccacagcctccattcagagcttaactaatcagatgggacaattggctacaccaataaattaacaacagtccca

SEQ ID NO: 199058 - DNA, 442 bp, Glycine max
  unsure (1)..(442): unsure at all n locations
tgttgaaatggccatgtttggatgagttagacatttcttttctgttttagggnttttgtgatgatggttgcgatgtttatatgttgaaattgcttatggaaaactgttagagatgaatggtagagtttaacctacggttagaaagtgagaatgtgatgttatgagtggaaaaagaatgaggctttgagagttggaaggttaagtctgaattctgtggtaaatggaggttaaagtgagttaatcctagcttgaaatgtcatttatgacttatgagaaagcttggactgtgctagagagaaaaacaaagatgtgaaattgtaggaattgatttgggcacgattggatgagaggaagtgtcgatttcgaaatctgcactttgtgcagatatttgctgtcgaaatgtcagcagggatttgcacaagtgcagaaaaatgctatgtat

SEQ ID NO: 199059 - DNA, 389 bp, Glycine max
agcttggaggggtagatggagacctttttgttgatagtaacgaggataaagggctacgtaagagtacttgagctcatttgaaggtgggcaattggggatggtgggttcatgcttgatttatggatgtgggagagttgatttgcaccatcgcccgatcgccacctattaccacatatgacggataccccataatccaacaagcttgatgtgagaaagcgtggatgagtcactctttctacttttgtttgttgaccacagagtggttcttggagatatttcgcggtggtcaggagaccttgggaacatcatgtggggtgatattttcaaaactcagcttgacccttccgatccacccgggcatagtagtcagtgaaacctgtgagtaccta

SEQ ID NO: 199060 - DNA, 470 bp, Glycine max
  unsure (1)..(470): unsure at all n locations
nggaggggttgatggngacccggtgctgagatgtatattgttatggctacgtangagtacgtgagctcagttgggtgggttcatgtttgatttgtgaaagtgtgagagttgatttgcgccatcgcccgatcgccacctagtaccacatatgacgggtgccccataatccactaagcttgaggtgagaaagcgtggaagagtcagtcttcctacttttgtttgttgaccacagagtggtacctggagatatgtcgcacgggtcaggagaccttgtggacgtcaggtggcgtgctattgtccaaaaccatgcttgaccaatcccgacccatcccgagcatagtcagtcaatgagaacctgtaacgtacctaaacaggcgagctcctgacagtctaccaataatagaacaaagaccacgatgctacgaggcttgtgtggtggctggccagctatgaatcttgagtggtatctg

SEQ ID NO: 199061 - DNA, 216 bp, Glycine max
ccaacacgagagcacggaaacaggatttttgtttatacaaaccaagcctgaagacaacctcagtaactcctttcaaagatgactaaaggaaggaaagttataaaaccatgatgccaatcctttagcagtcactgcgattatattaaacctaacatgtaatgccctaacaagaaccgtgttgacaggaattggggtaccatccagccatgaaggtag

SEQ ID NO: 199062 - DNA, 394 bp, Glycine max
tcttaccaagaaaaatggatcatttttaaggtccaacgccttataatgaccaccttgcaagtaaaaagaatcgcttgattcacccttaagaaagaactacgtaggtctgatttcctcttcgatggagggtatgtaggagcatgagccccgcttttgtccacctcaaaatataaaagaaataaaagtttaggtacacaatttcacacaattctaaaattaaggctggtgttctttgggacaaacgtgagaggtgctaatacctttctcaaatgtaaatacagctcctgaatctggaatattttcatgaccgatattcttctgtttttcgacattatcacgaaaaacgctggtggtactccacgcattttcttctttggaaaaccacctgtgacct

SEQ ID NO: 199063 - DNA, 402 bp, Glycine max
  unsure (1)..(402): unsure at all n locations
agcttatgaaccccctgtttcaatattaattatatattaaaacacacaataacaagcaacaactacactaaatgcaagtaaaacaaaattaaaaatggctgggttgcctcccagcaagtgctcgcttaacgtcattagcttgacacattgttctattatcctggatcaatcttggttctctccttcaaaaccttcttatccaactccttcacctgtaagcatgcatcctggtccaacaattctcttccttcattaaatagatcaaagctgatttgttggttttcaagacttatttccaactttttcttccccatgttcaccacacaacttgcagtggacataaatggacgttcanaatgacaggaatatccgcatcttcctcaatgtccattacaacaaaat

SEQ ID NO: 199064 - DNA, 479 bp, Glycine max
  unsure (1)..(479): unsure at all n locations
actcagcttatagaagaagtcattgctccacccaaaccaatattttttagatgcccccttatttttcaagtcaccaagtagtaagcactaaacttttaacacatttggataacaaagaaaatatcaattcagcttagaggggacaactttaggatacatttaagcaaataatatgggtgtagaaacaaagcctacaaattgtctcaatttgttaaatacactcaggaaatttactcaaggatatgtatctcaagataaaccaaatgcataacaactcaaatggacatacatcacacacaatgagagtaggctcaaaagctaatgtaagtggtttatgtaacaccctttattaaaataacaactcatactaaatgaatatagaatctncagaatatattactatgaaaatacctcaagtataatgaagaaagtcagataaataggtcttacatacgtaanaatattatcttcaaaatatg

SEQ ID NO: 199065 - DNA, 390 bp, Glycine max
  unsure (1)..(390): unsure at all n locations
agcttcctctcaaagaagaatctctccanatcattggaaaagngaagcatccacacccttaggcaaagaaactctgaaagtctatgtccttaacaaaagcaaccatcaagagaaggaatcctattgtgaacaacaacaagccagagaaggaatcagaggtgtcaatcagaagctgatcatagggtgttgtcccttgaagcttgcttgcggtctcggatctgtggccaagcacagagatctctttggagtagaatatcatcaaagctccacaagtaagagctattatggaatgaagaacacacataaaggtatatatagaagaaaccatttatccgaattcacttcaaaggcctttaattgctttctacttntaactcaatggagcctctg

SEQ ID NO: 199066 - DNA, 468 bp, Glycine max
  unsure (1)..(468): unsure at all n locations
ntccatcatttgtttctcaagtcatagtattacacacctatttgctcatgatcctaggaatttaaatgaaacaagcacaagctcggaaggtagtcatacctcacaaaatatatatatatgtatgtttaggtagcaagataccttggatatgcatgtatatagcaaaaatatctcacaaaacatatatatgtttaggtagcaagataccttggatatgcatgtacatagcataaatatctcacaaaacatatatatgtatgtttaggtagcaagataccttggacacgcatgtatatagcaaaatacctcacaaaaatatacatatgtttaggtagcaaaatacctcatggaaaaataaagagagcaaatagagcgagcaagattagataaagaatgaagaaaacacaacgagaacaataataaaaataaaaagtcgtctagctaacaaaacagcatgcttgtgaaaag

SEQ ID NO: 199067 - DNA, 371 bp, Glycine max
  unsure (1)..(371): unsure at all n locations
tcaagaatcaagattcaagactcaagattcaagaatcaagagaagactcaatcaagataagtactaaaaaagtttttcaaaatattgagtagttcaagaatttttcacaaaatcttttaccaaagagttttactctctggtaatcgattaccagaaggtagtaatcgattaccagtagccaacattgttttcaaactaatttacaaagctataatcgattaccatgagcatgtaatcaattaccaatattttaaaacgttagatntcaaatttcaagagtcacaactagtggtaaaacattttcaaatcattttaaacttgtgtaatcgantacacaatacttgtaattggataccaaagtttctaaacat

SEQ ID NO: 199068 - DNA, 473 bp, Glycine max
  unsure (1)..(473): unsure at all n locations
ntntggtcttaaataaaaagggttttccctttttccattattntattcaagctcagccacatgtccttatttgattggagcaaaaagggcccactttctctttttgactgtgacccatactcagtcacaaaagtggggaaaaatctgacctttgaaacgctaaaatcctgcctcgttttgcgtgccatttctctgattccagtttctcgcgtttctctgcgtccgtcggggccagttttcgaaagcaagcaatatatgtatcaaaacgctcagaataaaaccccgagcgtggttcagaggttggtttcgtcaaattccaagttgcacgcaaaacgatgatttttaaactaattaattaagaattaacccataacctctcagttatggatntctcttccttaattagtccaacccgcgtatcttgccccccactattcctacttctaccaagaacatataggcatagacactga

SEQ ID NO: 199069 - DNA, 446 bp, Glycine max
  unsure (1)..(446): unsure at all n locations
agcttctatataagctgaaccatnttatctttatttacaagttgagnnntattcagaaaattagagtttatctcttttatcttagtgagagtgattctcctaaattcttgagtgattcaagaacaccttggctgtatcaaaggactttcacaacctttgtgtgttgccctcgctggaaagagtgattctttctttcctttcatcatcacccttgttctttcaaaccacaattccagaaaatccacctctgcccagaattatctcgtggccataacttccattttacgcactcaaattaagtgattcttgagcctatattgaatttcaaaacgagacccttcactctcgtttggaatcacctcatttggagccctgtagcttcaggtattgccatttctatatttctggccagccaccacttaacctaccttttaccatcccattca

SEQ ID NO: 199070 - DNA, 476 bp, Glycine max
ccttgcggattggtcttcgccagtgaaaggatcgaagtgtttctgttaagaggcaaatttaatcatcctgcttagacgaatgagaaaactggggcaaataaagagggtgaggatgagggagaaacccatgatgtgactgccattcctatacggccaagtttcccaccaaacccaacaatgtcattactcagtcaataacaaaccacctccttacccaccacccagttatccacaaaggccatccctaaatcaaccacaaagcctgtctaccgcacttccaatgacgaagaccacctttagcacaaaccaaaaaaaacaccaaccaagaaatgaattttgcagcgaaaagcctgtaggattcaccccaaattccggtgtcatatgctaacttgctcccatatctacttgataacgcagtggtagccataacccctgctaggttccctcaaacccccatttttctgatgatatgactc

SEQ ID NO: 199071 - DNA, 441 bp, Glycine max
  unsure (1)..(441): unsure at all n locations
catgcaagctttaggagaaaccatagaagctaaggttgnttttatatttataataanngaggaagcttcgccaagtatccccattgaaaaacctttattcaaacctttcaaagttagtgagaaagctaaacgaaaaattagggaacttagaaaaactaaatccttaattgaaggcgtaggtgacaatcatagtgaattactaaacaagattggtagtttacttaaggtcattccagatactccccaaacctcagaaaatacttccaaaatggtaacaagaagtacctccaaattaattaatgttattaatgaagatagtgaccaaaactcagataacacaactgagataggatcagtgtcagaaaagaatataaattcaattaattcccaacactagaaaacaccctccaaattatattatcaacgtccgactggccctga

SEQ ID NO: 199072 - DNA, 469 bp, Glycine max
  unsure (1)..(469): unsure at all n locations
ntgttccgcatgggcgtcaggacatactgaacacggccataggttaacctgagcatctagggcatgtttgtgtcgcagggacaggtgtcacaataagccaatactttggccaagtgtcacatgcttctagcacgtcctcaccatcaatctaccaacaacagttggctgaaatcatcggtggaattaatgacgagataagaaaggaggtggaagaagaacacaagcagcagcaagaggcttggaggagggaagttgaagaacaacacagccgcgatatggagataatgaagcaagagttaaaacaagcacttaaaatagaattatctcatatttcatcacatcagtcagcccttattgaggcgccaaaaatgaaacctttagctgcgcgtgtaagcataaagggaagctatgctgcacctgaggcacaaggattacctanagagccttctgatgttgatgtggatcgaat

SEQ ID NO: 199073 - DNA, 476 bp, Glycine max
  unsure (1)..(476): unsure at all n locations
tgttcgcacatcgtttgcgtgtatgatatccactcgacattgttgtatttaggagaacttcaatcctattacgcaacgtggcggacaaaagtgggcagttaacttgaatggtcattattgtcaatgcggaaggtattctacgcttcactatccatgttcacacattatttcatcttgtggttacgtgagcatgaacaactaccaatatatagatgttgtttacacaaatgagcacatcttaaaagcttactccgcacaatggtgacctcttgggaatgaagtggctattcctccttctaatgatgcatggacacttatccctgacccaactacaattcgtgcgaaaggtcggccaaaatcaacaaggataangaatgagatggattgtgtcgaatcatcttatncaccgacaaaatgtagtatatgttgagtataatggcacaatagacgtcgatgtccaatgcaatctgagcatg

SEQ ID NO: 199074 - DNA, 339 bp, Glycine max
  unsure (1)..(339): unsure at all n locations
agcttaagtaccacggagaaagcaattaaattttcttctttttaccacataaaaggtggaaaagaaagatttacccagcattgtaagccggtgaagtgcagtaattgtggtagttatatgcttcttggcaaagtcaagtttcttaatgtcacggcatatttcttgaaccattgtttcactctgaaccgctntagtttttatctctcggatcttatacataagttcctgcatttaccaagggaatgtgcagataaaacgcatgcaacgcaacacaaaggttcaaaacgtagaagcaggaaaataaacagtataaactacttcacacgtgccataccttga

SEQ ID NO: 199075 - DNA, 463 bp, Glycine max
ggacctataaaactaagcttcgaacgtttcattggactttggatgcgtatgttttttttgtatctctgctaaccgccaaagttcacgtggatacatgattgcatgcttgtgatagatgcttgagttgtgtaaagcgtaaaatgaagtatggatgactgtctcaatgaaaaaccagtgcaaacctttagcataggcatacattatattcgggcatatagatactggataaatggttatcaaattgattttatggggtcttaatacttgcatgatttatgatgtgatggtgaaagctcactagtcttaatacacccaaatccgcttctattgctttttatttaagatttgattttcttgcagtttcttgaactggcagctgaagctttctatctgatggccatggtatattacaaactgctgcaattataagaaatggaagaagctgccgctttatttcaaaaac

SEQ ID NO: 199076 - DNA, 338 bp, Glycine max
  unsure (1)..(338): unsure at all n locations
agcttaacatcagaccactgtcattgggttggttctacttcacanggacttganggggcctatgcaagttgaaagccttggaggaaagaggtatgcctatgttgttgtggatgatttttccagatttacctgggtcaactttatcagagagaaaacagacacctttgaagtattcaaagagttgagtctaagacttcaaagagaaaaagactgtgtcatcaagagaattatgagtgaccatggcagagagtttgaaaacagcaagtttactgaattctgcacatctgaaggcatcactcatgagttctctgcagccatcacacctcaacaaaatggca

SEQ ID NO: 199077 - DNA, 469 bp, Glycine max
tctcaaggaggtcagcttagatatgagaggggttgtgtttctagctctagcttctcaaggagagtttctcaaagaagcttctcaaggaagttttctcaagaaagcttctcaaggaagctacctagtctataaatagaagcatgtgtaacacttgttgtaactttgatgaatgaaagtcttataagacacacttcatagtttcacttctctccctcttttattccttcaatttcgtgctcccacccccctttctctctttcttttcctccattaaagcatcgtcttcaagcttcttatccaaggcacattcttagtggtgattgtcataccctaatttcgtccggtgacctttgcttgatgacatgcgacctttctttggtccttgtgaggtgcttggcacccatcattaggcaatttgtgaagatccaggacatgccgtgaaaccaaaaaatattgatgcacaatacgt

SEQ ID NO: 199078 - DNA, 359 bp, Glycine max
  unsure (1)..(359): unsure at all n locations
agctngaatcaaccaaaccctattattaatatnttttgatgggaatagaaaatccactcaaggttgctgccacaacctgaaggtgcagtcggggccatgtatgataaaaggagatttctttttgtttaacttaagaggagttgacttgattcttggtgtggcctgcctggccactttgggggaaattaaagcaaattgtcagaccctaagcatgtccttcattcatcaaggacagaatatgatcatacaaggagatcccaaactgtcccaggcaatgatntcttccaaggcacttaagaaacttgccaaggcagaagtagacataatgtctatgctctgggttgcggagaaagtaatat

SEQ ID NO: 199079 - DNA, 242 bp, Glycine max
atttaatttaaatcggagaaggaaaacctcccctgcataagagaaaaataccacgacgacgcgcaaaaccctaaaccgaatacgaatccgaatcacacgcaccctcgctctcctgaggaacacgaacgaaggaaaagccaacacggatgactaagatgattgcacaggctcttctacccaaaacactctcatggacaccccacggaaccctaaatcgcgacgaaactaaggcgtaactacga

SEQ ID NO: 199080 - DNA, 444 bp, Glycine max
ttaactggaattgcaacgttccaattgttttatttatttgtaatcgattacaagatattggtaatcgattaccagtgtatctgaacgtcgaaattcaaactcaattatgaagagtcatatcctttcataaaaagctttgagtaatcgattacatggttttggtaatggattacagtgacaagttttgaataaaaatcaagagatataactcttccaatgattttcagatttttctaaaggttataacttttctaatggttctcttgatcaaacatgaagagtctataaaagcaagaccttgacttgcattaaaaaaaacaattacttacaactttttcatattttcttttacaacctttgaatctctttgaacatcttcttgaacttcttcttcttcttcctttgccaaaagctatctgaagtttctggttccaaactttgttc

SEQ ID NO: 199081 - DNA, 382 bp, Glycine max
  unsure (1)..(382): unsure at all n locations
agcttgtgaaaagaataataataatttattgttattagaatnaaattaaaataaagaaaaaccaacataaaattaaattaatcaattaagacagacaagatgagagaagccaatattagaaacaaaagttaattcagaagatgagaatgttgagagagtttaacctaccataactactcttgatgtaatattaatgatttttctctatttaaggttattctaattatcaactgcatctactcatatactctaactatgattcctcaagtgaaagagcctaatttatttattttctctggctaatctctttaagaggtaaaacatttaaattgcattaagaatagggatatatattagattaaataaaaatattatatcccta

SEQ ID NO: 199082 - DNA, 335 bp, Glycine max
cagcttgacatgttgcatgataaatactgcggtgttgactagattatgtataggtcattagcgtaagcagcctcataatttggagccacatgacacaatctcttttacagctaaaatagtttttagaataacactttgccttgatcaatcaattctttatccttctgtccttttgtctcttataaatatatataccaataccatttggtttcattaaacatcatgatcaaattcttagatgatggagcgctaattgaaattcgataaaaatgcaaactcttctttataactttattgttaatgtaaaatatatatgttgataatcaatttttata

SEQ ID NO: 199083 - DNA, 349 bp, Glycine max
agcttatcactaggagatgtgtatggtaatctcctggcttagaacgtgcattgttgtgttttaaatttgctattggaccattggaagtcttaattatgtcaattgtaaagataatacttataagtccttcaatgtaaatgtagtacttatccttaaattcctaattgtgtaatgcacctttgtactgctcgtctttgtactagtgtaaatgtgtaaggctagttatatttatagtggtattatacttgtaaatctcctcctttcttttttttttcttccacatatgttgcatgggttactccttggcaaacaacagaaagattatacagagcaaggagcctgtctagta

SEQ ID NO: 199084 - DNA, 402 bp, Glycine max
tccatcacgtggtaatcagaggacaagatctttaagtatgtgctccgctaaccgacccttaatattatgctttaccttctgttccatagccgtttcctcatttctatccatgtatcaccttacatgtcttgtgacaaacggtgttaacatgattcttatatagtgtccaccgagtaacctggctatataagctagattggatattctatggatcaaaactcttgctcatgcactcgagccatgaatcgagctgaggatacgatcctatgagggttgcctagcaaatatatgcggctaagacctaaaccataaagatcttactatagcagtaaagctgactaatacctccaaaatctatagagttcacatattcgaggtctgtgatacatatcatcgactaga

SEQ ID NO: 199085 - DNA, 466 bp, Glycine max
  unsure (1)..(466): unsure at all n locations
agcttacagcagatgccactctactctatantttgaaatatatgnnaacaaggaagcatacatatattcatcaggaaaacatcatagtggaaggaaactacagtgttgtgatccaaaagatccttccacccaagcataaagattttgggagtgtaactattccttgttcaattggagaagtcaatgtgggaaaagctcttattgacttgggagccaatatcaatttgatgtcactctccatgtgcagaagattgggagagttggaaataatgcccactcaaatgactttacaattagctgaccgctccattaccaggccatgtggagtaattgaagatgttntggtcaaagtaaaacaatttatcttcccggctgactttgtggtaatgtatatctctgaagatactgacatccttgtaatatggggaaggccattcatgtngaccgcaagcagtatattgatatg

SEQ ID NO: 199086 - DNA, 433 bp, Glycine max
actcaagctgttttgtgttgatttaacttgggtcacttatttactttcttactcattaaaagatgacttgcgaagtaaacgactggttcaaactttattttacattgataacacgaggttacagcacatacgatcggttgaaactttattttacattgattaagtgagattactatacaaatgatcggttgaaattttattttataataataaggcgagattatagcacgatcgatcggatgaaatctctgtactcaaagaaatgagatcactgatggtagaagaatgagataaagatgtgaaaagcaacaagagggacccctataggtgcatagaatgaattcaaaacttcacaatgaaaactaaccggtcgacgaacgaagaacggtgtaggaatcgatcacaaaagcgattcagaagtgcctcggtctcg

SEQ ID NO: 199087 - DNA, 335 bp, Glycine max
ccagtttcgctcccgaatatgatagccatcgttttaggagcgctgagcaccagcagcgctttgaggccatcaaaggatggtcattcctccgggagagacgcatccaacttagggacgacgagtatcctgacttccaggaagagatagttcgccggcagtgggcatcgctggttacccccatggccaagttcgacccagacatagtcctcgagttttatgccaatgcttggcctacagaggagggtgtgcgagatatgcgatcttgggtgaggggccaatggatccctttcgatgcggatgccctcaaccagttcctgagatatcctttagtgctg

SEQ ID NO: 199088 - DNA, 476 bp, Glycine max
  unsure (1)..(476): unsure at all n locations
ggaccttaaaactaagcttgtcacttctactcctctcttcattcttatgngtntcatcattttctttttctttntcttggccattatttctttttctttttcctgattgctttcacttctcacatcatctttcttttcatcagtaccttttttttcagtagctttcttcttggatacaacactatcctcatcctccgcctccacaaacctcttaatccttgtcatcataactttacattcctccttgggattcttttctgtattcgccataaaactgttggatgacttgtcggctatctgcctggccagttgtctcacctggacctcaaggtttttcaatgctgactcagtgcttttattattggacattgttacctgcataaactgattcanagtctcctccagcttagtagtcctttgaaagatgttaggcctttgttggattggtctgttagaaggtccaccctggtctttgt

SEQ ID NO: 199089 - DNA, 315 bp, Glycine max
  unsure (1)..(315): unsure at all n locations
cttatggcacaagggctgacttaagatcgtctaggattaaaccttggtggaaaattcagaaaattgattaagaaaaggatgggaaattggccagattcaagggttgggcagtggctaatttcctgggacttaataaggtgaatcttaacataaaatggatgaatgagatggtaaaaacgtatgttaagtggtgactggacagaaatatagaaatcgctataactcaagatacagggctccaaatgaggtgattccaaaatgaggtgaaagctctcgtcttgaatttcaatttangatcaagaatcacttaatttg

SEQ ID NO: 199090 - DNA, 476 bp, Glycine max
  unsure (1)..(476): unsure at all n locations
ggaaggtgtgtaacccaccattntccatagtaatgggtctactatcattgtcatcatttttttcgccattgaggtgccacttaagctgccaggttctccacctttgggtgtattctttgaaagatccgtgccccctttttgcacatgttttgtagttgcatcctatccgaagccattataccgacactgcctaacgaaggcaaccattaggtcctcccaggaatggactcgggaaggttccaagttagtgtactagggaacaactaccccagtaagactttcttggaaggaatgtatcaacaattcctcatcttttgcatatgcccccatcttccgacaatacatctttagatggttcttgtggcaagtagtccccttgtacttgtcaaagtccagcaccttgaacttgggaggggtgatgatattgngtactatgaacaactcttctagggtagcanaggcataatcttcacctt

SEQ ID NO: 199091 - DNA, 370 bp, Glycine max
  unsure (1)..(370): unsure at all n locations
gaaaagaagaaaatttgattatcctgctttaatgaacgggaagcctggggaaaatggagagaataagaaggagggaggaacccatgttgtgatagtcgttctcacatagccaaatttcccaccagctcaacaatgtcaatacttagccaatatcaacccttctcattatccaccatcctatcaaccaagaacacccaatcatcaataaaggccacccctaaattagccacagaacccgcttgctgcacatctgatactagacaccacccttaacatgaaccanaacactaaccagggaatgaattttccaacaaagaagcctgtagaattcaccccaattcaggtgtcgtatgctaacttactcccatat

SEQ ID NO: 199092 - DNA, 487 bp, Glycine max
ggacctataaaactcaagctgacacctctgttctcaccttcatcacgaccctgttgtttattgacaaaaacttcttcttctagtgagccattaagaaatgcagactttacatgcatgtggtgtacttcccagcaattgaagctagccattgctattacaagtttcactgtttccaacctatcaacaggggcaaatacttcatcataaaccagaccttgcttttgcaaaaatccctttgcaaccagtctggctttgaactttgttacttctcctctaggattcaacttagttgtgtagacccattttactgctatggctttctttcctattagtagctttgtgagactccatgtcttgtttctctcaatagacctcaactcttcttccattgcttcaacccaatgtgagtgcttaaagcttcttccacgccaataggatccatctcagcatgtagggcatatggacaaagtcaccatcaactgtaatc

SEQ ID NO: 199093 - DNA, 422 bp, Glycine max
  unsure (1)..(422): unsure at all n locations
agctagaagttctagaatttattttattgttaccttaaagatgaatcaattccagatagtcttggatccttattatctttgttgggcttaaatctaagtgggaataattttgttagtccacctactcgttgcattagtaatcttcataccctgcagagtttgaccttaattgattgcccaaggcttgagtctttgcctatgcttccaccaagtgctcaatgcttgggtacaactaatagtactcaaatgaaacccttgaattcagatgcatatatgctgtggaagatttatgagttacatatgaatcagacatactttttatatactcattctctccctactctgccccttacccacccaaantaattccataaagtgtgtgcttaccaaatggaagatagaccacattttttgtcatcatt

SEQ ID NO: 199094 - DNA, 441 bp, Glycine max
  unsure (1)..(441): unsure at all n locations
tctcaatgcttcctaggctaaagtcgttccacctactttatccattcaggtttcgtttacagagcctttgatttaagagaaaaaaaaattaaaaatttcttttgaatttaaagtagagtgtagatttgagattcatacaatttattctttatttcacttctttttccctcaaccaaatacatccttagaattgtcaaaatcaaatgtttttttttgtttgttttagtttttgaaaactaaaagtaattnttaaaaataaaaatcaaactcatccaaaacatctgttattttggattatttttagttccatgttattcatgtattttcttgtacttttacatattccttcacttctcactaaaaattagttttacaatctaaaaaacaaanactcaatcacacacatcttagataaattattgtaccttagattactgtata

SEQ ID NO: 199095 - DNA, 427 bp, Glycine max
  unsure (1)..(427): unsure at all n locations
agcttgccttccaagtaacatanaattgttttaccaaattcatccattgaggagcgctctgattttattaggtaactggaaaagcacgtgcacacacacatgcacacataatccatatattcaattacaaagtacatcattatgattctcaaatataattttattattcaggagaaaatatgagtttctacagtttttggatattgaagaaaatttgtcttgtccctttgtaccatctcatgcaagatgttcatcatattcccagcgtagttcctcgagcaacaacttcccacaagacaaaaaacattatgataaacaagaaactaaaagtcttattgggagcacatttcgaaatagttggggaagaaaagattctgagcataagagttcaaagaagagcaactcattggaatggtttcattggata

SEQ ID NO: 199096 - DNA, 457 bp, Glycine max
  unsure (1)..(457): unsure at all n locations
agcttgngtaccaaatcactatctactatttcttaaaannctttcttgaatcgacagccatcttcatggcttcttgttcaagtttcaacaaactggaatcagcagccctgttgaccaagactgcttcccatgtgacatcatctgaggttggtgttccttgcagatctacaagagaaggcattcttgcagaggttgactcagtcaagatcccatacagatcatagaaaccatctgagattttgtcatcataaccaagagcgttgtaattctgtgaagcatggataaatctacgatatgagataagtcagaaaggaatataaagtaggatatattacagttaagtaactctaaagttagctctcatgcatcaacatcctaatccattcagcatcattaacttcttaaattagtttccaaatctcatacaagatgtcagcaattttacaatataaatcgt

SEQ ID NO: 199097 - DNA, 470 bp, Glycine max
  unsure (1)..(470): unsure at all n locations
tgaatgcctacggactttcctctccttgtcagttgagtttactttataaccttctcttctgattctagttgtagtaactttctctatctaaggtgtcagcatcacacatatcatatagattgtgtagtaagtgagatttcccatacaaaacattagaaaatgaggccatctaacttggttaaatcgtgttagtcgtggttatcagcagaaagcccgaactaatgcagaatgacttgctatatcccatagcttgctgagacggcagatagggtttcttaagatatgatgataggtacaataatctaggttcccctatgggcatatcccaggtttccgatatgatcttaaaatagactattagacacaagaaagctaaaaaaatagcttggatgtaatccgagtaacgtagaatgataagcataanggatttgagaattaatgggatggatcacgtctcaagactgagatgc

SEQ ID NO: 199098 - DNA, 457 bp, Glycine max
  unsure (1)..(457): unsure at all n locations
agcttgtaggattatggagtatccattatatgtggtactagggggcggtcgggcgatggtgcaaaacaattctccacatccacaaatcacgtataacccaccatcccatgttgcccacctcaactgagctcacatactcccacgtagcccttatcctcgttcctctcaacgccgggtccccatcaatcctcccaagcttccacaacatccaagtaattcaacatccaagcatcatgaactaacacatccaagaaaacagggcagaggcagaaaactctgcccaaaacacaaaccaacatcacaacttttcacactcaattaccccagtaatattctcttcgttccaattcgttaaccgttggatcgactcanaaattntactggaagtctctagcacataaatctacattatgaccattgggatctgctagaaaacgtccagaacccaatctgtact

SEQ ID NO: 199099 - DNA, 446 bp, Glycine max
tctagattagtgtaccatacgaccacggcccctttcttttatcttggaagaagtgcatcaacaactgttcatccctagaatgcgcccccatcttgcggcaatacattttgagatggatcttaggacaagttgtccctttgtacctatcaaaatttggtaccttgaattttggggggatgacgacatccgatactaagcaaagatcagccatgtctgtaaatggatagtcgccaaagccttcaacagctctcaatatctcttcgatgagatcgagtttccttttttcttccgctgtcggaggtggcccttctgcggacaagaatattggttgtgctgtgaggtttcgaggttatcccatgacgttgggctgatgtattgtgttaggtgtcggcccctcgaccgtgactgtggagtaggaatcgatgtctacttgggtatgctctcta

SEQ ID NO: 199100 - DNA, 395 bp, Glycine max
  unsure (1)..(395): unsure at all n locations
agcttagncctcatgaccataggttctctttatgcacaagngtttaaggtaattcttcaaatagacaaccaacaccattcccaacttttgcatttcatctcattccatacaatcacacaaccagagatgactaagcaatgcatcaattaacaacctttcaaagtgaaatgcagtattttcaaagatattaggatgtctattaagcagcacaaatgaaataagctagtaagcatgacaagtatcaaggaaggtcaaccaagcttagtcctcatgaccattggttctctcatatgcacaagtgtttaaggtaattcttcaaatagacaaccaacaccattcccaactttggcatttcatctcattccatacaatcataaacacacaatatagatctg

SEQ ID NO: 199101 - DNA, 407 bp, Glycine max
  unsure (1)..(407): unsure at all n locations
nttctttctcaatcaatctgtctactgactaacaattcttattgtaagttcacattcttgctctttctttgtctagcatacacacttgctcaaactcatgaaaggaaacataaactccatcacaatcatgcactcaattcaaaatgaaaacatacatccatttttcacagaaagataaaagtgtttcactgccatgtcataaaaaataagtcagactgttcaaaatgctttagaataagcataccaatcatttataaatagaacttaacaaaaaggactcactgtaataagactataattaaaataataataaactaaatggcacaaaaatgtactcaggaatttaaaaatcctgtgatctgtcctgagtatctagtgttagaacatcctcctcatctgttaagtga

SEQ ID NO: 199102 - DNA, 417 bp, Glycine max
  unsure (1)..(417): unsure at all n locations
agctttaagcaacatagatattttcttgtattttaggttgaaatcgctggtgctggcagcttgaacatacgagcttgtataaattactgggaattggtcactacgtgtgttgagctgaatttttttactggattttctagacatctggaacaaaaatatgaaaaaagaaccaagcaatttggattaaaggaaaaaataagaaaaatcacacaaattggcagaaaaatcagtgtccaagaaaaaaaaagtgaaagggaagtgtgcttgttgttttaactgaaaatttgttctattaatggtgcctaatttataccaatcctagttctgaaatttcaattgaaaattattatgaaaacacgtgccaaaactagagggttcttgagtctttttttttttatangttntctactctactct

SEQ ID NO: 199103 - DNA, 383 bp, Glycine max
actagcaagactacccatcatatcttccaaaaccccacacccacgaaatttaagagagaaagaagtccacccaaacctgaaatttcgaagtcccactcgtagacacgcacttcacgactccggaaatgccctccttttgcgatttggggcagaaatgatggccaaaggttgaagctttgtttggagcttcaatggagaatgaagaagaagaaaatggcaacgtgagggagagagagagctgtctgaaaagtgtgggggctgagtgaagagagagaacagctacttcttttctgtgtttaaataacaggggtttctctccttctattaatttattataaactatgccacatgtctctatttgagtggagcatgagggcccactt

SEQ ID NO: 199104 - DNA, 380 bp, Glycine max
  unsure (1)..(380): unsure at all n locations
agctagcatgatntacatctccctctttcttaagcaaattcttcttgatatcatcaaaatcttcatgatttacattctccccctttttgatgatgacaaacatgtgatttcttctcgacaccatcaaagcttgcatgatttacatctccctctttctcaagcaaattcttcttgatatcatcaaaatcttcatgatttacaagggctaagcgatggaggtattggtggctggcagtaacatggtctatatggaagctcagaaacaaaattttgtttgcaaatgcacgaattgatactaatcggcattttgaagatgctatctttataatttggacttggcttagacaatttgagaaggacttcacagtccactataatca

SEQ ID NO: 199105 - DNA, 429 bp, Glycine max
  unsure (1)..(429): unsure at all n locations
acactattaatactaagctggggcggatgtaagagacatctgtatcgacctttttgtttcttgaatccatctcatcgaatcgcatgtctacttgtaactccaaagcatcaaacctttcgccaacaaaggtttgaagaccatcgaacctgtccaaaatcttttgaagaagagaggaatcccctcctaatggtatgtttccttcttcattaatgggtggagcacccttttttaccctagagccatcatgctctttacggtagccaaaagatgcaatcacagcggcaccaattaagaaggatctcttgattggaacataaggttctaaatcaagagggatgttaaagtgttgaaggaagagagtgactaagtgtggatatggcaatggagcatttaatngcaatgccttatgcatgtgatatcggactaagt

SEQ ID NO: 199106 - DNA, 350 bp, Glycine max
gctaagagaagaatgcatatttagctttattaatacgagattacacataatgagttagtagtgagcaatgctcacatttaacataaggtaaacttttaaacctggctggtaagctggtctgccaagaaattttctggcgaaattgacctgaaaggtacgcaatctatatcactatcttagtaaaattttgaacaaaacaaggacacacgtgccttcttggaattctctctttctctaccttgtagagaggagcacaaccccaatgaaatgtccactgtataaggaagaagcggctggatttatatatgatgttgagaggacaacatgttttgacagcataacctgtaata

SEQ ID NO: 199107 - DNA, 442 bp, Glycine max
  unsure (1)..(442): unsure at all n locations
tatcatcagtccactagaaaatggtctttatcattaattgttgctaagannctacgtcatttagcaatacatgttaatcatcctctatatttcttttcctctgaattttcttttgaacagaaatacatgactgcaggagttgcatccaacttaaacaccttaactcccactttatacaaaggtaactaatacatatatttgtttctattgatgaacgctgctccctccaattaactgaaaaccctcagcattcaccatcaagggtcattagcatgggcatttgaccattgtcattaagatcaatcttgttcaatctaaggcagcacaatactttctccggaagctcttcttggttatgtgcctcttatcacgaaattagagagatggtcaatctcagttgaaggctaaccatacattactaaaaaagttgtatttacgacgt

SEQ ID NO: 199108 - DNA, 458 bp, Glycine max
  unsure (1)..(458): unsure at all n locations
atccttaagcacctgagctgcagcttaatatgaattttagattttgttctttatatagagngaatgaatgtttgtagcatgtgaaacaccaagacacaatataattttgtactgcattatttttgaagtatttgtaactgtaatcatatatatttatctggaatattttacaatataaaaaaggacaaaactacaatcataatttaaaaccttaattctaaagtgtctagctgtgtgcatgagtacatttatacacgtaaccgacgtaagagtgttgctacaaataataatgattgcaaacatttgggggacaatatatatcatcaattccacgtactatctactcttattttatcagaaaaataaattcccgtatgagtagcgagtagagcaagttattgcaagtagcatttagcagcatanaataaaagcaaaaaagtacctctagtaagtgaaaa

SEQ ID NO: 199109 - DNA, 189 bp, Glycine max
  unsure (1)..(189): unsure at all n locations
tatttcatatactttccttcgatgaatgccagtaggagtgcatttaaactgccaaagttcatcactcgagctgcacgcaagggcaacacatacaaacttacaactgggatcagcagaagcaatcatagagttaaatgtgtgcaatccactcanactacttnccagcttactttgtcgccgctgtctgtt

SEQ ID NO: 199110 - DNA, 384 bp, Glycine max
cttgatgtaaatacctgtatatctatttaatgatgtcttgtgtgttcattgtgctatcagaacttcattctaccatgctttagccttgatcacgtagatgcatgtgttgttaggatcattcaatagtggaaactggtttgattcttagaacttgataggacgaggctagtttatcgtattattacgagggattacggtacgattacctagtagttatatatttgtcttaatgcggtcctgaccgagtttatccaacaagaggaatttgcggacgatgctcgatcaggattaggctagactatcatgaggaatcggggtttaacatttctcgagatattatataacacttgatcattgttaggtagagaatatccttattacatt

SEQ ID NO: 199111 - DNA, 399 bp, Glycine max
  unsure (1)..(399): unsure at all n locations
aatcacggnataaaagaatgcataactggtatgtaaactaaccaattttcattcttcttcgcattactaaaatgagcactaactngaacatcggagtgtgtgcaggcagcccaatgccactatgaggatcgcacaaaaccatcattgtgctccacctttgtgtgtagtntaaacctttgactctcaactagaatcttcttgaatcggatctctatctcctgaattaaatatttatattatgttgattctaatctatatgaatgaaataacaaataactttatattaatagaaaaaaaattgataaatataaaccatattatgaattgctcacatttaccttgacaatataaactaatctcttctctttttttacacaaccacctatttaatgtattaaa

SEQ ID NO: 199112 - DNA, 329 bp, Glycine max
ggatcttagcaccgcgctgcactgctagtcgccatatttttactacctatataggtcaaaacccataaattcccaaaataatccttaaagaagctatacatgccaaaattgagctacaacacaacctattactagcctaccccttattgggcattgttgtcactatgacataatactgaataagtgcaaagtactaacaagtgggtccaaaagtgcaagatcgaatacgaacaaaagaaaaggcgacaataggtacgtttatattttgcaaaatttattctagatgaccctcataaaagctagtgttacttattaatttttcaagaaaa

SEQ ID NO: 199113 - DNA, 230 bp, Glycine max
  unsure (1)..(230): unsure at all n locations
tttaagaccgctctggtaaagcattntttaagccggatgtaaagtacccgtcgttgaaaaggtataaatagttacgaaaatgccatcactttatttattacatcgagtttcatataaccgacgtaaaaatagagtcgtagaaaatctctattttagtagtgtatcaaagtcatccggtgtgtatggaatttaaatntaattcatatgtaatattnttcaaagataagagc

SEQ ID NO: 199114 - DNA, 426 bp, Glycine max
agcttgaagtgggattccccaaacgtgattccaggtcagtctacagcctatacgaacagtcgggctccacctttccaacgagtagaagactggtgtggcttcgtctaatccaccattcataagttgttttgcaaccttatcagtaagtccgaagagtagaactaggtcatctcctatgtatttgggcattaaatccattcctgtcacccaccatagctcctcctccaatctttcaaacatggctggattctttagtcttccaacccacgcatccttcaaccatttggtatcatctggtccaatgtcaatttgcaccgctgatgttgagtaaccacgattgtggggttgactgttggaggccattcgttgtctcggtatccaattagttcgcatcagcgcatccctgtaagatattgagtgtgtctg

SEQ ID NO: 199115 - DNA, 198 bp, Glycine max
  unsure (1)..(198): unsure at all n locations
cacaggcaaancaaactccacagaaccaaacatccacaccaagaaaccaaacatagataattcacacaacaccgcaactcatccaaatgaaacaaacaacgcaagaattacatcaaacaccgatctaaagagatcaaaagtgcagggcattacagctactactagcaacaacgagcaatcgacacccatccccaggga

SEQ ID NO: 199116 - DNA, 422 bp, Glycine max
agcttgcccagagaaggagtcctctggtgatatgcttaccacctcaaaagactggaaagcggtttctaatgactcctctgcggcctccacataaggcatagaggatgggtagctcacccagatgtcttcctcgcctgacacgatgaccaaatgcccctccactacgaatttcaacttttggtggagtgtagagggcacaactcccactgagtggatccacggacgccccaacagacagctgtaggggggttaatatccattatttggaaggtgacttgacaggtgtgagggcctatttgtactgggagatcgatctctctcctaacctctcatcgagtgccgtctaaggcactaaccaccattgaactccgctttaagtgggaagcattgaatggttatctctcccgagatgctcttatgcc

SEQ ID NO: 199117 - DNA, 255 bp, Glycine max
  unsure (1)..(255): unsure at all n locations
tatacgagacatctcgcccaacaaagtcagggtaaccataactcgcctgtgctttttcgtctatgctatatgtaacaaagtcattgattctgtcaaagttgatgagttggaaaatgaggccacaattatactgtgccagttggagatgtattttcccctgctnntcttgacatcatgattcacttgattatgcatctggtcagagaaatcaaatagtgtggtccttgttatctacggtggatgtaccccggtgag

SEQ ID NO: 199118 - DNA, 378 bp, Glycine max
  unsure (1)..(378): unsure at all n locations
agctatcttgaaagaagtgtattaatagcttcctcatccttagagtgtgcgcccatcttgcggcagtacatcttgagatggtttttgggacaagtcgtccctttatacttgtcgaagtccggcactttgaacttcgaggggataacaacatcgggtactaagcaaagatccgtcatgtctgcgaacggatagtcgccaaatccttccacggccctcaatctttcctcaaggagatcgagcttcctcctttcttcagttgctggggacggtccttctgtggacaaaactattggttgtgtggcgatgttgggctgaggcaacgtgctgggtgccggcccttncgggatcgggggatagaactcgacatcccttcagcat

SEQ ID NO: 199119 - DNA, 284 bp, Glycine max
  unsure (1)..(284): unsure at all n locations
aagaattcaaactcggacaagaaatattgctctacaactcaagattaaagtagtttccaaaaaattaaaattgagatggagtggtccttttactattaaatatgttaagccttatgaagcaacagagatagaggaccaatccaaagacagcaactggttggttagtggccaaagcttanagatctaccttggtggagaagtcccacaacacaccatattcatcaagctcgaagatccttagactgacaccaaacatcaagcttgtgatattaaagaagtgctta

SEQ ID NO: 199120 - DNA, 429 bp, Glycine max
  unsure (1)..(429): unsure at all n locations
agcnttgagccaatttttacgactataactttntacatgaatgtctgattgagtcctgtcatatatcgagacgctcgaaattgaatgttgaatctttgagccaatccaaacgacaataactttttactcggatgtctgattgtgtcccgtaatataacgagactctcaaaattgaatgttgaagctctgagctaattcaaacgacaataacttttaactcggatgtctgattgagtcctgtcatacatcgagacgctcgaaattgaatgttgaagctctgagccaattcaaacgacaataactttttactcggatgtctgattgactctcgtcacatatcgagacgctcgaaattgaatgttgaagctctgagccaattcaaacgacaatatacttttactcggatgtctgattgagtcctgtcatata

SEQ ID NO: 199121 - DNA, 391 bp, Glycine max
aaacattcaatttcgagcgtctcgatatattacgggactcaatcagacatccgagtaaaaagttattgtcggttgaatttgctcagagcttcaacatttaatttcgagcgtctcgatatattacgagactatatcagacatctgagtaaaaagttattggtcgttgaattcgctcagaggttcaacattcaatttcgagcgtctcgatatattacgggcctcaatcagacatccgagtaaaacgctattgtcgtttgaattggctcagagcttcaacattcaatttcgagcgtgtcgatatattacgggccgtaatcagacatccgagtaaaaagttattgtcgtttgaattggctcagagcttcaacattcaatttcgagcgtgtcgata

SEQ ID NO: 199122 - DNA, 390 bp, Glycine max
  unsure (1)..(390): unsure at all n locations
catgaagnagaaactgatataatttcacaaactgttgctttagaggatagttcaacccgagattagtttcgcttgtccaaagaccagtacaatgccatcatagttcttcttcaatagaccaaggattcttctacttctgttaatcacattcaacattttgtggttaatcagtcaggtattgacccttctctctagattcttgacactggcgccacaaatcacatatgtcctaataaatcttcattttactttcttaagaaaatcaaacctattcatgttagacttcctaacaatagttatgttactgctttctttgctggtgatattcacttaggtgatttgctnttgaagaatgttttgtatattcccaatttttctggtcatttactt

SEQ ID NO: 199123 - DNA, 379 bp, Glycine max
actcataaacccagaacaattaccgaataagcattagtatcattttagaatttaagtttgatcataactccatttcacaaaatgaacttatatgatgtgaattgtcccctaattatacactttaatttcaccattcctcatcaatgcaagatttaaaacattttaaaattattgtttcaaactatacttatattatattttgccttaaactatactttttttacaattaatcatttcactttaaatattattattattatattattagagtttaaaaatttatatactcctttaatgcaccactcaccactaaaagtaataaattatatatacgtgctactgagcctttctacaagatgatacacgtcatgcggcttta

SEQ ID NO: 199124 - DNA, 204 bp, Glycine max
  unsure (1)..(204): unsure at all n locations
ctaactacatgnataaaagccatgcacgaacccgngaaagggattatggaaataatattctcattctgcgcttagattttcccttcttctctctctcttcccctttctctcttagaatattcagtcacgaggaaagctacctctaacagataatctcaaatcatataataacgcttccaaaattagatgtactacctttctttt

SEQ ID NO: 199125 - DNA, 427 bp, Glycine max
  unsure (1)..(427): unsure at all n locations
tatctaaaattntgcatcttggatgtaatatgttctctctttgggattgagatagaccacaagattgacctcctaggagccttctaaccattaagaggtcaccttcttcatgggggtagacttccttactagactcttcaccccttactttatcttcacttccactagaggaaggggaagaagtagtctcctcttgactactataaatgtcttgacccctcataatcaatgttttctttgtggggcattgagaggcaatgtgacctctcccaagacatttgaagcatttaatgttgctagtcctttcttgggaactagtcttaggggtggatttctctatggtcttacccttatcttccttgggttttgaaggtgcagcccccaaaattccttgggcttggtccttccttggataaaatgaaagcca

SEQ ID NO: 199126 - DNA, 386 bp, Glycine max
gctacattttgttggggtccagctagtgtattattgtgttttgatgtggtagagatagagattacagaatcttatattgcagtgttgcacatgtaactttaatgtgctttttgtccgtaaaaatggtggttggtgtatgcacgatgaagctgcaacacactacatagacatgattgatcaaaccactttgggccatcgctttatcaaggaccagtttaacaagactcctactgttggatggcagattgatccatttggtcactctgctgtgcaggcttacctgctgggagctgaggtaagtaagcccattacgtatggcctaatttgattttttctttttcttaaattcactttttgtcatgttcgagttttatgattatgcattc

SEQ ID NO: 199127 - DNA, 398 bp, Glycine max
  unsure (1)..(398): unsure at all n locations
tctaaanggatataattcttctctttagcttacaagataagcggtattattgaactagacaaagcaacaagcaataaaaccaaaaatagataaaacacctaaactataattatggtcattggagcatttaatgcttgcattacatgcacgtacttcttaatgttgaaacaccactctagttggctttcatgttgagcactacagtaagaaactgtttgctttgcatcagagtaggtctatcaaaagagagtgtgtcttttgatgacgtgtggcaacttttaaatttagaactttatttactcttaataggattcaatagatcctagaagaatttcttttgaatacagttctgcaaaatgaatttcagacagagtattaaataaagtttttaatgttat

SEQ ID NO: 199128 - DNA, 261 bp, Glycine max
tgctctggatcgaacctttgtatcatttaagttactctagaactgttgaaaatcagtctctcgtttgaaactttctctatttttagctcttgattgattggctgactgctgacggactgcctgattgattgatctgaacaattctttgcctgagcttgactttacttgacttcttgtatatgatgactggctttctacttgttctaacttgatactgactagacttcttcactccttgagccttgacgacccccccccctt

SEQ ID NO: 199129 - DNA, 373 bp, Glycine max
  unsure (1)..(373): unsure at all n locations
ctaatccaaaactgnnccaccacgcttcattttttatgcctaaacaccttttcctacatcccacctactacccatcatccaatcaattcccaatgtcttgtttcctccatacaatcaccacctcttatcaccaaataatccccaccacagacaacatatactaacacactatatgtgtttcctttttcaccacccacaaccttactttttacacccccaacaccaaatctcactcacaatttcaaatgctttgtttctcaatagcgacattgtttatttttttttatcaactcccacccttcctttaatatatgtccaataactttgataatattttttaaaaactggaacttcttccaatttttttaccaat

SEQ ID NO: 199130 - DNA, 425 bp, Glycine max
  unsure (1)..(425): unsure at all n locations
agcttgtctcgcgggtntggtttatgaatgtatcccattctaaccttcgcgattntatttgaggcaaccatgattttaagcttgttccttggtagtttaagcttatctttgcatcttttatgactttggaatcaccattgtatgtttttacgcttcctttggaaaaccttagagaaagagactttgtaaatgttatctttttctaaaataggtgttattttcgtgaccttcattgaaccccgatcacattggcatgatcagaattttaaaatgatgttccttttgtagaatccaaaacgcccttagcctttncatgtagtgacatgagtatttaactcggagtattgttgttaactttatttctgacatccatagaaatttcctttgttttggcgtaatagagacttgcgttggaccgacaagcg

SEQ ID NO: 199131 - DNA, 435 bp, Glycine max
  unsure (1)..(435): unsure at all n locations
agctngagatgaggaagtatatatttgtgttacttcctgcttttattcgntgaccacagagtggtacttggagatatgtcgcgggggtcaggagaccttggggacgtcaggtggggtgctagttcccaaaaccaagcttgaccaatcccgacccaacccgggcatagtcggtcagtgagaacctgtgatgtacctaagcaggcgagctcctggcagtcaacagataaaaggaacaaagaccacaaagcaaggaggcttgtggtggctggccagctgtgaatcttgtgtgatatatgggttatggcctctggtaatcgattaccaagggtgggtaatcgattaccaagggtgggtaatcgattacaatgcttaaaaatgaagacaggaggctaagatggtctctggtaatccantactaaggggtgtaatcgatta

SEQ ID NO: 199132 - DNA, 424 bp, Glycine max
agcttcaacattcaatattgagcgtctcgatatatgatgagactcaatcagacatccgagtaaaaagttattttcgttttaattggctcagaggttcaacattcaatttcgagcgtctcgctatattacgggactcaatctaacatccgagtaaaaagttattgtcgtttgaattggctcagggcttcaacattcaattttgagcgtctcgatatatgacgagactcaatcagacatccgcgtaaaaagttattgtcgtttgaattgtctcagaggttaaacattcaatttcgagcgtctcgttatgttacgggactcaatcagacgtccgagtaaaaagctattgtcgtttgaatttgctcaaagaatcaacattcaatttcgaccgtctcgatatattatgggactcaatcagacattcgag

SEQ ID NO: 199133 - DNA, 281 bp, Glycine max
  unsure (1)..(281): unsure at all n locations
tatatcgagacccttgaaattgaatggtgaagccctgagccaattcaaacgacaattactntttactcggatgtctgattgagtcccggaatataacgagacactcgaaattgaattgttgaatctctgaccaaattcaaacgacaatatctttttactcggatgtctgattgagtctcgtaatatatcgagacgctcgaaattgaatggtgaacctctgagccaattcaaacgacaaataacgtttacgcggatttctgattgagtccccgtatatatcg

SEQ ID NO: 199134 - DNA, 427 bp, Glycine max
  unsure (1)..(427): unsure at all n locations
agcttctccaaagggcatgggtatttccattttcctgaaaatatctaaaaatctcgccaaatgatggtccttctccttcttggaaggtaccacaggatatggtacttccataccttcattcacggctttatcacttatactcttctcttcattctcatttgtagaagcaaagaatttgatgttttgatgatgccaaaggatcatgcgcttctcaagtttgattcaagaggatcatacacttctcaagtttaattcaagacaagagtccaagaaattcaagatatatgatcaagataatctctatagacttaggaagggaattccaagttggaacgacaagaggtttggccaatgaaattaagctaaaatgttttttcaagagatttactctctggtnatcaattaccagaggatgtaatcgattact

SEQ ID NO: 199135 - DNA, 203 bp, Glycine max
  unsure (1)..(203): unsure at all n locations
ctaccacaaaaattattttgctctcaagtacctaaatctttttgggttcttttttttcttgttaacttgtgggtgctgataaacactgggcaaaccctttgatgggttgccctcttcanggaggtccctgcacttatgagccttatgacccactttttcataaaaataggaaacattgacttctttagcattcacaacccctt

SEQ ID NO: 199136 - DNA, 299 bp, Glycine max
gatgccgtacgcaacactgctgctcttacttcgcattttcgctttgcagataacgagcaaaaagttgtacagctgtaaaataaatggtgaatattttctattcttcttgaagctccatccattaatatatattatttccccattacttttttgttatcattattaactacgcggatgatattatatttaatgatcctttccggccctttgaactttctcgtccgcatcagcactgctcacgaacgtggttttggataaaacatgtgcccatgggggattcttttccctagccctctcca

SEQ ID NO: 199137 - DNA, 430 bp, Glycine max
  unsure (1)..(430): unsure at all n locations
agcttccaagcttattttgatgatgccaaatattcaagtcaagaatcaagattcaagcaagtttcaagaatcaaagagtcattcaatcatgaatcaagattcaagagaagactcaagatatgtaagaacctcaagaaaagcatcaagataagtataaaaagaatttttcaaagaatagattgaataacacaatttgtccaaaagaattttttcaaagaaaaatcttttaccagagtttttactctctggtaatcgattaccataaggcagtaatcgattaccagaagcccaaaacagttttataactattttacaaagtagtaatcgattaccatgggcatgtaatcgattatcaatgtttttgaacgttgaatttcaaatntcaagagtcacaactggtgataaaacattttcaaacttgtgtagtcga

SEQ ID NO: 199138 - DNA, 375 bp, Glycine max
  unsure (1)..(375): unsure at all n locations
tggctctcaatggttttatctggccaactctttcgcataatggatgataagnggccggaagttccataattggatggtccaaaaagtcatatctctatctggtgcttaattgaagctgagaattagaagtttgtaactttgctggaagcatacacaaataagatagatgaatattatgcacaagaaatagaaattgaagataatanatacggaaaaacagnttttcctagaaaatatttttttcgttttttgtgtgaaagcgaccgtgataaagatggcctcgagatatttccaantactttgactactagaacccgtgaaagctttctgcaattgggactaaaacaacctccaggaattagaaatcttttaact

SEQ ID NO: 199139 - DNA, 367 bp, Glycine max
gcaagctttaatggaagtcaagagcatgatatttgctcctataccattaactggtcaacaagttcttgagcaggttgacgacatcaatattgtatttggaaagacctaaaagaaggaaaaaatataacttcaatattgtttgatcttccatactggttcgatctagatgtcaaacattgtattgatgttatgcatgtcgagaaaaatgtctatgatggtgtcatcggcacgcttctaaatattcaagacaagacaaaggatggtttgaatactcgtcaagatctagttgagatgggtatacgagacgagttacatccaaggtatgatggtaacaaaatatacttgcctccaccttgtcatactttgt

SEQ ID NO: 199140 - DNA, 291 bp, Glycine max
  unsure (1)..(291): unsure at all n locations
acattccggatgacgttcttccggaaattgtctgtgagtttttccggaagacacaaattattcttccggaaganntcccttctctcgtcgtcttccctacataatcacatttctgctactctctttttttatttttctgcatgctttctccttttattttctcaccatgtttcctctctctttttttacttaacttttccgctgtccctctcctcttatcgaggccctttactctgtcatattcgttactttttcgtcccatattttctttatgttctctctcttctcttt

SEQ ID NO: 199141 - DNA, 179 bp, Glycine max
agatgtgaaggtgtccaaactatctggctgtggccaaattgtatagctaatctaaaggatagagatgagggccctttgaaaacctcctaactagatggctagactaagtgtgttattttgtatcaactggcatagaactgtgattttgtgagacccaaataaagcgtatgctctctatt

SEQ ID NO: 199142 - DNA, 308 bp, Glycine max
  unsure (1)..(308): unsure at all n locations
gcttcagaattcaatgtcgagcgtgccgatgtattatgagactcaatcagacatccgagaaaaagtattgtcgtttgaattngctgagagcttcaacattcaatttcgagcgtctcgatgtattacgggacttaatcagacatccgagtaaaaagttattgtcgtttgaatttgctgaaagcttcaacattcaatttcgagcgtctcgatgtattacgggactcaatcagacatccgagaaaataggtattgtcgtttgaatttgctctgaccttcagaattcaatttcgatcctctcgatatattac

SEQ ID NO: 199143 - DNA, 419 bp, Glycine max
  unsure (1)..(419): unsure at all n locations
gcaagcttanagaatactcaataaaccactttatattttttanaaatactnggnttatattggttcactcaaacagagctacgtccagttctcctttacgcaattgtaaagggttctactaatcaaaaatttgattacaaataagtattttgtcttgctactcctaactatacaagtattctcttcgccactcctggcacacccttagactccacctgaatctaagaccacccaagtattgtttaacactaagtcactcttgactttcacaaacaaaagtttgaatgaatacaatgattcaacaatactcaaagtgtgaatgaacagttaaactcanacacaaataactttgcttagcaaagagtaaaaaaagaataagtctcgagtatattgtccactataaatatgtagagtttcgc

SEQ ID NO: 199144 - DNA, 382 bp, Glycine max
  unsure (1)..(382): unsure at all n locations
gggggggggggngaattaagatattccaaaactcttccccaattaaaaatctatttcactttctttttaagntataaatccccttaactatgaacctcttaaatattaattcacataaaacaatctgagtatgaatataaagcaataataaacaaaggagattaagggaagagaaagtgcaaactcagatctatactggttcggccacacccttgtgcctacgtccagttcccaagcaacccgcttgagagttccactatctttgtgaattccttttacaagntctaaacacacaagggacaattccttgctttgtgtgtagaaatcctttacaacaagagacccacgggctcttaatccctttgagaatgagaagaagaag

SEQ ID NO: 199145 - DNA, 332 bp, Glycine max
  unsure (1)..(332): unsure at all n locations
agctttgcggctgagaacctattttacagcatcagggttnnagnttaggagagtttttggagaggagaataattttatgtttttcaattccagtttttactgttcatgtgcactattcacgtagcaataaaattcattttctggttcaatctgcaatntcattttttgcttcaatttgtaatttcattttctgctgattaatggaaggctaantctccaatgttgttttctcatgaggatcaaacataactctctttgaggttttgttattactaatgaattgtgatcaggttttcctccaccaattactctatattagttgttattaatcc

SEQ ID NO: 199146 - DNA, 391 bp, Glycine max
  unsure (1)..(391): unsure at all n locations
tgatttccttgggcttactttcaacctttctatggatgttgaactcactatgcttatttaccatagttttaggagttcaatattcacttaggatcaaaatttcagccagcaattcactcaccaaaactcaaattcacatagacacaatcataaggaaacctaaaagttcaagaaaagggtcacaatcaaagactctcactaagaaatttgcatgaacatgttaaggactaattgacatgcaatatttgactcanatcaataataggctataaataattcatacactcatgaacaaatgagtttgacaaagaaccaagaaaatatnattagccccaataagaaatcttatctgacaagtttcatgactagacatgactttatgacaaactac

SEQ ID NO: 199147 - DNA, 448 bp, Glycine max
gatctcttaagcaccgcggctgcagctggacttggcattctttaattattcacttaaaaagttgtgatttttgaaaaaatcttcaaaaacaagtcacttgaagaattgtgacttttggaaatgtatttttcgaaatcagtcactggtaatcgattaccattaaggtgtaatcgattacacatcaacaaatgtaacttttcattttgaattttgaaaattaaaacgtttagaagctttggtaatcgattacaagtattgtgtaatcgattacacaagtttaaaatactttaaaactgtttaaacataagttataactcttgaaatttgaaatcttaacgttttaaaacacttggtatcgattaccagagagtaaaactctctggtaatgattttgtgaaaacttgtgctactcaatattttgaaaaactttcttagtacttatcttgat

SEQ ID NO: 199148 - DNA, 372 bp, Glycine max
gcagctgcagctaacatgtgagagggatctctcttcttacgacccaaaggttgtgttcggtctcaagttaaggaggctaagataacttctcatggttcttttgaaaaattgcatttgcagtcaagaaagaaaagactacctatataagcatgaagttagccgcttaagaactgggacttggctttgatatgcttatgaaggaaggacatagctattaaactagtgcgacaagagtaatgtataacattgtgcaatatcttatgtatcatttgaataaaagggttaatccttaggaaccctgatattcaatattgaaacggtattgctagataaattcatcgccatattatctagcatccttgtgatgtatac

SEQ ID NO: 199149 - DNA, 373 bp, Glycine max
  unsure (1)..(373): unsure at all n locations
catgcaagctggggtttgtgatttgattttttctgagaagntgatgatagaaaaagtactaccggatttatgttttttatgggtgattgtgtttttacatggagttctaagaagcaagccattgtgacactttctacttgtgaagccgagtatgtagctgcaacttcttgcacatgtcatgcaatttggctaagaagattgttgaaggaacttcacttgttgcaaaaggaaaacacaaagatctatgttgataatagatctgcacaagagcttgccaagaattcggtgttcatgaacgaagtaagcatatacatacaaggaatctattcattatagagtgctttgcctaaaaagaagtaaaattgactcatgt

SEQ ID NO: 199150 - DNA, 323 bp, Glycine max
  unsure (1)..(323): unsure at all n locations
atactaagcttgccaccatatacaagtcgcgaggttctgcgtgnnggttgtgtcgnccccctcgcgctcgttgccgacgttgacgtcgtgctcgtcgccgccgnntcacgccggggtcgtcgctgctggctgctgtgcagcgggtcacgcgtggctgctgtcgtggctggttacaggagtcgtggctaggttccgaggtcgcgctttgtgttggagcttggaggggttgcagctgcgttctgaaagcttggaggggtcgtgcttttgattaagttatcnggtaggggtgggtcgggttagcccaactcctaccacgaaccaaa

SEQ ID NO: 199151 - DNA, 409 bp, Glycine max
  unsure (1)..(409): unsure at all n locations
agctnngaacaatatactccctttatnnatttgtcncnngggctggcggccacgctcaacaaagtactttcgacacctactatacgttgatttgaccaatgttgttatgggaatgttgcgacaatccttcaaaaccttattgatacattctaagaggttggttgtcatgtggccatatcgacgtccttctctatcataagccatcgtccatttttcctttgaaatgcgatcaatccatgttgctatggctggactcaattcatgaaatttttctaaattttgataaaaattgtgcttgtaaggagtgtaggctgcataaaattagttatgaataacaattttaagtatatatcaaaggtaaatagacgtgatcatcaaatatgaaatcttacccaatttcttcaacatt

SEQ ID NO: 199152 - DNA, 276 bp, Glycine max
ggaagcctctttgtattatgactcaagatactaagagatcgctttcaaggtatcctaaggttgtcacaagagagttatatcgataaggtcctagatagattcagcatgaaagatagtaaaccaggagatacctcgatagctaaaggagagcaaattagtctcaaacaatgccccaataatgaccttgaaagaatagagatgcaaaagattccttatacatcagtagtaggaaatctaatgtacgctcaagtttgcacttattccgaaataacattt

SEQ ID NO: 199153 - DNA, 384 bp, Glycine max
gcattggaagtcagttctactagtcccatctgcccaaaataaatttatcaacttaccatcctctgtaaccatgtatcttgcaaaaaaatagcattgttgtcaccttttccttgcaaataattaattgcagccagtacatctcctcttttgactttgacacgcttcaaccgctgaatatgattgatcaaatctctcttgttgaatccaatccttatgtgtccccctttttttatctagcatataccccataatatgacatgttttcacaccttgccccatgcaaagcatcaacctgtgctttgtctccacaagacaatccacggtaggttcggattaagagaacataatctatggtaatgaccctccaaaaagggtttcacgtat

SEQ ID NO: 199154 - DNA, 428 bp, Glycine max
gctggccaatacgctactgtcggttgttgttaacctttgacatcaactcttttaagctccgatggtctatcatgataatgaatcgcggccctagcaaatagtgacgccattttcgcaccatagaggtgatggcatgcaactcgcgaatgtaagtcgagcctgttgcatccttgggtaaagttacttgctgaaaaacgcaatgggccttgacttctggagcaggactgccccgatagcggtgccgaaagcatcagtttccaaaatgaagggcaccgtgaagttaggtgaagcaagaataggagcctgagtcattaaagttttcagatgttggaatgtagtgtgagcttcaggcgtccatatgaagctatctttacagagtaaagccgttaacggggcagcagtggtagtgtaatttcgaatgaacttac

SEQ ID NO: 199155 - DNA, 263 bp, Glycine max
aaaaataagaaagatttgttgcttacaattaaaaccgaaaaaaagttgtagcatcaaatattttggtacatggaatacccgacccttaattttggggaataagtggtaatgaataagtaattagaaaaaatataattaactagaaagataagggtgtaaaggagtcgactatgattatttttatgaattagatttatttattttatactggtcaaacctattcaataaagtacgaggatatattatataaatctatttgaaaa

SEQ ID NO: 199156 - DNA, 438 bp, Glycine max
  unsure (1)..(438): unsure at all n locations
agctttcacaatatctagacaattcaattcttatttgttatgaaactaccttaaacaaagaagaataaagtggaggcagaatctttgcacaagattcattcaaattccacagagtttttcctaccctcatacctcagcaaaatcctcttcttttcgatttgttaaccattggatctccttgaaaattntactgggggttcctaatgcagaaatctaaattttgaccgttgggatctgctataaaatgtctagaacacgagatgtactacctttcccgtgactagcactgcccaaccatttttctacataatntggcagttttgctacacaatttaacagctttctctgcataatctggtagatttcgaattctggcttgcatgtatccaatttcactcaaattggatcctacaagtcctaaatcatgtataaatcatg

SEQ ID NO: 199157 - DNA, 100 bp, Glycine max
attacaagccttaagcgaaaaaccatgatatcaccttacccttaaggaattttggagctctggaattgttttgggaataaatgtgtgtgggggggggggg

SEQ ID NO: 199158 - DNA, 444 bp, Glycine max
ctgcagcttcaaacctaatttcctcgagagtattctgtctcttgtgccccatatgattataaacagatggggttacgttattttcctcaaagattgcagatttatacagaaatgaaaagcccgcgaatcaaaatcgcattgggtagctcggtgagctcagaatggcaaaaaaaaggtggtttttttctgaagatgatgactattggttatagcatctgtgaaccactgaacggaaactgatccggaatctctttcctctgattttttcgagaaacaaggagaaacttatcaacaattttggaaggtgcggatattggatcggatgtgtgtttctgagtgatggtgggtctgagaatgagttaaacgaataacgaatctgacaacgtggttcaatttaattggtttggtaatgataactgtactcctcccagtgtcaattatttg

SEQ ID NO: 199159 - DNA, 190 bp, Glycine max
catggggagaaataatcaattaattaatgtgtgtttggataccaccaaaaacgtggtggatacaacaaaatcactcaaaatacgtgaattttctgaagcatctaccagtagcttcaagggcatcgtggttttagaatcgaaattgattcactgcaccgccatcccaaacataccattagtttttcatagt

SEQ ID NO: 199160 - DNA, 362 bp, Glycine max
ataacaatgcctatagggtggacctcccacaagagtatggagtcagcaccacttttaacatttctgacttaattccttttgcaagtggaacttgatttgaggaggaggaactaacagatttgaggtcaagaggattgggctagaactgctaaagaaggcccctatggttctcataaaccttagggtagatttctgagcccatgggccaaggttgggtccaattatctttgtacatattagattaggaagtcattatatttggcccttgtatttacggctccataatgtagggtagggaccctaccttgggtttaatgagccttggaccagaaaagtgcttactataacacccctgaaatttc

SEQ ID NO: 199161 - DNA, 427 bp, Glycine max
agcttaccaaaaacatatatgtttgaaagtatacttgcttctccataaatgaactttaagaaaatcgctaagtatattagctactcacctaaataacgcaatcactgacttctaccgctgttagaaaggtcaaccattgtatttttcacagaacctaagcatttaaataatagaacaagggattagacaaaatcccccaattttagcaaacctagggttttgagaaaatcacaataatctctaatacatagtttctaactctttttctcacagcccatgactaatcagtgctataacatactcatctaacataatgggtcgtaaacatttaccttaaagaaatcaaatagaaaaacttaggaaatgcgtagtgttttcccctttttcccgtcaccttctcgtgcttggaaaacccaaaatgtaaaag

SEQ ID NO: 199162 - DNA, 439 bp, Glycine max
  unsure (1)..(439): unsure at all n locations
agctngagagagtngggggaactatctttttttcnttaatngnggnggaccaatngcggaaaattagcgtataaagaagctaaacactcgattgaaataatcaaaagttgtaaggaaaggcacttttgttaacaactttgagaatttttgttttggttaacgaaacttgctctccttgaaatgattatggcttccatttcaacaaagggtgataattaatcaattaggcttaacaaagctactctgtttttccctttttgtaaatgaaaagaaaattcatatataaatttcaattccattcttgaagaaatggttaccagaagactaagtcttgatttggatggaaagaaataaaaggaattagaaggaaaatattcaaaaaaattagtaagtaccacactttcatacactactttaattaaaatattttttttcaatt

SEQ ID NO: 199163 - DNA, 166 bp, Glycine max
attaatttcaaatattatatcaaatatttacacaatgttacagattttaagtaataattatctggtaaattataaagaggcgtggaaagaaacaacatttcataggcttgagtatcataatttgttatgaagtttttcaattctattatgacaggtatttatataa

SEQ ID NO: 199164 - DNA, 430 bp, Glycine max
  unsure (1)..(430): unsure at all n locations
ngcttctatgataggatagaatttttgattgtacacttgaaactctagagaagaataagagcaccatcacattcactgccatcttcactagaaaacaatgtcaagtgtttcttttcttttggccttgttcatggtagtagctttgtctatctttccttccatagtgggtgcaataggtgagcaccggctaaggtgggtgcctgagacaacaacaccatgccaaagctccatataagagtgcatggcagaaggtgagtttggaatggattcatagtcccaccggcgcattctagcgacctcacaatatataagctacaaggcacttcaacgtaacaccgtgccatgctctaggaggggtgctttctactacaactgcaagccaggtgcatatgctaatccttacactcggtggtgccccaccatcacccgt

SEQ ID NO: 199165 - DNA, 189 bp, Glycine max
atctttgatgctggaaaaacatgaaaacgcccaaaaaaaaaaggcagacaccctcaaaaagaagaaggatgctcagctaaataatgtgattatatctgagaaaatagaccagaacgttagtgccactaaatacaaggtttgaacccttcatatattctcagatatagaatcaacttgatcaatgcacac

SEQ ID NO: 199166 - DNA, 308 bp, Glycine max
atttcatgttgaaaaattaatcgcaaaacttattgaaataaatttagaaaaattaaaaaggtctgaaccactttacttttaaaggataattatactttcttatcactatgctgttatttttattctttaacaaaatttatccacacaaattattttaatacattttacctcttagttttaaaaaaattattaaatttacctttccacgtttatccattaaatgactaacataaacaaacttaagaattttaccttctcacatttgtccattaattgattaacataaagttggcctgacatgttgacat

SEQ ID NO: 199167 - DNA, 422 bp, Glycine max
  unsure (1)..(422): unsure at all n locations
ctgcagctttgcaattacaagaggtgttttatcttttgntctcatngacancttcttccttcacaatggaagcttcgtaatatcagtagcaattagcaagtgtgcaaatgtttcaaaacagaaaagtggagtttaaaacttgggaaaacaaaaggcataactgtacctgctgtgctttcactgtgaatggaatatgataacatattgtaaacaaagaaaaacgaagtcccttttcctagggaaacatttcatgacactaaaactttacaatcactatacttttgtcaatgtttgaaattgagccattgatattatccatataaaatctcttattaccgatatatgtgaaacaccccgtcccattttattatgagagactcatcctatttgaaatgaatggcggagcttattatgaatactca

SEQ ID NO: 199168 - DNA, 224 bp, Glycine max
tcctgaaaataataataactcgaaatttgtggattttttataacattataaagaaaacccaaagtaactgaataacttcttgctcatcatcaaatgaataagtaattataaaatctcacttaattttaaaactgatttactatagagagttactcgttacttttatctaaaaagaacagacgaaaaaacatttttaaagaatactagctagtatataaatttat

SEQ ID NO: 199169 - DNA, 367 bp, Glycine max
  unsure (1)..(367): unsure at all n locations
agcttacattngncatcagtatttaccacttggtaaccggcggggatggcttgttgactagctacagacaaaaatgcattcgtcattgattagcccggctagttgtcgcttttgccgtgactgctcttaccaccttttttacctgcttcagatgcgcgctgcgggtcattcttgaaattacccccgctgtgctgtccaccttttttacctgcttctgatgctctttcgcggtcttctgcaaaattgccggaaccgcctcgatggtttgccattactgacctccgtctgggtatagacattatattgcataaaaataacgcggcgtatggcggctgccatattttccctacaggggactaatcttgat

SEQ ID NO: 199170 - DNA, 425 bp, Glycine max
  unsure (1)..(425): unsure at all n locations
agctttntaaatntatttacgaaaaattgggatgttacaagatatgcccttgcatagcttaagttgtcaactaaaataccatggtatctttggtatgtcaaaaatcaggtgagtgcatttgaaaattgttattcctctcccatatatgtactagtattagtaaattactaattagttgctattgtcgtgtgtcttatatactgtagttttattgctattagctatgtagctaggatttataatagagctactatgagtctctaatggcacatggtaaataagattatatatatatatatatatatatatatcaaattacaaattttattagaatggataatggattggactcttgcactccttactcattgattaatatccttgaatcctaaagtggttaaacatttctggtctactaatcagtc

SEQ ID NO: 199171 - DNA, 385 bp, Glycine max
  unsure (1)..(385): unsure at all n locations
ggataatattcttggggctagtaatgatattagaatttctagaagtagttgtaagttcaggcttaggctgtgatgaattcactagtacatatattattattggtgattaganatatatatatacatatatatatatatatatatacatatatatatatatgccatggttatattatattactattactatttcgtttcatctttttgtggggttggtnganntgaaattttcataaaggatggaggatcagatgtgggttttttctctcttcattggcacttttgagttacaagtcattgaaattgattctagctatttattattcaacctctatttcttaattacaaaggagcatatttattactatctatttatatggtaaat

SEQ ID NO: 199172 - DNA, 391 bp, Glycine max
  unsure (1)..(391): unsure at all n locations
taatncccataaactctcttaaacacttaacaaaaagtgtttatgaaaataatttactataaaataccatataacacaaaggaagtacatctctagtatttatactataattagacaattattacaactaacattagtaactaccaacttattttacaatgattgaatgaactaacaaagttaattattagtcgttaaaaaacagaaaatgagtaattctagtcttctactctaataggtgataaaggaatatccagcaatttaagagttcatattttaacttgaattctagttaacaatacacatggttttttacaaagataaaagaatatcaatgtgagcaataagataaaagtgtgagatattgtagaaactaccgagttatctctga

SEQ ID NO: 199173 - DNA, 389 bp, Glycine max
  unsure (1)..(389): unsure at all n locations
aataccagttgagaattaatggtttataacataaatattaaaattaaaatatcgacctataaaagtgaattggaaacatactgacatgtagaagtaacaataccatattaaatttttgtgatgatggttgaacttaaggatcgaataaaaaataaaaatattgaaagacctaattaaaaattatcaattagttcatgaacctacgaagtaatttaacatttattntatttaactactctttagtttattattntataagataaatatttaatgttatatcattaaattttttaatagataaataattttgaacgagagataaaatatggataaagtttgacccttgcacttttaatgaatataatactatttttactattgaatttttt

SEQ ID NO: 199174 - DNA, 385 bp, Glycine max
attggcagcactagattaaatgctaggagtattatcacattcatttcatcaattaatgtgttctgtttattttgaaagaaaagaataattcattcaatttttaaattaatcaataacgaataaaattgatttatatttagtaacttattataaaacattttaaattttattgtaaacatgaattgacatcataattatcacaattaaaattattattctctcttgcatattttatattctttcatgaagtttaggggtcaattaccaagtgtatttcttcattctttatcccttttaattttatatagataagagatgaaggatgattacactaagaaacttcagaaacatattcatcaaacaattgcaatagacatgcaatatg

SEQ ID NO: 199175 - DNA, 281 bp, Glycine max
  unsure (1)..(281): unsure at all n locations
aaaatctgatttcaagcctaaataggtgggttggtccgtgctcgcgcgcttagcgcaattctgaatcgcttaacgctcataagtgggatttggtttagcgcgtttctctcgcttagcggatgagctaaagcggtgcgcttgatgacctatagcggtgcactcagtgaacctgacagctcatcttcttgtggattcttcctcgcgcttagccactgagtgtcgcgcttagcgaatgctcgctaagccaacagattggcttaacgagagggngaaacacactt

SEQ ID NO: 199176 - DNA, 207 bp, Glycine max
cacaaaatcaatagtgcaaaaggcatttgaaatggtaatatcttttaatattttatattcattttcttataagttatataataataactcattttttattttgtgattgtttttatatgatatattgaaggtcggcgaatatttttaaagctatttgcattggattatattatttaatttgatttttactatatttaatttatatag

SEQ ID NO: 199177 - DNA, 292 bp, Glycine max
  unsure (1)..(292): unsure at all n locations
tggttattgatcgccgtggaaaaaatgtctttcaaaaatgttaaaatattttaaaacttttctataatcaatttaaaaactatgttgtgagaccaaacctttgcaattactaagagactcttntttttaacaaagatagactaagacttagctttattcttgatctttgctttcttggtcttgagttggacttgaaatataacttgtggtgcttttttcttggcatcatcataaccttcatacaaatacattcacagagaatttgtctgagattcaaacttaagtatgtctt

SEQ ID NO: 199178 - DNA, 398 bp, Glycine max
  unsure (1)..(398): unsure at all n locations
tcgattaccatatatgtgtaatcgattacacaatgcaaattttgaattcaaattttaatagatgttgtaaatcagttttggccattggtaattgattacatcctctggtaatcgattaccagagagtaaatttcttgtaaaagactttttaacttaaatttcttgaccaaaccttttgctacttcaattggaattcccttcctatttaatataccctttctaagactctaaagactgtcttgatcatccatcttgaatatctttaatttctttgtcttaaataaagctttgagacgcatgtgatcctttggcatcatcaaaacatcagcttgatcctttgtctacaatctccccctttttgatgatgacaatccctganatcaagacaagctatatac

SEQ ID NO: 199179 - DNA, 224 bp, Glycine max
  unsure (1)..(224): unsure at all n locations
cacatagatgcatgctntgtcaggatcattcaatagtggaaataggtctgattcttagaacgtgataggacggggctagtntatcgtattatcacgagggatcggngtacgataaactagttgttgtatgtttgtctgaatgcggttctggtcaagtttaatccaacaagaggaatataaggatgatgcttgatcagngatangctagactatcatgaggaatc

SEQ ID NO: 199180 - DNA, 435 bp, Glycine max
agcttgctcgtcttgctgatatttatcatgtctacttttctgatgatgaccgaggaacaattagggatcaacttgaaacttatgtgcttcaagtgagaagaaatgcttctttttccacttgtgaagatgttcaaagtttggctatgaagatggttcaaactgagaaacatttggtatttccattggtttataaacttattgagctagctctgatattgccggtgtcgacagcatccgttgaaagagctttttcagtaatgaagattatcaagtctaaattgcgcactaagatcaacgatgtgtggctcaatgacttgatggtgtgctacacccagcgggagatattccagccacttgatgatattgatttattcgaacatttaccgcaaagaagtcttggtaaggacacctgcttccctatttatatacccccct

SEQ ID NO: 199181 - DNA, 336 bp, Glycine max
  unsure (1)..(336): unsure at all n locations
tcaaatagtgctgctctgcacacctggaagcttatcctgcatantgtattcaaantcacttaataatagaggtctgccatatatatcaaaattcactacatatatagtaaccatttatgatagatttttttttctgtttaacttttattaaccttagatagataacaacttatccggacaggttcgcangtaagaaaaactagaaacgggttcaaatattagcaaaatgtaaagaaagaagtatttcaaaagttcaagaagtattcaggttggcaattatcgcactatttctttcgtaattaagaaaatctaggtaagaatatgtttggtatgcta

SEQ ID NO: 199182 - DNA, 422 bp, Glycine max
  unsure (1)..(422): unsure at all n locations
agcttgggcaccgtcacanagattgtatgtttaatggttctgcaaaaagaagagagaaaacgaggtatatatagtcagggatgatctataatcaattacaacctcttgtaatcgattacaggcatatcctgtaactaccaaggcttgctggtaatcgattacagccttgtgtaattgattacagcctgctgttctatggtaatcgattacaaggagtggtaatcaattaccagtccctaaaacaaggctttgtctactgaattgaactatggctaagtcagataacctacacattcattgtaactaatatcacaacctacccttcggcgaaagggcgacgtgaggctcacgggtgcattttccaacgaaagaaaacgtgcggaatcaccaccaatgtttatttgaagaaaaacgttataaaa

SEQ ID NO: 199183 - DNA, 440 bp, Glycine max
  unsure (1)..(440): unsure at all n locations
catgcaagctnangcgtatanggccctattaacgttcactngcacaagacanccnatnaactaagaaaaatgtacccatatacaancaagcgcccctccattacctagattatttacatgtacttccaaggtgtatttgttatttacatcacacacgcctccttggctaaatttacatacatgcatactcaaagcatttcggggtaccaaaaattgcacatgcgctcatcttggtatntctaatacctatacatataaaaacttcatgatgaatcttgactacctacgcaatanggtgctacatttcatgcttttttttttcaagtttttgctacctaaagccacatgaaaattcaagcatattttcctttgctgactaaaattgtattcaaattagaaggtatatattttttgtaatatgttttttcacataacatgca

SEQ ID NO: 199184 - DNA, 157 bp, Glycine max
tatatagacctaaaataacacggaagctttcaaattaaaggtctaatttcacactgatgtcgatcagctatttatatggacctcaaattaaacacgaagtctgaaaataaaggtataacttttcctcgagtcgattagcgcacaatatcaacctcaa

SEQ ID NO: 199185 - DNA, 398 bp, Glycine max
ctcaactttggagaaattagatgagagagtttatatacaagttaagtacataagttaattttaacttatgggagaaactcaactttcataagtgttcatagagaattttatctaaacagagccttatatatgtcaagttacccaccccttctcaacaacctcactgtcagtctcaatgctgaagttccacctttcaagcacttcactggtggccttgctcattataacaaggaccaccctttgcaacttgccagcttcaagccattcttttcaaaattcaaaagcaatgatcaacaatgataccacaactgaactgctaacaaagcattgcaataaacaaggaaatctaaaaaatgatacaaattcagaaccatttcttaaaatgaactcttatacta

SEQ ID NO: 199186 - DNA, 274 bp, Glycine max
  unsure (1)..(274): unsure at all n locations
aatttttattatggggattggatgattaattttaacttcaattctgtggatccctgctgctgggaatttacggaagtagaatcttggtcaaaagatgcatcttttaaacattggagagcaattgggctaacataacacaaccagtaataatactctattgacggcaatggtttaaaaatgtcgaatcaacttatggatcgccgntggtcaatnggcttcagtgatcttgccagaatctagtagaataccatacatactgggggtaatggttgac

SEQ ID NO: 199187 - DNA, 427 bp, Glycine max
agcttaaacatgacaatggggctatgcattttctaattttgtctctccaatccctgaccccgactccccaatatccgtcgggttaaaatttattatctcatccccgtacccattgggtatcgggtatccccgtccccgtccagtacccgattcaaattagaaaaataatttttttgtaaaaaaatattaaaaatatgattttagaaaaaataaattgattgttaaacatttatctttaactacttatatatcacataaattattatcgcgcatgtgtctacgaaaatcgttaagaaaagaatattaaattatgtaaaaattctaaaaaaaactaactagtaataaatacaattaagactaacacattcgtctagtgtaattccattgtttttaagggaaataaatacacccaatactaaacaacata

SEQ ID NO: 199188 - DNA, 425 bp, Glycine max
  unsure (1)..(425): unsure at all n locations
agctntacgttgttggtcaatattcttaatcaacgttccaccagggatgcaaagaagtgaaaacccattactaaagtgactaatatttacagttttaaattaaaatagatttactcgttatntattgtagtaatatatggtttacttatatcttatttggataaatttctctataaatacttatatgagcaaaaaaaaaaagcaaaacgaattaaatttctcctataaattaaaatcacttatgcacttcagttttcgaagagaaaaaaaaaaataggtgcaaaaaacttctataaangttaagcattaaaaatactccatattattttcttctcttatactactttgggtggtgtatacacttccactttaccgggtgttctgtaaaaaagtgagaaaaacaatttttctttgcatcaagaatt

SEQ ID NO: 199189 - DNA, 270 bp, Glycine max
  unsure (1)..(270): unsure at all n locations
accatggagatgcaacggaagacaaaggagaagaggtgagaggcggcgccatccattaaggaataagccatggaagaaggagcttcaccaccaagatgagccttggataagaagcttggagaggatgcttcaatggaggaaaagaaagaaggagagaaagagagaggggggagcacgaaattgaatgaagaaaaagggagagaangtgaactntgagttgtgtctcacaagactcccattcatcanaggtacaacaagtgttacacatgc

SEQ ID NO: 199190 - DNA, 216 bp, Glycine max
ctgtatggttgtcagcaaaggagcacaacaccacaaacccttgcgacatgtacagatttctgattcaaggccagctgggttaccaagttaaccaatgcatccagtttgccttcaagcttcttagtttcagatgatgcagatgggtttgtaactacctcatgcactcctctaatgactatggcatcatttctggcgctaaactgctgggagttggag

SEQ ID NO: 199191 - DNA, 320 bp, Glycine max
  unsure (1)..(320): unsure at all n locations
gggaaattgaggccccttcaaagtgttttgcangggtataccaccaactgcttgcccttcagtggcatatccgaggcaaggcttgaaattagctaaattgtggtggggaatttcatgcgtctcccccatggtttaagaggcatgtgcatgatcagattgaggttgttggctctcaatgagtatgggagtggagttattgacattctcacagggagtgtacgccacattgggtggtgtatagttggaaagcaagccggcgggaaggcgtgcttgttttgaatttgcacataatggggggccgccgtacttcccaaatcttt

SEQ ID NO: 199192 - DNA, 426 bp, Glycine max
  unsure (1)..(426): unsure at all n locations
agcttataatatatctcaatctatgattgttatacagaataaaaatatctttacattgcattctaatttaatttcgcttttaacatacttgagagcacctgtatatttcatttactatttgattataaagaagattttagaatgcaagaaagaaagataaaacctacaacccactttggtgttgtatattctgttcagagttgtgaatttcctctggttgccttaaattttttaaccatacaggatcagtgactgtgcacctgaagatgtctcaaaggcactgactaggactcttgaggacctaaagcttgactacattgatttatatcttgtatgattcttgattttaaaactctgtgcaatgatactgcaactggagatgattgtatganatttgatgataaattattttgtgaaagatgcatt

SEQ ID NO: 199193 - DNA, 365 bp, Glycine max
  unsure (1)..(365): unsure at all n locations
tcatgcttaagtatgtatggcaaaacttcagtatgggtgttcaagacatacaagtgagcttgtaacaaatcttctacacttggagtgatcacatgcagtcctcttgaacccttaccacccactctgtcatcatgctgagactcangaaggccaacaggtttagccttctcaatgtattctgaacaaaaatcaatggcttcttttgtaatgtacctctcaacaatagatgcttctggacgatatagattctttgtataccctnttaagatctttatgtatcgctcaaccgggtacatccaccgtagataaacaggatcacaacatttgatttctcagaccanatgcacaatcaagtgaatcatgat

SEQ ID NO: 199194 - DNA, 397 bp, Glycine max
ataataacaagattttgatatgattttcatgaaatgaagaaagaaaactaattgtttattgaataagaccataccatttttataattaatctgggatgttttgttttgggacactaatataatcacatcaaaaatatattgccacagaacatgtggcagactgttgtctactcagccaactatcatgcaatgaaataactgcaaatgagctagcattaattcctggacaaaacctatataaaaggagatcatatattttaaagataaagcccaactgatcctactactgttttaaatcaagaagaatcattctcacatttattcatgatactagagtcatagaaatccaactaatacaactatcatcacaataagatcttaataagtagttttatgt

SEQ ID NO: 199195 - DNA, 261 bp, Glycine max
tcataatcctacctaccaaatgtcatgatccaccaccatataagctttcatttatttctcattttttgcatgtattgttcttgacaggatcaatatggtaaggtacctctgtattggggaataactgctgatggctacgtagcatttgctgatgatgcagaattgcttaatggtgcttgtggcaagtcacttgcttctttccctcaaggtgggttaacttctattatgttaatggtgttaatatattacataatatgtgct

SEQ ID NO: 199196 - DNA, 380 bp, Glycine max
atattaatgaaccactggataagtggcacaatcagctatttatcatttctgtttatagtgtgttgtcaagatgttcatattgtgcatgttacttattctgcctaacacttctactactgcatattcatagtttctagtttattttcttgaaggatttcaatgaagttgtggtcttgcaactttaattcacagcttgcaaatgctttatcaattgaaggggactaccaaggttcaatctctgccttagagtgtggatatgtctgtgctactgaagtatgctctccggagttgcaggtatgttgtcataggttacacattacaagaaaaggcatgccccttgcttccttgtctgctctttgccactgattcaataatgaatt

SEQ ID NO: 199197 - DNA, 397 bp, Glycine max
  unsure (1)..(397): unsure at all n locations
gctgggagactntcttcagcaccaagttctctttgttgaaccggcacgggcgtaccttcttgtcaaaagcgttcttcactcacttctgatataaacgcacgtggctcatggcggccaaacacttgccttctatgagattaagctaatcgaaacatgcttgggcccactctgattcctttaatttgggccccccgccaagattcttaatgatgggacttccacctcaaatggtaacacaacctccatcccatataccaactagaacggtgttgccccggttgacgtgcacattgaggtccggtaaccatgttacatgaacgaaaggatctcgtgccaatctttgtacgatacgggcatcttctggatatcttcttgatattcgtattggctgcctcca

SEQ ID NO: 199198 - DNA, 273 bp, Glycine max
caaaagctcaagggccatcaagaatgagtcaagatttcaggatggatcagaacacttcaagaatcagaggaaagtgattcagaatcagaatcaagatcagagatcagattcagatcaagatcagagaacagattcagaatcagagaagcttatcagatagttgaaaggtttctcaaaatgagtaccatggttttctcaaactgttaccaaagttttctcttggtattgataccaatgtgtatcgatccagtgcaaaggattgaaaagttcaat

SEQ ID NO: 199199 - DNA, 274 bp, Glycine max
  unsure (1)..(274): unsure at all n locations
agcttatgcaacgatggagccctgngtttattcactaccattgagagaagatcctactattgcttagagttagatgaatgattatgacaaacagaagctaaagaaggataaaactatcacttgcttgcattcaggacttggaaatcatattttcaccaaaatcaaagacttggaaacacctaaatagatgtgggacaagatccaaaatggatttgacagcaattaaaaggtcaaatctgttaggcttctcttattgaagacagaagttgaatca

SEQ ID NO: 199200 - DNA, 259 bp, Glycine max
  unsure (1)..(259): unsure at all n locations
tattggcctatattgaatggtatagtactatgctatttgagtgcagagtataattatggatcatgaagtttacgtgtgaaacttctgagtaagaatctgtggatcaagttatgagcatcaaaagtactgtctaaaattttaatccagtgacagtagtttcgatcaagtgaaaacaatgcaggatatataatattatattggagtggtttattanaagaattatatatatatatatatatatatatgtatatttatctat

SEQ ID NO: 199201 - DNA, 285 bp, Glycine max
  unsure (1)..(285): unsure at all n locations
tgaatttcttgaaagcnaaggggcagcatgttacactcacgtcacttttgtttggataacaagctacaaattcgtaatgattacaataaaaaaattctttataaaaaatacacatatataattaacggttcccttataatatataaaactctcgttatttatgaattaaagtttcacgtcattaaattcatctatacatatatatatatatacatatccatatatatacgaatacatgtatttattgagatgcttcttaacactaaaaatgggaagctctgccaa

SEQ ID NO: 199202 - DNA, 396 bp, Glycine max
  unsure (1)..(396): unsure at all n locations
ataagcatggnggaaaatgccaagtggcatcaataggtttgaatattcctgtttttgtgagggaaaaagatgttgcaaatcataattgtactattgttgtagaggattgaaaatttgttggtgattctgatgtgggtgattaattctggagtttatttggtggttatgctcccatattcctcgagattctccttctgttgaggaatctaaagctcctcctataaagctattttggtgaggttcatacatctgtgtgcataatgtttgtgtgctgatgaaccatacttgcccaactttatttctatgttaaaacatacaagtttgttttggatcaataattaactgattcatattgatagttcaatggccaacttaatggcatcacatttcattggc

SEQ ID NO: 199203 - DNA, 187 bp, Glycine max
aagtatacagaggcagtgaccaatcccttcctatcaactccaaccatgtccattttcgtcgcttctatcacttgtcatggcctgacatccatggcagacacgaacttgcaaggtcagtcataatattccaccggtcacgaatagttggatgtgaggtactcatgtgggttcttctcgcttgacattt

SEQ ID NO: 199204 - DNA, 339 bp, Glycine max
attgttaactatggtttgaaaactatttacgtggttccattctgtgtgaaccttccatttacttgcttttagtgcagatgcttaaaagatttaacgtttattccagaatgaataatagaggacttggatatagttacgcgaggtggttggtggttagcattttaagcaaatatttcacttaataaattgaatcttttacttttcaaaaaatagactgacgaatttctactttaaaaataattcgatgcgttggtggttatctactttttgcttcaatatgttagcattattatcacgagtttttgtcctccatgatgttgtggatgcaaatgcgataaa

SEQ ID NO: 199205 - DNA, 418 bp, Glycine max
agatacctgcagctgcagcttacggatataaaaattatctttatttatttacctgccaatcaagtatgctcaaacatgtatatgatatattatcagatacttgtatatcaactaaacaaatggcctaacttttatctctttttgattatcattttcaatatcttcttattttaacttgaatatgaatagtttaaaaaaatattttttcaatatattaaaaatatctatcataaatataaaataaaatttatttgttcaaaaatatttatttattatatattttaattataatataatttatatatttaagaagtagatttttatcataaatcataaatatttcatttataaaatagacatctactttatataatacatagacataaatactagtatatttaattaattgccacattta

SEQ ID NO: 199206 - DNA, 338 bp, Glycine max
  unsure (1)..(338): unsure at all n locations
tgtatatgattgattggaaaagtattcaagattgttgttagaaagattgatgaaaatgcaaaacaaagccttgcttttatagactcttcatgtctggtcaagaaggccattcataggagtgataactnttagaaaaacttaaaacccatttgaaaaagtcaaaacctttttgaagagttacatctttagatttttcagaaacaaacactggtaattgattaccaaattagagtaatcgattactcaaggcttttaagtgaaaggatgtgactcttcacatttgaatttgaatttcaacgttcaaggacactggttatcgattacaaaacattgtatcg

SEQ ID NO: 199207 - DNA, 416 bp, Glycine max
  unsure (1)..(416): unsure at all n locations
agcttgatcctatcatttggtgctctcgttctatgtcngaccctccctccaccgccagttcctctaataaccttgaagctgccatcctcaaactcactgacctccatgcctcccttggtgagacagtccacacaatggcccagaagtttgatgcccttatgctccgccttcccccatcctctttctcatcctccgctgcaactccacccattcccaccttcttccttattcctgcaacacaatacaaaatgaaacttgacatcccatgatttgatggcactgaccctttcgggtgggtgttcaaaataaatcaatatttccaataccatgccacaccaaaacaatatcgacttaccatctcttcattctacatggatggtcgcaccctcgcgtggntccagtggatggccaacaat

SEQ ID NO: 199208 - DNA, 404 bp, Glycine max
  unsure (1)..(404): unsure at all n locations
cgctttaactagattatcatattaattnctcgtatgtatgacttagtctacaatacaatctaatattntatgataatgattatatagttaagtgatgtgacagattaagcctacaattttacaaaattgtcttatgtacaagatggattaaggtaacggagcacattaggctagctattgaaagncgtaattttttgaagtcagactgatattagagcaatctagagtaattttgatcttagagcaattagtaacgttagtactttgcatatacgtacagatcattccattgtaaagggaaaattacttaaacaaatggatataattcaattccaagatgtggcacccgagcaaattgttatatattaaataatatataagttctagctacatgctattttttt

SEQ ID NO: 199209 - DNA, 328 bp, Glycine max
  unsure (1)..(328): unsure at all n locations
ctcgcccaatactatgacaaggccgtgaggtgtttcacgtttggggacttccaaatggtatcgactattgaagagtttgaggaaatatttggatgccctcttggggggagaaaatcgtatantttctccgggtttcttccctccttgagcaagattgcagctgtggttggagattcggcaaaagaggtggatcgcatgaagcaatctcggaatggcgtagtgggcctgcctcggaaatacttggaaggaaggcaagggatatggcgagccaaaaaagtggggcccgttgcggaatattaactttgttgatttttgggttctcctcttt

SEQ ID NO: 199210 - DNA, 359 bp, Glycine max
atttaatcattctacttggatgaatgagaaaactggggtgaatgaagagggtgagaatgaaggagaaacccatgctgcgattggcgttcctacatggaaacttcccaccaacccaacaatgtcattactcagccaataacaatccctctccttacccaccacccagttatccacaaaggccatccctaaatcaaccataaaaacccacctaccacacaaccaatgctaaacaccacctctagcgcaaacccaaaacaccaaccaagaaattgagtttgcagcgaaaaaaacttgtagaattcaccccaattccggtgtcctatgcttgacttgctcccatatccactcgataatgcaat

SEQ ID NO: 199211 - DNA, 416 bp, Glycine max
  unsure (1)..(416): unsure at all n locations
cataatacatggttgggtttggtttgggtcaaggataaaagggatgccccacattatttccatgacacaaatgcaaagatgatgatttggaaattntatgcaaaactggtcatgcatgcacctatgcggacactcaagtgtcaaatttttatggtcatgtgatgctagggctcaggattcatttcctctattttaaatcaacccaatgtttccaaaatatgttcttttatcaatttgtgcattcatcctagtccattttgggtactcgggaaaatttcacagcattcacccttcaggtgtacacacattttttcaaaaactagttatgatcagtgaattttttcaaagacaagttggaagtcatctcttttcaaaagcatgttggtttttcagctagacaacttaattttttcttt

SEQ ID NO: 199212 - DNA, 292 bp, Glycine max
  unsure (1)..(292): unsure at all n locations
tccaaataccanggcttcttaaaatcaatttctaatttttcatacaagggtgcatgaacttgcctaaaaccctcttggcccaaaatgcgtatcatgtcttctgtacgatctttgatttgtacatcaactaccacagtcggagggactggtgatatcaatggtaattcaccatgccatatctattttgtataagtaggactaataccctgacatttaagatgtgatctaaagccatgcaatgactctcatctnctattcacacatttgacacatggacagaanatatttacac

SEQ ID NO: 199213 - DNA, 441 bp, Glycine max
  unsure (1)..(441): unsure at all n locations
agcttcaacatcaaaccacttccagggtgttggaacttcttacttggactngatggggcctatgcaagttgaaagccttggaggaaagaggtatgcctatgttgttgtggatgatttctccagatttacctgggtcaactttatcagagagaaatcagacacctttgaagtattcaaagagttgagtctaagacttcaaagagaaaaagactgtgtcatcaagagaattaggagtgaccatggcagagagtttgaaaacagcaagtttactgaattctgcacatctgaaggcatcactcatgagttctctgcagccattacaccacaacaaaatggcatagttgaaaggaaaaacaggactttgcaagaagctgctagggtcatgcttcatgccaaagaacttccctataatctctgggctgaagccatgaacacagcatg

SEQ ID NO: 199214 - DNA, 332 bp, Glycine max
ccgctcccgagtatgacagtcaccgctttaggagcgctcgacatcagcagcgcttcgaagccatcaagggatggtcatttctccgggagcgacgcatccagctcatggacgacgagtatactgatttccatgaggagataggtcgccggcagtgggcatcactagttacccccatggccaaatttgatccagacatagtcctcgaattttatgccaatgcttggccaacagaagagggcgtgcgagacatgacgtcctgggtgaggggtcagtggaacccgtttatgcagatgctatcggccaacttttgggatattcgttggtgctggaac

SEQ ID NO: 199215 - DNA, 406 bp, Glycine max
  unsure (1)..(406): unsure at all n locations
cccctatactgcattcatagtatatttccctgtataaaattacgctattcataatatatatcctggtataggatgaggctctactagcatcctggaagcagcaactggatcgagaagttgagactcaaaattaaaggaaatttacatcacttgcacatagtgagtgccttgtgtttgcttgttaatttaatttgttggcataattgaaaggcatgtttattgcaacatctgcatattttcatgcaaaaacagagttggaggctatagtactntccttaatatagtatttcattgtgggactaaagtattcacagtatgaattatatatgaatggatgggataccaattaaacaatcaatgcaacttatgctttactatggaaaagttgttgctttgcatgtatgtc

SEQ ID NO: 199216 - DNA, 326 bp, Glycine max
  unsure (1)..(326): unsure at all n locations
acatgcccacccctgttaatgctaaccaataagaacatagacgaatgtgaagtccgagagaaactgttaaaggagaaaaaggtttctttggcttttattaaatttnttctattataatgttacattttaaaaaataaatttagatggtaatctttaatgacatggaatgatctaagctgttaataaaataaaggactatgatctcttcactttaccctctaaagtgcagcctggctgcactttaggggagctcgatccaattcaaaagtggttatgtaccaacactagggagtaattctatgtacctagtgaatccaaacttgcac

SEQ ID NO: 199217 - DNA, 368 bp, Glycine max
  unsure (1)..(368): unsure at all n locations
aggcagacggccctccaatttattatgtgaaagatccaaccgactgacatgctgaagatntgaaagtgtcgatggcagctcaccctctcatttgctatgtctcaaatccaattcgtgaaagttgtttgattgaggaaagacatttgggatctgaccactgaggtggctagcttctagattcataaaacacaccctgggaagggttaatattgcggatggtactgaactctcgacgctggttactgagaggtccatcacagtgatatgtatgacgcttaacaaatagggagggattgaccctggtgcccgcaatgtgttatatcgtataacacgcggacacgtgttctacaactaccttgtgcagcttt

SEQ ID NO: 199218 - DNA, 435 bp, Glycine max
  unsure (1)..(435): unsure at all n locations
agcttcaagattaagtctgtatgttgttcttcctatctctaacagaacgtctacttttgaataaatatctcaaaggtatactatttggagataatataacaatacctattccataaccatctacatgttttgatccatcgaaataatacccaaggttttactcctacataacattctaaaattttgacacaagtatgattaactaaaaaattgccacaatttgacccttaatagcttttaatggtacaaagtttaaagaaaattccgtcaatgcaagagcccattctcctattctaatatccaatataaatttagatagcataaattttataacaattattatgagataaaacttgaacattgaaggcctaatgtaatacttaagtttagtacaagggaaagacatacacgaacataactttncgataggaatat

SEQ ID NO: 199219 - DNA, 430 bp, Glycine max
agcttactctgcacaagtggggtttctattattgaagcggcaattcctccttctaatgacgcatggacacttatccctgacccaactacaattcgtgcgaaaggtcagccaaaatcaacaaggataaggaatgagatggattggctcgaacagtctgagcaccggcaaaaatgtagtagatatggagcagaagggcacaataggcgacgatgtccaatgcaatctgaccgtgggagttgttcatttaattgatttatgtatgttagacgagtgacttgtattggtttaatttctattgaatgtatttagtttgtggtcttcaatgaaatcatgggagttgttgttctattgaatgtatttagatctaaccctcagccaaaccctaatccctaacctaaccctaactataaaccctaacccttgaagacta

SEQ ID NO: 199220 - DNA, 234 bp, Glycine max
  unsure (1)..(234): unsure at all n locations
ctttgagatccagaagagatccattcaatccagctttggttctaacattttaatgataaggttgtatgtcttcttgacttttgtttcatatgtttttacatattgntgtagcatatgcatgagtttctaaaacatgccagaatanggttttctagcttgagttaaaggtaagtgtttcttaagcttttattcacaaaggaccctanggttgggtgtcttaatctcattntctgg

SEQ ID NO: 199221 - DNA, 417 bp, Glycine max
  unsure (1)..(417): unsure at all n locations
agctntgttagtttccagcgaataactattctatccatgtttagtgtagtctctcttttcaatcatgttcttgtatatgcaaaactcgaatctgagatgctggttaatggatctaaactccgtttcacttgaaccaacataatgttggttgagattcatggtttgaatttatttctagaatgaaaaatttaaaaagaatttaaaacatctattaattaagttattaaattttattgaaaaaacttaacaagctcaggtatacatgaataatatctaaaatattaactattgtttctattgcctgacctttattaataataatcaaagacatgtccataaaaatgtttttgatgataaataatactacccactaaatcccatgatataatattaattaactttaagaaaaatagttga

SEQ ID NO: 199222 - DNA, 224 bp, Glycine max
taatctgcccctaggtcacctgaggctcatgcacgatgcccctcattgccccaatgtaaggctttgaggtaccaattgttatctttcgtcatgaccttgtagcaaggaacctattgggtgagaacttctaatctgcccatatgttcgtttgaggtttatgcatagtgcctttcattgccccagtgtatggctctaaggtatccatcattgttttgttttcacaa

SEQ ID NO: 199223 - DNA, 414 bp, Glycine max
  unsure (1)..(414): unsure at all n locations
ctgcagcttaatacacttctttgtttccttgtgaaatgtgaaactctccccttcaaaccttagaagcccatcaacttgtgctatattgatcaacattgtccaaccctaccgagtttgatggggagcaaccccccattcctcatgttattgagcctctcaatcgtgatcaaatggttgttgcctttgtatttctgtatcaattgaatgtcgttatcaatagtctatttagagccttaatgcttctatctaaccatnttctcaaccccgtagcttccaagataagcacttggtccatttacgtggtatactccggtggaatttgaaaggctttgggacacactggtgttaagcctttatgcatttacattgtagcgacgaaaaggtctatttaatgaaaaattgtgttggtttcct

SEQ ID NO: 199224 - DNA, 461 bp, Glycine max
  unsure (1)..(461): unsure at all n locations
tagtttgatgattctcaagactcaagtcatgaatcaagattcatgagaagactcaagatatgcaagaacttcaagaaaagtatcaagataagtataaaaatattttttttcaaagaaaagattgaatagcacaatttgtccaaaagaatttttcaaagaaaaatcttttacctgagtctttactctctggtaatcgattaccagaagcccaaatagttttataactgttttacaaagtagtaatcgattaccatgggcatgtaattgattaccaatgtttttgaacgttgaatttcaaatctcaagagtcacaacttatgataaaacatttccaaacttgtgtaatcgattacacaacatttgtaatcaattaccagtatttctaaaggttgggtntcaaatctaaatatgaagagtcacaactattgatgtgtgatcgattacactataatgggtatcga

SEQ ID NO: 199225 - DNA, 411 bp, Glycine max
  unsure (1)..(411): unsure at all n locations
agcttctatggaggctggatatatgancttcaatgaggtccttcaatggtgattttccaccatggagatgcagcagaagataaagaagaagaggtgagaggaggcgccatccactatggaataagccatggaagaaggagcttcgccaccaaaattgtgccttggataagaagcttggagaggatgcttcaatggaggaaaagaaagagagaggggggagcacaaaattaaaggaggaaaagggggagaaaagttgaactttgagttgtgtctcacaagactctcattcatcaaagttaccacaagtgttacacatgcttctatttatagactaggtagcttcattgagaagctttcttgagaaaactttcttgagaagcttttttagaagacttcttgagaagctgagcc

SEQ ID NO: 199226 - DNA, 234 bp, Glycine max
gcccgggtagtccaagagaaggtcaagtgcatagccatcaatgtctgaaaagagtatgatgaacttagggacgtcgatctggccaccgctgaagccttggaacgagaaaccaggatagcccgagaggaagagcacgaccaaagccacagtttgaggggctatatatggcagcagtagtgagctcaagctccgaagaggtgaaaggaatcatcacgggtcagaggcatgatcttg

SEQ ID NO: 199227 - DNA, 335 bp, Glycine max
agctgtaatgtagaaacacattttcattgttaaaatcacacaatggaaatgtgttttctatatgttctatgacaatgagcaatcccaaattatttaaaaaataatgatacatgaatcacttttcattataaacatctcatcaatacttctcatttctctcttgtttctattcttatcggatcataaatcttactatatttatatttcatctcctctcttttctttctttttctagatataagataacatattaagatatttatcaaacattctttttttttaacaaaataaaatgtgcaaatgtttaacacttaacacgcctaccaaactaaatt

SEQ ID NO: 199228 - DNA, 313 bp, Glycine max
taaaaaatagttatggcctagtatcctaataaaaattaacacttggaatgaaggtgaaactcatacaacttgtgtcaaataagggctaatattagcaatcttttgatcacattaatttttaaaatgaatatgataaattgaagaaaagttatacaaaattattgaggcctcccagtctgatagggaccaacgtttacacaagaaattgagaaacccatgaatcgagtgtagacaacacgaatagcaaaagtttaacttcctaagcaaacaaaagttaaactaatttcttcctcatcccaggatcataaaatat

SEQ ID NO: 199229 - DNA, 397 bp, Glycine max
agatcaattgaattcccaaaaaataatatcagtgggttgaacctgaatggcccgtcccatgtcagcccccaagtgtctcatcccaatcccatgttaatctatctgaggcatatggttccacaattacccaacatagcggtaattgtgttcttggttaggacccaccacccacattaatcttttcttcagacactagctccttcaattaatcaattgtgagtgctgagtagtagtagcaatgtgagcaaatatttctatcatttccctgggtgatgaaaatgttgtaacgtaaacatttattgtgcatctcatttctcataaagcatttggaatctagtaaagattcatactagttggacatgccaaaagtgtcgccgctaataagatgcagcatcta

SEQ ID NO: 199230 - DNA, 220 bp, Glycine max
agagtattatgaactaagggacgtcaatatggccaccgcttaaacctttgaacgagaaaacaaaaaggcccgaaaggaagaacacgaccaaaacaagtttttgagggctttatatggcagcaatagtaagctcaagctcttaagaggtgaaaggaatcatcacgggtcatgatcttgaaggatgagctaaaggcttaccttatgtcgaaaagaaatttgt

SEQ ID NO: 199231 - DNA, 424 bp, Glycine max
  unsure (1)..(424): unsure at all n locations
agncttgcagcagatgttagtaatgacccattaacctataattaaaataacttaatgccattaacctagggaattaaaaaaaacttattggctgagtgtaactgaaattgtggcaaccaaaagtcacccccaacagccaacaagtcagccaccatttggtctcccaaaaggctgatgcctaggttgccaattgggcccttattacaacttgaactaaacctaactaaagcccttttagttgattaacccaaaacatatgtttggtcagccaactttacaaggattgggccattatttagacaaactaaacactctataattgagactaggtgtggtcaattattcctctttcatttgtggcatgataacactcacatctcttgacttttctccttgaaacttgggcttgtattcaaataatatg

SEQ ID NO: 199232 - DNA, 376 bp, Glycine max
  unsure (1)..(376): unsure at all n locations
tgacccactaacctagaattattatatacttatgccattaacctatgtanattaaaaaaaaaaaanaaacttaatggctgagtgtaactgaaattgtggcaaccaaaagtcacccccaacagccaacaagtcagccaccatttggtcctccaaaaggctgatgcctaggttgccaattgggcccttattacaacttgaactaaacctaactaaagcacttttagttgattcacccanaacatatttttggtcagccaactttacaaggattgggccattattttgacaaactaaacactctaaaattgagacaaagtggtgtcatttagttctcctccatttgggccatgatacaactcacaaactttgacttttc

SEQ ID NO: 199233 - DNA, 420 bp, Glycine max
  unsure (1)..(420): unsure at all n locations
agcttccatcaagtggtaatcagagcacattagcttcatgtangtgctccttaaacctccattaatnttttttctttaccttctcttccattgttgtttcttcatttttctccatgtatctcctcacatgtcttgttctaaacgttgttaacatgattctttaaagtttccaccgattaaacttgctatagaagctagatttgattttctatggttcaaatttcttgatcttgttcttgaaccatgaatagtgttagtttaagttcctttgagtcttgtcttcgtattttttgtggctgaaacctaaaccataaaattcttcacaaatattaaagtataagacaaccttataaatctatagcgactcgttcacctattgtaatttattcataaaagccatgtctactcatgaaacttgtc

SEQ ID NO: 199234 - DNA, 428 bp, Glycine max
  unsure (1)..(428): unsure at all n locations
ctcagcttagctgaggggagtgtagatagtatttatatttttgacactgataagctgcttaactgtagacttttccctctgtgctttctctattagctactttcacattataaaagagacagctgagtngtgggggttaacacaactcactcagatattttctatctcaaacccttcacaatgtagctccttaaatttttacaacactaacatagtccatttcaacttcatggtcaatcattaagtatcaatctccaagaaaaaaaattactctnttataccatatgcaaaggtaagaacgcagccaanaaaagaaaaatataaaatacctcttcagtaggtgtactccttttgccaccccacaacagnttcttcttttggtcagtagtcaagcaaccagccccaactaagtcctattaactgtcatg

SEQ ID NO: 199235 - DNA, 430 bp, Glycine max
  unsure (1)..(430): unsure at all n locations
agcttctcaagcatgctgccattatttggttatcagagcacaagagcttcaagtaagtgctccttaaacctccattaattttcagttgtaccttctcctccagtgttgttcttcatttttctccatgtatctcctcacatgtcttgtgttgaatgttgttaacatgattttttagaatttccaccgattaaacttgctatagaagctagatttgattttctattgttcaaatttcttgttctttgttcttgaaccatgaattgtgttaagtttaggctctttntagttttgtattgctattttttgtggctgaaacctaaaccataaatttcttacaaaaatattaaagtagaagaaaaccctaaaaaatctagagtgacatgttcacctatcgtagatttggcataaaagtcatgaaacttgtcacata

SEQ ID NO: 199236 - DNA, 434 bp, Glycine max
agcttatggatggcgtgtctggcttccaattgttaagtttcctggacacctattcaaggtacaaccaaatcaggaagcaccctctagatgaagagaaaaccgccttcataactgaagacaccaatttttgttacagggtcatgccctccggactcaagaatgcaagagccacatacaaaaggatcatggaccgggtctttaaacaacaaataggccaaaatgtcaaattctatgtggatgacatggtcgtcaagtctcatagtgtagcccaacacttaatagatttggaggaagtgtttggagagattcacaagtataacatgtgcctcaatcctgaaaagtacacatttggggttggaagtggaaaattcttgggcttcatgatcacccacaagggaattaaagccaaccttgacaagtgtacgatgatacta

SEQ ID NO: 199237 - DNA, 252 bp, Glycine max
  unsure (1)..(252): unsure at all n locations
atgtttggcttaacttgctgcactatggtgggtacattgcacatgaatttgtgtagaaaatcaaattcattctttcaaaatagtatgcactgagttgtgattnttattagttgtatggtatcacatacaattaataaanaccacacaaaaatttattgacttcttggggtctatactcgggatgactaaaataatatgggtctgtatttcatgcaaaataatttttatgcttaaatttagttgggatgtgta

SEQ ID NO: 199238 - DNA, 342 bp, Glycine max
  unsure (1)..(342): unsure at all n locations
gtttgtnttacctttcacttgcccttantgcttacccaaattantgtgttgttaaccatcactcaaaattactctttattcctcttctgatttgcaggatccccgatgacaaaatgcaaatgcatgcatgtctatgatctaacgttaaatgtaacaatcaaacaggggttattgtgtacaattatattaaaacacttttggctcccctgtttctaaggcctcattctggtataccttgtccttgatgtatcattcgatatcgaagtaccaaggcttaccatccctctttatcttttattaaaagctatgtgtagcttagcacaacattgaatattatgacta

SEQ ID NO: 199239 - DNA, 222 bp, Glycine max
atgagatgacatggatgacataagtgcttggtatatatacgaaaccaagtatgtgaatgcacctaacaactacaatctgtagacacttggtgcttagcatggtatcataacttctctgatcaagtggctaacattgcaattaaaagtcattctaattcctgatattaacatccaatcgttccaaaattatatccatataataattaatagatgatctacaat

SEQ ID NO: 199240 - DNA, 181 bp, Glycine max
tcaccggacatagtcttatttctacaactcctcatcttgaaaacattattcatctttataccagaaatatcagatgcatgctccctgagaataaaactaactcaattatatgccttctatatcgtgcagcgaaattgctacaagctatattcagacaaggcatagaacctgaattggaacg

SEQ ID NO: 199241 - DNA, 223 bp, Glycine max
caagctacaggttttatagagaatcattagatttcgcgtttccttaaaagaaaaaacagacagctaacaattacaatttcttcggctccccttttgaatttgtcttccttaccaggaagacatcgtaatacactcccaaacctcatacgcatataacattttaaaacggtaatgaaaaccacaccactaacggggcacttttaaacaggcggtatatatcata

SEQ ID NO: 199242 - DNA, 414 bp, Glycine max
  unsure (1)..(414): unsure at all n locations
agcttgtgaaaatgtttctgttatatggtatggnatagagaataaaaattatatatgttgtccctctgtttttcttcttcatcatttctcaattaattntcttccttaacgcatttgcatatgcaggttgagaaccatgaaatngacacacaactgatggggaaggtgaagcagttgatcaatgcatactatgaggaaaacctgaaggaaagcttctaccattctgagatagccaagaggttggagaaacagcataacacctctgatatagattgggaaagtaccttcttcatttggcatcgccccacctctaacatcaatgaaatttcaaacatctctcacgagctttggtaagtcaatccatatattgtcctttttctttatttttacctacatgtattctcctctaaagat

SEQ ID NO: 199243 - DNA, 167 bp, Glycine max
gtcaagaaattaaataaatgagtactgagtacagttatccacaatagtgcactcagaatttgtcatgaataaaatcactacactaacaatccactgctgtaagccgttaaattacatggagccacatggacattggatacaaatacaatgcaatgcttagctgacac

SEQ ID NO: 199244 - DNA, 394 bp, Glycine max
  unsure (1)..(394): unsure at all n locations
agctgtcttgagaattcttccttgagaagcttctttgagaaaacttccttgagaagctagagcttagctacacacacctccttgagaagcttccttaagaagattcctaaagaagctagagcttagctacacatacctctctaatagctaagttcacctccttgagatgagaagctagaacttagctacacaccccctataatagctaagctcacccccatgacataaaaacatgaaaatacaaaaaaatagtccttactacaaaggctactcaaaatgccccgaaatacaaggctaacaccctatactactagaatggtcaaaatacaaggcccaaacgaaggagaaacctattctaatattgtcaaagatgacgggcncatacttagcccat

SEQ ID NO: 199245 - DNA, 265 bp, Glycine max
  unsure (1)..(265): unsure at all n locations
tctttctgaacacgtgataaccctttgacaccaagacacagtggttagagaccaacacatttggcaaattttgtgatgaggtaactgaacaaagagttaaggagaaggagtgcaatcaagagccattcaagcactgcatagactagaatcaaaacccatttgttggtgtttggatctatgcaacattgtagcaaagttgttggtagctattgatgtttatttacctttngttttctcttgtgactttgagttgtgtgtgtgacac

SEQ ID NO: 199246 - DNA, 485 bp, Glycine max
  unsure (1)..(485): unsure at all n locations
ggatcttaagtcacctgaggcatgcaagctnnttgattgctaccattctaccttgtgtatccaatggaaccttgnagagtgttccaaagactccttctccaatctcagatgccttgttgagcaaggactcaggattgctgatccaatcaggtgaggactgggaatcaaacaggataagctttcctgtggctggacttcccgatcttgaagagctcgagcacatgctttccaaagcattatccaaaaatgttagccttctccttacagaaacattaagtaggctaacagcaatcactcctaatacaatgacaaaggatgcagatattgctacaatatcagatacactaaggaacctgtggcgatggactgggccaaactcaaatgatacggtttgttgccttagaggacttatatggttgttataggcattcgggtcaagcacaagtgtgttgtggacattcatcttacatggacccttcaacaag

SEQ ID NO: 199247 - DNA, 395 bp, Glycine max
  unsure (1)..(395): unsure at all n locations
atcctactggatgtgaacagctgatatgagatgatacttaccattgagtnatataaaaaacaagcactcttagctcactgtcttccttccaaggaattaattacaacattttcaggttaattccattagtttccaaaatattgacttatgttcctgatcaaaacatagaattaataaaagaacatacccgtataagtttaagtactataggattggagaaaccaaacatatcagacctcaaatcctagctcttttctttcccaccagcaacagtaccttcagaagcattctctttcattctctttatcttttcgtatacctcatttcagcaagcagatggtgtataaccattgaactgcaaccacacattaataacatgtcattggtgggactgt

SEQ ID NO: 199248 - DNA, 430 bp, Glycine max
  unsure (1)..(430): unsure at all n locations
ggaagcanattattagtgtaggaatttatcgaataatatataacctttatatgttgggggttaaaagatgtttcagattccatgctatcttcttttcagttgcagctttatgccaaatcaagtcactacttgaataaaaccaatgggatgctgagcttcactagcgaattgataggtaaagaatatagaatgtgatactaagtaaaaggtattcaaacaaaaggataaagaggaacggcacatagtgggcattttcctaaataaagtataaaagcatatgttctgaatgttttccctcataaaatattattgaccattgcatttcacannattgtaatacctctgcttcctctccattttctgatcacttttctacaaaggggtcatttgtggcataaactgtagtaattcaaatcgtattgaaaacaat

SEQ ID NO: 199249 - DNA, 476 bp, Glycine max
  unsure (1)..(476): unsure at all n locations
tgaaggcaaactggatgcatnggttaactgggtaacccatttggccttgaatcagaaatctgtacctgtcgcaagggtgtgtggnttgtgctcctctgctgaccaccatacagaccttagcccttccatgcagcaacctggagcaattgagcagcctgaagcttatgctgcaaatatttacaatagacctcctcaacctcagcagcaaaatcaaccacagcagaacaattatgacctctccagcaacagatataaccctggatggaggaatcaccctaacctcagatggtccagccctcatcaacaacaacagcagcctgctccttccttccaaaatgctgctggcccaagcagaccatacattcctccaccaatccaacaacagctacaaccccagaaacaaccaacagttgaggccccgtcacaacacttccttcgagaacttgtgatgcaaatgactatgcataacatgcagt

SEQ ID NO: 199250 - DNA, 322 bp, Glycine max
ataggtttatacaaccttcttttaatgcattcacatttgactccctaatttgatcttggcctaatgcatccatttgtatagtatgttcactcatccgcagcatgcatctcatttttactacaataagttttctctttgagaatatttttggattgcttaagggactttccaccaacagagggacttacttatttcatgagtatacaagacaataatgcataacatttacacgaacattaaatctgctcctctaagtgcttgcttagctatccaatattagtactgaaaattctaagattcataccacactctgtacttttat

SEQ ID NO: 199251 - DNA, 475 bp, Glycine max
  unsure (1)..(475): unsure at all n locations
tgtcgagaacccctagcctggacatgtgttgtccgggcggtttcttttaagnngcccacggtggacatgttctttggctttgcaagcaagatttgacatgtcagctgagggaagcctctatatttgactactctgcccttttctgaccattggagagagtattgaagacatatattacatttcgtttgttgttgtacgtatgtgcggtgcatgtgcaatactcttgcatacatgtcactcgtggagcgggcacatactgagacgtaatgcatgggtaagtgtgcgtatgtcgtggtgcataaaattatggcaccactttagctcccaccagttaccgaagagtttgcctctttataaatggagtggatgtttgattcgtgaccagcgtcacttttaattactacttgcgctctctatatcttctgtattcctgtacttacaattntgtgattcactttcttctctgtcatcttct

SEQ ID NO: 199252 - DNA, 486 bp, Glycine max
  unsure (1)..(486): unsure at all n locations
tgtagaggatgcttcaatggaggaaaagagaaagagagtatatgatagaggngggagcacgaaattgaaggagtaaaagagggagagaagttgaattttgagttgtgtctcacaagacttgcattcatcaaagttaccacaagtgttacacatgcttctatctatagcctaggtagcttccttgagaaacctccttgagaagctctcttgagaaacttccttgagaagcttctttgaaaagcttccttgagaagctagagcttagctacacacacccctttaataactaaggtcacctccttgagaagcttccttgagaagattcctagagaagctagagcttagctacacacacctctctaatagctaggctcaccttcttgagatgagaagctagagcgtagctacacatccttttaatagctaagctcacgctcatgccaaaatacatgataataatatagaagtccctactacaaagactac

SEQ ID NO: 199253 - DNA, 316 bp, Glycine max
ctattaactcctgattagctgattgacccatggcatactattattgacacttcaatcagcagatctttataacataaaattcggactggataaaatacaaaaacccaatagatgccttacacatagagtggcccacacgcttatctgaaacggcaaagaaagatgagaccagcttcacttgaaagttaaactgttcagcctcaccaaggatctgtcaagacaaactactttcaaatgtttctggttgagacatacacgttgaacgagtggagctcagacaaccgactctattatgcttgagacttatcgagtatct

SEQ ID NO: 199254 - DNA, 436 bp, Glycine max
  unsure (1)..(436): unsure at all n locations
agctttatgaggaatgnagattgattcattgatgtttgatgataacaaagatgatgagaaaaagctcaaaagtcaagaacactttatgataacaaagataatgatctcaagaatctaagaatgcttcatgatgacaaagatgatgatctcaagaatcaaagaatgagttcaggattgaatcaagaacacttcaaggctcaaaaggaaatttgatttcaataatcaagaatcaagtttcaagattcaagttccaagaatcaagatcaagattcaagactaaagattcaagaatcaagagaagactcaatcaagataagtattataaagtgtttcaaaaactaagtagcacatgaatttttctaaaaaaacctataaccaaagagattttactctctagtaatcgattaccagaatggtgtaatcgattaccagtagc

SEQ ID NO: 199255 - DNA, 356 bp, Glycine max
ccaggcaaagattgctggagtatatctaccctgttaaatgccaaatgatatcgtgggatgtgagggatatgctgtaaattcactaatgcagatatgtctgtgtacatgatccgagagaggatgcgtagtcgttgctcacaggagatcaaaagacttcacgatggcaccctgacacaaagtccagctacatacctccgctcattggactaaagagagtcttctcatatctcttatgaaccccaggtttactgttaggatcactaccacttcgtgtttcaataccattggcaagttgatgtcgacgctttttctgatatggacgctgcattgtttttaatgagaatctatacatgtct

SEQ ID NO: 199256 - DNA, 437 bp, Glycine max
tcaagctgcagtctttctctacaaattgggtaatgcaacaagataactggtgatgatacattgctatagcacttggcttgtgcaacggaatcagtatacgaacaagaaacagtttgtgctcttccttcaatggcagtgcaaaaccattaatgatgctcccaagaatctccaggaactcagcaatcccattgtgcttctcagtctcaaaaataaaattaaagaacacattattgatggccttcctgatgaaagggcgatgtgccatgaatttcccatagatgcggtgcagcgtcatcttcaagtactcgcgctccctcggatcctcagagtctaacaaatccagcagcctcaaaatgaatgactgatcaatgtatctcttggccaacttcgatccagctcgggagacgccacaaacctcagaaaaagctcatacacaa

SEQ ID NO: 199257 - DNA, 369 bp, Glycine max
  unsure (1)..(369): unsure at all n locations
cctcaacgtttcaatttgacacaaaaactgtgagacacactatcaaaaaataaaagaactgaacgtaaaattagcaaaaaaataaaaaatacaactatggtagaaataaaacgaaaacagctaaagaataaaatacactaaattaatncgatgggattaaatttatcacaatcaaaaagtcgatgataaaaaatataattaagcctatacattatatgcatatagatngacacaccgtgtcaatgaactacacaacggaaagcaattgagtgtgccaagaccggctcacaaaaacaaacaaccaagctaactgaacctacagaatgagacccggtgtggaccacaaccganataagataatcacatcat

SEQ ID NO: 199258 - DNA, 430 bp, Glycine max
agcttgcagtggttgaagtagaattcggttatttcagttgcaggtgcagagagtcggtgataggctcgtgaaagtgtgaaccacaacagaacagaacgtgaacgcgaaccttctttgctttgctttattgtctctatctgtctctttctttctgtgtgtctctcttacaccaaagtttatcttttttattttatccaaacctgatcatctaagatgcatgaggcagcaaattcttaatttttaattaatttatttattcgttgctttggattttctttcttttttgtgctttcagcaataccaatgatgatgatgagtttagagtaagagttgtattatttatttgtcacggaatcagagaaacgtgtgatcacaaactgagaaataagggcacctttcgattttagttaaggtagtactaccctttggt

SEQ ID NO: 199259 - DNA, 475 bp, Glycine max
  unsure (1)..(475): unsure at all n locations
tcgaaataaagtgcgcttaaggatgatgcattattgtttctcgcggcataacaacccttgacgaattccaccagatcaatccccaaaatacatggcgagacaaacaatataaacaaggagtacagcacatgacggttggacaaatcggttgtgtcatcaagatccaacatagttccaaaaactatcactaatcttcacacattccaaagaaggttaaaaaacaaggaaaacataatttcctcacacaaccttcttgttcttgcaaccattgcaccatcgatcacaacaacaaaacaatgaggctatggattaaggcctcnggtgcattgaaagatacgtatagcatttggattgcgaagctctcaccgagtggtccatgtaggaatcctgatctcgaaaccgtgatcatcaaggccacangccacgatgaacaatgcatggattacacgaaacgtcaaagggtgttcaatggcta

SEQ ID NO: 199260 - DNA, 394 bp, Glycine max
gacatcattgaaacagaacgaagttttatgccaatacatgtcacagcaaaagaaaagcggctattttattagcatcatagattttttgaatgtgatcctgaacaattaacaccccttctctttgtttccctcgttaatatatgaaagagagaaaattgggtgcacgggaaaattgaggggacaatgttattttgaaaccgggtttctagtatattttgtatagaaaatacacacacacataaacttcgggagtgtttctttcaaaagctgagagagccatcacccatgagtttgtacgtagttctgccctgaatgtacgatcgatttgaaataagctcttcgaaatacatcccctgtgagtgtatgataatatgagtcccacgcaataaaattg

SEQ ID NO: 199261 - DNA, 471 bp, Glycine max
  unsure (1)..(471): unsure at all n locations
ccttcatggtacatttattattagctgtatgggcctttatntttattggcgnaatatccacaaaattgatgaacatcttcccctaaccataaatctattaaatcctgtatatgctggcaggtgcctcaatcatatgaggataaattcccagacagcagataaattcacggtttatgcgagatgaggaatctcgtggcagaaatagtcatccttagaattatataacggcttcttttgagatagatgtagctatgcacatttgtcttgggaagttaaaaggtgcttatttgtaaaagctgcagttactactttcataaaattntctgaggtgttggttcgattcaagcgtcctattatgagattactgtcgtggctcggcagtgttattgattggaacaatgagtnttgcgatgcctatatacatcgatgtaattcaaacttnggcttgtggcaaatacaaaagtttgatga

SEQ ID NO: 199262 - DNA, 429 bp, Glycine max
  unsure (1)..(429): unsure at all n locations
ttatacttgaatgaagctctgataccactcgttagacaagtggcctcctatatcttaagaagggggggttgaattaagatattccaaactacttccccaattaaaaatctatttgattttttnttaatcaagttataaattcccttaacaatgaactttttaaatattaattcaaataaaacaatttgaatatgaatatcaagcaataataaataaaggagtttaagggaagagaaagtgcaaactcagatttatactggttcggccacacccttgtgcctacgtccagtccccaagcaacccgcttgagagttccactatcatgtaaattccttttacaagttctaaacacacaaggacaatccttcctttgtgtttagaattcttttacaacatgagaccctcggtcttcttatcctttagagaatt

SEQ ID NO: 199263 - DNA, 365 bp, Glycine max
aagactgtccgctgcagccttcatgatggcccgagttatgttgctgatcgttttctaacccggaatgggtttacgcagagactatggctgcataactagcctgatagatgccaaacgagatcgagggaggcctgggacacgctataagcgcactcaggcatatatactgacgatcggtgccgcaaggaagagcgaaagacgccgctcgcggctgagacaagaaggggaatgagacgcagcctgccacatgagtaagagctacacaagcgcgggttatggggactaatggcatgtctgcgacatatacgaggatgactatacaagtctgcgggatttggtatgaccatgccctcctgattccgact

SEQ ID NO: 199264 - DNA, 363 bp, Glycine max
gaatcaagagaggactgtatcaagataagtgtgaacaggattttctgaaaactgagtagcacatggattttccacaaaacatgtttaccaaagagttcttactctctgggaatcgattaccacattggtgtaatcgattaccagtaaccaaatgcttttgaaaaagttatcattttgaatttacaacgttccaattaatttcaaaaatctataatcgattacaatgttttgctaatcggtcacatcctttcacataaaagccttgtgtaatcgattacactgatttggtaatcgattaccagtgaatgtgtctaaataaatcaaaagattaactctctcaaaagttgtgacctttcaattggt

SEQ ID NO: 199265 - DNA, 425 bp, Glycine max
  unsure (1)..(425): unsure at all n locations
tctactcctctntctctctcttcagattcattaacccctgtggaatgaggggtctctcttagctnttataggagccccttcactagggttaaggactttctagtcaattataaaatatgaattttactaaaaaaatttaggcatgattaacctgtgcaatttaagcaatttttgaagtgacaaaaataccacaagaagggagagttgaattgtgttttcacaaacttttgttctctttttttaaagaaagtgtattatgatataagttcagaaagatacaattcaaaatgaagaattgttctgagctctgataaaaatgaaagcagttccaaaaaaagagttttcatagttcaaaactctgttttaaaaagttgtttagttaaaaaatacttgataaaaatggtttagttctaagtgtgtttatc

SEQ ID NO: 199266 - DNA, 463 bp, Glycine max
  unsure (1)..(463): unsure at all n locations
agcttatnttagacatccaagcatccattgaatccactttgaaccaaaacccattctcctcatcatatatagcgagaactcccaagacaccgaatcatacgccttctcgtagtccaccttaaaaacgatgcacggtttttggcatcttttagcgtcttcaactacctcatttgcaatcatcacactatgaagcatgtgtttgccttctatgaaagctgactgtcattcattaataatgcaatgcataaccttcttcattctgttagtcaacaccttagcaagaatcttgtaggtacatcctatcagtgagataggcctgtagtcattcagcacttgagggtccattactttcgggattaaggctatgaaagatgcattcaagcccctcgggaagactccattgacatagaactcatcaaagaatctgagaaagttcggtttgatgacatcccaaaattgcttg

SEQ ID NO: 199267 - DNA, 449 bp, Glycine max
  unsure (1)..(449): unsure at all n locations
tgtctgtccgatgcagcagtaatgatggcccgagttatgttggggagcgtttacaaacccggaatgggtttaggcaaagacaatggcggcataactagcctgataaatgccaaaggaaatcgtgggaagtatgggttaggctataagcccactcaggcagatataaagaggagcgttgccggaaggaagagcggaagtcaaggctcgcggttgagacaagaaggtgaaggaaacccaccctgccacataagtaagagctttataagcgcgggttagggggacgaaggtcaagtcgtcgctatatacgaagatgacgttccgagtatgctggatntggtatgaccatgccctcctgatttccaactgggaaattggcgagtggaggaacgccccgacatttacgcgatgagcataatgtaaacctttacggttntaaaagctctatagtt

SEQ ID NO: 199268 - DNA, 457 bp, Glycine max
  unsure (1)..(457): unsure at all n locations
atccttaagtcaccgcggctgcaagctgcttgtaagcaaatgaacttttgttgctagggagacatttcacactaagtgaaatttctcttctggctagaattgtgcttagcgagccaactcgctaagcgaattattccctctggatggaattgtgcttagcgagccggtttagctgagtgaattttttcttctgggtggaattgcgcttagtgagccggtgtcgctaagcgaattgttccaatgtagatcaatcaaaatcaacataacctaacatccacaccaaacagttgcacaaggataattcacacaccactacaactaatggtagaatgaaaactattattatgggtgaactctatcaacggcagaaaattctcccaaccccctttttattctaatacacatgctctanaaaggtgcttcaatgactaaatggtttgttagtctggcatcattt

SEQ ID NO: 199269 - DNA, 464 bp, Glycine max
  unsure (1)..(464): unsure at all n locations
cggacctataatactaagcttaaatangctctganatcgngacgctacgctgagcgctctcctctcgcttagcgagagtaagtgaaattgggcttagcacctgatggaagcttgcttgcggggcttctatggaggctggatctttgagcttcaatggagtcctttaatggtgattttccaccatggagatgcagcgaaagacaaaggaaaagaggtgagaggaggcgccatccattaaggaataagccatggaagaaggagtttcaccaccaagatgagccttggataagaagcttggagaggatggttcaatggaggaaaagaaagagggagagaaagagggaaggtggagcacaaaattgaatgaagaaaaagggagagaaggtgaactttgagttgtgtctcacaagactctcattcatcaaagttacaacaagtgttacacantgttctatttatagact

SEQ ID NO: 199270 - DNA, 449 bp, Glycine max
  unsure (1)..(449): unsure at all n locations
agctntatgatcaattatttaaaaaacaattatgtatcatgctcaagtagccacttatactatctctgcaatacaaaaaaagttaaaaaaaagcattatattgtaaatgttcaatttaatgaaaagaaaacatatataacaagttactaaaaatgcaatgtttttcctcatcatacctcaaattcttcaaaccatattcatgccacgtttgggctattactattcatttctccataagtttcccaacacccttcaaatttcccttttattatctatggaattcaacatgtgggatgaataagaggatcaaacttatgaaaacaactttgaacaagttattatgtaacatcccaattttttatgtgagtgtaaaagacagagttattgctttgtatgcgatcgggtagtgtttttagactattagttttagacaataaaaaattaacttt

SEQ ID NO: 199271 - DNA, 482 bp, Glycine max
  unsure (1)..(482): unsure at all n locations
ntaactttttaaaacgntttcgggttccattcttgacactctttcgtgatttccttcactcagcaacaatgtttntgcttcactcaaacaatgttatggtttttgattgcggcacgccaagtagttatttgtgttaagcaaaagcataattgcgtacgggcccactagtaacgaacggctgtgattcaagcatatctttgatcaggatggcgatgttgacacatggcttcatcaattgcaaattaaaccgtcaaacaccgaaaggtatagtcacttccaatttgaatcaaataatcaaaaccacgaatttttcgctttgtcccattacttaattagattctccgcgtgctgtactattgcctgtacatgtgtacccgttttcattntcttgcttttatcatntaaattgttaatatatcttcgctgtaatcttttctttttggtacanaatatatcttcactgtaatatatagaatttaaat

SEQ ID NO: 199272 - DNA, 451 bp, Glycine max
  unsure (1)..(451): unsure at all n locations
agctntgagccaaaatcttgactcaccataatctcttgacccagggtgagaatgtcaatccttaccctcggaagcaaaaaagaaaagaaggaaaatttccaatcaaagagaaagcaaaatgcaatcaaagagaaagcaaaaagaaaagaaggaaaatttccattcaaagagaaagaaataagaaaagaaagaaaattcccaatcaaagaatgggagaaagtaaaaaaaggaagaagaagaaggaaagaaagctcctgatcaaggatcgaaagaaaacagaagaaatgtgcagaaaggtctttggaccggacaatatctgaacaatacagaattgtcaccaaatgaacgaanagaaggaaaggaaaccatgacctaaagtggttttctccctttaattgccaaccaagatattgtgtgctagtgactntttcgccccgcactaaaccaaaac

SEQ ID NO: 199273 - DNA, 457 bp, Glycine max
  unsure (1)..(457): unsure at all n locations
tcctagcggtttctaattatatgggccattaaatctatcatatgctgacaatggccgagaagtccgtggatctcctcgggggcggagtaggtgtccgccattgctttggccttggctagcaattggggaagttcttgactcccgttcaaggtaagagcaaattggtccatccacatggttgcctcttggtgtaacgagtcgatcacccttcctctagcctccttttccgcgtacacttgggcatactcgtccgccaccctatgctcgtgggctgtggcaagacttagttcctcttggtacttgctgatgatggctaacatgttggtctctgtctcgcataaatgttgagacaaacttctcttggacctcgagcaagccttcaactcatccttcaagatcaaactgtctacccgcgataggtcccttntcttcctttgaagttaagctcggtgtacta

SEQ ID NO: 199274 - DNA, 268 bp, Glycine max
  unsure (1)..(268): unsure at all n locations
aaaccaaaagcgagaaaacaggccaacaacancagcaacagggggaataaaaagcgacgaaacgcgaacaaacgaacacaaaaaaacaaccactccacaaaccaaaccagtgccagggggccaccaaagcagggatggcaaagggaaaaaaacgaggggcccccgaccacagaacagccgaacacaagaaaaccagaaggagcggacagaacaggaacgaacacacaaggaacaaacaccccgacggaaaggcaaaaaacaacggaaa

SEQ ID NO: 199275 - DNA, 365 bp, Glycine max
aacatctacgtgaaaaagacgactatgaagcaccgctaccagctggacctattacacaaccaacagaaacatactggtgcctcttacatggggaagtataaatgaagatcgactatagaatgctgcgttatgttaccggaaaaacaggcagacctctagccagttatggtacccaatctgggctacgagactacgagagaaaacgcaacagacattatacagccaacactcctgaaacttgctctctcttatgttgcaatttactaaaagataataactgtagtctatcacaatagtcgaaacgcaaagacacacgcgcatacaacatagtgcgtagaaaacggaatagacagctcatatgaaga

SEQ ID NO: 199276 - DNA, 178 bp, Glycine max
  unsure (1)..(178): unsure at all n locations
ctcagcttgctgtcggggcagcagaacgatggtgcgtgttatgtctggttgcggttacnaacccggaatgggcttaggccaagacaatggctgcgtaactagcctgatactatgccgcacgacatcgtgtgaatattgggctaggctctaatctcactcaagcggagatcaagaggag

SEQ ID NO: 199277 - DNA, 399 bp, Glycine max
ctcactcctcatcttgctgaagcatgagatgaatagcgggaggtattacttgtgttagaagcattagagtggatcgcctctatctcattgagcatgattgtactatgaccgtgagggattcgggaacgacccgtctgtgtaatatgacattctcactatctgagtgtagccgtgactctaaagcgtgagatcctattttctaacagctgcatgcttgtgaatggcatccgctagacccattccatgacccttgtcccaaatgatcaaatggtcctatgacacatacaccactctgattgaccacgagtcttgagcccttgatgacttgtgagactatactttctatgcttgatgacaatcaaatctgtaggatccgtggagcttgatagactgcctata

SEQ ID NO: 199278 - DNA, 422 bp, Glycine max
agcttgtttataggggggagagaattatttttttctaacggccgcgtaggatggaccatatcttccggttctacctactatagatatggatcacgcacaggtcaacatatcttttcattaaagattaaaaataaatcttaacaaaattcagttgttaataattaattaaaagttttatttcttttaatcccaatcatctctcttccattttttgcggaagatggagttgctagaatgcacatgcactctgaaatcatatatctgtggaaaaagataacagacctggaagggagggacacatggactgatgctgaagaaaatgataaaacagaagtattagtataaataaaaagacaagttaatattgactgataatccgtcttgcccctataaaccccctttttgtgcccgcgcacacttac

SEQ ID NO: 199279 - DNA, 428 bp, Glycine max
ttataaacgcgactatttaatcagatatttccatttattatatttcttctcatttctctactagtatgtcatataccccatagatgtctccagcacctatttgtactgactcaaatatctcagtttctctccacatctccttaaatttgggtacagcggtatttatgtccatttctttatatcaagtttatttattaaaacccagcaccaccaacaatagccttatcaatggatgaagctttattccttggatgaagacttccatattcattgtaatcaatggtccactagcttgagggaggagatgtcttatggggtgttccttttcgcttatctaatgtatcatgaaacttcagatgggttatgcaatttgcctcgtcatatatcctatctgcagacactagactcgatacacttaataataatct

SEQ ID NO: 199280 - DNA, 387 bp, Glycine max
agcttgaagtgagagagtgtggaatagttattcttcctactttaattcgtcgaccacagagtggtacctggaaatatgtcgcgggggtcaagacaccttggggacgtcaggtggggtgctatttcccaaaacgaagcttgaccaatcccggcccaacccgggcatattcagtcagtgaaaacctgtgacgtacctaaacaggcgagctcctggcagtcaaccgataaaagaacaaagaccacatagcatggaggcttgtgtggtggctggccagctatggattctgagtgatatatggaatatggcctctggtaatcgataaccaagggcgtgttatcgattacagggcttaaaaacgaagacaggaagtgaatatggtctctggta

SEQ ID NO: 199281 - DNA, 473 bp, Glycine max
ccacaacagaagcaaaaccacttaatgtctctttttcttccacattatccgtccagtaggttctaagctctccaacccctgaagcctgataaacagttgtccaattcaatatgctatcatctgaaactggctcattcctagaatcatcattattgtcctccatctctcccactaattacttgctacactcataaatgttagagtgcaattggatcaatttcatttctaagatcatgcctttatgtgagctgctggttatatttgacacaaatcaaatcatgcaaaaataatacatgaaatttgtaatatcaaataatttcccacttccttctaatatcctaagtgaaagatgtaatctattgacaaaatcatatcctaattctttaacatctcagatatgcactgtatgacgcaactttcttctatagcaatgaaaggatatttgaagagaaaacatcctaattgctatgtac

SEQ ID NO: 199282 - DNA, 440 bp, Glycine max
  unsure (1)..(440): unsure at all n locations
agctttatgagaaaggaggtcattcttcatattngaattngaatttcaacgttcaaaggcactggtaatcaattaccaaaatattgtaatcgattacagctttttgaaattaattggaacgttgtaaattcaatttgaaaactttttcaaaacaattttgctactggtaatcgattacaacaatctggtaatcgattacccgagagtaaaaactctttggtaaacatgttttgagaaaaatcatgtgatattcaattgttgagaaaaacttttcatacttatcttgattgagccttttcctgaatcatgaatcttgagccttgaatcttgatcttgattcttgagatcttgaaccttgaatcttgattctagactctaaactttcttcttgagtcttgaattctttctgattcttatcttgaactcttgaattgctcttg

SEQ ID NO: 199283 - DNA, 453 bp, Glycine max
  unsure (1)..(453): unsure at all n locations
actcacgcatcttataagctgagacagcgtatcaatacagggaagctgtgtgttattcagaacaagagagtttatctcttgtatcttagcgagagtgattctcctaaacacttgagtgattcaagaacaccctgactgtatcaaaggactgtcacaacctttgtgtgttgccctcgctggaaagagtgattctttccttccttggatgttcacccttgctctttcaaaccacaattccaaaagatccacctctggccagaactatctcgtggccataactcccatactacgcactcaaactaagtgattctcgagcctaaattgaatatcatgacgagaccttgtacctcgttatggaatcacctcatatagagccctgtagcttcangtattgccatttctatctntcgtgtcagccaccactaaacctacgtttaccgtcccattcatcca

SEQ ID NO: 199284 - DNA, 330 bp, Glycine max
  unsure (1)..(330): unsure at all n locations
ggccatacaacaacactcccatacgtggactgcatgcatacgtgctgctcctctcttcctatcactgtcgactnccagtcgaccttgaactatcaattcggtgtaacaaatgctctactcccaaacacgttcccatgtcatgcagctcgccggaatgcagcaaacatgaatcctccttacacccactatggggaatcacacctcccttttgtagggcctcaaagataaacctcccagaggtgccacatcccttaaaggtttagacccacgcgggctatcggactcaacggcataaaccaccgccatatgattttcctcgcggggaacatg

SEQ ID NO: 199285 - DNA, 382 bp, Glycine max
ctgcatcaacaagtaaatatcttattgtgaagttcttagagaattggccttgaccaaaagtgcgcattatgtccacgtagcctcaggtctatactctttcgcctgcaaagccaatgagtggaccgacgtgaggatggacagtgtcacgggagacctcgagtctctggaaagctttccagtataagatatcatgggagcttccctgttcaatgagaaccttggacaccatgaaatctgcaatgatgatggagacaaccatgtggtcgtcctggttgatggggtagtacccttgaattcctattcggatagagaatgatggagacttattggatgggcattgcaaattgattatatgtccaaatgggtgaaatggcatttggac

SEQ ID NO: 199286 - DNA, 424 bp, Glycine max
  unsure (1)..(424): unsure at all n locations
agcttagggatggaacacttacttgttggtgatgaacaaaagcgcataacggaatcaaaaaatgcgaanaatgatgacccaagggctgcaaactcgtcaatcccgtgggtatggcttttgaaaggggggaaaagaagtttttgaatgcaaaaacgtcccccctttcgtctttcttataatttggtgcaggggtggctcgcctaggcgagctcagctcgcccaggcgagctaacctgcatttttttttttgagaggaacattaaccatgtcccctccttccttatggtttagcgtcttgcttaacttgaacttacttaagttagagttacgcattgattacttatttttaaaacacaccaaaagtaaaagaaaactgcgaatacaaaggattcggggcttgcttgcagagacgttctccgcttgc

SEQ ID NO: 199287 - DNA, 483 bp, Glycine max
  unsure (1)..(483): unsure at all n locations
actcagcttcatataagctgaatcattttatcaataaagggaagttgtgttntattcagaaaattagagtttatctcttttatcttagtgagagtgattctcctaaattcttgagtgattcaagaacaccctggctgtatcaaaggactttcacaacctttgtgtgttgccctcgctggaaagagtgattctttccttcctttcatcttcacccttgttctttcaaaccacaattccaaaaaatccacctctgcccagaattatctcgtggccataactcccattntacgcactcaaattaagtgattcttgagcctaaattgaatttcaggacgagaccttntacctcgttttggaatcacctcatttggagccctgtagcttcagttattgccatttctatatttctgtccagccaccactaaacctacgtnttaccatcccattcatccatnttatgccaagaaccaccttattcagacc

SEQ ID NO: 199288 - DNA, 451 bp, Glycine max
  unsure (1)..(451): unsure at all n locations
ttaagtcacctgcggcatgcaagnctngaggattatggggtacccatcacatgtggtactagggggcggtcgggtgatggtgcacaacaagttttttcacatccacaaagcgcgcataaacccaccattccctgttggccaccttcaactgagctcacgtactcccacgtagcccatatcttcgtttctctcaacaccgggtccccatcaatcctcccaagctttcctcaacatccaggtaaaacaacattcaaaccgcacaaactatcacagccaagaaaacagggtaaaggcagaaaactctgcccaaacaccaaccaaaatcacagcttttctcacttaaagaacccagtaaccaattcttcgntcccgntcggtaactgttggattgactcgaaaattttactggaagtctctagtacataagcctacatattgaccgttgggatct

SEQ ID NO: 199289 - DNA, 431 bp, Glycine max
  unsure (1)..(431): unsure at all n locations
gcacanattctaaataattatatgaacactgtggtcaatttcaattatgatattaactctntaaattatatataaaaacctaaacagcaagaaaaagagaaaatacaaaatcaatatctctctctaaatttctcctttatttcaacaattcatattaattagaaaaagtactcgatttatagggttcacgctcaacacaatagcatatcaattccacaacaattggtctgtcaaacatatataattcattgtaataattataaggataaaatgaaaattacaaaaacaccccaaaactcattccaattgatatctctaaggatccctacacatattctcactaattcccaattgtgaatacctcttcccttacctctaagcggactcacgtgtcttcagccagcgatagcagcatctctagcgggtctctg

SEQ ID NO: 199290 - DNA, 415 bp, Glycine max
agcttgtctcaatggttatgcgagacatatacttacatgttagccatcatcaacaaataccaagaagaattaaatctagccacagcccacgagcacaaagtggtggacgagtatgcccgagtgtactcggaaaaggaggctagaggaagggtaattgactcgttacatcaagaggcaacaatgtggatggaccgatttgctcttactttgaacgggagtcaagaacttccccgattgttagccaaggccaaagcaatggcggacacctactccgccctcgaggagatccacgtacttctcagctattgccagcatatgatatacttaatggcccatatgattaagaaccgctaggaagtttgtattgtcactcaaaatctagactagttataactatctgaataacatgagttta

SEQ ID NO: 199291 - DNA, 456 bp, Glycine max
  unsure (1)..(456): unsure at all n locations
tcttagtttcagatgatgcagatgggtttgagctaccttatgctctcctctaangactatggcatcatttctggcgctaaactgctggaagttggaggccatcttttcaattaaatttctggcttcagcatgagtcatgtctccaagggctccaccactggcagcatctatcatacttctctccatattactgagtccttcataaaaatattggagaagaagctgttctgaaatctgatggtgagggcaactggcacatagtttcttaaatcgctcccagtactcatacaggctctctccactgagctgtctaatacctgagatatctntcctgatggctgtggtcctggaagcacggaaaatattttctagaatactctcttaggtcatcccagctcgtgatggaccttggagcaatgtatacaaccagtcctttgccacttcctttaatgaatg

SEQ ID NO: 199292 - DNA, 451 bp, Glycine max
  unsure (1)..(451): unsure at all n locations
agcttgttgaaatccatgttttttacatatgaaacagtatctcagaaacttatcctttnttacatagtgttctagagcaacaatactctgttttgtttataatgaaatctggaaccaattctaacactagcaagaaagctccaattctaggagctatggggaaatcttaatgctgtgcaagaaacaaggagggttcatgatgtagcataccgaatggagggattaacagaaaagttaaaactttggagaacttggtaccacatcagaaaaccaagactcgcacttgaggatgaggaagactggagagatgttagagcgcataatggcttcccccaacaggggtcccaaaacatctgcagggcattcagagggcaatgcagagcataatacaaatggggaaagaaggagaacccaagaagtgataagtgtaggggtcaatgaaaatccctta

SEQ ID NO: 199293 - DNA, 403 bp, Glycine max
tgcaccaacattcattagtccaatacacactcaacaaatagtcattatccatccgcaattccaatcattcatgctcaatatgatgcatgcacctgacctcaactctcatatgcaatgtggtaccatccccaaggaaatagcctaagcgtgtccacacaacactctcacttaggaaaactaggcagtaaatgtcgaggtcaccctgtcgtgcacaggaaactcccccccccctccacggtgatcagcctgagtcttaagggagttccaaactaagtgacatgccctcaagtacaagtattcctcctcatgagaaactacaagtacttactgacaaagtttatactatttccatgtcatatgaagtatgaaacatgggcaccatcaaatgcactgactgtggata

SEQ ID NO: 199294 - DNA, 406 bp, Glycine max
  unsure (1)..(406): unsure at all n locations
agcttatccccacaagagtgcagaacagttggcgagtctgcattgattataggaggctaaatcaggtaaccagaaaagatcactttcccttgcctttcattgatcaaatgcttgagcgcttggcaggtaagtctcagtactgttttcttgatggttttttttttggttatttacaaattcatattgctcctgaggatcaagaaaagaccatattcacctgtccctttggcacttttgcctatagaaggatgccctttggcctatgcaacgcccctggtaccttcctgcggtgtatgcttagcattttcagtgattttttagaaagctgcctagaggtgtttatggatgattctactgtttatggatcctcttttgatgcatgtttggacaattntggagagttctt

SEQ ID NO: 199295 - DNA, 507 bp, Glycine max
  unsure (1)..(507): unsure at all n locations
tataatctaagcttacacaagtntgtatggcttgaaacaagcaccgaggcattggtacaagaagtttaatgagtttatgagcaactcaggattcaaaagatgtgacatggaccattgctgctatgttaaaaaatatactaatagttatgttatccttgttgtgtatgttgatgacatgttgattgcaggatctagtatggcagaaattaacaagttgaagcagcagttggcagaaaactttgaaatgaaggatcttggtccagctaaacaaatccttggtatgagaattcttagaaacagatcagaaggaattttgaagctgtctcacgagaaatatatacacaagttgcttgacaggttntaccttggagattctaagaccaggaatacccctttgggatctcatttgaagttttcaaagaagcaatctttgcagacagatgaagaaaaatgttacatgtcaagagtaccatatgcatcagcagttgggagtttgatgtatgctat

SEQ ID NO: 199296 - DNA, 380 bp, Glycine max
agcttacaaatgctgtgttaagttcttgctccttaaaaaaaataaaatctggacaagatcagataatattggattcactaaaatctggatgaaataaaatctagatgaaataaaatctggataagataagatttgatacaataaaattgtctgctctcttcaagtccaagcctaattctggattcaagtccaattgctcgtaattctcctgacattaaattaaaaatacaaaattagtcaagtaggcccaaatgataaaattgcatagttcatttgacaattaaggataattagcaattaaaatggcgacaaaaagggttaagacataggagacaatactgacacatcaaatccccccacacttatccttttgcactcct

SEQ ID NO: 199297 - DNA, 281 bp, Glycine max
aagagaagatgagcatagttgtgatttgacatgagtgtcgtgaatgatacactgataaaccagacacctgtgtgcttgaggggaccaccatacccgtgaggaatgaaccatggtggatccacatagatgctcgtcatacttgctaacccatttgatctcccaggccattattgcatgcctctctcctgatatcatgattatggtgaactcgagagttggctatcacactcgctgatatggtgacccatgatcctatgtagagtggcaggaacatacctaac

SEQ ID NO: 199298 - DNA, 473 bp, Glycine max
gatcttaagcacctgggctgcaagcttgaaagtgtgtttttcaccttctcgctaagccaatccgctggcttagcgagtgtctgctaagcgcaacactcattggctaagcgcaaggaagaatctggaagaagatgagttgtgcaggttcgctaagtgcaccgcttcatctcactaagtgcaccacttcactccatccgctaagtgagaaaggcacacgctaagccgaaattcactaatgtgcattaagcggtccagaattgtgctaagcgaatgagcacgaacaaggccacctatttaagcctaaaattagattctgtgaagagagtttgggctgggattcacagctttgcatgtctagagattctagagagagaaaggtccaagtttcacagaagtttgagagattttgatatgtgaagatctgcagagactagatcttgaagcaggagtcgttctaagagctcgagatgagt

SEQ ID NO: 199299 - DNA, 479 bp, Glycine max
  unsure (1)..(479): unsure at all n locations
tcgagtgctaatcttgctggaaatactgattgtattgngtttgangatgcccatacctcttttcctgaactatttgttccccttcaagaagaggattttgaggggaggggtatagtagaattttatatgcagctaggaaatccattgcagccctaaaaaaagtaccagaaatttgtatcttatattttggattgaacatattccattaggaaagggctttatgataaatcttgcgggatatgttggagttgccaacgtattggcggtgtttntatgttggccattggtgatgtaattacgcaacaagataaactgctgaaggtttatttgtagggactgatactgactntacaaaggatggattatacctaatactgccataataatttaattaattcgagtcataataatttaaatattgggatggattctaagagaatatttgtgtagtaaataatctattaataagaactcttatt

SEQ ID NO: 199300 - DNA, 408 bp, Glycine max
  unsure (1)..(408): unsure at all n locations
agctnggtgaaagtagaatttagcagatttaggataatgtcaaaagactacaccatatgctgccccccccccccccccccacacacacacaanacataatttaaaaattaactacttttattcgatttatgttttgaagcctgtaattttcttcatttttaaatagagaaaagtaaatatcgcgcccaagtaatggggactgactgaaatgcttgtgaatttcaatgtataataaacagcacttattgcttatttataatattcattcaaacatctagcaagtgagtcgtctggattctgtaaagtagctcatgggaactagtttagtgttgctctgctgaaaggaaagtgaaacattaactttccttgcttgttataagtagcattaaaaaactcatgttctctctt

SEQ ID NO: 199301 - DNA, 482 bp, Glycine max
  unsure (1)..(482): unsure at all n locations
ntcanatagttntatgtggttgaggggacagtgtggagttatgtncaaagatttcttgggaaatgtgtagagattataggagctatctgtgttaggactttgcagagatttgtgattcatggggaatactagttgtgtaagttttttggctagatgggctggggtttattgccttgtatttttgggtttactacttgtcatgtcacgggctaaagcatgagggaaagtgttaagatatttatattagtattaggttattagtcttatgcagagcacaaaaaaaaaaaaaaggttattagtcttatttttattgagctcacgcttgtactaatagtattggtgcatgacctaattagtataaataagaagtttagatttgggtgctataacctattacatatatcaatcatatattgcgtttattataggtatccaccattttctcttcttatatactaaccctctacctgaaattcttaata

SEQ ID NO: 199302 - DNA, 435 bp, Glycine max
agcttgtagactggctagacatgtttcatgtcagggttgggtttggttcaaggataaaagggatgccccacattatttccatgacacaaatgcaaaaatgatgatttggaaattttatgcaaaactggtcatgcatgcacctatgtggacgctcaagtgtcaaatttttatggtcatgtgatgctagggctcaggattcatttcctctattttaaatcaacccaatgtttccaaaatatgttcttttatcaatttgtgcattcatccgagtccatttcgggcgtccggggaaatttcacagcattcacccttcaggtgtagacacattttccaaaaattgggtatgatcaatgaatttttttcacagaaaaagttggaaatcatctcttttcaaagcatgtctgttttcagctaacaacttattttctttttctc

SEQ ID NO: 199303 - DNA, 456 bp, Glycine max
  unsure (1)..(456): unsure at all n locations
ccctctagccttaggttgttccatgttgctgctccccttatctttaacagtaacaagcacatntccattcacaggtttagcgacatcaacatcatcacttgagccctcactttcaatgtttccattatccagtaatatcatgcctcttttatttggacattgagaagcaatatgaccaactccttgatacctgaaacatttgatatcatgggatctagaagatgaattaatttccattgtacctttaggtgcagcaaatgaaattttggacttagcttcatcttttgactttgtcatagattttttgttttgccaatttgacttccatgaataagtggaatcaaatttggaagtactcttagctntcaattgcctctccacttgaatagatttatgcagcaagtcctctatcttcacataatgatgcaattctaccacattagttatctcctcctt

SEQ ID NO: 199304 - DNA, 446 bp, Glycine max
  unsure (1)..(446): unsure at all n locations
agcttggccaaggcattatatatngagaaacaggcccagcaccaacatggacaacatttacgaaaacctagcaatatataatgtgtaagcaacaaatagtaaatgttagtacaatgaaattttaaagttcataaacttatagtatgtcggtgtcacaaagctggttcacatgtatgccacacccggtaataattaaaagcaaacaattccgggtcatcaaagatatatagtgaatatgatgaacaggaactgactagtgattacattattttttttaatactgatcactcaagcaaatactctttcacatgtcatttgcatcagaccaccaaataaacctttattaaatggattactcaaaggcattcacaactgctacatcagtaatcgaacatttcttgtaaataaaagcatttcacttgaaaccttaatcagatagatgcatg

SEQ ID NO: 199305 - DNA, 70 bp, Glycine max
gactaaaatatttcacataaataattaatatgattttagaaagattaattgtaactacattcgtatttta

SEQ ID NO: 199306 - DNA, 419 bp, Glycine max
agcttattgtaatggagttcacactttttataacacaatgattgatatttaaagagtctctgctttaatcgattatcaagagatatatcgattacttctctcttaaataatgcttcagaagtgatcaagaacactttaatcgattacattgttcttgaaagttttccagtttttgggagaaacactttaatctattgaaatgataattaatcgattacttctttgaaataatcgattacattttatatttaataaattacaggagtttattaccgctttctctataaattgtccccttgcgttcttacttctaacaacttgtgaatgagctagaattttgagctcatatttgtaaaacaaagaacgaaagaaaaagtgctctgatacagtgtgcctcacaccttcttatctttgattat

SEQ ID NO: 199307 - DNA, 463 bp, Glycine max
  unsure (1)..(463): unsure at all n locations
ctttgtccacaagaaaatcatgtgaatccatttaaaggtccaacaccttaacggcctttttttttttacttttatcggttaaagcgaaccatttaaaagtctaaaatcaacaccccgcataaatttcttgttgttcaaagaactacgtaggtctgagttcctcgtcgtaattgaggatacataggagcaaaagccccgcttttgtcgaccccaaaaagataaaaacataaaaaagggaaaataaaataaacttgaaatcatgattttgcacatttgattaaaggttgtcatcccttgtgacggacgtgtggggtgctaataccttccccgtgtgtaaacaactcccgaacctcttattcttaaaatntgtagacactttggtgtgtctaacatgttccttagataaacattggtggagactccgcgcgtttcctttcttggaagatgctttcatgagcctcac

SEQ ID NO: 199308 - DNA, 453 bp, Glycine max
agcttggacctttcatgcaagttctacctttatgtacgagactcattaatcaaggtccgtttattccatatccgtgtatttaaggattttgctatgaattttccactcttattttttcattcattttaactgatcttcattgtttcatttgaattaggccaagtcataacataaacttagttttctggttacatggtagtttttgacagctctttctcttcagaggttttaaattgtggcagcaggttcgtcatatttgggacaaatgcaggttgatgcatccacaattgtggttgcagaaactctaaaaaccttgaagttgcggttctaatatgggtcgtggaccgttttctaaaacattatattaatcttctttcacatgcacagaatggtcaatttctgaccttctcaccggcctgaaccatctaatggtaaatcaatcattgttcttaa

SEQ ID NO: 199309 - DNA, 448 bp, Glycine max
  unsure (1)..(448): unsure at all n locations
agctngcatgcattggatatgaccaccattgtttattgcttgctcctccatgaactcagattcctccaataagaacacattatccagaagtggatctcctatttgatggtgttcctgcctagatagcatcagagtatcaagtgattttggcatttgagagattttgcaattttatctttacttgtagcgaagtcatggacaaaatgtgcaaccaaagatacggagaaacatggtagaaatcttatacaagaaagagtatggaacctgatcgtgaagtgtgattgatcaaataacatgatgtgagaagtagaaacgacggggaactttatggtgaagaagggtatgagtggtttcaacctagtatttattccttcttttgacaacaccattttgttggtggtgtgtacaagatgtttgattaataataccctgtaagtacaaaagactg

SEQ ID NO: 199310 - DNA, 477 bp, Glycine max
  unsure (1)..(477): unsure at all n locations
ctgtccccacaactgggcttcaatcagaagactctattattgttaatatatccattatcaagttgttcataggggcattgtttctccactcaatttgtgttcactgttcagcataagcatgtttgttttatggcccataacaccggacaacgccatgcatgaagcattatgcaaaataatgagtgaataaacattttggtctctgtctttgtagtcattttgtaaattagtctttatcctgttaaaatataaataataatctctatctttnttgcataagtgttgcaaaatgattcttgccgttaaatttgaaagtaacgttgttagtgaggtgtattgttgacaatcttaatgccacgtacactatccaactatgtgtcctcttctctctctcttgtcactctctcttcttcatctttctcaaccatccatggntgacttgttcttctcactcataaaacgagtccatgaatatgt

SEQ ID NO: 199311 - DNA, 361 bp, Glycine max
  unsure (1)..(361): unsure at all n locations
agctnttcgattcattctatgtacccgtagtgttccacattatgttncgcgcatttttattctcgttttgtttactttttataccccctcttgacgtgcttaagccattttacttaagtcatttctcgcttaactaaaaaaataaaataaatttccaccgaacgtttgaattgtattatccattaacttcggttaaaatgaattccgaccattcggtcgtgccgtaaccacgttggaaatcaaaaaagagggtaaaaataatataataataaaaaaaacatcttttagtaaaataaagcggaaaatcaaatcggatgtttcctctttgggaattctcattcttaatcgaattgataataac

SEQ ID NO: 199312 - DNA, 438 bp, Glycine max
  unsure (1)..(438): unsure at all n locations
aaatgttggtttcaccttcttgctaagccaatctgttggcttatcggatgctcgctaagcgcaacactcctgngctaagtgcgaggaagaatccagaagaagatgagttgtatagatttgctaagggcaccgcttcagttcattcgctaagtgagaaaggcgcgttaagccaaaaatcactaacatgcgttaagcagtccatacgtgcgctaagcacacgagcacaaacaaggccacctatttaagcctgaaatcagattttgtgaagaaagtttggactgggatttagagctttgcatgtctagggtttctagagagagaaaggtccaagttccagagagtttttagagattttgctgtgtgaagatctgtagagaccanagctcgaagcaggagtcggtttgagagcttgagattaatntgtgagtggttgtgaga

SEQ ID NO: 199313 - DNA, 422 bp, Glycine max
agctttccaaaatgggcttgcttctgttttggtgtttccagaaaacctttgtctgaaatggtcattctgaaagccatgaaaatcgttctggaaagctcgttcaggaaatatgtccaaacgtgacacattgcgacctacctagcatggaaagttggaggacgagaggtattcctgtgctagaacctctggcgtggagagttggaagaagacttgagttggagaagaatagttggtgaggaggagttggagaagaaaaaaagaactggaaaactgggtgccttgtgggaagaatagaagaatgaacgaaaaggtgtgtttgtgttgcgaaagaaaaaaaaggaagaaagggtaggttggggttttttaaaacaatgggaggtgtcggatgtgattagggaggtgtaggatataaatccctaatt

SEQ ID NO: 199314 - DNA, 400 bp, Glycine max
  unsure (1)..(400): unsure at all n locations
atttcttggatgatgctttggtgtttgtgctaaangnggngttcatcattggaagtgcggtagacaagctttgtgtttgacttaaggatggcctttgtggataattgggtggtaggtaaggacaacggttgttattggctgagtaatgacattgttgggttggtgggaaacttagccgtataggaatggcagtcgtagcatgggtttctccctcattctcaccctcttcatttgccccaatttttgcatttatcaaagcatgatgatcagatttgcctcttttcagacccactttgatcatttcgccagcgaagaccaaattcgcaaagcttgaaggtgtgtaacccaccacttttcataataaaacacttggaatgtgtctactatcattgttgtcatt

SEQ ID NO: 199315 - DNA, 455 bp, Glycine max
  unsure (1)..(455): unsure at all n locations
gaccgggatccttaagcacctgagctgcagctaagcagaaaggggatttttcattgagattgngggttagctggctctgaattgacctgcacaggtgtgggctcaggcggagcagcctcgttgggtctcaccaatggaagttgagctttaggccaggctactttctcaagaaaatgcttcatagatatgattggcctattgtgagccaactcttgcaagctgtgcatgataataaactgtcctcaaaataagctttgtagcataggaactaaagttagtgagctttggacatcctatcctacaattactgacggaggagctggagtggatggccaagggatgtcctccgttctagctcttttcttgattccatctataactaanaagaactcaaaattccttagaccaaaattgttcaatgtaaacaacaacaataaaggcgcttagcgggatat

SEQ ID NO: 199316 - DNA, 429 bp, Glycine max
  unsure (1)..(429): unsure at all n locations
atgtcacttaacaggctcccaactntagacaatctcaaacacaagaatataattgatcaaggtgatgcgttgtgtcgctttttccatatggaggaggagtcgctgattcatgttatgttcattgtccccttatctgagtgtgtacaatgtaacgacccgcctcattgctatgacatcaccactctaaaccgtgagaaatttcaaattttaaatgaaaactcttgtaatttgcttataaaaaacaagaaaagtaaattttccttctttccttgatatacattcaccaaacaacgcaccaatacttaagtggatacatatatattagtatagtaactcagtacacatcattcacataatggagataaacttgtcatacataaattcaaactgngattacatcttaantcaacaaagaatatggaaccacta

SEQ ID NO: 199317 - DNA, 400 bp, Glycine max
tcgacgaataataatagggttgtctatgacatacatgggttttttactaagaagaacaaagagtaccaagagaagctaccccttgttgtgctcaaggtagtggaaattatttactctaaagccaactccgaggtaaccttccttctatgtttcttgcttacttgcttgtgaactcaactattatattttattgtttggaaaacgaaaaaggaaaataaaaatgacttgaggttattttatttcttgaggaggttgaaatagaaatatcacgagcattataaaaaacttttttagtttctaatagataataaatattgtttttggggtaggctgaatacatgtttcaatatcatcttacaaatatattgatttgttaagcagtgaacaatgttgttgtaat

SEQ ID NO: 199318 - DNA, 308 bp, Glycine max
tgatattccgagctctgtggatttggtacgaccatgctctcctgatttccacctcgggaaatggcgagtggaggaactcctcggcatttacgctacacgtcatatgtaaacctttaccgcttaaaagctctatagttgggcctaggctttagaagttttattatgtaaaggctatgtgtctggtaaagatatattatacaaggatctttcttcatctgttggtgctctctacccattctcattcatttgcatgttgactacttttttgtgaacggcagattcgatgacaactcctccgaacgtactaa

SEQ ID NO: 199319 - DNA, 268 bp, Glycine max
  unsure (1)..(268): unsure at all n locations
agcttgccacccagctcgcccattcaagttcatctcgcccaggcgagcagggttgcttcctccataagcaacagccttctggaggaatcttctggagggcccaagtgggcctggttgctatttacacccccatttttactaagtacaccgcctgcctttntttgtgattcttttttcgtaaagttacggaaacttacgactttcgaacgatacttattttttttccgtaagttacggaacccttgggataacaaatcatccccttttt

SEQ ID NO: 199320 - DNA, 490 bp, Glycine max
  unsure (1)..(490): unsure at all n locations
taaagtatgcctgagtcattcatccctatgagatgttgtttatgtatnggcaatcagaatntccattccttggattacggngttgaaccaagctcaagcttttacaaaaaggttcatcaagtcaagttgaaatatggaagtaaccgtcctgcaaaattggggcaaaagatgaatcgagtcacatcactgcttcgtctactgccaaacatatttaggattgttgatgtccttgttacttccagtatcaccttgacaaagatgtcatggaccatgttgaatatctaaattgattcaaccccatatcctgcgtaaaaattcgcaatacttcgactgtacatcattcgcatgcatccatgcttttcattggttgcattgctcattgcattctttccttgaaaaagtaaatataataaagtataaattgaactcatcattgttatcacaaataagaaaaaagaaacatgccttacggcgttctcaccgaacttgt

SEQ ID NO: 199321 - DNA, 180 bp, Glycine max
agcttgtaattgacttgatcgatatgcttttcgccaatattcccctccccacaatttccaacctattcgattgcatatggatacatggatctctgtctgcattatgaactaatcatctttcatacgccacacaaaaatagaaaacagtatctaacgctatattaggtatacttttttaaa

SEQ ID NO: 199322 - DNA, 252 bp, Glycine max
aaaccaccaaagacggaggcacaggggggaatggtaacctaaagacacatcttgaatggaattcttgatttacaacgggaactacggaccttaacaagctggggaaccaccaatcacggacgacgcaaactacagagcgtaaacgacgcaccaaaaccatcaatagaacggacacggacggccacattcgcacgcaaagtcaacaccaatatgggtatgggctgatatacgggttagacataatgacaactc

SEQ ID NO: 199323 - DNA, 441 bp, Glycine max
  unsure (1)..(441): unsure at all n locations
agctngtagactggctagacatgatacttgtcagggttnggntnggttcaaggataaaagggatgccccacattatttccatgacacaaatgcaaaaatgatgatttggaaattttatgcaaaactggtcatgcatgcacctatgtggacgctcaagtgtcaaatttttatggtcatgtgatgctagggctcaagattcatttcctctattttaaatcaacccaatgtttccaaaatatgttcttttatcaatttgtgcattcatccgagtccatttcgggcgtccggggaaatttcacagcattcacccttcaggtgtagacacattttccacaaattggttatgatcaatgaattttctttaaagaaaagttggacatcatctcttttcagaagcattgtcggttttcagctagaccacttaattttcttttttctctc

SEQ ID NO: 199324 - DNA, 442 bp, Glycine max
  unsure (1)..(442): unsure at all n locations
ttagccttaggttgttccatgttgctgctccccttatctttaacagtaacaagcacatttccattcacaggtttagcgacatcaacatcatcacttgagccctcactttcaatgtttccattatccagtaatatcatgcctcttttatttggacattgagaagcaatatgaccaactccttgatacctgaaacatttgatatcatgggatctagaagatgaattaatttccattttacctttaggtgcagcaaatgaatttttggacttagcttcatcttttgactttgtcatagattatttgttttgccaatttgacttccatgaataagtggaatcaaatttggaagtactcttagctctcaattgcctctccacttgaatagatntatgcagcaagtcctctatcttcacataatgatgcaattctaccacattagtta

SEQ ID NO: 199325 - DNA, 429 bp, Glycine max
agcttatggtgttcttttgaagctttgggattaacctcaagcaaacatatccaagcttcttatgccatacccaatgatgctcttttgataaagagtaagcatgacaccttttgattggacaaatcacagtgaagagttgtacttgttctagatgatacacatatccttgttaaaggtgagattgtatccactatcacataattgacttatgctcaacagattgtgcttcaatcccttaacaagtaaaaattatctatagaaagatatggagagatgcatactttacctacaccagttatcaaacctttctgattccctctgaaagtgaccaccccaccagacataggtcttagggattggaacatagactttttgcctgtcatgtgttgtgagcaaccactatccaaataccatgaatggtgttctttc

SEQ ID NO: 199326 - DNA, 387 bp, Glycine max
  unsure (1)..(387): unsure at all n locations
ctaatctataaatagaagcctgtgtgacactngtagtgactgtgatgaatgagagacttatgagatacacttcaaagttccacttctctcccctatttattccttcaatttcgtgctccccccttctctctttcttttcctccattaaagcattctcttcaagcttcttattcaaagcaattcttggtggtgaagctccttcttccttggcttattccctagtggatggtgcctcccctctcctcttctcctttgcctttcgctgcatcttcatggtgaaaaatcaccattgaaggacctcattggagctcaaagatccattctccatataagctccacaaggcagcctccatcaccttatgagtcacatgatactagactaacacc

SEQ ID NO: 199327 - DNA, 421 bp, Glycine max
  unsure (1)..(421): unsure at all n locations
agcttgtgatgttaaatattgctctaattaacctatgaacgnncttagagagaactgatatttcacaacctcactgagatctgatctaaagtttatcagatcctcccttccccccttcatcttgacatgcataggaggaaaatcggccacctaattttaaacactgataactaaatacaaaaatatgtttcatactgtaccttactactgagaaaaagcaattcctcggcatggtcattcttccatgaagtcacgtgagcaccgtacaattacacctgaaaatacaaacaaagaaatgaaacctaggcatgtggttcgctacttctaaaccgacgcaatagccgctaattctacaccaattttcaacgaaattccaaaattagagtaaagataatcaattccactgttaggaatatccttc

SEQ ID NO: 199328 - DNA, 387 bp, Glycine max
  unsure (1)..(387): unsure at all n locations
ctcacgcttcacaatactactaagagaatcgagacttgaactttgtttncgcgctctataaagaacatcaaatgtgagacataggctcattgattcaattctcttcattgcctatatactgacgatggcaataattatgtcaatcttaaatcacacattttgcatacttatgtgcattcaataaggcaattagtcttctcttgtatagtctagattgttcatacgctcttacactaaagtatgacaatcatcatccataagcatttaccaaagaaaatcagcatccataattatattataatatatggaatgtgtgtgtgtgtgtttcaattatctaataatgctgtgcaatagaatctgcgtctactaattttttattaattcaag

SEQ ID NO: 199329 - DNA, 430 bp, Glycine max
  unsure (1)..(430): unsure at all n locations
tcacctgagctgcaactgaataggagtgttgaaggtgaactcctgctttattgntgaccacagagtggtacctggagatatgtcgcgggggtcaggagaccttgggacgtcaagtggggtgctattgcccaaaaccaaacttgaccaatcccgacccaacccgggcatagtcggtcagtgagaacctgtgatgtacctaagcaggcgagctcctggcagtcaacagattaaaggaacaaagaccacaaagcaaggaggcttgtggtggctggccagctgtgaaacttgattgatatgtgaggtatggcctctggtaatcgattaccaaaggtgggtaatcgattacaaggcttaaaaatgaagacagggggctaacattggctctggtaatcgattaccaggggatgtaatcgattaccaggcttgaaaa

SEQ ID NO: 199330 - DNA, 423 bp, Glycine max
aagagaagcctgtgtcacacttgttgtaactttgatgaatgagagtcctgtgagacacaactcatagatcaacttctctccctttttcttccttcaatttcgtgcctcccactctctctttcaccccctctttcctttcttccattgaagcatcttctccaagccttttatccaaggctcaacttggcggtgaagcttcttcatccatggcttattccctagcggatggcgcctcctctcacctcttctcctgtgcctgtcgcttcatctccatggtggaaaatcaccatttaatgaccttattgaagctcaaagattcagccttcatagaagccctccatgcatgcgttcatcaagtggtaatcagagtccaagagccttcagtacgtgctccttaaacctccacgtatatctatttcttta

SEQ ID NO: 199331 - DNA, 432 bp, Glycine max
  unsure (1)..(432): unsure at all n locations
agcttaatgaatttgtcataaatagaactttgttcttaaatgattatctcctaataccttgcttagattctaggagagcatatggttcaaggaaaaatttaccccaaattttgggggagtaaagtcagttagaatgcaaagaaaaaggtaaagcatcagcacacacaacaaataagttgtatgttataaaaaaaaaagaaaagagaaaagaaaagaaaaaaaattgtgctgttacaataaggtcaaaagcaaattaaggggtaaagatagtgaaaaagcaacttgtatgacacaagatcatttggataagtctaggatttatgctctcttagaatctaaacctttgaatcctagaaaaaccaatgaatttctatagccaagcctcactacaagcctgagagagtccttctgaatttgttatacantttttac

SEQ ID NO: 199332 - DNA, 389 bp, Glycine max
  unsure (1)..(389): unsure at all n locations
gaccttanggcaaccttgaacgcgtgcacgttatcattttgtctactcgngaccaggtcgtatactctctctagagcataagctcattgttactgccccacagagcccctaggaatttgacgcggccgagtacttccctactagccctttcggtctcttgttccaaggcacttggggtagctacatttacatctatgagctccgcattctcctttccgatcttaagagctgctgattcgaacctttctttgactgtgtgggctagctgaagttctgccctaagggcctgcacctcttcattttacttcggttgcctaacttcctcccacttagtggatctcaaactcgggagccaatctaaaccttgcatgtgggctggtaaccactta

SEQ ID NO: 199333 - DNA, 397 bp, Glycine max
  unsure (1)..(397): unsure at all n locations
agcttatcatccttcctgagtactcatttcatatctgangttacttcaataggtgctcttttcaaaacttggctatttttaatatgtgtcaccataatcatccttatgctttaacttataaagattattattcttgttcccaagggttgtcatatttaaaacactcaaggtgttgggcctcacactttgcatgacaataaaaacccaactaatgggtactcccctttgctcgataaggaaacactctttctatgggtccagtttgatttcttccactgggaaatgggacggacccgatttcccccctctcccctctatttttaaaattttatattgaagcttttattctttttccctcttcccgaaggaataggtacatttcctttttctttaccat

SEQ ID NO: 199334 - DNA, 425 bp, Glycine max
ccttctcgctaagccaatcttatggttttcgagcgtccgctaaatgcagcactcatgggctaagcgcgaggaacactctggaagaagatgagctatataggttcgctaagcgcaccgcttcatctcactaagtgcaccgctgtacttcatccgctaagcgagaaaggcatgtgctaagccaaaattcactaatgtgcgctaagcggtccataattgcgctaagtgcacgagcacgaacaatgccacctatttaagcctgaaatcacatcttagagagagagagtttggactgagattcataagcttgcatgtctagagaatctagagagagaaaggtccaagttccatagagttctgagatatgttgttgtgtgaagatctgcacagactatagcttgatgcacgagccgcgttgagagcttgag

SEQ ID NO: 199335 - DNA, 442 bp, Glycine max
  unsure (1)..(442): unsure at all n locations
agctntaggatcaaactctgttctctttttctctcaatggtncttcattcttcttcttcttctttttacttatgttcatccttttcttgcacaaatttcgtggctcttccattgatgataatcgnggaagactaaacactcaatcaatccaaggatccagtccaagcaaggctaaatttgagttctagtttagtatttctaatttgtgtgaatgttcatttttttcttctaccctatttttgattttcatgattatgaatatccttaggattgaaaacaaattaatttagggattcttttcctaatttcaactttaatcatagattgtgtggatgatattccaaccctaattgcaatctcaatggaattagagattaattcgacaaaacaactttaatgacattgattgaactctcacaacatgatcattctctgcaaaact

SEQ ID NO: 199336 - DNA, 500 bp, Glycine max
  unsure (1)..(500): unsure at all n locations
ttaacgctatgcgcatacttcttcacgaacgttcacttgcacaagtcttttttttttctaagagaaatgcacccatatacaatcaaggcaccttcgttacctagattatctacatgtacttccaaggtgtatttgttaccgacatcacacacatttcctttgctaaattcacatacatgcatactctaagcactttggctatcaaaaattgcatacgtgcacatcttggtatttctaatacctatacatacacaaacttcatgatgaatcttgactatctacacaataaggtgctacatttcatgcccttttttttttcaagtgtttttttttttttactacctaaagccgcatgtgaattcaagtatattgtcttttgctcactaaaattgtattcaaatcaaaaggtatttttgctatgtatnttctgtacataacgtgcaacatatttatagatttttgtgagacattttgactaccaacaattatatgtacataca

SEQ ID NO: 199337 - DNA, 206 bp, Glycine max
acatcaccctcaagagtgcgatcgagaatagcatggctgacattgagctgtagaagaggccaggtgttttaaatagcatgagaaaagatctgcctcgtggtcacgaacagttatcacccctgtttgtacgttgcctcgtgactacatgatccagaccaaatagtgtgcaggagcaacttgaggggacgagagtaatataatgcggg

SEQ ID NO: 199338 - DNA, 280 bp, Glycine max
cgtactactacaaaatatcgtcggggagatgacacctttatcccagtatgaggcgcgtcaaatcccatcctcaatagcattaacatcaggcatattactccatcaaacatggagttctacacctcgcacggaacactactgcggaaaaaaaaagaaatggacagctcaataacactttcaaagatgagactgaaccttcgttgtagccaacatcgtggaaagtcaaaactctcaacaatagttcgaaaacatcatctaaaaaaaagcagtatgcaaagac

SEQ ID NO: 199339 - DNA, 381 bp, Glycine max
actggtaattcattaccaaaacattggaatcgattacaaccttttgaaaatatttggaacattgtaatttatttgaaacttttaaactcatttgctactggtaatcgataacaaaaatatggtaatcgattaccaaaaagtaaaaactctctggtaaaggttttgtcatacactcatgtgctattcaaagctttcaaaaaacgggttaatacttatcttgattgagtcttttcttcattcttgaatcttgagtcttgaatcttgatcttggatctctgagatcttgaatcttggaatcttgaatgttgattgtagactttcttcttgagtcttgaattcttctagattcttgaactcttgacttgaccttgaaccacttga

SEQ ID NO: 199340 - DNA, 245 bp, Glycine max
gaaaatgcacgtcgaggcgcttccgtaacgcttgcctgatgtctccgtgggtgctatctcgaagattgtcaaacggtcttccattggtgttggtctgaattcactcttcaacaggtatgttcccgtaattcaacctttctattcattctatgtacccctagtggaccccactcggttctcgtgcttttattttcattgtattgacctccggggctcccctttgacgtgctttaggcatctatgta

SEQ ID NO: 199341 - DNA, 425 bp, Glycine max
  unsure (1)..(425): unsure at all n locations
agcttcttagttgcagatgaggctgatttgtttgaanctacctcatgcactcctctaatgactatggcattatttctggcactaaactgctgggagatggaggccatcttctcaataaaatttctggcttcaccaggagtcatgtctccaagggctccaccactggcagcatctatcatacttctctccatattactgagtccttcataaaaatattggagaagaagctgcttataaatctgatggtgggggcaactggcccataatttcttaaatctctcccagaactcatacaggctctctccactgagttgcctaatacctgagatattcttcctgatggctcgggtcctggaagcacggaaaatttttctaagaatactcttcttaggcatccaactcggatgaccttgagcaggaataca

SEQ ID NO: 199342 - DNA, 430 bp, Glycine max
  unsure (1)..(430): unsure at all n locations
agctntgaccaaattcaaacgacattatctctttactcggatgtctgattgagtcctgtaatatatcgagacgcccgaaatggaataccgaagctctgagcaaatttaaacgacaataacctttttactcggaggtctgattgagtcccgtaatatatcgagatgctcgaaattgaatgttgaagctttgatcaaattcaaacgacaataaatttttactcggatgactgattgagtcccgtaatatatcgagacgctcgaaattgaataccgaatccctgagcaaatttaaacgagaataactttttactcggatgtctgattgagtcccgtaatatatcgagacgctcgaaattgaataccgaagctctgagcatattcaaacgacattaactttttactcggatgtctgattgagtcccgtaatata

SEQ ID NO: 199343 - DNA, 418 bp, Glycine max
agctttgatgcaacatttggagaggttattgaaacaacaagatgatgcgctccatgagaggttggatcaaatggagaatagagatcataatgaagaagaaaggaggagaagagggaatgatggtgttcctaaacaaaaccgaattgatggtattaaactcaacattcctccatttaaaggaaagaatgatccggaggcctacttggagtgggagatgaaaatagagcatgttttctcatgcaacaactatgaggaggaccacaaggtgaagcttgccgccacggagttttccgactatgctcttgtgtggtggaacaagctacataaggagagagcaagaaatgaagagccaatggttgatacatggacagagatgaaaaagatcatgaggaagccggttgtgccggctagttactca

SEQ ID NO: 199344 - DNA, 439 bp, Glycine max
agcttaggaacccaagctcttatcttcaatgcaaggaaacatacttatgcctaagaacctaacttttggttttggaagtatgaaggcatgaaaattaggacttgcttgtgagagtttttactcgaatttgggctgccccatgaggggtaatttgcacctaggtagtgtggaaaatactttacaatggtatgtaaatatgtgtgtaaatataggtggcatggaaaacacctttcaatggtgtgtatatatgtgaacatatggcatgaaattccttgcaaagtgtgaatgagtatcttcctaaatgaatagagggcgcttcctaaatgaatgtatgatggcatggaattccctttttaaatgcaagtatgtgcatgacgtaattagctctccaatgtgcatattaataaatgtgagtgaaacaatgaaagtcttatcatat

SEQ ID NO: 199345 - DNA, 429 bp, Glycine max
  unsure (1)..(429): unsure at all n locations
ctgtatgggtcgaaggcgacccggtgctgataggaacttttattttggctacctaagagtgcctgagctcatttgaatgtgggcaactgacgatggagtgttcatgttagattagtggaagtgggatagttgaattgctccattcctcgatctccacccagtaccacatatgactggagccccataatccaacgcgcttgatgtgagaaagcgcggaagagacagtctttctactcttgtttgttgaccacacattggaacctggagatatgtcaggggggtcacgagaccttggtgacataacgtggtgtgctatggcccaaaaccaagcctgaccaatcccgactcaacccgggcataattgatacatctctgaaatgtctacncggaattatagaaacgacgttattgatgactattatatactat

SEQ ID NO: 199346 - DNA, 352 bp, Glycine max
agcttggcgttgagactgatcatccctggaaacaagagattcacaatttgcagtaaaagatgaagcataatgatcattttcaggattaataggctgggcacaatgctcaatctttatacgctttatagatgggtgcaagtcctctgaagtttcaacaactaagggaggcttcgagatcaatctaggcgatgcacctacaatattgtaaggtttaaaggatccattcactgcagttggcaagcttgattcaacttctggccgaatctgaggcttgagttgaaatgcacgtcgatactttctcacaaaaacacaaacagggcaacatggatccttgcagttcataaaatgatga

SEQ ID NO: 199347 - DNA, 399 bp, Glycine max
  unsure (1)..(399): unsure at all n locations
cgtacttaactnngctggcatatacatgagaactcttggctaatagtcncaaccatcaaatcctcttcgctctctgtcttctgcttataatacaacaagcatactgcttgaataaatagcagactcacaggtgctcgaagtgcaatgcagtatgttacaaacaaaagcatggttgatgaatatattggatgacggacccaacgataaggtccaaattgcacaacagcagttggctccaccacattttctgaatacttggcgagatacaatgttgcgttatactgcattagcagagttgtaatgattaaagcccatattccaagattgctccacccacccggtatgaggtgaagctcatgcccttcaaatgctgcaagccaatggccaaccatgacttct

SEQ ID NO: 199348 - DNA, 404 bp, Glycine max
  unsure (1)..(404): unsure at all n locations
agctttgccatttgaggagagggctaagctgttctanaatccaatgggaaagagggtgtttgagataatggctgataaggagagtaacctatgtttggctgctgatgttggaactgcaactgaattgcttgaaattgctgagaaggtagttctgatatcttttttaggaacaagtggctatnttgttcactttggatcatcagcttgcaatgtattttcctacgtagaactttaattttgttttcttgcttatatacatgaaagaatcctgttttctttggcttattactatcagttggattcttaatagactatcggtcatgatcatatattttcttctaactaatttgaactgttttctctttcatgttggacctgagatatgcttgctgaagactcatgtg

SEQ ID NO: 199349 - DNA, 434 bp, Glycine max
  unsure (1)..(434): unsure at all n locations
tctctanaccataaccaagtctagccttatccctgttttattttngagaacttaacaaggcatctaagtttgctcttccacttgtgaactatgcaagtgttttttcatgatactcaattttgcattggagatgtttgcaattatcacaatttaagctagaagtaatattgctagatttacatttagaaatgcggtcctcaatagatttttctaaattcattttctcttttatcaaatcatagagttccttttgtaaaatagtaaatttctcaatatgtcatctaactcttcgttttagagtcttgttcacaaaggtgagtcttcatgcctctttatgtaactctntgaatgcatcaagtagatcgttatagtttgtgttagattcggaataagagtcacttacattnagtttggtctcatattcatcaatgtcg

SEQ ID NO: 199350 - DNA, 467 bp, Glycine max
ttaatcacctgagctgcagctattatagagacgctgtcttattcatattactatatctatatatatgactttttcaactaattcaaacccattaaaaaagtgattaatttaattaatcacattaaatttatcaattattatactgttcttccaaaattattcttcatttctctccccttagttgtttttcaccaaggaaaaattattgtttggagagaaaatacactaattaaagatactataggataataataattaatgtactagacttttagaagagaatcttataaaggagagaatcaatgaaataaaaaagatcttgtatagaaagacagaggtagtactttgtagccctcagttacttttatccatttaaataggaattgtctaattgaaagctatggacacatgtatgtatgatatggatataagactcatgctgcaatgtatacaagtacgctatcata

SEQ ID NO: 199351 - DNA, 317 bp, Glycine max
gaacctccatgctagtttttaataaatgctctatataaaaggcaggagactctgcctgtgtggggcaacaaacatttttgtgcattggttcacacctaaaacttgatgcccttatcaatatgttttatgcattttacacatcttctgcaaatcggccacatatatcttgccaattaaagcgtgccatgtcaaacccaatgtttctcgccggagactcatgatattgtataatgatgcatatccaaagatttaattctgtcacctatattaaaaaaatcagtacaactgcggcgatcaacactatatgtaatgaagct

SEQ ID NO: 199352 - DNA, 414 bp, Glycine max
  unsure (1)..(414): unsure at all n locations
agcttgcagnaatcagtattattgtattttatttatgcaatgcggtccgattagtgaggctagctaaccaatttgaagccctcatgatcatgggtgtnttgtttttgtcataagtacacctcctgtgtaaaattggtcagctatgcctacatgtgcagctgtgctactaatatattttgagaaatgttaattacaagataaaattgtccatggactaataatatgaaatatttctacactgttattaaattgcaaattatctcatatagtaatttattgacttttggaataattatgttaaaagttaaattaacaatattttttaattaaaatgggaagttggtttatattaattgcatataatcaaactttaattataaaatattttatttgctatcattggtatcttcctgt

SEQ ID NO: 199353 - DNA, 383 bp, Glycine max
agcttggtggcctgggatcttcttcattattggattcctttgcttcttgaggtctgattgcagcggaatggagaaggagaaagatgaatgaagacaccacttcaagtagaagatgagtctagaagaaactcatcaccataggaagccatggataagagcttgaaggtagaagaagatgaatgaaggaagaggaagagaagagaatgaaatttagtgcttgaagtctgaactttgaagtttaattctcaaatgatcaaagttgaaaaaaatgcacacacatgacctctatttatagcctaagtgtcacacaaaattgaagggaaatttgaatttcacttgaatttgaaattgaatttgtggagccaaattttcactaattatga

SEQ ID NO: 199354 - DNA, 428 bp, Glycine max
atccgacctcccattaacagcgcctacatagaggagtatagcgttctttggcacgcacaacagcagggtcacgcacaaccgcagatgcaccattggcacctctacgacaaccaccatctctagagtccatctctgctcacatgctgaggatggagctccagatgcacgcatatatgcagcatgtgatcgactagcaggcagccaatcataggggtcacgtgcagctaaataagagcttttaccgatacaccttgcatcaacagagccaagatatcatccctttcccgtggcctacccccaaccagttcagggccacagttgcatggactggagataggcccgattctcatacagggccaggactcgcagggacccccagagataaagatggagcacacgatgatgatggcatggccgatgtgatggac

SEQ ID NO: 199355 - DNA, 423 bp, Glycine max
agctacaatgcatggagagggttggtgtttcttataaccaaatccatattcttgagttgacatttatatattttaaaataaaaaatgactattaatcaagattaaagagagaggttagaacaaaaaatcctgattgaacaaaagggaacaagggtagatatattgtattagcagcgactattggagaagacaactcgttgactccggtggcgattttcttagaaaatacttgttctactttttggaatgaatataaggggttgctatttgataaaaatttcataaatgcgaaaacaatctcaaactctatgaaagagagagagagagagagagagtcccagagatgatgccactgttacgctaatagagggaaaaagattttcttttgagagaaagagggcgaaagaatgaaaatttaaaatt

SEQ ID NO: 199356 - DNA, 396 bp, Glycine max
agcctatcgaggacgggccttgttttcttataacctgcgaggatcaccaagtgcagagcttgtgtttgacaaatcttgtgtgcactgcatgtgatgtactctttcatacatggcactcgccatgggtggctgataacgacaatcaaatcgttcaaaaacaaatttactagggaattctgatcacatgattaacctagatcaaactcagaaatatgattcaatatggttcctacattcattcacatataaatagaaagggggatttttgtcttacaatttgtgataaactctagaagaatgtgaaaacactagaacataatcgaatataccatatcaaacaataacaacatcatttcatgatgtaagcgtaattctattcacaaaccaatgcaatag

SEQ ID NO: 199357 - DNA, 337 bp, Glycine max
  unsure (1)..(337): unsure at all n locations
ctcttgaggacatcacatggcatcttagtgtgatcgatcactggcgaactatgcaaatgcaaattcaggatgatcattttcgcattgatgatgctcgcggtaatccattacagcgcttgaagatctattgctagatatacatatatatatgcaggacatcatagaaatttctatggacaatatcctttgttcaacctgtgcatcatcatttgaaaaactctttattacactctatgaactatagccatcaattatattgaattgctggatactggactcgaattacacttttatagcgctatctgaggcatcatcaanacttgatagcattcgtgct

SEQ ID NO: 199358 - DNA, 449 bp, Glycine max
  unsure (1)..(449): unsure at all n locations
agcttgaaggtgtgtgacccaccttttttcatatttaaanactggtaatgggtctactatcattgtcatcatttttttcgtcattgaggtgccacttgagctgccaggttctccacctttgggcgtattctttgaaagatccgtgcccccttttttgcatatgttttgtagttgcatcctatccgaagccattataccgaccctgcctaacgaaggcaaccattaggtcctcccaggaatggactcgggaaggttccaagttagtgtaccaggtaacaactaccccagtaagactttcttggaaggaatgtatcaacaattcctcatctgttgcgtatgcccccatcttccgacaatacatctttagatggttcttggggcaagtaatccccttgtacttgtcaaagctcaccaccttggacttgagaggggtgatgatattgggtact

SEQ ID NO: 199359 - DNA, 295 bp, Glycine max
gaacgccgcactgtaagggagaatatgagttcactgtcgccgttgtcataatgcatcacaataataaaaattaaaaacactcttatctactccattctacatctttacggtagagtaatgaccactatggctaaatgcattactgcacctttcagtgaataagaatgataagagaaacaatctccattttactacatctttactgtaaaaaagcaaaaacaaaacactcttctctattctcaacatctatctatgttattctcaaccatgacttactgcatgctgcaagtgctac

SEQ ID NO: 199360 - DNA, 441 bp, Glycine max
  unsure (1)..(441): unsure at all n locations
agctnctgagggagccctatagtttgcttgttntnannnaaacaaattcccttagcaatcccccaaattaaggacttatcataacttgaaacccttatgctttcttagaaccctaaaacaaggtcaaggatatcaaaattaagctcaggggtttattcaaacaaatcattattacttttggctcaacaggggtgcaagggataaattcatcacaggttagctttttggctgagtggctaaaataaaaagaaacatggccttgatcatatccaccttatgtaaataatctaacagtctaagaatgatgcaaaattaataatttaaaaacagacgttctctcataattaagttcacacagctcaccgggacaagataaagttatcggcttaccgaaccatgatctctttccatcaagctaaccttttctctctttggaatcat

SEQ ID NO: 199361 - DNA, 444 bp, Glycine max
  unsure (1)..(444): unsure at all n locations
gacactatagaaactaacgcttcnnttgagaaacntccttgagaagcgtaagcttatcttcttacacccctctaataactaagcccacctgcttgagaagcttccttgagaagattcctacagaagctagagcttagctacacacacacctcactaatagctaagttcacctccttgagatgagaagctagagcttagctacacatcccctataatagctaatctcacccccattccaaaaatacatgaaaatacaaaaaaaaagcctctactacaaagattactcaaaatgctttgaaatactaggctgaaaccttatattactagaatggccaaaatactaggcccaaaagaaggacaaacctattctaatatttacaaagaagagtgaatccaaccttgacccatgggctcagaatatcaccctatgttcatgagaaccct

SEQ ID NO: 199362 - DNA, 441 bp, Glycine max
  unsure (1)..(441): unsure at all n locations
agctntaacctagaatgcagacgtgattcaattgtgggtgggatggagaatgctttcaaactcatttagaagtgcatgtaggcttcttaaagagcatgcatgccaagaaagtctcttaattaggatttaagatttgattcctatcttaataatagggatacaattagagaaatagagttacaaaaaatggagctttatttcctcccaaaaacaaaagaatactacaactttaacttgttgctcttaatattagaaatctgttttaaaccttaatattgaaattttgaaattaatattttataatccaaatcataaactgtcattctgagtctaaaantttaaacattcaacattgaagtttatatctatttgtgagatttaaaatcagttttagttttaagttctcttttattgaacaacagtcaactcaattatgagttt

SEQ ID NO: 199363 - DNA, 353 bp, Glycine max
  unsure (1)..(353): unsure at all n locations
agcttgtagaaagggtagacggttacttgncttggctngagaaggcccagggggaaaagggatgccccacattatttccatgactcaaatgctaaaacgatgattaggaaactctatgtaaaactggacatgcatgcatctatgcggacactaaaatgtcaaattataatggtcatgtgatgctatggctcaggacacatttgctctattattaatcgacccaatgcttccaaaatatggtcttttatcaatgtgtgcatacatactagtccatttcgggcggacggaaaaattcaaagctttcacccattgggtgtgaacacatttatctggaaaaatggttatgaacaaag

SEQ ID NO: 199364 - DNA, 389 bp, Glycine max
ctttctccttggtttgatactttgtttatagatgctggagtggacttgggcttgcgtactcacgccaagcctgcgctgatcgcttaatgtgggtgcctgtgtttgtgcttaccacaactctttttgcttagcaccactttttgtttttgcgctgaacccgcgctgcgcgttgagtgggctcttttcgctaaacctgatgccaaaatcttcctttttatgctattatctgcatattgttggcttttaatcccttttttttgtatctccgaactataaataagaaaaacattatttcttatcaatggagcataaataacttgtgaataaaaatggttaagggtattttcgatatattttattataaagacattcttattaacaggtattac

SEQ ID NO: 199365 - DNA, 339 bp, Glycine max
ataccaagctatctttactaacacaacactactctcgtctatcgcattcactatatgaacgagacgggcaccgtgtgaggtcggagagtgaaccgcacagctagacatttttatactagtgtcacaccacattgtcatattgttttgggaaaagggctcaccttactgtgacgtccagaccctctgctgatagacctgatatcacgaactcaatgctctaactatctactgacagatgctagacctgggcagccctaacaactgcactgagtcaatgctctgattctattaataacgaagatgaaaagtcctcattcactgcatgccctacttggctat

SEQ ID NO: 199366 - DNA, 408 bp, Glycine max
agcttgttattttcagtttatgatgatgaatccatggccacctcatgggctcttctaaagacaatagcatcatttcttgcactgaattattgggagttgcaagccatcttctcaatcaaattcctgacctcagcaggggtcatatcaccaagagctccaccactggcagcatcaatcatactcctcttcatgtggctaagccccttatagaaatattgcacaaggagttactcagaaatctggtggagaggacaacttgcacacaatttcttgaatctttcccagtacttatacaagctctcttcactaaattgcctgaagcctgaaatgtctattctgatgcactggtcctatatgtaggaataatttctccaagacaccctcttaagtcatcccactggatatgat

SEQ ID NO: 199367 - DNA, 408 bp, Glycine max
  unsure (1)..(408): unsure at all n locations
tagcgcatacnctcgctaagtgagaaagctcangcttatttcaaagaaggcccacgagtgaacctaaaggctgtcgngtgataattaagctaccttaagcctataaaaggagtaggaagcagaagggaaagatacaacctatacaccgaggaaaccaatccctacacaccacccatagactcagagctctctaatgaatacattctaagcgtgagtacctctaataaggaaaccctctctctatgtccattatccccttctcttcctttatccatccttcttcttctatccacatgaacccctatagtgtaaggcctctcatgacaatgagaggctaaaaccccattggtgatattcatttagcctattacatgcatctctaatcttaatgcgatatgttatttttat

SEQ ID NO: 199368 - DNA, 434 bp, Glycine max
  unsure (1)..(434): unsure at all n locations
agcttgntgaaagctgctgctttttagtctttttgcgagactgaagcacatcgattgggattttggagtgaatgctgttaattcagagttccttaactgatgtttaaaattttacaatgtcgatctgaattcaactattaatataatttgtattactacttgtttaatttgtgatgctttaactcctatttccctgacacaaggcactgatgtctgatattatggtgcatgttaagaggataaaatctgtggctaatatttttctcttcgactgtgggaaaatgttatgtctgatatgaaattggaaattcgactgtcttagacttagcttctgacatgtgcaaaaaccactgaggctactatccctgttagatgaagagtcaactttccctaatggcacagatttaacctttgctaacaagcttaagcagcat

SEQ ID NO: 199369 - DNA, 369 bp, Glycine max
  unsure (1)..(369): unsure at all n locations
ttaccggacncanccggacatccatgtataaagttattgtcaattcaatttactcagggctattgatcttaatattgagcgtctcgttatattacaggacttattcggacgtccgagaaaaaagttattgacggttgaatttgatccaagcttccgcatttcaattggagcatctatcaaataattatgacactctgtcgggcatccgagtaaaaagtaatcgtctcttgaattttctaacagttatcgcttctcaatttggagctgcctgctatatctcgggattgaaacaaacatctttgtataaagatattgcatttcaattgctatagcttctatttcattttcgaccgtttgaatattcctgat

SEQ ID NO: 199370 - DNA, 337 bp, Glycine max
gtacacttggaccacatttctaccaactacaaaacctaataaaactatatcatctactcaaaatgtacacttctctatattagcctaaagggcgctcttcctaacgactgaaagacctcggctgagaagttctaactgatcatctatgctcctactatacacttaaacatcgtcaaaatatacaactacaaatctacctatgaaatacactaacacatgaagcactaccctcatataggtgcttggtgcattagtgatcacaataggcatctctatcctatcatactcactatacttggtcttgatagcaggttccactcatcaccatattcatcct

SEQ ID NO: 199371 - DNA, 421 bp, Glycine max
aagcttgtgaaatatcgtggaggatattttttactcaaaagctcaattattatcggggagaggagaataaagaccatatcacactcaaatattcggataaccaatatattaatataattttaaatgatacaacatgaatctaaacacatagcttttgggtacaaattctttaatattcagatgtgcttgacaatcaattcaccacccaacgattatggaatatagttgataactaattgccctaattggcttgtaagtgaatactaaaataatagcattccatgacgctccatacggttcccaaaaaatattcgtcgaataaaatgccatggcggtattgaattaatatgaaatgggcgacgtctgatctaacaaaaccatctttatttatttgcgttaatgacgattttctaaaaaacca

SEQ ID NO: 199372 - DNA, 410 bp, Glycine max
cacgatttagaccactgttgaaacaattaacgaaagcctcatcactcaatccaagagatctattatccaaggacatgaatttttagtaataatcagaaatagaacttgtttactgtaacttaaacaacttatccatatgaaaattgaatggagaaggaccaaattgtgactccaaagcacgagtcaattccggacaagtagacaccatacatagcttctgagacatttgatacaaagccacgacattattatcaaagtgcattgcatcaatgtcaacccgagtagcatctggagtgttatagtatgagaaaattttctctgccttgaaaatacattccataaccagggttagtccatcacaatgcaataatccaatagagatctcccttgtctgtaatgcttcactaatc

SEQ ID NO: 199373 - DNA, 408 bp, Glycine max
tgaggaagtgtaaaagggtgaaacttcctgctcttattctttgaccacagagtggtacctagagatatgtcgcgggggtcaagagaccttgtggacgtcaggtggggtgctattgcccaaaaccaagcttgaccaatcccgacccaacccgggcatagtcagtcagtgagaacctgtgatgtacctaagcaggcgagctcctagcagtcaacagataaatggaactaagaccacaaagcaaggaggcttgtgtggtggctggccagctgtgaactttgattgatatatgggatatggcctctggtaatcgattaccaagggtgggtaatcgattacaaggcttataaatgaagacaggaggctaagatggtctctggtaatcgattaccaaaggagtgtaatcgatta

SEQ ID NO: 199374 - DNA, 352 bp, Glycine max
agcttgtcttctggtaatcgattacacttgttggtaatcgattaccagagccttgcatgtcttggaaacactttgttttaaggaaaggcttgatctttagtgaatcttgaaacaaggctttgtttgttgaagcaatcttgtattaatcttgaagcattgcttatcctttgaagtaaccttgtttgattcttctttggcatcatcaaaatcatgtagacatacattcacattctccccctttttgatgatgacactcattatcaagcaaattctttttgacatcatcaaaacctgcatgatttacagtaaatattgcatgtacatcttgatacagcttaataagactcatctt

SEQ ID NO: 199375 - DNA, 403 bp, Glycine max
  unsure (1)..(403): unsure at all n locations
tgctataatagggggagaagagaggattaatatgtttcagcccacnacgcacttctctctctctcgaaatctgctgaggaaaactatctccgcgaagaaaatccaagccgaggcgcttccgtaacgtttccgtgagtaattacacgaatattctcgaccgttcttccgcattcatcgtgcgttgtatcgtttcttcagtcgtcaacgggtaagtacctcaaaccgagcttttcacttcattctatgtacccatggtggtccacactttgtttcatgtatatttattcacgtattcattagctttatatacccccttctgacgtgcgttaagcatctttttaaggcatttctcgccttatctaagaataaaatataaatccaccgatcgttcgaattgatcatc

SEQ ID NO: 199376 - DNA, 264 bp, Glycine max
catatgcgaggatgatgttccaagtacattggatttggtacgaccatgccctcctgatttccagctgggaaattggcgagtggaggaacgccccggcatttacgcaacgagcataatgtaaacctttacgagttaaaaagctctatcctggggcctaggcttgagagtttatcctttgtgtcagggcttgggtcttatgttttgaagttataatacaaggatctttcttcatctgttcctacgtctctacccattctcgtacat

SEQ ID NO: 199377 - DNA, 322 bp, Glycine max
caaaaggagagagcacgacatgaacatccaatggttgattcatggatggagattaaaaagatcatgaggaagcggtatgtgccggctacatactcaatggacttgaaattcaagctccaaaaactaacccaatgcaacatggggggtgaggagtatttcaaggaaatggatgtgcttatgattcatgcaaatattgaagaagatgacgaggtaactatggctcgatttcttaatggtttgactaatgatatccgtgatattgatgagctgcacgagtttgtagaaatggatgatatgcttcacatagctttccatgtggatc

SEQ ID NO: 199378 - DNA, 443 bp, Glycine max
  unsure (1)..(443): unsure at all n locations
agctntnggcaaaaggaagaagaataagttcaattagactcagaaatcaattggcaaaagttttttttttctaaagaatgaattgaaaagatgcattgaaaagaaaatcaaagccttgcttttatagactcttcatgtctggtcaagagaaccattagaagagttataggaaaagctataacttttagaaaaacttgaaaactattgnaaaaattanatntttggattgtgttcagaaactatcactggtaatcnattaccaaatcagtgtaatcgattacacaaagcttttttgtgaaaggatgtgactcttcacaattaaatttgaatttcaacgttcaaacacactggtaatcaattaccaaatcattgtaatcaattacaacattttgaaatcaattggaacgttgtaaattcagttgaaagctttttgaaaaccattt

SEQ ID NO: 199379 - DNA, 465 bp, Glycine max
  unsure (1)..(465): unsure at all n locations
tggntcgaggtacttacccgttgaagatcgaatatcgatttatatcgaatgaagaacgtcgaagaacggttgaaatctttgcgaaattcctcacggaaatcgttacggaaacgtttcggaagcgcctcggcttagatattcttcacggaaacaatttttccaagcaaattcgaaagagagagaagtgcctaaggggctgaaccccttccttcttcacttcctcccctatttatagcaaaataggggaggtggttgccgcccagctcgcccaggcgagcagggttgcttcctccagaagcaaccgccttctggaggaatattcctgagggcccaagtgggcctgggtgctatttgcaccctcacttttactatgtacacccccctctgctgtttttggggattctttttcgaaagtacggaacttacgaattcgtacgaacttgtttcttccgaatgtacggaacc

SEQ ID NO: 199380 - DNA, 286 bp, Glycine max
ccggaaacataagactctcgaaaaaggataccaaagctcttagcaagtcaaaatgacaataactgtctacccggatgtgcgagagggccacggacatatcaagtcgcccaaaccgaaaacagaagccgaaaacaaattcaacgaacatgacattaactgggatatgcaatgaacgccgcaaaatcaagaagttcgaaaatgaatcaaagccgtgagaaaacctaaccacggaaactttctacccgcacgcccattgcggaccgaaaacatccagaacccctatatt

SEQ ID NO: 199381 - DNA, 434 bp, Glycine max
agcttatagaatatataataagagaacttgacaattgaagaatcaattcatgtttcctttgatgagtctaatgttatttctccaagaaaggatattttagatgatattgcagaatctttagaacaaatgtatattcatggaaaagattctaaaggaaaaagagaaggaagcaatgaagatcctccagtagaagtcaaagcaaataatgatcttccaagagagtggaaagcttcaagagatcatccccttgacaacattattggtgatatctcgaaaggggtaacaactagacactctctcaaagatttatgcaataacatggcttttgtatctatgattgaacctaaaatttaaatgaagccataatagatgaaaattggataatagctatgcaggaagaactaaaccaatttgaaagaaataatgtttgggag

SEQ ID NO: 199382 - DNA, 482 bp, Glycine max
tcacgatgatgagatcaagctgatgcaagttgtttcgatgttaacaaagataatgacaaaaagctcaagagaatgatttcaagattgagtcaacatgttcaagatcaagattaatttcaattttcatgaaaagaaatcaagaagatttaagattcaagagaagtttgatttcaagattcaagagaagatgaattcaagattcaagagaagaaatcaagatgacttcacaagggaagtattgaaaagatttttcataaacaaacatagcatagttttgttcttcacaagagtttttctcaaaattttctaagttaccagaagttttactctttggtaatcgattacctgttatcaattaccagtggcaaagtttgatttctaaagcttttaactgaatatgcaatgttcaaatttatttttaaatggtgtaatcaactacaatatattggtaatcgattactagtgtatctgaacgttgaaat

SEQ ID NO: 199383 - DNA, 469 bp, Glycine max
tcgcttcttatccaaggctcatctcggtggtgaatctccttctttcatggcttattccctagaggatggcgcctcctctcacctcttctcctttgtctactgctgcatctccatggtggaaaatcaacattaaaggacctcattgaagctcaaagatccagccttcatataagccccacaagcaagcttccatctagtggtaattagagcacaagagcttcaagtaagtgctccttaaacctccattaattattttgctttaccttctcttccattgtagtttcttcatttttcttcatgtatctcctcacatgccttgtgctaaattttgttaacatgattctttagagtttcctcgaataaacttgctatataagctagatttgatttctatggctcaaattcttgtattgtctcgtcttgaacataaatgtgtgagttagatactttgagtttgctcgtatttttt

SEQ ID NO: 199384 - DNA, 452 bp, Glycine max
  unsure (1)..(452): unsure at all n locations
agctngaagctgattctgataaggtaatactttttctttatctccctgtaatacattctatcatataatagctacttttcttcttcttcttttttctttcctgcatgtatctcttattgctttacctttaccttcactctactccttttagattgaggtctgaacattcattaatgtacattaagtaaataacattgtttagtgtcctcattcagagtcctttgttaagttggcatccaaaaagggtccaagaatgatcaatataatgctagaagtccaacaagagatgtttcgactttcaaggtcagtgcactaatgtccatcatggttaattttggtggtttcataaagagtattagaaatttagctttagcttttaatatttggccacttaaataatgatttaagacacaaaaaaccttctactggatcaaatcacatacagaacattc

SEQ ID NO: 199385 - DNA, 486 bp, Glycine max
  unsure (1)..(486): unsure at all n locations
ntatgtcattcaagcgtgaaaggaaatgaacattggagtttttctgtattacccaaatcacctcagctagggcagacgaaaggcaacgtgaaatgcgagtctattgataaaatgtttttttttttattcatttcagaattgttggttgctatggtaataagatattgtcttttggaaaaaaatttagagggaggatattaacactgttcattcggattcgtgggctatatccattgaaattttttattaaaggaaaataatacgtatttaatgttttgattaatgaaataaagattgaaagattttgcaaatcaaagtataaggtgtattcatttgcattatgacgtctgtatgttatttttaaagagtatatttaaaataaaatntattgtatttaattagaaaaccatttaaatattttaaagaaatattttttttgtacaaacattgtcatttaacttctactattgtgttntgaataatatt

SEQ ID NO: 199386 - DNA, 446 bp, Glycine max
  unsure (1)..(446): unsure at all n locations
agcttgcagtgtacatgatactactggtctttgtttaagtataagtatattctcttcaagcttgtggtttccttgatggtattatggatttctgttaatggtctgaccactgtaagaagaacttacactatttaatcttgttgtcgttgatttgaattggatagctttggattttgggacatttatcttcacactagaacgaaggaagcaaataactagcaaaaaataatttaacacaatcctttcctttggtaaaaaagaaggaaaacatgaaaaagctatttatgtatatatttaaaaaaaaagattctgagaatggttgtatcttccccctttcccaggtatatataacttgttcaaaggaagaggaagtgatttgttgtattcaaaatgtgcattggatttgtttggagggtagactntaaggtacaaatatttattgaaac

SEQ ID NO: 199387 - DNA, 477 bp, Glycine max
tgtatctctgctgaagaattaaccccgtcagctgctcctcttgatctctattgcttggaccctacactcaaaaagtcataaaccaaaagaggaaaacagaataggatgaggggggaaaaagattaacatggaaaaaccattgagagaaatgcaaaacaatttagaatcaaagacgctgataagcaaactaaagttttcgttcgtactgagtgagtcgcctgaaccagaatgattcatagtatttgtttgcagtgattttgagctctttagactcttaacattccggtcctttccacccttaatcctacgctctacaggattgtagttcctattaaaaaaaagtggaaaggatttgataaaatatactcacaataacattgtatgcatggccagcatggcttaatattgcatatccaaatatcagtacacatatgctttgttaaataatttaatgatgatctattatagaaaagacca

SEQ ID NO: 199388 - DNA, 337 bp, Glycine max
gatctacttcgaagacattgggacaactgtctccaatatcttttacaaaattattactataaaacgcatcgcgcattatgaatagcgtccatcactattgctctacctatatgaatcaaactgcagtataaacttatgcacattctttaatcgagcgactcagttacgtattctaatattatgtctatatataccatgacaggcactacataatatcaatacagccataccataagtattcgctctcacatatcattgcacatgaacatcgtccccgcaaatatacattctctggtaatgcatgcttataaaaaccataggattacaaaatgattca

SEQ ID NO: 199389 - DNA, 383 bp, Glycine max
  unsure (1)..(383): unsure at all n locations
ctgcagcttgatgatgtatgggaatcttaatatttgngaaacaacttggcctatgaatcatccaacatgaccgggtacacaatcagagtaatatcctcgagtacaagactgggatgattagagtatgattccctcatatttgactttcccatttccaacaactttgtacatatttaatttgcaccttaaaatgttatggaaatgtaatgacacatattctaatacaaatttaattaataaaaataacatgaatataccaataagagttctaagttatggacaaaattattttaaccttaaacataaatttgcaataaattcccatgcatgctcttaattaagtacgaggcttccatcactaccttgacatggcaaaagaattg

SEQ ID NO: 199390 - DNA, 358 bp, Glycine max
  unsure (1)..(358): unsure at all n locations
gagatgacctcatattttctgaccatacacggcaaaattaattactaattcctgattatatctcatgcatattatacaaataactttgaggaattgaacaatgacacaaaagatttaactgttaactgtttcatatttctttaaatgattagatatgcctcaaaaataaatataattaaaaagcacgaagcaagctaaatgaaaagccattaatatgccaaatgctctttttaagcacctcatacttgaaatgtctatcctttgcggtcatctttatttttttacctgcatgctgcaaattcatattttgtttcgctattgtttgttccaccatttgatcacttncttctatgtaaca

SEQ ID NO: 199391 - DNA, 428 bp, Glycine max
agctagtaattgagtgttttcctcatattttaaaaaaaagaattataaagagaggaggaaaagtacaactaagacatgttatcctccaatggtggcggcttgtgttttgccattctgtttatgtggaacatgtttctgctttctagttcttgggctaccatttttgatgtggttaacgtagattattaccatcttttatacccaaaaaatacatgctgctatgttgaaatttttttttttaggaagatacctatagtacctgacgtgctatcccaccaacacattacattgttatctcggctgtttgagattttgtttccactggacttcaaatttatttggttttagatgcttgccatgttttgttactattgaacagaatcgtaattcagttagttaacaatgatcttatttttgatactatctgc

SEQ ID NO: 199392 - DNA, 453 bp, Glycine max
  unsure (1)..(453): unsure at all n locations
agctngtccacagaaataggatattgattgtntatcatttctgtttcttactaagtaaaatggatcattttcaaggtccaacgccttaaaatgatcacctttcaagtaaaaaagaatcacttgattcacgcataaagaaagaactacgtaggtctgatttcctcatcacaattgaggaatacgtaggagcaaagggaaacacccttgtcgaccacaaaaagagaaaaaaatataaaggatataaggacataaaagggaacataaaaatcaaagtcatgtttgcacattcgattaaaggctgttgtcctttgagacaaacgtgagaggtgctaataccttcctcaagcgtaaatacaactcccgaacttagaattttcctttgtgaccggtttccttcggtttttccgacgtttctcacaaataaacggtggtggcgactccgcgcgtattcct

SEQ ID NO: 199393 - DNA, 468 bp, Glycine max
  unsure (1)..(468): unsure at all n locations
tcaagaattatgttgatgatgccaggaattattttgatctttcaagaatgaagaaagcaagatttcaagcaaaggcaaaggtttcaagaaaagaattaagataggttttaagatagactattagaaaatattntggaaagcacaaacgattggccaagagagtttttatcttaaatttttccaagcttgttactctctggtaatcgattaccagaaggctataatcgattaccgaaagcccaacatttttgaaaatggtttttcaaaggtgtaatcgattaccatgaatttgtaatcgattgccaatgcttataacgttaacaaatattatgaaaaaccttgtaatcgattacacaaaacatgtaatcgattaccaatggctctgaacgttgaaaatttaaatntaaatgaagagtacaactcttcagaaagataattgtgtatcgatacaccaagatggaatcgata

SEQ ID NO: 199394 - DNA, 450 bp, Glycine max
  unsure (1)..(450): unsure at all n locations
agctttatctaagcaaatggagactcttttgaggcccaatcccagttttagattccaaactgcacacttccttaccatacttgtgataggtgtggatgtgtccttggtctaggaggattcacagtggaagtcgagttgactcaagccatggatgaactcaattatttgggaggcaagaataatggctatgattagttctccaataataacaacttccatcaaggacaaagttacagacaagggaaaaatcaagacttgtataggcctcctcacatgcaaaatcaaaggcctaaataagaggagagagaacccagtatacaagaagcattgatgcaatacatctcccanaatgatcagtgcatgaagctcatggagtcccagctcacttctatacattctctcttgtcacaaagagctcctggcacacttccttctcaaactaaaactaat

SEQ ID NO: 199395 - DNA, 504 bp, Glycine max
  unsure (1)..(504): unsure at all n locations
gtgacactataaaactcagcttacatagtgtatctntctcagacttaagtgttttagactaattaccaagtctttcctaactagatgatntaaatgatgcatattaatgtgtgtagttgatgtgtcattattttctcctatttcttaaccctttttatcatcactttaattactaattagccttaattgtcaaattaattatgcagttttatcatttgggcctacttgactaattntgtgtttttaatttaattttaggataattataagcaattgggcttggatccgaaattgggctgaaccggcttggacttgaagagaatagacaattttattntatttcanttttgggcttggacttaaaacatattcgtaagctttggggctgaggacctttataacaacacgagggttttagtataatgagactgttgagataggagaanacatttanggttttgcaatttcagttcaatggtactattcacgcgcactagtcacata

SEQ ID NO: 199396 - DNA, 310 bp, Glycine max
  unsure (1)..(310): unsure at all n locations
agcttataatatatcgatacgctcttntttaaacatcgaaaactctcgagaaattcaaatggccgtaacttttcacacggatgtccgattcgggcgcataatatgtcgagaggctcgaaattgaacaaccgaagctcttgagaaattcaaatgggcataactcttcacaccgatgtcccattcaggccaattccatatcgagacgctcaaaattgaacaacggaagctcttgagaaattcaaatggtcataacatttaactcggatgtccaatttaggcccatcacatatagggacgctcgaaattgaac

SEQ ID NO: 199397 - DNA, 360 bp, Glycine max
acactctcgctagaatcggacatccgcgagagaagatatgagtgttagatttttaccagagcaaccgctggagagtttccagtgtttctatatgagaggctccatatatggacattctgaataagagatatgagcgtaaggatatctccatagctatcgttgaagaactttgagcgtctcattatgagattcgcctgaattggacatccctgagaaaagatatgacgcataggatatgaccagagcattcgatggagaatttccggcgtctaaacataagatgcgcccgaatcgaacatcctggagaagagatatgagcgataagatatgtccatagcaatcgatgaagaacttccggcg

SEQ ID NO: 199398 - DNA, 358 bp, Glycine max
caagctttaaatattgctaagaaatgtgtttcttaaataccttggggatcacccttctaatgcgaaatgtaaatggtttatggttccataaaagttacttatacaagctggctttgcaaaatatatacttcattcagtggaaggatgagaaatactaactctttactcttacaagatagaacgtacaagaatgcaatcagatgtttgtagaaatattcgttgtaccttctacatcctacaatacactatctctaattcaatataactagagaaaatcattatacccatctctgaattgataaagactatggagttaagatagctatgaaacattttaattatattattcctagaattt

SEQ ID NO: 199399 - DNA, 298 bp, Glycine max
aagcacaggagaccttcgatcctattactcaacgtggcggacaaaagtgggcaattaacttgaatggtcattattgtcaatgcggaaggtattatgcgcctcactatccatgttcacatattattgccacttgtggttactctagccttaactactaccaatatatagatgttgcttacacatatgaacacatactaaaagcttatccctgaccctgctacaactcatgcgaacggttggtccaaatcaacaacgataatgaatgacatggattgcgtcgaaccatctgatcactgac

SEQ ID NO: 199400 - DNA, 454 bp, Glycine max
cgggatccttaagtcacctgcaggctgcagcttaacagaagctgtcagaagcatttatttgtagtaagcatgcagatgcataagcttaaaagtaaaagtacactaatctcaaaacaaatagtaacaattgcaagtagccaagagcagaccaaccatacacaggcagaactttccatgtttaaaaccatagaataaaattcaaagacaatataaactgaaagacctgtgaagcacctttatcattgtccacagcaataacctgaccaattccttctacttcacgagcatatctgagagaccttagcccagaagcagacaaggcctgtgtgcaggcaagagagcaattatattacacacatgaaacttgctctggattcaaattgcagataaaaatatataaatttaaatcactatggaatggacaacattgatgatgacatgaaacagttgttta

SEQ ID NO: 199401 - DNA, 432 bp, Glycine max
  unsure (1)..(432): unsure at all n locations
tatcactactctcaatctgtacctgagagtttattcttatctacatncaatgaaacttccctcaaagctgtaagcacacccactaaattttccaacactctagctcttaatgataaaaaccacctctgaaaacaaaatgcttgagaacttgtcacagacgcttctaaaaatttcaaggaagagcaaactgccacatgagactgagtaagctgatcatagtaattagaatcattgatactcctagcaagtcttggacatgtatcacccttgtaatcacatgattttaaaggaaattttatagtctccatcaactccattgaggtggttccctgttttgcgtgactaacaagttggatttttacttcagaatgagcataatgaaatcatgctgttaatccacttcagcaagaatcagacttcactttctctatt

SEQ ID NO: 199402 - DNA, 367 bp, Glycine max
  unsure (1)..(367): unsure at all n locations
agcttgtaatcgattacacacattctgtaatcgantaccagagcagattttcagaaaatattctcaacagtcacatctttttatgtggttcttgaatggctatcaaaggcctatatatatgtgacttgagacatgaatttgacaagagtttttttgaacaaaaaggtcttatcctcttaaaaagaaaaatcgttttatcctcttacaaattccttggccaaaacacttgtgattcaataaggaattatttgagtgctcaaattgttcaatctatctctttcaagagagatttcttcttttcttcttcttcattctgaaaagggattaagagaccgagggtctcttgttgtgaaagaattataaacac

SEQ ID NO: 199403 - DNA, 413 bp, Glycine max
  unsure (1)..(413): unsure at all n locations
ccttgcggattggtctttgctggcgaaatgatcgaagtgattctaaaaagagggcaaattgatcatcatgctttgataaattcaaaatctggggcaaatgaagagggtgagaatgtgggagaaacccatgctgtgactgccattcctatacggccaagtttcccaccaacccaacaatgtcattactcagccaataacaacccttctccttacccaccaaccagttatccacaaaggccatccctaaatcaaccacaaaacccacctaccacacaaccaatgctaaacaccacctttagcacgaaccaaaacaccaaccaaagaaggaattttgcagcataaagcctgtagaattcaccccaattctgatgtcatatgctaactngctcncttatctacttgataatgcaatg

SEQ ID NO: 199404 - DNA, 412 bp, Glycine max
agctatgttgagagaacttccttgtgaatcttctttgagaaaacttccttgagaagctagagcttagctacacacacctccttgagaagcttccttaagaagattcctaaagaagctagagcttagctacacatacctctttaatagctaagttcacctccttgagatgagaagctagaacttagctacacaccccctataatagctaagctcacccccatgacaaaaaaacatgaaaatacaaaaaaatagtccttactacaaaggctactcaaaatgccccgaaatacatggctaaaaccctatactactagaatggccaaaatacaaggcccaaacgaaggagaaacctattctaatatttacaaagataagcgggctcatacttagctcatgggctcgaaaactaccc

SEQ ID NO: 199405 - DNA, 343 bp, Glycine max
  unsure (1)..(343): unsure at all n locations
tgganatgtcagctgcgtgagccttacacatgagattcttgtgcaaatgcgtgctgtgttctttctgctacacgtgatcaacccttgaacaccaaagacacagtggttagagaccaacacatttggcaaattttgtgatgaggttactgaacaaagagttaaggagaaggagtgcaatgaagagccattcaagcactgcatagactagaatcaaaaccattttgttggtgtntggatctatgcaacattgtaccaaagtagttggtagctattgatgattatttacctttgtttctctcttgtgactttgagttgtgtgtgtgacactgttagagttattggg

SEQ ID NO: 199406 - DNA, 134 bp, Glycine max
aactaaaaaaggagacataccacggaagcaccaacgacacttgcctacactaagaaaaaacccgacatgaacctcaagatgagaacaggggactaaaaaaagcaccgaagcaacgaggggaggatacccaccaa

SEQ ID NO: 199407 - DNA, 192 bp, Glycine max
cggctagaagctcaaaagaacaaaactgccacaatcattcccaaatatgcaagcgaatcaggaagcatcaacaagaatccagccaaggctattgcgcaagcaatcaatggggcaaaacacaccacaagaatatggcggtggaaggctcaaattcccacaaaggaagactcatcactctcaaaacgagccctc

SEQ ID NO: 199408 - DNA, 341 bp, Glycine max
ccatgtactcaaaatgttaaaatcataatgtcaacactataatgctcaatattaccataaaaagaatgctcaggatgctcaaaatgtactaaatgatgactaactattctagtatatgttctatctatctcacgatcaaagggtggtatgcatattgattgcctctagtcatacactatattccacatgcataactagttgccatcttatgtaagtaacagtgtccgagtgaactacatgtaccatttaatgatatccaaatgaattaaaattttcggagcaccatattagttaagaaaaatacgagaataatactccgaagctacacaatgatatcacaa

SEQ ID NO: 199409 - DNA, 454 bp, Glycine max
  unsure (1)..(454): unsure at all n locations
agctttanatgatctttaatagattttttatttctttcgcagggtttcataagctgtggaaagaatcaatgagttaagttatagttcatgataggctcttctaagagacttagggtcatcaaaatttaccacatatgcatataagccccttctttgttttagtcctaaagaattccttatcttggcttttctccaaatctggacattccgacttgaagtgtctaggctttgtgcattcatagtaaactatggagcttttgtctttttccttcttgtcctgtggcattcttcttgaagagcttctccacttagacccactgttgtgtctccacatcttatagattttgtgatagatgaaggcgagatcgctctcatccaagtcttctgtagattcatcatcaaatgaatcattgactttaagcaccttggaggagcttctctatacttgtactct

SEQ ID NO: 199410 - DNA, 396 bp, Glycine max
  unsure (1)..(396): unsure at all n locations
agcttgtaattcctgatcctcagatattattagttttataggttgggactggaacgagtcaccacatgactttcttgagganagagacatgaatgaccggatgaattttactgtgagatggaagatccaacttgtaagcaacaactcccaccttgtataacacctggaaaggatcataaaatcgaggggagtgtttcattaatccttttagctatttttccataattatcaacaaaccttctggtataaccagtaaggcctaagaatccccttaagctggtgacattcttgggcgtatgccataatgttattgctttcaacctttgaggatctgctgatacacctctcgcgaaaataacaagtcctgaaattccaagattgctcgaccgaagacat

SEQ ID NO: 199411 - DNA, 437 bp, Glycine max
  unsure (1)..(437): unsure at all n locations
ataatctagcttgtgtcctctattttcatcaaagtttcttgtgttttttgtantaagagncattaagtatacgatttactaattctctatcatgcgataaaatattgaatgcttttaaatagcataggaacaaggatgtcaccaatatcaacagaaaatgcatcgaacagctagaatacgatcaagataattacctagtggtcttggcaatgcaactgtatcctgactctatcaattatcagattagagaacaccgcataaagtaaaatacacatagctctcacaatctgtgtgagattctaaggaaacaccaatgattatatctgaagaataatatatgatagttgtctattctaccatcattacttgctgcgattgactgaattttgatattctatcattatgtgcggaatatgaaattcgcaagttacaataac

SEQ ID NO: 199412 - DNA, 349 bp, Glycine max
  unsure (1)..(349): unsure at all n locations
agcntgaagaagatttgaataaattctggtttttacatgcccaacacccttgagtgacacttgatattggctgatatcccggctgatgcatcttaaaacattagatatttgttttgcattgggcatcaccataagtgtgggtgaaaaaaacgttctcaagtataaaaataactttagaggcaaaaaccctgtatttcaatcgaatacaacctcattgtaattgagaacaacaagctattaaagcttgcgaaattaaatatcggatcgggtaaatcgaccaccgatatcttataatccattacactattgtgtgagacaatgaccgatttatataagagtcttcgcttta

SEQ ID NO: 199413 - DNA, 298 bp, Glycine max
agctttgccgatttagatttcattgtctaattgatcgaacggggtctgggaagaggcaaatttgatcatcctgctttgatgaacaagaattcaccccaattccggtgtcatatgctaacttgctcccataactactcgataattcaatgctagccataacccaagccaaggttcctcaacctccatttttccaaggatacaactccaacgcaacatgtgcttatcagggaggagttccggggcattccattgagcattgtatgaccctgaagcataaggtgcacggtctaattgatgc

SEQ ID NO: 199414 - DNA, 383 bp, Glycine max
gagccaaaatcctgactcaccatattctcttactctttaagcaaaaaaagaattgaagggaaatttccaatcaaagaaaaagagacggaaaatttccaatgaaagcaaaaaaagaatataagggaaatttccaatctaagaaaaaaaagaatgagaattcctcaatcaaagagtgtgagaaagctaaaaagacaagaaaggaaattcccaatcaaagagtgggagaaagcaaaaatgaaagaaagataattcccaaccaaagaatgtgagaaagtataaagggaaggaaagaaagttcttgatcaaagaaactataagaaatatgcagagaggtctttggaccggacaatatctgaacaatacaaaattgtcatcaaatgaac

SEQ ID NO: 199415 - DNA, 261 bp, Glycine max
tttactggagaaataaggaggacattacttcctattatttcacccatttcacagatgagggaaacgagatgaggctctgggagaagtttaaagtatggggggacgttcgggaggggtatattgccaaccgccgtaacaaggagggtaggatatttgggttcgcgcggcttaaatgagtattggatgcaaagcatttggagataaagcgtgacaatttcttcattgatatgcaaaaactgttcgtcaacctccctaggttct

SEQ ID NO: 199416 - DNA, 414 bp, Glycine max
  unsure (1)..(414): unsure at all n locations
cgccttatttaaataatataggagtttggagaaattatagcantttatcaacgcaaagacacattatgtgatatttcataagcaatgtgtgcattatgtacagactctccgctagcaggggcaaggttgcatacatcttaactccccaaaccccactatgtgaaagcctcgtgcatggggtctcatttatgtacagccttaaaccaaaaggggtgaaagtttactttcaaatttctttaaaaaaaaacccagaaagaaccactcactaatagaaaacaatatatgccatagaccaatacacatacataagcacattttactcaatcacaaaaatgttcatatattatatatgatagactttaatntcattcaaattgttgagatttccaaaaattcataatttgatcttcctgc

SEQ ID NO: 199417 - DNA, 430 bp, Glycine max
  unsure (1)..(430): unsure at all n locations
cctgcggcatgaagcttttaagaattctgtattgaattttttctttttcacctgcttcctctgtgtccactaaccctcacttattggcgtcgccttctccatattcccaccgtatgaaacttgatgctccacgctttgatgggaagacccatctggttggatccttaaaataacgtagttcttcaaataccatgccacaccataccataaatgactcaccattgcttccttctacatagatggacctactttacttatctgcaagtagactagacattatgtttaatgtatgcatgtgtgcaagatntcaatcagatccaaagttttcacatttaatggcaataaaaagaattataagatatttattaggaacagttagtttaggattatggtatcctaagaattctctatgcaacctagtaggatactc

SEQ ID NO: 199418 - DNA, 361 bp, Glycine max
ctcagctttagccagccatgaataggactcatttgataagttgttactgagtaggggtttaattatgtttaaataaactcacccttagttattttttgattaaatatattttttcattagtcatttatattttaatctatatacaaaatctttcattactttctttttttcatagaaaaatattatatgtttttcgagaattaacccatgtatataacatccaggaagcatagctactcaatgcctcaacatatttgaaagagaaactctaaagttcgcgagttttcaccaatcaggagcaaaatatgtaatcttatgacttatcctaaagatgctgctcatgcaaagaaatctccttaat

SEQ ID NO: 199419 - DNA, 440 bp, Glycine max
cctgcggcatgcagcttgcctcaaaaggtccaggaaggacattgttttctaaggaactagttccgctccggagtatgacagtcaccgctttaggagtgctgtacaccagcagcgcttcgaggccatcaagggatggtcgtttctccgggagcgacgcatctcagctcagggacgacgagtatactgatttccaggaggaaatagggcgccggcggtgggcaccactggttactcctatggccaagtttgatccagaaatagtccttgagttttatgccaatgcttggccaacagaggagggtgtgcgtgacatgagatcctgggtaaggagtcagtggatcccgtttgatgccgacgctatcggccaactcctaggatatccgttggtgttggaagagggccaggaatgtgagtatggccagaagaggaaccggtctgat

SEQ ID NO: 199420 - DNA, 480 bp, Glycine max
  unsure (1)..(480): unsure at all n locations
ctgatagacttgcaactcgcgtaccaatcgacgttaccacttctattttcagacaacacttgtccaaacttgtgggctcgacatactcgtgaccaactcctacttgtcaaggctgctaccctcaacactagataatcaccctcgacaccaaacaacctttttcaccaacaagctggctcagagctngtggggcttatgtattatccagggtccacaaaatggaaatggcaagtgatgtggcactccaatacacacgccaatcctccatgtcaaccctggcataagagcacggacatctcgcccttagcagtctggttacagggccggcagagtccctaatacctcattatttgaatattaatgataatgttgcaaattccttatcaagtggcagataggtactcaattatctataagatacacatcatctataagccataacttatctactaactattatctacaagctataaattatat

SEQ ID NO: 199421 - DNA, 238 bp, Glycine max
cattttgccaaacatactcaggttcaccataactcgcatgtgctattctttccatgctatatgtagcaaagtgatggtaccatcaatgtctgatgagttggaaaaagaggcccgaattatcctgcgcctcgtggagatgtattatccccctgcttttttgacatatgactcacttgattgtgcatctggtccaagaaatcatatgacgtggacctgcttaactacagtggatgtaccc

SEQ ID NO: 199422 - DNA, 356 bp, Glycine max
  unsure (1)..(356): unsure at all n locations
ncagcttcaagaaaagaccagactctcatcatttatctgatttcaagctcaaacaggtggctgtgttcgtgctcgtgcgcatagcgcaattctaaaccgctaagcgcgcataggtgaatttcggcttaacgcaacttttctcgctcaacggagggccctttgctcagcgaacaagcacaactcatccttcttccagaatctacctcgagctatgccaaggaaagctgcactcaagggatggctcactaagccagcaaatacatctagcacgagggtgaaaatcaacacttcataacttgccgtaataacctgaaagtgagagaacatgagtattatacacacaaaatggaaggact

SEQ ID NO: 199423 - DNA, 304 bp, Glycine max
accgcggcagcacctttatcaaacaaaaaatgagtatttttatggagaacaccacagccctagagcttagaagggatattacaacgaaggaattccttataacgatctaaaggttcggcaaaaaattaaagataaatgttttttcaagagattagtttctggaatcgattaccagaggatgaatctattaccagcggccaaaactgattaacaacagctgattaaatttgaacccaaaatttgcattgcgtaatcaatcacacctattatggaattgatttcctacacgtaatgaaacgtttaa

SEQ ID NO: 199424 - DNA, 269 bp, Glycine max
agagattgatgattgatagcgaattctgaatgacatagtgcggaaataatgtaagatatgctcagcaaatgatatttggctactatatgtcgccttgcttctctctaatagggaggaatgtgacaactcactcccggatcgccggccgagtcaggatcccgcgcagatcttcgaactttatacctccatgaccataatggatatgtggcagactataataaacctcatgccagaggaccccggaacacaatgccctgaaggatacgaca

SEQ ID NO: 199425 - DNA, 423 bp, Glycine max
  unsure (1)..(423): unsure at all n locations
agcttttataggagacatgtttcatgttatgtttacattttgtaattcaataaagattccttaaaaggactcatccaatcccaattcatcatgaaggattcaagaaattctacaaanttaaggtacctattttcctataaaatctttgaagtgatgcaaacgaatattgttacagttattatgaagaaacaagaagtaattagctcagagagttataaatacacacatgcgggctcattcatgtattttcactgtgtgaacaggacatgcaaaggatgggatcttatattacacatctttcatcatgttggccgtattctgtcttgtctgttatagggggcaccttacccttctccacaaagatgtacttttgctcttttcttccaaataaccacaagcccagatgtcacacacacaaacctt

SEQ ID NO: 199426 - DNA, 395 bp, Glycine max
tatctgcattgactggctatttttctttttaaggtctgactgactttgtttaatgttacataaaactgactgttttttcttctttctagatagacgataaaacaagggacaaactgatatctgcgtagaacaattgggggttttttttttttcaaatcgaaagatcttcatttcaaatgaatgttagttctctcacttgcatctttcatataaaaatgataacatttttgagagaagagtctatattaaatgcgaatatatctcttctaatctactatatctatagtaatatatatgaaaataattttcaataggaatatttatccgtgatatctccaaaaactttaaataatatatttatttattctttaaagatatttcattctaattatata

SEQ ID NO: 199427 - DNA, 220 bp, Glycine max
gcacgcctaaacgaaacataacatacttcaattcagctggaatttctatacaagcacgcaattgggtgaggctataactgctaaacaataaaaaaggggacccccccagcattaatgagaatgaagcaattgacattgccataaactaaacggatgaatcctcatgtcgctagaaggctaggggtgctatgcctctgcaactacaccaccctcccataat

SEQ ID NO: 199428 - DNA, 243 bp, Glycine max
tcttgcctagagcctatagaagcagatagcagcggaacccaaactaaaataagtcacactacaaagcgaagtgctcatactacaaataattcacatgagatttatctaataacaaatatgttgataacacaacctcaaagaatgcgtcggtaacatttgtcgtaagcactatatataaactcttgactgataaaatgcaaattttactaaacaaagctgaaaggaaaactattcataaattat

SEQ ID NO: 199429 - DNA, 352 bp, Glycine max
ccttcttttagtgaccatactaactttgataagtcgatcatattattaaggtccctgataccaacgatgctggcaagattaatattacctatcttcagactcgataaaaccttttacgctttactgggccttatctagaacatctgaagaatgggttggtgagtgtgtattcgttgactatataactgacaggaagactctggctgctaagattagcttgtaccatttcatcaatctctatgggcattctattcacatgaaataccatggcaatcttaagtaccacctcgaactgctctgccccctctatctgaaccatgaatgaggcggctgaacacctttcaaactggtc

SEQ ID NO: 199430 - DNA, 410 bp, Glycine max
agctctctattctcagctgatgattattatttcttggctacttcatgcactcctctaatgacaatagcatcatttctggcactaaattgccgggagtttgaacccatcttcttaataaaattttcggcttcagcaagggtcatgtctacaagggctccaccactggcagcaccaatcatactgctttccatgttactgagtccttcataaaaatattggagaagaacctgctcacaaatctcggcggtgagggcaactggcacataatttttaaatctctcccacattcatataagctctctcactgagttgcctaacgcctgaaaaatcctttctgatggccggcgcctggaacaaggaaatttttactaaaatactctttcaggcttccactctaatggccctggaca

SEQ ID NO: 199431 - DNA, 273 bp, Glycine max
agagcccgggtagtcaaagagaaattccagtccctcgccctcaaagtctgaagagagcatgaagaaccaagggacgtcaatatggccacagctgaagcctcggaaccagaaaccacaaaagcccgcaaggaataacacgaccaaagcacaagtttgaggggctttatacggcaccacaatcgagctcacgctctgaataggtgaaaggaatcatcacgggtcaaaggcctgaactcgaaggacgagctaaagggatccttagggcgaaaagaa

SEQ ID NO: 199432 - DNA, 417 bp, Glycine max
  unsure (1)..(417): unsure at all n locations
cgcagcntnatagggagccatgccaagggtagtgtgatatctgttgttgaatgtgaactctatcaaaggctgaatactctcctagcttaccttctgctctaagacacacacccttaaaaggtcctccaatgactgaatggtccgttcagtttggccatcaatctgaggatgtgaggctgaacttaatctaagcttggttcccaacgctttgtgcaggctctcccaaaatctagaggtaaacctaggatctttatcatacactatgctagatggcacaccatgtaatctaacaatctcactaatatacagggaggtcaacttctccaaggaaaatctgatattaatgggaatatagtgagcagacttggtcagctctgtaacaataacccagattgaatcaaaacctctgggggttct

SEQ ID NO: 199433 - DNA, 443 bp, Glycine max
  unsure (1)..(443): unsure at all n locations
tcaagtctgcatgccattgtgactgatctcacttccattctcgctgtcattgtcactgttgggtntgaggtaagcttcgcctatttttaatttctagtttagttagcaaacatcttcaagtttgtttttgttaagagtttgatttttctagctatctattactcatttgctttgctgcaacccaacctaaatattgaaggattaatgtgtatagttgtgtgctttggtttgagaaaagatcatgatttctttgttgtgtgctttggttcaatataaaaatacaatgtgtatagttgtgtgcttctttgctatgctctgaagtttgcaatagaatattaccctcatctgtagaatgactgtgtgtagcttcttcaacacttttcatgcgtctttaattccttgcactactaagacagagtcttcatttgcctcagattttcatc

SEQ ID NO: 199434 - DNA, 411 bp, Glycine max
agcttggttcgaggtacttacccgttgaagatcttataacgatgaagaacgaatgaagaacgtctaagtacggttgaaacctttgcgagattcctcacggaaaacgttacggaaacgtttcggaagcgcctcggcttatattttcttcacggaaacaatttttccaagcaaattcaaaagagagagaagtgcctaaggggctggacccctttcttcttcatttcctcccctatttatagcaaaataggggaggtggttgccgcccagctcgcccaggcgagctcagctcgcccaggcgagcatggttgctttctgcagaagcaaccgccttctggaggaatcttttggagggcccaaatgggcctgggtgctattatcacccacaattttactatatacacacccctctgt

SEQ ID NO: 199435 - DNA, 403 bp, Glycine max
gtaactgaatttgtttttggtacaaaatgtattaactcactctctaactaactaacttccactaatatatacggttactactaagaaggaagggatgggcctcgattaggccaactaatccacctaattaaactaattgcataaaacaaagcccaaactcgcagtccaattttcaagtgtaaaggttttgacttgcaagcccaatttgaccctcgaagtggtagaagtggccaatgcttatttgtgagaaaattgaagatcatcagtttcttagctttctagagactactcacatgctctatttggagttctgtagtgtcctctaggccctacacaaggaagataggtcaactaagcacaaaaatccaaaaataagcaacaattatcaactaagcccaattat

SEQ ID NO: 199436 - DNA, 374 bp, Glycine max
agctcggacaaagaaagagtgatcctacatattatgtgatacaatactacaagatcctggtattacctttcacctgcccctagggcttacccaaattcgggtgggattgaccatcattcataatgactccctatgcatctccttgtctgcaggatctagacgaataaacgcaaatgcatgtatgtttatgatcggacgtttaaatgtaacacataaacaagtggtatcatgttcaattttacttaaacacttacggcaccccgttgatcgagccaaatggctctggatacaatgagcaacaacgagagtgtatgttcttacagatgataacagataagagactcatctcagaaggctgagacgcaaatcatcaa

SEQ ID NO: 199437 - DNA, 156 bp, Glycine max
tatcctttagcgcaaaccgctagcggctcaacactacgtcattacacggagaacccgctttcgcgacatggaccctaaggcgttatatggaaaccaaaatttaccagggcaagaaaaggtaaccgccagggtgcctacgcgttattgtgatttcaa

SEQ ID NO: 199438 - DNA, 304 bp, Glycine max
  unsure (1)..(304): unsure at all n locations
ggtcttgaaggcacgagtatgatgtaagnggaaggtaaaccatggagagtttaaaggtgcacaacacgacatggctccacggccagcctgggtacggtcatggatataatggtacgtattggcgagtatagtgggtacggggttctttgtaaaaaaaattttaatggcattgatatcgatgaagttgtcaatatttgggaagagttaaaggccatatattaggagggctaggatagaatggaaggcaagtgtactaactgcttcaacaaatatggaggcttgttggtagatgaagtgggtggga

SEQ ID NO: 199439 - DNA, 302 bp, Glycine max
tatttgccttagaacagtggctctcagattgagtgtctttgccaagtgatatggctgagagttaatccaaagctcttgcttctcatgaaccttcactgttatattgatgccctgaatgcctggctatggtgtcccttgattgaaaacccaaaaattggcaatggctcatcacattttgtcacaagtgtaccaggtcaaaagaggcttcttatcacgactaaacaactctgacaaaatcttgattgtaagataaagggtgatgaaatggcaatgtagccacattatgttcatctatcactctt

SEQ ID NO: 199440 - DNA, 394 bp, Glycine max
acctctcgctgcttcacattgaatccttttgacatttaaaagtctttatattaatcaatactattttcacttatttaaatgattggaactttaaccacacaatatgatccatcaattgcattcaagggggaatgaaggaaaatacgcttcccattaacaggttatttacaaggacatacatgaatgggcacatatctttttaagaagttggaactacaacaaactgaagcttttaatcatttttaccaaggatcttacgattgtgtgcatgaacgtctaaatacaccacttgtgatttgactactctaaatttgagaggatctcacttaattataaaatggttagactcgaacaattaaaggtatagacaccataactccacatgagcgagcta

SEQ ID NO: 199441 - DNA, 408 bp, Glycine max
agcttattgagaaggtgaattcaatatcttatatttagcacatttgatcttctgcagcacttatagactagagattagagattaattcacatttcgcaatcatggttagcaactcttggacagcttgtggattgatagaacaaaagttatgtaaaggcaaaaagaacttgactagaaacatatgtgatgaactaaggtctacgctaatactggcaaaaatgtcactgtttttttattttaaataatgcttgtataaccattctaaaaagctgcccaagataatgtatttttgtactacagatataatattactattttattgccaatttctaattttttgtaaaacttcatagcaagaatttccagccatttttttgaaggaaaaaagagattgatggattactacaa

SEQ ID NO: 199442 - DNA, 336 bp, Glycine max
ctagaatacaatcctgcaccatcataatcaaggacaaacacacatgatcggtcaggctatctttcagatgctgcgttcatctctttctacagaattgttctgaattatggcccttctcctgctgaaagttatgatgcgcacgttttcttccgagagaagatctatgctccaaaactggagatatgcatcgttttcattctcttgatcctttgccaacagaacgaacgaccaaccgcctgactactctgtgctctttttgcctctgcaaaagaacaaagactactgccaaattctgttggtctactcctccttacaaagatccaaggactaccgcgg

SEQ ID NO: 199443 - DNA, 199 bp, Glycine max
ttctcccatggctcatggcttaatggatgaggcctactctcaccttctttcctttggcttcccgtgcgtgctactggtggaaaatcatgtttataggaccccattgaagcccaaagatcccgcctccacagaagccccacgagctagccttcataaagtggtgttgatgccgaaagcgtcaagcaggggctccttaaac

SEQ ID NO: 199444 - DNA, 430 bp, Glycine max
  unsure (1)..(430): unsure at all n locations
agctttgnctcagactttggctcaacattatcttttgataataattcatcaaatcaaactctttctgctggtacttaaggatatgctgctccaggtaaagtttttttttcttgttatagaaccatatattcaatttctttatagatagttttttgtattaaaatattgttgacaacttacataatgttttattggtacatgtagaattggcttacaccttgactgtgactacaaaatgtgatgtctttagcttcggaggggtggtttaggaaacaatgatgggtagacatccaactgaattgatttcttctttatcagaaccatccattcaaaacaagaagctaanagatatattggactcacgaattccactactcttctctcgaaaggatatgcaagagattgtgcttattgaacattatcataacat

SEQ ID NO: 199445 - DNA, 300 bp, Glycine max
tcttgagccattgtaggcccactaccaggatcttaatgttgactacggacgaggagatatcacgagtgtgatccatctttagagggtctctgaactattttggtctagaatataccgactgaccactccttgattctacgctcgcttgactaccatcttatcttctggtatcttgctcaagtacactacccttattcctctctgtggatatgaaaacattgatctgaccccttatggtgcagaagactcttccccactacccctctcatccttagggacattgacgttatctttaatcct

SEQ ID NO: 199446 - DNA, 329 bp, Glycine max
ttcccacaaggaatgtgttctgttctttaagttagggaggttgaaatataacttttcaatgggtcttttgaaaaataacatcttccggtgccagaaagaaaaggactacctttataagcatgaagattaaccgcttcaagaagctgggacttggctttattttcgtatgaaggaaagggacaccggcttataaactattggcgagcaagagtaattgtttaaactattgtgcagattatcttcatgtgttcattatgaatagaaagggtttcatccttattgacaccctgatattctaatatttgaaacgtgtaatttgcgtaaaagaa

SEQ ID NO: 199447 - DNA, 448 bp, Glycine max
  unsure (1)..(448): unsure at all n locations
agcttaggcaataacaaatatttatccctttatttgtgctaaggtactcgattgagacttgggttcctaggaaaaaaagctataatatttcaacttggtcttagcctttatgcaatgggaataggttgaagttctaggcataaacaaattcagtttgatcaccatggacttgtttagtctagacaataagaacttcttcaaatagtggaggttgagttgcttaattttgttttataggtagcactcattgtgttagtttagatatgacatgtttagtcttaaaggttgtagaacttcttctcctattaaaggaaagaatggtctgatcatcattcttttctagtggaccaacattagtttgtgtaaccacttgatcttccttcataataatttatgtaaacttactctntaatgatctctttangtgttggtgatgtatggaaagtgt

SEQ ID NO: 199448 - DNA, 393 bp, Glycine max
  unsure (1)..(393): unsure at all n locations
ctatagacgactcaagcttncacatatntgaagcatctaaatcctgtttatatacgtttcatccaatcttttatttcttaaaagatttctacaaagaactcgctattgctatattcgtttatatatcaatggatgaagatatacttacactgaaaccttaaaatgcctcctcgataaatgtctaagtgttttccaacatatacatgggtgtcttttcaaatatctgtggcatttattgtataaagcaagatctcaaccataatttcatgcagtgctacaagtattttatctttctcgcccacttccctagaatttattaccgaatcacacttttttttgccaccaattgtcgaaacttctttgtcaaactcgaaccttcttttccttgaaaca

SEQ ID NO: 199449 - DNA, 434 bp, Glycine max
  unsure (1)..(434): unsure at all n locations
tgcggcatgcagcttgganataatggaatccaagattttgtttttacacgncgntcattttggtgcttagaaatgtgacctaagcgcttatgccataatgctcctgagtttgattatcaattctacgcttagaaccatgcaatagaattcaccataggaagctacagtatcaagtaaatatagattatcattaaccaagagtgaaccagtttcaacaatatctgaattaaaagacaacctaaacacattgtttccaaatgaccacaaataacccaatttgtccaaataagaaactgaaaccaaattccgtctaaatgacgggacaacaaaagtgtctgtcagatccaaataaaaactagtacatagtaataatctaaagtgccctatagcttccacttccaccgatttaccatctccaacatagatccatcttt

SEQ ID NO: 199450 - DNA, 366 bp, Glycine max
attagtgtttacggttagttttgaggattttatgctacagtagagtacagttgaatttggaaaatgctatctggtctggttttgaggcttgttttagttgttttgtttgtaattgatacaatattccatgtggcgcctcttctatgtttatttcttctccaaatattgtttcatctttacttgaaattgcaagggattaagtccctcattctatctgtagtgggagccttttcatctttaatataatggtagttcccttagctctgagtgaacccattggcttttatatacttgccatctttgatatttgagcatttcatattttgacattcttttattgtggacttatttccatgcataataaat

SEQ ID NO: 199451 - DNA, 411 bp, Glycine max
gcaccgcggctgcagcttaatttgctccagtagtggttgttctatctctactctatacgccgggcaaaggacacgtgttaaaaatgtgaacagtacattgaaacgtgggttaaggaatcacatcgacaagcctacttaggacctttcttgaatcagtaagtcaatcgatgtggttgttatcaatgcgttggcatttatttgagggtcaattttattttcgtgacttcaaggcacattggcaacttctggtgttgcgtccacaaaagaatattgtagcatggttatgttctgtacggagaaagcctgatgttcacattacggctatagataacactgtagtggaaagcttataaaatttaccattggtcatcagttgtagtttaccactcaaaagattacatgttatatacg

SEQ ID NO: 199452 - DNA, 375 bp, Glycine max
agcttataacttcaataactgtgcttcatttctattcttgatcttcacattttttgtgatattaatcatgtcatcgaatttttgtaagattatattcttttcgatcaagcatcaaacataacattaatattgcgctctttagattaaaccaacttcaataaatcttttaatattccatacttaaaaatttttactggtaccactaacacaaactggaagcatatattaacctaccatcgtcaaccataacaaaattctacagtaaacaaaaatgtttactaaaatgggacgaaatgacttcaatttggtgatgggtatccattctttgaaatgcaacctatcgaaatgggatgtagaggacaattaagtcatctt

SEQ ID NO: 199453 - DNA, 387 bp, Glycine max
ctaagctgaataaattcagttgtacacaaagcatgatgactctttgctctattcaagtttcaagcctaaagggatttcatgtaggaagcaagtatatattgtaggaaagccactttaactgcagtcacccttagcccgccttagttgcagcctcttttggggcatgccttaattacagcctcaagggtaggggtttagtcccacatcaactagaaatatgtcttaagtagagcttatataagctaccaatcctcaccttacaagctagttttgtggagttgagttaagtcccaagtccaaattctaagtgatatacaggagatagaagcctttcttgcttatttactactaacatgtacttgtaactacaagattccgtgttatttg

SEQ ID NO: 199454 - DNA, 367 bp, Glycine max
cagctttgagacgatcatccaacggatttttttttctttgttgaagctgcattgacaaatgttgttgctccatgttgtatgacactagagccactgagctgctactaggatgctgcatgaacaaatatgttaccttaaacagataaatagacaggaagtgaaaggataagctaataacttatctattttaaagaggaacctaatcttgttattctgctattaccttaatctattaaaaacaaggttgtttccctacaattagcgcagaaaaaataccactgcacttggtcccacatgaataatattaacagcctatcatactatagccacatgtaaatgggaacaaaaacaccctaaagttatgtag

SEQ ID NO: 199455 - DNA, 324 bp, Glycine max
tatgagagtaaactatacgatgaaactgggtgttgaatctgtcgtatgaatgttgatataatcgtattataataattaaaacaataatatgttctttgtcgattatacaaaatattacagaaggggatatattcactagcttaccacaggttgcttgcagtcctattctagttatgcatggaacctatagagagggagaaccctcataaagaatataggaaatacactatctcctgcctcgggctgaacttgcttgatatctgttcctaccatatattcttgattttttttattcaatggatcaaaatcaatccgtaataatta

SEQ ID NO: 199456 - DNA, 369 bp, Glycine max
catgcagcttaccatgaaattaggatctattatttctaactggcctaaattcaagtttgttatctttattttccatagcacacacaacttaccttattcttccctcattcactcactccaaaaaggtctccatgacatcctgtaacatactaccttctgaattcctatactccacacctgcttgttgttgatggcgatccattgaagtataagatgaagatgaagtcatttttctggctggtagagtgaagcacctcttgaacttggccacttaccatgcccctcctcttccttcagtgtgaccattcaagctcaagaactcatttgggtttgctacactaccaccatttggattagggttgagagtgt

SEQ ID NO: 199457 - DNA, 387 bp, Glycine max
catgcaagcttgcctcatagaggtctaggattgtttggttttcgtaagaactagttctgctcctgagtatgacagccaccgctttaggagcgttgtacaccaacagcgcttcgaggccatcaagggatggtcatttctccgggagcgacgcctccagctcagggatgacgagtatactgatttccaggaggagataggtcgccggcggagggcatcactggttacccccaaggccaatgttcgatccagaagtagtccttgatttttatgccaatgcttggccaacagaggagggcgtgcgtgacatgaggtcctgggtgaggggtcactggatcccgttagatgcatatgctatcggccacctcctgggatatccgttggtgctgg

SEQ ID NO: 199458 - DNA, 462 bp, Glycine max
  unsure (1)..(462): unsure at all n locations
tattcacgggatatgtgatgatcgcatacattcatcatgagttggctnacaacangccaatctatggagcagtttctggaaaaagtggcatggcctaaagttcaactccctctggagagagcccataagggtgttcctcctggacctgtactagctaggactgagctgacatcagctgaaccacaacctcctatatgagatccacttgcttctccgagacttgatacattgtctccttcggcaccacctctgataatcatccccgaagacttatctaatgaagctgctggttctcctaattcaccaatctgcaacatgcaacatagacgaatggtctgactttatgactggaggactgcgaggaaatgttggtcatactgacataatgttaaatccttgatgtttgagtctccgttgttgcttaaataatatatcatatgtggtttcgacatattccttatt

SEQ ID NO: 199459 - DNA, 404 bp, Glycine max
ggattttaagtcacctgcggcatgcaagcttacagagattgagaatgttttttatcctagaataaaataacttaatgccattaacctagggaattaaaacaaactaaatggctgagtgtaactgaaattgttggcaaccaaaagtcacccccaacagccaacaagtcagccaccatttggtctcccaaaaggctgatgcctaggttgccaattgggcccttattacaacttgaactaaagcccttttagttgattaacccaaaacatatttttggtcagccaactttacaaggattgggccattatttagacaaactaaacactctataattgaaataaagtggtgtcatttaatcctccatttgtgccatgatacaactcacaaccttggacttttctccttg

SEQ ID NO: 199460 - DNA, 325 bp, Glycine max
tctggtttcaattacgagcgtctccatatatttctggcctctatccgacatcggagtaatgagttattgtcgttagaatttgctcacagcttctgttctgaatattgagagtctcgatatactacggaacacagtcggacatctcagtaaaaaggtattgtcgcttgaatttgctcaaagcttctgttcttaattacgagagtctctatatattacgggattcattcggacatccacagaaaaaattattgccgcttgaatctgctcaaagcattcggtggcaagtacgagcgcctagatatattacgggagtcattcggacatc

SEQ ID NO: 199461 - DNA, 383 bp, Glycine max
agcttgtaagattatggggtacccattatatgtggttctaggtggcggtcgggcgatggtgcacaacaagttttccacatccacaatgcgcgcataaacccaccataccctgttgcccacctccaactgagctcacgtactcccacgttgcccatatcctcgtttctctcaacaccggggccccatcaatcctgtcaagcttccacaacatccaagcaaaacaacattcaaacagcataagctatttcatcccagcataagctcagctaaggcggaaaactctgctcaaacaccaaccaaaatcacagctgttctcacttaaagaccacagtaacaattccttctatccaattcgttaaccgctggaacgacaccaaatttac

SEQ ID NO: 199462 - DNA, 411 bp, Glycine max
  unsure (1)..(411): unsure at all n locations
agctntacattactcctcatgcttctttctatgtctaataaggttcgatttcttcgttctgccacaccattctgatccggagaaccaggcatattgtattgggcaacaatcccatgttcttgaagaaattttgcaaatgaacctggtgcttgtccattctctgtgtatctaccatagaactccccacctctatctgatctcacgatcttaatttgttttccacattgtttctcaacttcagccttaaaaactttaaaggcatctaaagcttcattcttataatgaagtaagtagagatacatatttcgtgaataatcatctataaaggttatgaagaattttcgactatttgcatccatgtctggacaacatatgtctgtatgtttgatttctataaattagaactcctct

SEQ ID NO: 199463 - DNA, 340 bp, Glycine max
ctatctctataacatagaatgatcactcttctggctttatcaatcatctctaacttctcctttgcgcttagagattctgacatcttttcttctcctttaagagcttctgcacaaccatgttgaatcaagattgcttccattttgattctccataacccgaaattattttctcctaagaacctcttaatgtcggactttgttggtcccatctttcttgatcttgatgattcccacagacggcgccacttgttgggtcttcttatatcctttgagacctacactatatctaagaatcttgaacatgctctacacagaacaaagcccataactactgaaagat

SEQ ID NO: 199464 - DNA, 309 bp, Glycine max
  unsure (1)..(309): unsure at all n locations
agcttggatttctaggcctaagtcatattttttgttctttagnctagcttctacaaactgtccacacattcacaatggcagccatatgtgcacaattcgttccacaagctaaattccacaaaatcatgtgcaaatgccattgaggcgtttcaccaaacacttggtgggtgcatgtttaaacatttaaaaaatgaggcacgggacaatgcgaactggccattctatttagaatacacaattgggctacgaccatcccatacaaccccccaatttaaacaaacaagcctgaatccacaaaatttgcaaaaa

SEQ ID NO: 199465 - DNA, 255 bp, Glycine max
  unsure (1)..(255): unsure at all n locations
tcactcccgcatcttatctctagcattgtttctttctttctttacccactcctcacgtttggttttttagggaaaaacaccataactaaacgcgccacaaggcatccctatcgcaccagatccaaatctagaacgatgggtgatcaagaggagacacangaacagatgaaagccgacatgtcggctttgaaagaacagatggcttccatgatggaggccatgttaggaatgaggcaactcatggagaataatgtg

SEQ ID NO: 199466 - DNA, 258 bp, Glycine max
aagcaggtgtgacgaggaattttttttttttttgcctaccgagcctgcaatctgcgatgtgctatatagaacggcctacacgatatacctatacgtattgaggcataactggatacataatataatatgccaaagtaatcctttagacttgtactagattcttttatgagggaaaatgctacacgtatgcatatgtacacattgttaatttcctgatgcttgcacctgatggcatataaagtacccatgtatctaatg

SEQ ID NO: 199467 - DNA, 247 bp, Glycine max
  unsure (1)..(247): unsure at all n locations
tgcaatctcgacatgaggattggaagaggggtgttacttcttgctcntattccnagaccatcggagggttcctgtagatatgtcgcgcgggtcacgagatcccgaggacacatgggggggtgctattgcccaataccaagcttgtataatcccgacccacacccgggcattatcagtcattgaaaacctgtgatgtacccaaacaggccagcctctggcgtcactagataaaaggaacaattaccac

SEQ ID NO: 199468 - DNA, 345 bp, Glycine max
  unsure (1)..(345): unsure at all n locations
ttaatactagctttccccatcttcttanatatggggagaagtgaagttgacatatggttcatcccctttagcacttctctttcttcgaattttcttaagaagattattttccgcgaagaatatccaagccgaggcgctattgtaacgtatcccggagtgattacgcgaaaggtttcgaccgttcttctacgttcttcattcgttcttcatcgttcttcaggcctcaacggagaagaccctcaaaccaagcttttcaattattctatgtacccgcggtgggccacacttggtttcatgtatacttattctcgtttcactgacattttatacccctcttgatgtgct

SEQ ID NO: 199469 - DNA, 412 bp, Glycine max
  unsure (1)..(412): unsure at all n locations
gatatgctcatgggccacgtgtctttttttttcnatactgagtatggaaccttggtgttattccacgttgacatgatgatgttaacgtatgggtgcaactgaaagtggattatagctcaccatcctgaatagaggaaaaatcagctccacataattcttgtggacatctaatggatacaatcatgcattggaactatttggaagtcaagccatagaggagacaaagactttggattaaaagtgaattagaaaatgacccaccggacctatttggaaacgaagtattggtgattatatatgagcatgctgatcttcctgataggaaaagaaaaaggtaaagatatcatttcgttggcctcccgaaattatgagggaaatctcatgatgttaaaagtcaatttgtgtgctaaac

SEQ ID NO: 199470 - DNA, 173 bp, Glycine max
ttatacaaggggaccttacattgtgtgaagtgatcagggcatggttttatcgtagaaaaatgctaaaataaggattatacgacatgtatgggtgaaaaatccccaattcatgaactgaattttgtctacaaaagaactgatggtcgtctcttaattaaaagatatgaaaccta

SEQ ID NO: 199471 - DNA, 376 bp, Glycine max
gaactatgcatgcatatctggttttctctttaagatggcagaagaacttaacttatgatatcatttaaactaactcacatttccaattcaaaaatacgctgtgccaattttaaaataaccacatacctcacaataagaatgtgagagattacctttcgatctataagggactatacatgtataatggagtgttagcatgacacatgaggattaaaattgttggcttaccatctgttacaaaattaccaaaccatccatcacatagaatattttcagggaaggcaacttgtttgaagccgaccacctttctttgcccttgcacatataactcatctactctcatgcatccattacagagctgctcattctataatta

SEQ ID NO: 199472 - DNA, 261 bp, Glycine max
gcaagctgggtctaggacgtacccgtttattatttttaacgacgaagaacgaatgaagagctgtttagaacggttagaaagctctcccgagattcctcacggaaaaacgttcggaaacgtttccgaagcgcctcggcttaaattattttcacggaaacaaattttccaagcctattctaacaataaagaagtgcctaaagggctgggatcctcttgttcttcatttctcccctatttataacaaaataggggaaatgcttg

SEQ ID NO: 199473 - DNA, 372 bp, Glycine max
ttatactaccaaacaattaacttccattaaaaagattaagaaaatattttagacacgtggccggtcatcattactttaatgaccacaatctaactagtgtggactataacatataaaaaaatgagaggtcatgtatctctaccagtaaaaaaatttgtttaggaactttaaccaaaaatgtagaaaggttcaagactaaaaacttaattaaccctgtaaagggagtgtatgccaaatatatgggaaacaaatatttctgggttgcgacagtatggatacaagtgatttaataaaaacttctacctaagtgtggttgaagtatgattctgtcattatttgaaataggaaacttgataacaaattgtttaattt

SEQ ID NO: 199474 - DNA, 309 bp, Glycine max
tccttggaagccctttggagccgtggttcccttcccttggtttgaagcccactactagccttaagtgaaaaaccatgattttaccatattcttaagaagatttggagctctggaattgtttttggaataagtgcggggggttttttgtttattggacaacctgagttggtggctaagcttcatgaagtattttgggccatacttgatgacattggctattggtaaatgctggacatgctaaatgaatgttgttctcaaggctaataaaaaaaaaataattctaaaaaacaattctgaatgaaaaataaa

SEQ ID NO: 199475 - DNA, 365 bp, Glycine max
atacctcacaaaatatatatatgtatgtctaagtagcaagataccctggatatgcatgtatataacaaaatatctcacaaaacatatatatgtatgtttatgtagcaagataccttggatatgcatgtatatagcaaaaatatcttacaaaacatatatatgtatgtctaggtagcaagataccttggatgtgcatgtatatagcaaaaatatctcacaaaatatatatagtgttaggtagcaagataccttggatatgcatgtatatagcataaatatctcacaaaacatatatatgtatgtttaagtagcaagatacccttgatacacatgtatataaacagaacctcacaaaatatacacat

SEQ ID NO: 199476 - DNA, 61 bp, Glycine max
aggcccgtaatataacgagacgctcggacttgaacgcccaaactctgagacaattcaaacg

SEQ ID NO: 199477 - DNA, 174 bp, Glycine max
cacgatatattctggactcatcagaatccagtaaacatgctggcgtgaattgttccagcttcgattcatttcacgtctgattttcggactgatagactccagaaaaagtatgcgctgattgctcgagctcgattccattgagcgccgtattaccgactatcaacatcataaaag

SEQ ID NO: 199478 - DNA, 443 bp, Glycine max
gcttctactgatgtggcagggcggggccttttttgcttgatgtcccaaccgcgggctgtggccttagttcttcctttccaagatacttttccttatgtcagcttgcgtacatttatagcctaacccaaaattcccgttgtatcctctggtgcttaccaggctggttatgccgccattgttcttgcccaaacccattccgggctcgtaaccgtaccctaacatcacccgggccaccatcattgccgtatcatatcgtgaaggctgcccagagagggaatctactaaggcaatgctgactacctcaaaagatgggaaagtctgttctaacgactcctccgcggcttccacatatggcatagaagaatggcaacttaccaagactgtttccttacccgatactatgaccaaatgcccctccactacgaacatcaagaatttagtgg

SEQ ID NO: 199479 - DNA, 359 bp, Glycine max
atcatctaataagacagcattgcacttaattgatattatatatattgtatatatgtcatcaacttttacccatgtatttgtttgacataatcaaaaaaaggggagattattaaatcaaaaggcatctatgtcttaaagacgaacacgtactcctttttattcttaatagacgcaaataaatacaaatgataaaagagtgatctgtgtgctatcaaatcatggattgtattcttgcgtttgagttttcagatgatacatcaatataagatgatatagcatagccttaaatagtaaatttaagaacttcattctatactctatgatgcaatcctaccccccaagggcattggataaaaaac

SEQ ID NO: 199480 - DNA, 374 bp, Glycine max
actagctgaaattacaaattttttttttgacaaatacccaacagacaattagacctctccagcgacacgtacaatcccgggtggaggaatcatctcaaccttagatggacgaattttcatcaacagtctcaacaactacctaattttcaaaatgaagttggcccaaacataaccatacgttcctccaccaatccagcatcaatcacataaatagccccagacataccaaacagttgaggctcatccgcaacctcccctagaagaactggtgaggcatatgactatgcaaaacgtgcaggttctacaagataccatagcctccattccaagcttaactaatcatatgggacaattgactacaccgttaaatcaac

SEQ ID NO: 199481 - DNA, 387 bp, Glycine max
  unsure (1)..(387): unsure at all n locations
tcccagctggccttgaatcagaaatctttcctgtcgcaagagactgtggtatatgctcctttgttgaccaccatacagacctgtgctcttccatgcagcaacctaaagcaattgagcagcctgaagcttatgctggaaacatttacaatatacctcctcaacctcagcagtaaaatctaccacaatagaacaattatgacctttttagctacagatacaatcccggatggaggaatctccctattctcagatggtctagcccttaacaacaacaaacaggagcctgttccttccttccaagatgctgtnggcccaagctgaccatacattcctctcaccagtcaacaacagcatcagcctcagaaacaacaaatagttgagggctct

SEQ ID NO: 199482 - DNA, 389 bp, Glycine max
tccccattggtgtgtggttggtggcgttccatattcttatatccaatattttggtctctgaatctattacgagcttgtgttctttttctctagaactagaatttttgagtgattatataattttggtacattaattggaaattgaatgatagaataaaacatattttgcaataaattattacttgaatattttttgtttttgaaagatatagaataaaagccttaaaacctctaagaaaacccacttgagctaaatcagctctcaacttataataaataaaattaggagcaaaagagaaaacttggtgttgaagttcttccatcaaagaatgcattttgctagcttgtcggtcacttagtgatggagacttgtttgagaagcttctata

SEQ ID NO: 199483 - DNA, 433 bp, Glycine max
gacgcttagagcaattcatatggtcataactctactctttgtgttccgattctggcgcataatatctcgagacgctcgtaattgaacaatggaagctcttgatcaactcccatgggcataacttttaacttggaggtgcgagtcatgcgcataatatatctcacttgctcgatatttgacaacggaagctctcgagaaatgcaaatggtcgtaactgtacactcagttgttcgattcacgcgcataatatctcgagacgctctgaaattgaacaatggaagctcttgagcaattcacatggtcatatactttaactaggaggtgcgattcatgcgcattatatatcgagacgctagaaattgaacaatggaagctcttgatcaatcaattggtcataactttcactgggaaggcgattctgccataatataaa

SEQ ID NO: 199484 - DNA, 307 bp, Glycine max
tacttcgggcatgtattatagagcaacaaggtagttggatggattggttgccattgactgagtttacttacaacaatagctaccaagccaggattgggatggctccttcttaagctttatatggacgaaagtgcaaaactcctatttgttggtactatgatggagaagcaatacttcttggacctgaaatgctacaacagattaacgaacaagtgaggttgattcgagagaaaataaaagcatctcatgatatgctgaagagctattatgatataaggatgaagccactatattttcaggaaggaga

SEQ ID NO: 199485 - DNA, 390 bp, Glycine max
tctctaggacgtcttcttaagaaagcttctctttgtattctcctattctataaatagaagcatgtgtcacacttgttgttactctgatgaatgaaagtcttatgagatacacttcaaagttccacttctttccttcttttattccttcaatttcgtgctccccccttctctctttcttttactccattaaagcatcctcttcaagcttcttatccaatgcaattcttggtgggaaactacttcttccttggcttattccctagtggatggtgccgcccctatcctcttgtcctttgccgtccgctgcattctcatggtgaaaaatcaccattgaaggacctcattgaagctcagagatccatccttcatagaagcttcacaagcgagctt

SEQ ID NO: 199486 - DNA, 430 bp, Glycine max
  unsure (1)..(430): unsure at all n locations
ncaagctttaacacaaagtgagtcgttatttatactaacagaagcctaattcaattaaattttatagggggaggtgagcatttgcatgctacaccccatttacatgcctcatgacacctaagcacacttagtggagaatcttggacttgatcttggattaatgggatggaccttaactaaaattcactaatcataattagggaaatttcggctccactaaatcaagtgaaatttgaatagaaattcaaattcccctccaattttgcgtgacacttaggctattaataaaggacatgtgtgcgcaatttttcaatttgttatttgagaattacacttcaaagttcagaactcatttgaggcataaaatttcgtgctccttttctccttttccctccatcatctgttcatacctccaagctcttattcatgg

SEQ ID NO: 199487 - DNA, 405 bp, Glycine max
  unsure (1)..(405): unsure at all n locations
ggacacatagatactcaagcttttctacaccaaccttgtctctacaaccaataaccttttctctacaaccaaccatttctccccctgtggcaacaacataatacccaagaactaacagattgaacaaatgagtataaagatataaagatcagagtgttaagcataaccatccaaactcacaaacgagaaataatcaaatcagaatccaaagaacttataatgtcaacaaacacacaatgtcaaagctcagaaagtctgaaatcgttataccacaagataaataagcaaagtacttaacgcagtaatngaaactctaagaaacttaaacaaccacaatacacggcttattaaaactaaatactaagttgaccgagggggtggtggaagatcgaaactttgacgaat

SEQ ID NO: 199488 - DNA, 297 bp, Glycine max
atgactgatctatcttaataggagagaaatcttcttaaaaagcacttttgactgatccatgtgtgatgccttctaagtaggaacacagccagcccctccttctattgaagaaagggaaaactatgtcttatgtccttaccgcacataatcttttcacctgtggtaactgatgaactgtcagggtgatagatcttatagcaaaccacaacggttgtctttacaatgaaaaccatgtgaataaatggactctttagtaggaaaaaagaggatggttcccaagggggtgagagtcaaagg

SEQ ID NO: 199489 - DNA, 418 bp, Glycine max
tccgctgtcagtgcttgattgaacatctttattttacatatgacaaaatatattgttggaacttgtgctctaattatattgcatgaccatgggacccattcccaaggtggccacccctgacctgtcccgtttttaattgggaaaaccctacttgaccactgtcagtggcaaaatttacctgttatccaaatacagatatggtgttgaatatgggaatattaattaccccccctaaacccgatccgctaataatttattttctaaaatatcatttcatatatttaacacactcacacatgaaactattgaatctgaatctattgtattggtggattgattctatgttatcagtacgaatcaaaataattatcattgctattaaactaatttttaatctctaaaacaataaagtttttat

SEQ ID NO: 199490 - DNA, 230 bp, Glycine max
ctggtaattcctgatggaaaatcatatatgcgttggtataattgaacttgaagaactaaacttacttcactgatgacggaatattgctctccatttatctcggaattgtgaacttattgttattggacagattccgcagctatttaacttttagaggttgctatttggctaatgggggacttctatagaattaactatatatctgagagctggtaaaacttcaccacctt

SEQ ID NO: 199491 - DNA, 421 bp, Glycine max
cgcgtgtgacacttctatagaggctggatctatatgttctaatgaagtccgtcaacggcgatcttcctccatggataatcatctgaacgattacggagacgaggtgatatgaggcgcctaccactattgaatacgccttggaagaaggagctctgccaccaagaacgtgcctttgataacaagcctgtacacgatgctctcttggcggaacagacaactagatagaatcatagagggtggagcacgaaattgaatgagtaaaagagggagagaacttgactcttggttgttgctcaccagacttgcatcatcagagtaccacaagtggacacatgcgtctattatacacctagagcatccttgaaaaccatcttgataagcttcttgaaaacttgctgagaagctctttgaaagcttcttg

SEQ ID NO: 199492 - DNA, 360 bp, Glycine max
aagctccataatgagatagcttgaaatgaagagcccttggttgatacctggacctagatgaaaaagatcatgaggaagcggtgtttgcctgcttgtttctctagggacttgaaatttaagcctccaaaactaacccatagcgacaagggggtctgggagtactttaaggaaatgggtgtcctatgattcagccaactttgaaaagataagagggaccttggctcattcttaagggtaacctaagatattctgaattgtgaacctccgagtttgtgaatgggtgatttttacaagcaatcattggacatcatttaaatgatggagggtaaaagatttaccacttggtcttttattgaaaac

SEQ ID NO: 199493 - DNA, 342 bp, Glycine max
  unsure (1)..(342): unsure at all n locations
agcttncgtnttcaataacgagcgtgtcgttattctacgggacacanatggacatccgacgaaaattatttccttgaaattgctcagagctcagtttcaataggagcgctcgatgatatgggctaatcggacaccgagtaaaatattgtcgatagaatttttcatagctccgttcaattacagcgctcgatatccacgggaccaatcgacatccgagcaaagtattgtcgtagaatttgctagagttcagtaacaatacgagcgctggattatacaagactcatcagaatccgagtaaaagcattgtcgttgactttaaagagagcgacttgaaaattacaa

SEQ ID NO: 199494 - DNA, 444 bp, Glycine max
ctcaagtctggacgaaatgcaaacgacaataactctggactcggatgttccatttgtgttctccaaatcacgagacgctccaaattcaaaacagaagctattagaaaaatctgtggacgatagacttttacacggatgtcccattgagtcccataatatatcgagacgctcgtaattgataacagaagctatgagcaaattcaaacgacaataaactttgactcagatatccgattgtgtcccgtaatatatcgagacgctcgaaattcataacataagctcttgcaagaatcaaacgacgataactctttacacagatgtccgagtgagtcccataatatgccgagaccgccgaagatgataactgaagccctgagataaatcagacgacaataactattaactctgatgtccaatgtgcccgaaattatctggacgctcgaa

SEQ ID NO: 199495 - DNA, 411 bp, Glycine max
  unsure (1)..(411): unsure at all n locations
aaggaanngnggaacaggattcaatcctttaaatttaattaaatatgactacttgacagctttaatgtatagtagtcactcttataattagtttctttttgaattatcaaattattacaaggaatgcatgccaacaaagtggcggacatttttatttcttttgaaaacaagagacttagagaatttcattcaagataataggagcaatatacgaaggaatcaaatcaaaagtgtggaaactagcataagatcttgacgctctagctaaagtgttaacaataagatttgcttgtcttcgagagaaactaatcctatagttgttgtgtgtttgagggaatctctacattttgtgatgatgtctccaaactcagtctgttgactagagtcactgtgaatagaatctaaaaccta

SEQ ID NO: 199496 - DNA, 274 bp, Glycine max
tggaaataatggaagtctatgagtccatgggcgacacattagcctttcaacatgggggttctgcaacacacaataagggaatctctctaccttctggagtttggactctatggatcatgaaatgcacattgcgatcagaacttctgcacactaatatgttatttaggaattgcatgagtctatcttaagcttaacattgaatacagaatgacataagttaatccaattctgagagcctattgctctcattaggagggctcgaaatccaataaaa

SEQ ID NO: 199497 - DNA, 423 bp, Glycine max
  unsure (1)..(423): unsure at all n locations
ctgcaagcttgtttttgcaattgaagagaatatttttatatatgcaatganaaagctgaacactacaacaccaatggattaaaagaaaaagttccagataaaaatatagaagaaataagtgatcatcattgcaattggagtaaagtagtgatctttctgctcttatgtcttggcaaaaaaatgcatttggatttttttgcgaggccttcaaatatctgattttacatttggttgtgcatgacttagattgattgaatatattaagtcttacaagaaggatctttctcaaatcattctcttgagatcctccattaaaatgatttcactagatcatctcatcctaacctagagggtctttaactagctagatacatcatacatatatatgtatataagaaaatatcattgagctttttttccatc

SEQ ID NO: 199498 - DNA, 494 bp, Glycine max
ggaccttagatactaagcttcttgagaaacattcttgagaagctagagcttagcttctcacacccctctaataactaagctcacctccttgaaaaacttccttgagaagattcataaagaagctagagcttagctacacacacctctctaatagctaagctcacctccttgagatgagaagctagagcttagttacacatcccctataatagctaagctcacccccatgacaaaatacatgaaaatacaaaaaaaagtgcctactactcaaaatgccttgaaatacaaggctaaaaccctatactactagaatggccaaaatacaaggcccaatagaagaataaaaaacctattatgatatttactaagaagagtggacccaaccttggcccataggctcagaaatctaccgtgagggtcatgagaaccctatggccttctttagtagctcaaggaccaagctcttggattcttctatctaatacccttggggg

SEQ ID NO: 199499 - DNA, 362 bp, Glycine max
ctgaactgggatcattcatctctattttctagattacttattaattcatgaggctgtggtaaaactggtttaccttacaggttacattgttggttaaaaaacgacaatgacatttatattatggcgtatttaaggctcatttaaagtttagcaccgggtttggttatctactgtaataatgctctactgaaataatgctttgttgctaacgacaatattgtgaagcttgcgctttgacaattatgtgcatggaatatttttgattttataatgctgaactgggatcatccatttctatctttctagtatagatactaatacatgaggctgcggcaaaactgtgttaccttacagtttacttt

SEQ ID NO: 199500 - DNA, 312 bp, Glycine max
  unsure (1)..(312): unsure at all n locations
ttgtcccagatttgggggagttgttggatggataaatttaatagtaagatactacaacacacatagcatattaataaaatgttgtgtcttataaaaaagaaattcacatgagtgtgtgctgcttaaacaaattcaaagtgatatgctacttgaatgggctaagtggattgaaaagacaaactgggttatctaggatctgtcactcttagaactcaagcttttgcatcctataaataccaatatttgngtatccctacctcattacaaaccaataaaagtccttctgattcatttatgtatttctgactttat

SEQ ID NO: 199501 - DNA, 332 bp, Glycine max
ctagtaatatgcctactatcattgttattatatctttcttcgccattaagggaaacacttgggctgccagatccctccacctttgggcgtattctttaaaagattcgtgccccctttttgcacatgttttgtagttgcatcctatccgaagacattatactgacactgcctaacgaaggcaaccaataagcccttccaagaatggactcaggaaggttccaagttagtgtaccaggtaacagctaccccagtaagactttcttggaaggaatgtatcggcaattgcacatcttttgcgtatgcgcctatcttccgactatacatatttagat

SEQ ID NO: 199502 - DNA, 511 bp, Glycine max
ctcacgcttaacctcatcgtctctcacagtctttagatgtgagagtctttcctttccttgtgtccgggctctcagccacttatgatagccgccgatgatcccattactgcttcccctaagctctctgtcctttcttcacgccgcatcccatgccttgcgaactccttggagtacctttgcattggggtcactgaaaccccgtgtaatgaaaggcgtaatgctttcgtctaatggcgctcctctcatggggtagccaagctgtcttatggcgaggacgggattataattaatacaaccccatgttctcatccagggaacatttggacatccttcgcatgaagatacaatcctgattcttccttccttctagcgagggaaccaactaacagacgcccctccatgctagccaagagttggtcccaattcgcctttcctttttcgacgcacaagcggtgaccttgtaacggatagacgggcctaccttcttggagaaaaaagtgtgaaactaacc

SEQ ID NO: 199503 - DNA, 306 bp, Glycine max
aagacgagggagctttatgaaaccctttactctttgacctcattatgctgtcattggcagtggttccttctccacaaccataccaggaagaagttgttgcatagcttgcaacattttctgttaatcgtggtatgatcttacctatttggcgtagatgttgtcagtggccttttgctatgccaaccttggtttacggtacatggtggtgtatccttcagtgctttagatgtgtgctatcaacgctgacactacagttgaaggatcatattcaatcaagtggtggatggttttactgactagcaaata

SEQ ID NO: 199504 - DNA, 402 bp, Glycine max
  unsure (1)..(402): unsure at all n locations
tatccaatgccttcagcatcaatagcatcattactgcgttttggaanaatgtatccataccctctaatatttctccatcaccaagccaaggcatgaaaagttaaaaacaggacacgacccttgatggtagaatcccaaaattcaacataagccccacaatgaaaagtgtcaaataaaacaccctacatagtacatatacaatatatacaatatgagtaaaaatagtgtcctattcttatctgggtcatcagggaaaaagggaattatgcactagagttcgctactntaaccttgaaatcgatatttaatacataaaatgcacgttttacccacagacccgtttctaaaaccaaatgatgagcataaaggcgggccacaaaaaaccaaaagatgaaaattttc

SEQ ID NO: 199505 - DNA, 348 bp, Glycine max
gcgcactttttttggaaattttatttgatggaaccccctactggaatacaatgtaatgggacccttgggccccctataagcttttccttggaagatagaccaaaatgcttccttagcacttatgacatataaatccatgataccttatacaccatcgtccaagatacccatatgttatcacaacccaatttaagaagaatggtctgctgatacttccaatcaaccttatgaaacatacttcttatattaatttttagagcaaattcacattccttacctcatcacttacatcttatgtgaaggatgggttctatacctaccataacattattagaataatcttatttc

SEQ ID NO: 199506 - DNA, 288 bp, Glycine max
aaccatgtataccggcctctggtgggtgaaaatgcataccctgcagttataaatgatctagtatattacacattgttgtcataacatcaccaataagtagcatattttgtgaagaatcaaaagactaacttgtctaatgaacttatctaccgggaacaattctactaatatatattcatgtctcatactcggactgatctgctatagtttacgcatagcttattactgaccatcttaattgttttcaaactcaaaattacatgtgtttatgtagcgatactgcatata

SEQ ID NO: 199507 - DNA, 305 bp, Glycine max
  unsure (1)..(305): unsure at all n locations
gcccgaanaacaccatttgctagtttaccatgcattaggtaccatgttcaattattttggtttgtaggtgtgagtattttttttttaagaaatgggtttatgatcccaacatggttgagtcatggtgcctaacacatgcaattaaaaaggtatggtgaagtctcaccgcttcccctattttgtttttgtatagaaatgaaaactctaagattatccatcattagaccaaatgtgatgcattttgtgagatcaaaaagtttgttgaacgcatatgcttgagtatgtcctgactcatgcgaaatgtg

SEQ ID NO: 199508 - DNA, 362 bp, Glycine max
gcttgctcactagcttttcactttcattagcttctgaccctgttacatcacgcacactttattctttgttttaacataaaacttatttgatgtgtgtggtgatgcattacctttttttttgcatcccaattagttctactctcccaaaattggggaaaaattgccttgaaccatatgccctcctataatctaagcaaggtatcatgagatacttaattaagttcagggttcaaatttatgacactatcattcaccttcaaaagggtgcaaaggatatattaacattcaaggaaagtttttggcaaaagcccgtgtagtacaatatggccttcaacagttctcatatatacattcattctaat

SEQ ID NO: 199509 - DNA, 373 bp, Glycine max
aatgggagtgcgtagatattattacctatgcgtaaacggaaacatactctattacacttacaacaatacaccactaaattaggagagagtcttgatacactcttacaccatgtttatacacaaaaagtagtcatattcaccgactaacaactacccttaaattacagtttagcttgtcctctagcaaaaagagaacattctacttgtcctcaagggacaataacatacagggactatgtactaaggtgtatgcaacaaaagttactgatcgtcgattagagaatgaggaaaatgccctatcacttgttttacaaaaatgcccctttcaaaagaaaaaaaatggagtcgtcttttaagaattatctaaaccatt

SEQ ID NO: 199510 - DNA, 349 bp, Glycine max
  unsure (1)..(349): unsure at all n locations
accatagaaactcaactgcatcactcggtggagatgacgaagattctttttattggccaaagnncacaaaagcctaatgtcgtgtttcaacgagcgcgtttatcgtgggaacccaatgtcgatatctggggcaatacataattgggtgtataagagtcctgcacacgccgaactaccctagaactccataatagcactcctgacaatgatgaatttgaaacaacatgaaaattaggcatggctactgccaggtgggcactcacacatcctcgctatggcatagagaccctacggatgggaaattacacaaacacaccctatagtgcacaaatatgttctcccatcaatt

SEQ ID NO: 199511 - DNA, 315 bp, Glycine max
  unsure (1)..(315): unsure at all n locations
cttccacggcttattccctaatggatggtgccttccctctcctcttctcctttgcctttcgctgcgtctccatgggggaaaatcaccattgaaggaccctattgaagcctaaagatccagcctccggtaaagcttcacaagcatactttcatcactaccaagacatttttcgttggtcttaccaagatatgcctggnttgagcctaaaaattgtgccacaccaacttcctttgaaatctgaatgcctctccgtaaacgaaattgaaagaatgaaacccgagatttcctaattttccagaagaggtgataaccatt

SEQ ID NO: 199512 - DNA, 387 bp, Glycine max
caggtaacaacttgcgcaacaatctatatactcattatcctaacccatattggtaagactaactcagagcggagatacctgaagcactaagagcacatgaactcctacatactaataaataaaaaatctccacgtaatcctaaaactgatacatatataactactgctgagactatctccttcggaaatacaagatattgatgccataggccaaaacgaacatgaagaggataacccactctacatgagcagcagcaacaacgggaaggaatcatactccaaaccaagttttgataagaaatcttcaatccatgcatcacacctggtatacaatctgatttagtcacccattggaggtataggcctatatgccaaaacagagaaccc

SEQ ID NO: 199513 - DNA, 399 bp, Glycine max
atcttacttcctgttggtcttcaagatagcttaagaaacatgttcaacttgttcgaaaacaattcggccctaatccctcttccattacagaaacaactaataagcaagttcttacatgacaagttatttaccgtaacagctcaataactaagcatacaaatttactatgctaataacttctgacacaatccagttagacatacgagttttctagcaccacacagtcacatacaaagaccttaattgctagtagatatacataaacctttcagtatcagaacaaaaatgtaacctacgaataacatttcaaacagaaacattgaatcagactaataacttcattctctataccataattgcaccataatatagcaaggttcaaaatgcaggaaaagaact

SEQ ID NO: 199514 - DNA, 332 bp, Glycine max
ttttttttttacaaacaaatgcaatgtaactatgtaacataatcgattcctgtaaaactgaaaaaatttcacctacatgatatatataatcttaactaacgacatctcatgggggggaaatcgcggtaaaatcattccacattcagtaccttggattcccttactgtgatcaagccaatttttctgaatcaaagatcaacacatgcttgtctggtctcaacattctttttggagacttcatctccatggggtgggtcctcatgaaatacctcttatcatttgaaaccatcttgctttcttgcatgaatggcaccaatcaccccctactttct

SEQ ID NO: 199515 - DNA, 491 bp, Glycine max
  unsure (1)..(491): unsure at all n locations
acacttagaaactaagctatgattcctntcctgagaatacttggattggatgctttattcctttggcttcccagcccagttctgtacttggatcatggaatgtgtttcttccacttcctttagtgtgacagtcaatggatccatttatggccacttcaaaggacagcggagtcttatacaaagggatcctctctccccttatctgtttgtgctttgtttggagtactcttccagagatatgagcagcctcaaggatgatgccaatgttaaatttcatcccaactgtgcagatattctgctatctcatttggcttttgcagattatattatgcttctatctagaggagatatcccttctgtgtcaactattgttgccaagcttcagcacttctgtatggtttcggagctttccatcagctctgtaaatctgccatatactcagccggtataggcctcatgagctttctcatattcacagcttattacatttc

SEQ ID NO: 199516 - DNA, 404 bp, Glycine max
gcctggatcttgtacaaacgtgagcctatatttattattcttgttggctcttcaaactctctttgacttcgattaactcttgcgtctttacaagaatctggttcaaatattggtcatgttgaaacttagctaattccaccagcttaaccagtttcctaacctcaaattgttggcacttcatcaactttgtctcggcacaatcctgccaaacattcttgaagaagtgttggccaagtatttataggcttctttcgcatctctaccaaatgcaccatcaaatgactcttcaatagattaccactttcaacatgtggaggaatttttgcctaatgagaaatcaactgatcctaaggggtcaagtcaatctagtcttcatttacaaagttggccgagccttccacaat

SEQ ID NO: 199517 - DNA, 478 bp, Glycine max
  unsure (1)..(478): unsure at all n locations
cgcgacctttagtcgaccgccggctgcaagctntgaatcaagtcacaaagaatcaatattctttattcgtcaagtttcaagattcaagaacaatcaagatcaagattcaagactcaagattcaagaatcaagagaagacttaatcaagataagttctaaaaaagtttttcaaaacattgaattgcataagaatttttcacaaaatcttttaccaaagagttttactctctggtaatcgattaccataaggtagtaatcgattaccaatagccaacatgtggttcaaaacttatttacaaagctgtaattgattaccatgagtttgtaatcgattaccaatgttgtaaaacggtagatttcaaatttcacgagccagaactagtgataanacatcttcaaatcattgtagacgggtgtaatccgatacactaaacatttggttctcaatttaacatgaagagtccatctttggatgtgt

SEQ ID NO: 199518 - DNA, 460 bp, Glycine max
tagctgaattcagatcgaatcgaagttagttgagctctttcttggttctctttgcggaccaaatcagcctcatatgcaagggttaggcactaagcgctcaagactcgtggcttagcgcatgaacagagatgcacttatcgcgaagcttgcgcttatcgaaaggactgtttttcaaaatatgttttctaagttatttttcagtcctttttccaagaaattgaaaccattatgttaaacattctaagattggctgatataatcctatgtacagattacatggcaagttccaaatgatcaaatgcatgaataacaaacacaacaaacattaaaactgggttgccttctatgaagcgcttctttaacgtcattagcttgacgcatagcttactaccttcaacgtggcatgaaagtcacaaagaacacatcttcctagaaggttcgcctttagctagaaatttca

SEQ ID NO: 199519 - DNA, 362 bp, Glycine max
  unsure (1)..(362): unsure at all n locations
agcttgtctaggcacagagtttttgattttttctgttcaagaaaggtccaacattttctactatgcattcagtttcttcaaaatgaattgctttctattattatgtgttttatgtgccacaatgtcactatgcttgtgttgagctataattatcatttttctattgaacatgattgagaatgcaaccatgatctgagaagtagtggttaagatctgaatagatattttcagaatcgagataaaataaagcaccatggttttttactataattaagccaaaagttgcatgtgggtgaattatggatttatggtccttcaagtaaattataatcatcaaatattnntatcattgatggcttctt

SEQ ID NO: 199520 - DNA, 354 bp, Glycine max
  unsure (1)..(354): unsure at all n locations
ggacacttaaaactcagcttggacatnatgctcaactggaggtgagtatggttatttagctaacatctattcaaatatgaacactagttntcaaatcgcatatgtactatttgttgaattagaaataccattcatgacggactccagagtgttataatactagatcagatgcgtgacttactcaactattagaaaatcatttgcacatcacaacttctctgcataacataagttgcaagggtgagtgaccatattggataatggcatacatctatacctctgtcatatagtcaactccctataacacatgacatttgctcagccgaattgcatcttcttccaacgggagattta

SEQ ID NO: 199521 - DNA, 256 bp, Glycine max
gagaagaggagagtgtctatttttgtagggctcgcgcctgacatctgtcagaatgtatgtctcacactaaccttcaatcataaatcgacgtcaacaaatagatgtactcggcaacattgcgttcccggaagataccgatgtcaacgaacgtacgcttacatcgagttgtgacaatccgcaggtatctaaccccttatttatagtgatgccaccgaattaatcttgcatcacgctgtgccaaaactacgttaatatg

SEQ ID NO: 199522 - DNA, 342 bp, Glycine max
agcttatcttattaaatcattgaaatagtgtctctttcatacaattaggataatcgtggaaaacatgagtactatcaaaatctctaaacgccctagccaaatggtaaatcacaagattagcttgtcttataataaaacagaacttaaagtcttattcagtacgtagcatagatctacacttgcttattatgctaccaaattcattcaactctatcttcttcgagttgatagccgctaccaccctctgacaatcagcttcgaaaatcaccttcttatattgcatcttctttgcccacgataacgctattaaaagggctaaatgtggaatatatactggaaaaa

SEQ ID NO: 199523 - DNA, 388 bp, Glycine max
gtgtacaaagttttggtcacgactaattctccatctgtctttgctctgtctgtcaaattgcgtgtgactgtatcgtgtatgcgcgtctctctgtttgtttgtttaagcctttaaggttacagttggagagcaagttcaacactcttaagcttttctatccatcacattcaaacaccccatctcttctcatgcctttctgctaacatcaccaaatacagatctgaaacaaacaaacaaaagaggtaagcttcatctttcatcttttgctatgcaccaccacccttttctgtcacctgcttatctactccaaggcttcaactttactagaccaattttcctgcatatctgatgatctgacgttacaagggtaggaaagcagtgaaaaatg

SEQ ID NO: 199524 - DNA, 319 bp, Glycine max
tgacaccctggatcctactattggcggagaaggcgttgttgttccatcgtgcgatttttaagagaacttgaccttggcgatgcgtatgaaatctctatctcctccaggaagctatgactacaatggcgatattgtggtttcaacgggcgatggttgggactatatccacaccgattaaactggcttttggggtacggtattttgatgcaaaacatcttgctgttggactttaaggaaccttatttatggctcctaagtctattgttctgcggaactcctgtttcttaaacctttttgcatctaatctacatttatgttg

SEQ ID NO: 199525 - DNA, 84 bp, Glycine max
gatcaaacaaaccctttcttctttccaaggtgtgcaataaaccaaatgttgaatgcattcaatctctctttacctctcgcaaaa

SEQ ID NO: 199526 - DNA, 409 bp, Glycine max
cctaagacagttgtactttgcatgttgtctcttgcgcacatgcaaacttagcacacgatcattttcgaaaagcatgactacacaacattgtgaagattataaaaagggtgcattatgcttttggagggagctggtcagcaagggcacgaaatacagaaaaacacccactttggagctcttcttcttccatctcctttgttccattttttatgttcttaagcttctcatgactatgagaggttaaattacccattattaggggtttggataccaaccactctttgatgtaatgatctttactatccatttaatggtctttcaatattatggggtcctttctaagcatattgtcgtgtgtataagttgatcatccattcacatgtaagttatacgggttcaatcattggga

SEQ ID NO: 199527 - DNA, 416 bp, Glycine max
agcttgttgctgtgaacaaactatattcttttgtaacagcttgttcaacccttgttttaacaagggagctagagaaaccagcttctcgcatgaccctactaatactagggtcatcaaggatagagactatgagctgctccaccttaatctttaaagtcaaaatgggttgctgctggttctgatcaatggatccacggcgttggtgagcctgagcacgtttgaaggctgcaaccaaggcattggaaagtgagggagtagtagtggtggaattatatggaggacttatcagaagaggcgttggtgtggatgctggcaaacggttgagggaaacgttgaacaaagttccatgccttgtttggaagggtggagtggattgaagcaacttgcggaaaggctgtgaagtacaacatgacagt

SEQ ID NO: 199528 - DNA, 480 bp, Glycine max
gtcatctctattatgtatctgctctacacaaatgtactcacattctaattgaaccaaagctgtcacacctccattttagagaacttcaacaaaaactcagttttttttgtttttatcaattctcggatcagcccctcttgagtttgagggggagtattggagtgatgtcacattactgctgttactctgtcagtattttacaactttaacctacggtgtttagatgagacttctctataatatctactggtaggagcaattactttagatatgtctaagttatcgctgagtattaactgagcttaactatgtaactatatacatttatggtgtgtatagatcaatatttttgaaatagtgaaattacattgtcagatctatagttcagctctctatctagattctctttctttgattttctccactcttacaatattactctgctatttggactctttaatgttggtaacctcaattaaa

SEQ ID NO: 199529 - DNA, 462 bp, Glycine max
  unsure (1)..(462): unsure at all n locations
ctttctntatgggttgatgggttntgtctcgcacaatggcatgatcactggctggcatattctcaattagctcagttgcttcttccggagtcttcagctttattttcccccctgcagaagcatctagtagttgcttggtttgtggtctcagcccatctataaacatattcaattgaattggctcacaaaacccatgggtgggagttgttctcaataaacctctgaacctctccaatgcttcacttagagattgatcagggaactgatgaaataaagagattgtagctttcccttctgcagtcttggactctgggaaatatctctttagaaacttntaaacaacttcttcccaggttttcagactggtacccttaaatgagtgaagccacctcttggcctctcctaccaatgagaatgagaataggctgagtctaatagcttcatctatcacaccatcaatct

SEQ ID NO: 199530 - DNA, 412 bp, Glycine max
agcttatagtttttaagaaggttattatgtttgttggagaacaaaagtgcttgactaaagatgctggtgacaaagatattctcaaagtaaaaatgaaaggaaaaagctttgttttaaatccattggaggatgagcaaattgctttttcagtaaaaaagaataacactaaattatgggacaagaaaccaaaagttgatgaagatcaaccaagttctgaaatagcagctctcacatcttggaatggtgctgctgaagcaaggttgccaccagcaaagggacaagaaaaatctgctttagagaaagtatctattgtgcagaagcatacatactagaagacacaattgagtgagaaagctgcaaaaattgatcataatgcgaagtgttataagtttctgacaagaacttgacgctg

SEQ ID NO: 199531 - DNA, 365 bp, Glycine max
  unsure (1)..(365): unsure at all n locations
acttacctttcatggaaacttcaataacctactattaaatttccataaaattagaaccttacgcgagtgaaccgaggtntctgttccaaacccatcttgagataacgtctaattaatctccgtccttctcctctcagttcttatacacaaactgtctttaacacactcccacatactccgtacataaactacaggcactactagctaggaattaggatagaaaacaacgtaagaatgtgctttacacatacatgtatatatataaagatggtattaggatatatatgcgtatataaatactgagagaaaagccaaagagtagtggggatatatatatatcatactaatccgatgtcgtacctgcg

SEQ ID NO: 199532 - DNA, 422 bp, Glycine max
  unsure (1)..(422): unsure at all n locations
tgaagatcatcatatcaatttctcatatattaaatggatcattttcaaggtccaacgccttataatgatcacctcttaagtaaaaaaaagagtcactggataagcaagaactacgtaggtctgatttcctcatcgcaattgaggatacgtaggagcaaaagccccgcttttgtcgaccaccccaagagatcgttaatggtccaatgccttaacgtttctctcctttcaaaaacaagagatcgttaatggcccaacgccttaacgtttctcccctgtcaaaatcaaaagaccgtttaatggttcaacaccttatatgaccttttgttcaataaaaacatatnttgcacaaaaagataaaaacaacttaaccaaacactttgttccgaaagaactacgtaggtctgatttcctcaccgcatatt

SEQ ID NO: 199533 - DNA, 335 bp, Glycine max
  unsure (1)..(335): unsure at all n locations
tgcgaaaaagcaagaggaatgtgaataagggaaaaaaataaaagcgtataattaaataacgtaaaaaaaaaagaggagatatgaaagcattttttactcacggtaacactgtagcatgaggtgacatttttaggcgggaattggaggcaccacagcttgacacgtggccaccaaggaccttattcgtataatgaaagatgattacatcaaaaatatgcttcatgagtaaaaataataataaataacctctctaaataacttggaatattgactgtacactattntcaaacaaatttatcatttgtatgttctttttaatatgaaattaatggatt

SEQ ID NO: 199534 - DNA, 440 bp, Glycine max
tggtctccatattcagtattctattgttagacatttatcctatgatgggaagctgcactagagaataccatcacattctctaaactaggatatttctgattttccttcacgtggaattctcaagttgactattaattaattttgtcatcagtgtggtaatctactttgtcattttctcatcatttgaaagtctcgcaatgcaagctatatctgaaagtctcaaggatgtagcagcctctaattgcatctcattgtcctcagtatgcaatttatcgccttttcacctaaaatgaattaaaaattatctcggacatgaaacaacgcctccagcaaagttcctatcaatatcttttagctctatctatgtattgggggatgtaccacattgaaagtaattgggctttcacttgagtacattgatctcgatgagaacgttggac

SEQ ID NO: 199535 - DNA, 479 bp, Glycine max
  unsure (1)..(479): unsure at all n locations
gaaactcaccttctgcctggaaatcctttaagcgctctggtgtgtgtcatgnaaagacanacaaggattcataggcctaattgagaagtgcgttggaatggtgaagggattagaggagccatttctggtggaagtgttcctcaaggggttaaaggaagagattagcactgaggtaaggtttcatgaaccaaagaacttgatggaagctatggttaaggctcgaagagtggaggataaggacaaagttttatggaagttacccttgagtaatagccaggggtataatctgctgaaacccagttattcgagtctgaaatttgtaagggattggcaaccagtaaataataagggagctgatcctactaatgctcctaaaacaggatccagtggatggcaatgtagaagaaactcttcattattgtcacccgttgtagtatatgagatcatgaggaaaggagaaatgttcacctgtgaagaaa

SEQ ID NO: 199536 - DNA, 353 bp, Glycine max
gcagatacataaataccagaaaccatccgcatgcatagaataagagtctatcttatactagttagctccagactatgtttcctgaccatactacgatatgataacagggaaagaactattaaaacataaaatcccgcatacaccgcattgaatcccaacctattaattgcactatctgttgatgtatcaagcaacacgtaagggcttatgaaaccaagcaccgatccaactgcaatgcattttccacccacacaacaatactatgagccaaaatgtccattgtgggcaatttgtctaatagaagcttccacattaagaaggccacatttggaagtatctgcatcttccagacc

SEQ ID NO: 199537 - DNA, 481 bp, Glycine max
taataaaatattgggtgaaaataagctttgtctcattcttgtgtacattaaatgcatcagatatcaaaccacataaagttgaacagagcaatagtttgacgatgccaaaaataatgatagtttataccaaaaagtttttctctttcctgacatgtgtaagacacattctatctttttccttttgtttagctacttcggtagcttgtatctggatctgaactaatattagaactactcatgtttcatagtaaaagcaacacaacatttgaaaagacaagacaaaatatgattggtttagtacttagtcatttttcaaacaaccgtgttaaagttttaggtcataagatacatttcgtccaaaaatataagagaaataatatatacaactttctttataaaagcatttatgataataaaaaaagaaagtgaacacactcaatcacaatccaactatcaagcagagcatatcttcaaattaaat

SEQ ID NO: 199538 - DNA, 457 bp, Glycine max
ttgactgggccctgcgtctcttcaatctctacatagcattgctagataagttgatttgtgaagacttcattaaaggtaagtcccctgtccgctaaatcttgttttccttccatgattgaacaatgcttaacctagcgtttagtaatgcatatgctacccctgtccacctatttgtgtgcctttgtgtttgccttgtaaaacgtagttagcagtttagttcaaatgaaaatagtttgatgagcaaacctagtttacgtatgtcaggtctctaagatggtatgaagaaaacctagtttcgtgtttagggcagtagttacagtcaactaaagttacgctctaaagtcaaagaggaagaaggagatgaatcctatggtgtagaagaggtatgagatggagattagaggaagaaggagtcatctagtttgtatggacatgagagtggggaagtttctgatct

SEQ ID NO: 199539 - DNA, 496 bp, Glycine max
  unsure (1)..(496): unsure at all n locations
gacactatgatactcaacgcttagcnncttcaactgcacaaagctctgaatatttgaagagtatccttgtggaaccntnanncgatgaagacactgacaaaaaattatcttctacttnnnggacaaagtatggcaggctgggggcaagtaaattttcttcccatcagaccttggatgcaattgtgatcgtatacccatatcagctagatcttgacaggtattcaagccatccttcgtcttgccttgaatgttaaggagcgtcccaatcacactttcacaaacatttttctccacatgcataacatcaatacaatttctaacgtcaagatcacaccagtacggaagatcaaagaaaatggatctcttcttccatatgcaactctgacttttatccttcttttgggtcttcccaaatacaatattcaggttntgaacccgctgatatacctgctcaccagtcaatggtatcggcgcaatatcatgctcttgacttcca

SEQ ID NO: 199540 - DNA, 434 bp, Glycine max
tttaaactaacctggtcaatcatgcaggctggttatgaatatacaattctcgactggatgagcaattttgtatattaacgagaaccaaatttaagcaaaagcaacacatgtcttctctaccatatctaagatatatagagaacttaagacacaatttttctatactctttgcggattttctcttcaaattagaagccatggacttttatgagcgcttcactgaacaaaacacaaacagaaatatatctttaattcaatttaaaatatattagaattaattccagcaaaatttatatataaatgtttgtttaataatttttcttatacgcatgtgccaacttcaatgacaaatacatgcatgaacaaagggaggtgcacaacgtttctgagggttataactaagaaacgacaaacgaccccacgaacaaagacgt

SEQ ID NO: 199541 - DNA, 487 bp, Glycine max
  unsure (1)..(487): unsure at all n locations
taagatggctttaaattagcgacgctgcatttagagcttctctcgttctntgcacgggtaagtggattcgggcttagcgtcagtggtgtgctgagcctggctaaagatgttggacaagtggcctcacaaatattaagaggggggtagaattaagatttcattgactattcctaattgagaatttccttttctttattattcccaagattcaattatttctttgttaacaagttactgaaatattaaatgaatgaaagtaactcaaagaaatataaacacaacagagagtaaaggagattaaggaaatgtaaagacaacaaaaattaaaagagataagggaagagagaatgcaaaaccggatttatactggttcggccacaacccgtgcctatgtccagtccccaagcaacccgcttgagattccactatccttgaaaatcctttacagcaatgaaccataaggaatccccttcttgtgtcaatgata

SEQ ID NO: 199542 - DNA, 272 bp, Glycine max
accacaaacccttgcgataagtacacaccatccattcaaggacagctgggataccaagataaccaatgcatgcagtcttccttcaagcttcttagcttcagatgatgcagatgggtttggagctacctcatgcactcctctaatgactatggcatcattactggcgctaaactgcagggagttggaggccatcttctcaattaaatttctggcttccgcaggagtcatgtctccaagggctccaccactggcagcatctatcatactactct

SEQ ID NO: 199543 - DNA, 456 bp, Glycine max
  unsure (1)..(456): unsure at all n locations
gtcctaatntctctacgatagcatttcttgttaatgagcttatgaagaaaaaggtggcttttacctgaggtgaaaagcatgagcaagcctttgctttgctctaagaaaagcttactaaggcacctgttctagctcttcctgacttttctaaaacttttgagctagaatgtgatgcctctggagtgggagttggagctgttttgttgcaaggtgggcaccctattgcttaatttagtgaaaaacttcatggtgcgacccttaactaccccacctatgataaagagctttatgccttaataagagcactccgaacttgggaacattaccttgtttcccaggaatttgtcattcatagtgatcatcaatcacttacagtcattagagggcaaagcaagataaacaataggcatgcaacatgggtagagtacctagagcaatttcatatgtttcaaatac

SEQ ID NO: 199544 - DNA, 311 bp, Glycine max
  unsure (1)..(311): unsure at all n locations
ggggtatattttactgcggccccatggtggatgccaaatatacttaccaaaatttgaagctagcacacgtcatggtatacgtggctaaagtgggctcctagacttcgcatgtcagctagagagtggcctctgttatgagggaaaaatgggangaccatctaaatataggactctagcgctcaagtaagtatatctgttagaagagtaagtgagaatacacgagtttgtgagcaggtatgtgcatttgattgcgtaactgtgttgagagagtacgaatgaaccttgtacttatagtgtgtatagggagctat

SEQ ID NO: 199545 - DNA, 364 bp, Glycine max
  unsure (1)..(364): unsure at all n locations
ccttctataacatgagcattcttgtaccgtgtgatcttgttttttcctagtgagacagcacacaatacaggaggatctgctgatgctgaaacccccattatcatagacgcgtgtttcttctcttggccctggatgctgtgggagaagagacagatcagtgggtatagctggcccattgatctggaagctccatacccattatgtaatgggagctatcaagcattcctgttgatgcagagaacccggcatacattanattcctcatgattggtgaataatccacattatttgacaagagtggcctttctaggttggtaaaagatgcatatattgtgacatggaccacacttgtgacaacatcatt

SEQ ID NO: 199546 - DNA, 442 bp, Glycine max
  unsure (1)..(442): unsure at all n locations
tgactaccatggtagtaaaattgaactctaagttttccagaaacactctcatcangaatgtgatgaagctggaatgcaaagttcaccactaatgcttcatctggactgcagttcagcattgatgtggtgacaatggaagtccttgatgccactgctcgaagtttgagtcaagttcagcatttataatttcattgatgtcttaaaaggtaacctgtggatgtgcagctggagttgctgcagcatttagagagctccagtttgtggtgtattgtttgctntggaagaggttacatcttaattggtatggatttttatttcttgatcaaagattctgtttgcttagaagcatgtgcagtaaagatagtggtgtctgtacttaaattttgttgcttgtgctcttgaacgtggaggagtcaagtcatgtggcggctgttgtggtctg

SEQ ID NO: 199547 - DNA, 383 bp, Glycine max
  unsure (1)..(383): unsure at all n locations
ntgagctatattaaacgacaattatgtgttgcatggatttctgatttagtcccactatacatcgagacgctcgaaattgaatactgaagctctgagctaattcaaacgacaattactttgtgctcggatgtctgaatgagtcccgtaatctattgagatgctcgaaattgaatcttgaaccttagagctaattcaaacgacaataacttcttactcggatgtctgattgagacccgtaatatatccagacgatcgaaattgaattctgaagctctgagctaattcaaacgacaataatgatttgctcagatgtctgattgaatcccttaatacatcgagacgctcatattgaatgttgaagctcttagcaattcaacgacaat

SEQ ID NO: 199548 - DNA, 367 bp, Glycine max
  unsure (1)..(367): unsure at all n locations
gcccatgacaaatgattgataataactaaaataagtccttattacaaatacaactcaaaatgccccgaaatacaaggctaaaaccctatactactagaatggccaaaatacaaggcctggacgaaggaataacctattctaatatttacaaagataagcgggctcatacttagcccatgggctcaaaatctaccctaaggctcatgagaaccctagggcctttccttggatctctagcccaatctactaggagtcttctagccaatgcccttgcggngtaggattgcatcatgtagtctacacacattcgaaacttaccgtcccttttcgggactgtgacaatggtggccacccactctgggtaccg

SEQ ID NO: 199549 - DNA, 441 bp, Glycine max
ctcaccataaaccttgacccattgtgagaatgtcaattcttaccctcggaagcaaataaaaaggggagagggaaaatttccaatcaaagaggaagcaaaataggagagaaggaaaatttccaatcaaaggaaaaaaagagaggaaagggaattcccaatcaaagagtgggagaaagcaaaatgaaaagaaagaaaattcccaatcaaagaatgggagaaagaaaaaagagaagaagaaagggaagaaagttcccgatcaaaaaaaaataatatgcagaaaggtctttggaccggacaatatctgaacaatacagaattgtcaccaaatgaataaaaagaaggaaagggaaccatgacctataatggtcttccccctttagttgccaggcaaaatcttgtgcgctaagcaacctttttcgccccgcactaaaccagaacaga

SEQ ID NO: 199550 - DNA, 472 bp, Glycine max
ctcagctttcgcaagcttacggtataatctgggacttagccatgttagtatgtctccacaaaggccattgcctcccttgcccagtattatgatcggccgttgaggagctctacctttggggacttccagctatcacctatggtagaagaatttgaagagatcctaggatgccctctagggggaaggaaaccttacctcttttcaaggttctatccctcattagctagaatttccaagataggacaaatctcggcacaggaattagaccacaggaagcaagtctaaaatggggtgggtggaataccgagaaaatatttggaggctaaagcaagaatcttggccggtaaaggcgagtaggccccgttcatagatattctcgcactgttgatcttcgatagagtcctctcttcgaatgtggatgggttggtggacctaacagcgatcgacgcttttctcgcctatatatccacaa

SEQ ID NO: 199551 - DNA, 238 bp, Glycine max
agatggaaaccatgctcttaagtggtatgtaatagtaacctaccatgccttctgcttgacttgagatttgaaaggaaagaaaagcttaaccatatgtaaatcatggacattttagaaacattgcgacacatctttgatatgtacaagggaggataactcatcgaaaatgatccccaccgcagatagacaaaatcgagcgaagaagtttattaaaacacgtaaaggctctgtatgaaag

SEQ ID NO: 199552 - DNA, 266 bp, Glycine max
tcgcataggttctgctaatatcccacttatccaagatacatacagtatatcgctcactctgtcttgttattgacgtattcgaaacactcaatgattgtcaacatagttacatacgtggctatgctaatagtagacctaaccatgtccttctgctggagcttgaatgtttgagaaggaaaagaaaaatgcatcaaccatatgtctgaatcattggaacattgttcaagaaactatgtacgacgatcattcttctgattattgtttac

SEQ ID NO: 199553 - DNA, 431 bp, Glycine max
  unsure (1)..(431): unsure at all n locations
atttatctccgtcttgctgtaaaatcatactcagtcgcgttctcattatgggatcaaagctggctattagccatataaataccactcattcttttgtctattcggttcggagcatgaatatactattagatctgtgaaatgtgtaggaagaaggtatacattatcatagtgtgtttggatgaaacagttcagcaagagaattcatctttttagggaattctaagtgctttatgattccctttattgctaaattgcttcataataaaaatattttgttaggatagaatattttaaagagaattgaaaatttggtattgttgtgaatcatcttgattaaccaaaacattgcgattttaaattctctcaccaattaatgaatttgaattctnttatcaagatgcttggtcttgtcgtgactcttctctctattc

SEQ ID NO: 199554 - DNA, 437 bp, Glycine max
  unsure (1)..(437): unsure at all n locations
tctggaaggagatcaacctgaggttctatgctttcttaatgtggcaatccatgaggaatctccttgggaaagacatctttaaattcctgcaataagggttgaacactatgagaaacataaataattaactgattagaattatcactctctctctctctctctcttgnggatcactccatctctcaagtgtatcactcttcctttttctattcctctgtgatgcctcactattgnctctctcttgttctctcttttctctccttctgaattggtcatcacacacttctctgagggatagaggtttatgaataatnntttggtcatggtgatggaaagaaatctttgtggtgaagccatcatgcactgctttggggtcctcttcaatgtggccctcactagtgccatctncatcttcttgtccttcacaatcaaacttc

SEQ ID NO: 199555 - DNA, 440 bp, Glycine max
  unsure (1)..(440): unsure at all n locations
cctttacttggnatgggtgaagattctatgcctctagnctgttttgantngcataaagagttgggataatggtgatgagtatgccaatatatccggaggatatgatcacttttatcagattaagcaatctttacttgttggtcatgtctcaatgattaatattttattacgtagagataaaacatttttacttaagctttcacaacatgactatgttttttttatttaaataggttggtgtggacaaatgaatgaatgtgcttgacatgggatatgttattgtatgtcgatataatgtgatttttgttttgtagcgctgaagcataacataagctttttctcccttaaaagtcaaccttgtatagatagctcagctcaatgcatcaaaatatatgcacactacatgaaaacatggattgaactaccaaaatttacccatg

SEQ ID NO: 199556 - DNA, 372 bp, Glycine max
  unsure (1)..(372): unsure at all n locations
attatactttattgaattggtctttgctacaagggagattgatgaaatgggccacaaaattaagtgccttttaaagaatttatgttcctttgcatgcggttaaaagtaaagtatgagctgattttttggctgaacattgatgtgtagaaattgacgatgttgtatttgaaatgaataactatattggtttacaaccttgnngctcaatggctaatggatctaatacaagggatgacactagagtaggaattaacgttacagatccctaatgaaaggtgtatcgattggtaactggatcgcgcaaattanccaataatcaagtcgaaatgaagcattaataccttggagctaatatgtacacatactatgaga

SEQ ID NO: 199557 - DNA, 489 bp, Glycine max
aaaccagcccgatctagactcgccttctagacggactgcttatttttctgtcgcacgatccttcttattcaccaatgaaccatcctccaatattgactatctcccgatatgaagattcgatacttaacaatatccttgcacactgattctggaatagaattagcttgcattatgtatgttggcatggcctgtataacaactctattaagagttaaacgttcagcgaatgacaaactcttatctttccaacagctcaaacgttggtccaatttatcaatgatgaaacggaaactctgagcatttgccttctgatgatgaagaggcactcccaaatacttgcccagatccggagttccctgataacccagttgctgcacaatcaaatatctgtccagccagtgaacattacccagaaaataaatcctgggtttgtcataattaactgttttgcctgagctagcacacaaggtatccaacacttttttaatc

SEQ ID NO: 199558 - DNA, 433 bp, Glycine max
actcagcttagatactgaaccatatcccacaaagataccaggtttatttttcttgtctagcttgtctctcttaatctgtggtacataagtaaaacacaagcatccgaatactctaaaatatttcaaggaaggtgtataaccataccaagtctcaataggagtcttcccgtttactgctttggtgggaagtcgatatagcaagaatactgtagtgtttgcagcttctgcccaatattccttaagtaaccctttctcatgaagcatacatttgaccatttccattatcgttcgattctttctttcactaaccccattttgttgatggatgtaaggacctgttaattgatgctcaatgcatgcttcctcacaaaatatggtgaattgtgctgaagtgtactccttaccagtatcagacctcaaagcttgaatcatg

SEQ ID NO: 199559 - DNA, 387 bp, Glycine max
  unsure (1)..(387): unsure at all n locations
actcattagccataagtcgatgagagaacgactaacattgagtaatgattattgcatgaatctctgagtatggaatgaatgcgtgaaattgaacatgatgaagggcatgctttgattgaagatagccacttagctaaaaagcttaccttgtgcatgatagatttatcctttgcacccantttgagctgaaagtatgattgtttgattgaaccttaagcctgtacaatttatctccttctaccttgtcttaggttggaggagagcatcattcataaaaggaacatttggttcacagcaaattttcccaaattcgtgggaattatggagtgaatgcttggaatggtaagaaaagagcaacacacaatataatctaataagcaacaagta

SEQ ID NO: 199560 - DNA, 469 bp, Glycine max
  unsure (1)..(469): unsure at all n locations
tgacgaattgacgatgaagtagtagatggatcttttattttatcgtggcgatcctcgggaacggtgaactggatctacataacatgaaatgagagcatttccttatatatataagataatccgatgtaagtagtcttattgcgtgcctacacattctacacccaaaataacttttccacaggttggggggacttaattggctctcccacaatagcctgcttcaccatgggagatagtttccaacctacctataattctcggaaaataaaaaacttactttaagagataaaataaattntattcaattataaaataaaagtgagagaataaatgtgacacaacaaaattgtgtgtattttacatgctgagaatcaatcattcctggtaaatactttattaaacttgatgcacattgatgcaaatgagatccacacgtgtgttattgtcaattgatgcaagttataacctg

SEQ ID NO: 199561 - DNA, 378 bp, Glycine max
tctagaatggtgtacctgacgaccacggcctctttcatctattgtggaagaagtgcatcaacaacttctattcctggaatgcgctcccatctagcgacaatacattttgagatggttctaagggcaagttgtccccttgtacctatcacaatccggtaccttaaatttccgggggatgatgacgtccggtactaatcaaagatcagtcatgtctgcaaacggatattcgccaaaaccttcaacaaccctcaatctctcttcgatgagatcgagctctctcctttcttcagctaccaggggtggcccgtctgcggaaaagaatatcatttgtgctgaggaggttcaaggttctcccatgacgttgggctgacgtagtgt

SEQ ID NO: 199562 - DNA, 491 bp, Glycine max
  unsure (1)..(491): unsure at all n locations
ggacatctgaaactaagcttgtgaatgcctcccataaataagaagcatgtctactatacaactcctagnctacgtaatccactatgatagaagataaataaataaataaaatattcgattccttcttttctatgcaaataatatttttttttgtggtgatacagctataaaattcagaaggacagcaaggaagggaaaaaatgcaggcttagctatatactaacaaaaaaatctaaaggtgattattacacattacagattcttaactatattaaccattgagttcaaaataaaaacaatattaaccatttgtttattntctgcaaatttgacgagtccgtgtctagcattaagagatcagatgttgattttaagtagtttagcttttttggatactagaaatgttagcttaaccaaaacattttccagttaagtggtgtgttttctttcttcggatgcgtgcgtgctacaatggttgtcaagttatacta

SEQ ID NO: 199563 - DNA, 482 bp, Glycine max
  unsure (1)..(482): unsure at all n locations
aaaactaacgcttgggcgagtgtaacaagcacaattgttggccaatattgaactcttttctaagaatcctagagccatgaaactgttagagatagggggagaaacacgaagactaagtcttggagcttgaagaagttttgtatttttacatgcccaactcttttgaatggcatttgtattgattgttgtattgagtgttgcatcttagtctctatctgttcatatgtacatcatgcatcatcatgtaggagtaaaaagattgttgctaaagttagaaactntctttagtgcataaaactctccattttaaatgattacaaggctaatcataattgattacacaagtgtttgtcgctcgaagagagattctcgtatcaatttaatcgattacaaggtaaccgtcattgattttacagatcaattgagacaatgattagttnttcacgagtctctatgattactagataatcgtaatcgattac

SEQ ID NO: 199564 - DNA, 449 bp, Glycine max
  unsure (1)..(449): unsure at all n locations
tagcacaatgagctaagatgtgagtaaggggttggtcgtttggatgagtgtttatgtacaaatcgggcttcttggtagattaattatatntttgtatttgcatttgaaaaaatctagagaattatgatacttatgtatccgattcgaaataatcaggctacataaagaatactatatggttaatgttgcttcctaaagctgcagttggaaattatccaaatgtggtcattcattgttttcctggcctttctcaaaatcctcatcatcatatataggttgcttgcaatgttttcagtgcttacctattatcctcattatacatttgcacttctcttctcacaaaaaaactgacaaggtatagagaaacctatttgacttaacaaaacattatgtgtattgcatggtagttaatggtgcatgatagttctattgcaaagcaattctacatt

SEQ ID NO: 199565 - DNA, 333 bp, Glycine max
gtttctaaacacatcgaaattgcaatggctcctttttcttttgcaaaactatagccaccattccaaattctaacctttgagacatttgttggctacaaatccttgaatagagtcttatcatatatcatgtggtttgtacaaccactatcaatcaaccaacatttatatctactcctcattgaataacatgttgtagcaaaaatataatcttcttcctcctgctcaacaacttaggcattcactttatgctgctgaaatttgcttctacatattatagcttcgtgtccaagctgattgcacttgctacactttgcgtctggtcgtttccaacat

SEQ ID NO: 199566 - DNA, 484 bp, Glycine max
  unsure (1)..(484): unsure at all n locations
ctcaagcttaattaagaactaagaaattataaatataaatttcgttttatgttattatatacctttataattataattgttaatacattctcaacttaattgtcaataaaaagtttctatcattaaattcataatcagtgtcttgattntattaattaactagacttcatatcaaatgagatgctgaggcttgtccctttctcttgtttggcccgataatactagtagtatatctttttttctttgattcttgattctttcgttttcctttcacaccgagcacaaaatgatgttgttaattngattttcaagatttcattgtttttttatcttggaagttgaaacaaagggggtgttttttntcttcctattgactttggactacatggattcgctaaatgcttggataatagtgattttggataatctatgttaaagataatcaatgcatgaaagatgggcaattttcatggaaattaatcac

SEQ ID NO: 199567 - DNA, 481 bp, Glycine max
  unsure (1)..(481): unsure at all n locations
cagctttgcaatagagtctcaagagacatgttagtaagatctctcaattctgctattgcagntacctttggctgtcattcccagcttaaacatcttagtactttgttaacgagatcctcgttaggaaatatctttccaaatgatgcaaaatgattaactatatgtgtgaatctcttttgcatatcctgtatggtttcaatttgattcattataaaatattcatattcatgtgttagggtgtttattctagaactctttacatcagttgttccttcatgggttacatgcaatgtatcccacatttcttttgcattcttataattngagactctaaagtattcatccattcctgatgcagaggtaattatatttttagcttttaagttatattgtacccttctgtggaagcaatgtcttccaaggttcttttgatgatgtcaaagaatcaagagtctagatcaatccaaagattcaagaatca

SEQ ID NO: 199568 - DNA, 488 bp, Glycine max
  unsure (1)..(488): unsure at all n locations
tggagttccttacccttttcccanaccccacactgaatttgtcatcttatngagtgggtttccctacctctttctttatatttttttttttgtttccaaatatttcattttatagatactctagtcatgaatcagagaagagaaatataccaatatggtaaattgtttccttatgaaactgcaatatataatgaaataagatagaatcacataattaatgcaattcataaactttactattacaaaacttcaagttggttcaggtgaatggtggaaatctgatactgaggctataataaatgaagctttgaaatctgggttggctccaaatgtctctgatgctcacacaatcaatggtcatccaggatccgttcanaattgtgcatcacaaggtaaaaatactcatgaacttagtccaactaagatggaaaacacaatcagttagactttggttggtttcattncattttccctacaactacaaaaaa

SEQ ID NO: 199569 - DNA, 353 bp, Glycine max
atgacaattctctttcatatatcgcaacgccacttatgtattatcttattgcataattcttcttatgatacaataataataacgtattcaagaatacactcttttcacctttattttcccgtaattaaaagatgcaaaaaatgtcttaaaataacaaagccaacgtacatagtataaaaaatgaaattcagaccacgtattaatatttataaaaataaataaaacataaaatataaagtattctataagctctaattagaaacttttaaatcgaataatattttattaagaatctcattataattagtaaatattggaagagacttatacacaatataagatcacttaacatg

SEQ ID NO: 199570 - DNA, 459 bp, Glycine max
  unsure (1)..(459): unsure at all n locations
tactcagcttctcctcttttcctattaatgggggaggttggtttatctaatantcaaccctcctggtgtctgagaatcactttaaattagtgagaacaattattttcgtgaagaaaatctcagccggggggcttccataatgcttccgacaggtttctgtgggcgatttcgtgaagatttttcaccgttcttcatcgtccttcggtctacaccggtaagttcccgaaatcgaactgttcaatgcattttatgtacccatagtgatccccacttgcgtcgcatgcttttattatcatatcattcactctccgtacccccttttgacgtgctttagtcattatatttaagtcatatactcgcctaatcaaaaattatatatatttccaccgatcattcatattgatacacactttaatttcccttaacatgaaattcgaccgtccgacgtgccgataccca

SEQ ID NO: 199571 - DNA, 436 bp, Glycine max
ctaagcttgaatgagcttaatggggaaagaagtttgaatttgtaactctaaactgaaggaatcaaagaaggaaagaagtgtgactttgaagtgtatctcataagactttcattcattaaaggtacaacaagtgttacacatgctcttatttatagactagggagcttccttgagaagcttcttgagataacttccttgagaagcttccttgagataactatcttgagaagctagagcttagctacacacacccctctcataactaagctcacctccttgagaagcttccttaagaagattcctaaagaagctagagcttagctacacatacctctctaatagctaagctcacctccttgagatgagaagctagaactcagttacacaccctctataatagctaagctcacacccatgacaaagaacatgaaaatac

SEQ ID NO: 199572 - DNA, 468 bp, Glycine max
actaagcttcctcatctagtgtcacggagattgtcttgtgttattggagattgttcggtgtccagggtgggaacctctacttgtgtaaaagctggaggatcgtgaggcatgtcaagctcccctagcttggacgactgatgtttaagcttcttctggcaagttgtctaaggtggacatgcttttgatcttgccagcacagttagacgtgtcaagtggatgatgtccttatatatgacaattcagcccttttttgatcattggaggatgcatttaagacaaatgtctcgttttgtcattttctacatgcgagtgcgacacacacatattactcttgcatatgtatcactcatgaagtgcgtgtgtactgaatatgcaatacttgggtgagtggaactgcctcatggatataaaaataacgaccattttagctatgcaggtacccgaaagtacacctcccttatggagtga

SEQ ID NO: 199573 - DNA, 476 bp, Glycine max
  unsure (1)..(476): unsure at all n locations
ntaattngtccagaatttcatgatgaaactcatatcttttgttaccaaattcagtatatatgctgcagtttgcgtgttgccgggggaggggggattttctactctaatttgtaactataatgttttctgaaatgctccatcatcaatgtcacaagtcaaaattgtagtatactattatcatagaaatatgaagcactgctgctcagagtgtaccaattctcataaggaagtctttcgagtgcatgcttgaattttagttaaaaatgtagtgcacaaatctcaaaataaatctaatgttccgcaaacttagatttgtaaaaggaaggatctaaatgcttttgtatacttcatattactccaaacatcggttcgaaactganaaacaaacatgcagttaatctaatgtgtacagtattgtctcaatggactaataatacttattntgttcggattcaaatgttcaatggtcaaatata

SEQ ID NO: 199574 - DNA, 472 bp, Glycine max
  unsure (1)..(472): unsure at all n locations
tgaaagaaaattagtaattaatgtttgtgaagttagaaattaagtgggaataaaggttgattaaaggtgatctagattccatagaattagaaaaagagtaattgagtcataagaaagtggagggcattttcataaatgactatataactagtttaaaaataaaattttattttaactagttggtgactaattaaagtgtctaattatatgatatagaataattaaaataagttaaagttgtaacactctaaaaattacaacttagactgacaaagaaaactctatgttgtgtcgtttgtgcatgtatgaatttaatctcagtagatatatgttcttaatcataaaatttcgtgttatgtatgtgtgtgtgtgtgtgcgtgctattgnattattaaagctggacaaagaaataaaaattatctaagctagatttccgtctgcgcaagagttgcaatntgcattgagtcatagt

SEQ ID NO: 199575 - DNA, 445 bp, Glycine max
  unsure (1)..(445): unsure at all n locations
tgaagctactgcanaaatggaggtcccatgggtccttgtgaagcctttgtgattnttttggggggaagatggggtgtccattgtaggctttgtgctctatctctacaggaagatgacatgccttgccaaagacaacccgataaggagacattcctatgggtgctttgtaggcagtcctatgcacccaaagagcatcatccagcctggtgctccaatctnttttgttcgactgcacaatcttctccaaggcatacatggagctattacaaaaatgggtgccttgatcactaacgatggctctagggactccaaagctgcaaaacagattagatctaacaaaatccataaccaagttagcatcgttagttctgggtgggttggcttccacccattgtgaaacataatcaacaccatggagaatataaaccatacccaaagagacagg

SEQ ID NO: 199576 - DNA, 360 bp, Glycine max
aacacattaccccatccaaaaccctagcagccacatccaatactccaagggttgaaaacttgacatgattattatcatgaaagaaaagatgtaaaaagggatctgagaacctataacttctaaatttattccatccaatgactatgattaacatatgctcatgtcctagccaaaactgcaattttgttcattagtagtcgatcatgtaattttcttctcagaatatctacagtgagacttgtttaaaatcctcattaatgatctagttgctatttttattatgggcttgcacgagtgagtgaataaggtacttttgcgtacactatatgctttgatgcttcacggcattacatttattac

SEQ ID NO: 199577 - DNA, 484 bp, Glycine max
  unsure (1)..(484): unsure at all n locations
tcttccatacctctgcactgcactcaataatacgtttttttcttctttctgcttccacatatcttnggttgctagcattgtcctggttggcagtttgagttagtgaaacatcatctccttgttgaagctgagggtgattttcctcaatctgcaggggtcgagctttagagagggagtgtttttgtctagtatagactctggaatacttgtctggagtttctctagtgggttgggctacagataataaatcctccttattacaccccttatgtttcgaagttgggcctatgcttttgcttgtgtcaccagctttttgagagtggttgtgttgcacatccgagaaggctacagggtaagcatcctgcttactacacccctcctgtatggtgtttgggcccgagttgaacttggcccagcaccttggtggttctgcctcgatataaggagagagtggtgttgcattacgtggtcgtcttccttcccg

SEQ ID NO: 199578 - DNA, 325 bp, Glycine max
  unsure (1)..(325): unsure at all n locations
cgcacacgncacacaggcaaggaaacaacaaaagaaaaagatcgtcacaacaatccagaaaatgcacaaaaaaagaggtctctagaagcacctcagaaaccagaaatgccacaaacgcgagaaagaaacaattgcgaatactgactatgggataaacagaataaagaagcaaaaagcaaattagagaggtcacaatgcactactattagacactcatctgagactaagaatcaagcataagacaatacccacaactccaaacattgtaatcaagcaaaatacagtggtcacaaactcacaaagcagcgtcaccatatatattaag

SEQ ID NO: 199579 - DNA, 319 bp, Glycine max
  unsure (1)..(319): unsure at all n locations
ttggctatattatcacggtcttcgcacacaatttactatttccataattgcatggcatggatgaacaagtatgttattcgactatgtggatttcatagctaatctaattatgaatgtcgcttcatggctcttacttcatgaatgctgaatgaatggttagttatatttgcatacttaaattttgatacgcactttggctttntgttgatgccaaagggggagagaaatgagattaaatcaagaactcacatgagtaattaatttaattttaagataaacataaatctcaaaacaaatgggaagaatttatgagagtgat

SEQ ID NO: 199580 - DNA, 335 bp, Glycine max
taatatatagagcaagaccggagccaaaggagtggcatccactctgcaatactatacaaaaacataaatgcgaacaccataaacgcctcattaaggtaaaccgtacaaatcgaaatgagtgcaccctgattactatgaaattaaaaccagactcacccttcatggcgagtatggagaagaaactaatccatatgcattaagcagtttaacgtaacatccgaacatataaatataatcactatcaggaatttcaatgcaaaaattagtaagataagaatgtgatcgaatcaaaacgatcaatatatatatatatatacatatatatatacatacat

SEQ ID NO: 199581 - DNA, 368 bp, Glycine max
  unsure (1)..(368): unsure at all n locations
tactctcaatgtttaagttgtttgaatcacacttcaaactttttacagcatatacttgacctcctgacatctccgctttataaactattcccagtgctcctttcccaatgcaatacttgttgtcaaagttcttggtagcttcaattatgtctctatacacaactttcccattgaagtaccaaattgaaaatggattcggacttttgaatgaacttatntgccttggagctctngattctctcttgaagcaaaagacaacaatcccaagtaaccccaaagaaatataaagagcacctcccaaggaagcaacaatatggatcacaaccttgtttcgttcactggatccaccattaggattagtgagatta

SEQ ID NO: 199582 - DNA, 430 bp, Glycine max
agagtcttcacaaataaccatcatgtatcagatatacttcataactacccatcatatctcccaaaaccccatacccacgaaaatcaaaggagaaagaagtccacccacacctgaaattttgaagtcccactcgtagacacgcacttcacgaccccgaaaatgccctcctttcacgatatggggcagaaatgatggccaaaggttgaagctttgtgtggagcttcaatggtggaggaagaagaagagaatggcaacgtgagggagagagagagctgtctgaaataatgtggggctgagtgaagagagagagagttgctttttgatttaaaaaaaggctttcttctcattcttattatttattataaactatgcccatgtctcatttgagtggagcaaaagagcccattttccctttgactgtgaccatact

SEQ ID NO: 199583 - DNA, 340 bp, Glycine max
tgatagtatgatgaacaattgcacgaaactattattccgaaaattaaaaatataaattggtacttgtcccttttttcttggctaggcttgaatctgtgctcagcactttggaagaagcggttaatgatgccctcaaagcaccacagtgtcttggccgcatttttgccaaagctataacagagcatgtagtctctttgaaagagattgggcggttaatacatgagggtggagaggaaccggtgagcctcttataagctggactcgcagctgatgttcttggaagcaccttggaggtaataataaatggagaagggtgatgctgttttgagtgagaactgca

SEQ ID NO: 199584 - DNA, 425 bp, Glycine max
  unsure (1)..(425): unsure at all n locations
tctcggctcatgctgggaacgcctctagttttacaccctttcagcctaaggcacccacccagagggaagctccccaagttccaactccgaacgcgactcgaccggccggtaattccaacacaacaaggaacttccctccgaggccgntgccggaattcaccccgctcccaatgacgtacgaagatcttctaccatccctcatcgccaatcatttggccgtggtaactcccggaagggtcctcgaaccccctttcccgaagtggtatgaccctaatgcaacttgcaagtaccatgggggtgccccggggcattccatcgaanaatgtttggcccttaaatacaaggtccaacatctaatggatgccggatggctgactttncaagaggatcggcccaatgtaaggaccaacccgctcgccaatcat

SEQ ID NO: 199585 - DNA, 460 bp, Glycine max
  unsure (1)..(460): unsure at all n locations
tatccttatggcttgcctccggacttcactcnccgtgccttctcatttatntatgccaagcccctactttcgaggggcagctcccaccttatgacgactatcccgggcaagacgatgaggaaggagatacccatctcggtcccctgctccacctcaaagatccgtccccccatgaactaccccaaccaaacatagtccgccatatcccggcttcacccacacccgtaaaagaatctgttcccttcgtggaagataagggaaagattgaggcgcttgaagagaggttgagagcagtcgagggcctcggcaattacccatcctcggatctagcagacttatgtctagtacccaatatcgtcattcctcccaaattcaaagtaccggactttgataagtacaaagggacgacatgtccgatagggcatcttcggatgtattgccgaaaatgggggagtattct

SEQ ID NO: 199586 - DNA, 460 bp, Glycine max
  unsure (1)..(460): unsure at all n locations
ctaccttgagataaagtgtaatcatgtggccagggagtataactctatgatttngcaaggaatcaaggttgtccggcaccgatgtttgatctataagtgagaaaagtttctgcaacatgaagctaaagcagggaagaaaggaggagccaaccaaaacccaaaatgtaagaaaacaattaataaatcctccagcaaaaatatttcttctccataagaaacaattaaatatgactagttattcaaaaatcatcacataaaaaagaagagcaagtgcctaacatgagaagattgaatttgtcaaaattgttatccagatgaactaatatgcagtccttcaaaacagcttcagccacctagtaaacaaagacattcatataattattagacaggcatatggtcaaataaaacccttcctcatattaaatcaataaaagggaaaattaaacccccttaacctaat

SEQ ID NO: 199587 - DNA, 480 bp, Glycine max
  unsure (1)..(480): unsure at all n locations
gagatataaattctagattgatttggcttgaaactttattttattcaaattgangngaattagnttggtaattaacaatgtacattccccagactggaggatgctggatatgcggttggggctcgagttcttgagctgctttgccacagagataaggtatggattctgtcactagttctcgtaaaagaattagttgtttatcataacctggattaaatatcgaggaaatcaaattaggcaacctcggaccctgattagagggggtcttatactggactatagtttatgttacccagcagtttcctctctttgaaggatttatcattttgaatggtataatctgttctactttcatatacccttggtataaaactatgcatcaatattatatgttgatccatgagcttgngcttgaagtcttgtacttgtaagccaatttttctatcaagattgcagtatcactattggttgactctttta

SEQ ID NO: 199588 - DNA, 488 bp, Glycine max
  unsure (1)..(488): unsure at all n locations
agaaatctaagcttgtggattatggggtacccaacacatgtggagctaggtggcggtttgtcnatggngcacaacaagtattccacatccacaaagcgcgcataaacccaccatcccctgttgcccacctccaactgagctcacgtactctcacgtaacccatatactcgtttctctcaacaccgggtccacatcaatcctcccaagcttccacaacatccaagctaaacaacattcaaacagcacaagctatcatagccaagcaaaacagagcaaaggcagaaaactctgccaaaacaccaaccatatcacagcttttctcacttaaagaccccagaaacaattccttcgttccggttcattaaccggtggatcgactcgaatatattactggaagtctctagtacataagcctacattttgaccgctgggatctactggcaacatccagaactattctgtactactctttcacagccaacacacac

SEQ ID NO: 199589 - DNA, 375 bp, Glycine max
acctggagatatgtcgcgggggtcatgagaccttggggacgtcaagtggggtgctattgcccacaaaaaagcttggctaattccgacccaacccgggcatagtcagtcagtgagaacctgtgacgtacctaaacaggcgagctcctggcagtcaaccaataaaagaacaaagtccacgaagcaaggaggcttgtgtggtgactggccagctatttatcttgggtgttatatgaaaattaccctctggtaatcgattaccattcgtgggtaatcgattacagggtttaaaaatggagacaggatgttaagtagcttctggtaatcgattaccaattgtgtgtaattgttacacggtatgatagggcactggtatcg

SEQ ID NO: 199590 - DNA, 407 bp, Glycine max
  unsure (1)..(407): unsure at all n locations
ggcccatataagaaactcttgggaacaaacaataatgtctatagaaaaactggttaaacgataaattatatcactcccggcacatttgtgcagacattgccgcacctcccaagaggcagggcatatgcacatgaaccctttacatggtgttgtgggtgtagttgggaaaagaaaaagcttatcagcaatatatttaaataaatataatataatactgacaataaagtatgtctagtggctgttggtacaagaagctaattcctctaaagagtttgagtatgattagttgccgaggaaaaaatatccagattctcacatcataatacatctaatcctccattagagatacacataaatctcgttctgttntctgtgtagcatttatcgatgttntatttcagtaccac

SEQ ID NO: 199591 - DNA, 484 bp, Glycine max
  unsure (1)..(484): unsure at all n locations
tcaaagaatcaagatcaagatgcaagactcaagattcattattaagtgaagaattaatcaagataagtatgaataagtttttcaaaaactgagtagcacatggatttttctcaaaacatgtttaccaaagagttnttactctctggtaattgattaccagattgttgtaatcgattaccagtagcaaaatggatttgaaaaacttttcaactgaatttacaacattccaattgatttcaaaaagttgtaatcgattacaatgttttggtaatcgattaccagtatgcttgaacgttgaaattcaaattcaaatgtgaagagtcacattctttcacaaaaaagaattgtgtaatcgattacacttgattggtaatcgattaccagtgatagtttctgaacaaatcataagatgtaactcttcaaatagttgttgacttttatcaaatggntntaaagttttctaaaagtcataactcttctaatg

SEQ ID NO: 199592 - DNA, 483 bp, Glycine max
tcagccttggagtaaacactttccttaacatgtgctggtattactagagcatatccttctctattgcattgagcctattctatttcataaaacttagcgctacacaatcttgcaaactgggatggaaactaagtttgagtgacaaagcatatggtatagcaacaaaaagtcgatgcacaagctcaatcctgtgaatgattaccaattgtatgtaaatttaagtacacatttgcaacatgttcacaattgagcaaagctattttgtaccaaaacagagctacagaagctattaatttgtatggctcacgatactttaattacaaattaatttgtatggctcacgacactttaattcgaaatcgcttaattgtaaaacgtgctatttgtttagttaatataccttgtcccaatgtcccagccagttatgaaatagattttgtcaaaaatatcattatccaagtataaaatgatgcgatgatctga

SEQ ID NO: 199593 - DNA, 418 bp, Glycine max
  unsure (1)..(418): unsure at all n locations
tccaacaagagggatctaaggatgaagcttagtttaagttagtctaaacctaggagggctgtctaaattgagcctagtccaacaagagggatctgaggacgaagcttggattgatttagtctaactagggatcgaggtttagtaatttaggctacaacatagaacacaaaagcatgattaattagagaaacatcattatatacatcagctggtccgttagaaaacccaacacttctacctactgttgtcaattttacttacctgcatttttactgtttttagcctagacttagtttaattatgttctaaatcatcaattatcaatgtttctttcaacaatgccttatttctgaattaaccctatctaagagtagttcctaattcgatactcggatcatncgtntaatttaaatacttg

SEQ ID NO: 199594 - DNA, 471 bp, Glycine max
  unsure (1)..(471): unsure at all n locations
tcaacattcaatatcgagcatttttatatattacgggactgaatcagacatccgagtaaaaagttactatagtttgaagttgctcagagcttcaacattcaatatcgagcgttttgatatattacgggactgaatcagacatcagagtaaaaagttaatgtcgtttgaattatctcagagcttcggtattccatttcgagcgtctcgatatattacggaactcagtcagacatccgagaaaaaagttactgtcgtttgaatttgctcagagcttcgataatcaatttcgagtgtctcaatatattacgcgactcagtcagacaaccgagtaaaaagttattgtcgtttgaattatctcagagcttcggtattccatttcgagcgtctcgatatattacgggagtcaatcagacatccgagtaanaagttactgtcgtttgaatntgctcagagcttcgataatcaatttcg

SEQ ID NO: 199595 - DNA, 387 bp, Glycine max
ctcagccgagacgagaaggcgaaggaacacaacagcattattgttttacagaaggacccgcagatatgtcgtcggggtcaagacaccttgaggactacaagcggggtgctatagcctcaaaccaagcttgaccaatcccaacccaaaccgggcatagtcggtcagtgagaacctgagatgcacctaagcaggcgagctcctggcagtcaacagataaaaggaaaacaagaccacaaagcacggaggcttgtggcggctggccagctgagaatcttgtgtaatatgtgagatatggcctctggtaatcgattaccaagggcgggtaaccgactgcaaggcttaaaaatgaagacaggaggctaagatggtctctggtaaacgatacca

SEQ ID NO: 199596 - DNA, 493 bp, Glycine max
  unsure (1)..(493): unsure at all n locations
tactaagcttgaaaccccctcttacatgacctctcatgtgtacttttgtgttgacccctcttcagctaggagattcttctcattccgagaacctcctctacatataaacctagcatcctgatcttaaaagaggaaataaatctcaaattaatagataatatctttaaatttaaacaacattatagagattaagataatatcttttaaaatcaaaacaatatcctagagaattgaaattataaatttgaattatttcccaacaaccttatgcatatattagcctcgatattaggtttaattatacatttgatccttataattacacaatttttttccttttaatccctacacttcaaaactatttgttttagtctctatactaacacttttagttccatgntggtcctttgtcgtaaaaataattngattatcattaagaatgctggaatgatgttgacacgtgttacaatntaatgtttagtaccccacttgc

SEQ ID NO: 199597 - DNA, 471 bp, Glycine max
  unsure (1)..(471): unsure at all n locations
actaattcagaatacacaggcaattgcagagatatttatggtatgagacctgagnttcgaaatgcttgaatgcgttctaaactctcatcacaacagaaatccatatctatgaacttagggtccatgatataacgagaggacaatcggtttgtgtaccgtatgtgttgttcttcccatgagaacactgacgatgaggaaatggaggaatgaattggagtatcctgagcctcggagtgtcgatggcttctactcgaagaacctttgtgcttctttgatggttcctccatttgagagactttgttgaaatttcaatcggctgagatgaaaaagaatgacaaaaatgaattctgggctttgtggggagtgatttggataagaaatgagtgagttatggcagaaatatgaatcgagaacgatggtttcgcgagagaaatgaaagtctctgatttctgattctgagatctgaattta

SEQ ID NO: 199598 - DNA, 301 bp, Glycine max
gataagtacctttgcgacaacgtggtccatacatctcaccgacacatgtagagccttgttgtgtcctttcccctcaacgggaatctcttcttccacaaacgcgatataattgttggtggttatatgattaacgatgccttcgaaaccctccactgagatatcatgtgctacatgggcatcgttaaggaccttcatcaacagcgcacgatgaggctcggagttaatgagtagttcaagcaaagagatccttgctggagttttattctgttgctcgactaccttaaactcgctttactggatg

SEQ ID NO: 199599 - DNA, 419 bp, Glycine max
actaagctttaagaatcataattaacggtcaacctttatatgtttcctaacttcataacgaaattcgaaccttgcaaactacattagccaaatctgtcaatggaatagataatcttaacaaactattaaggcactatacaagttcctcaaacaaatctacaaatggatatgatgggaagatctatgctcataataagaatactattatatgatagttttgtggtaagactggacacatgacgcccaagtgtagagatcgacctaataagggtacaaccaatacctctatggctaacacacaaagacccaataagaattgggcacctatgaaaaagattattcctattgcagatgtccttgatagcagacagtatatgcctatcatggtacttggacagtggctgctaactacacatgac

SEQ ID NO: 199600 - DNA, 304 bp, Glycine max
aagaacatcctagaatctagacaagccttaagacaattaaaaacctgacaacctattatgaagggacaaaaagacatgagctgtcatcacctagacaactattgaaagagtagaagagaaatttgcacacataaatatctccgtgcatgaactcatgaaggagcaacataattttctttaacattatcatcattcatctcttcaccatatctctagatacaagtgaagggccatgcattcctcaaatgggaattcaagcgcgagcggtactagcactccaccacaacacaacctagattgcctc

SEQ ID NO: 199601 - DNA, 433 bp, Glycine max
  unsure (1)..(433): unsure at all n locations
gagaaccccctatagccttgttccattcccagaccagcacttgaatattctttaatagctcaaaagatagttataaaggcaatacaaattctaataaactaagggacaaattttttttataaatcctttcaaaaagaagttaaccaattaagatctcacttaataagaaaaagtagggaagccaattgtgaagcaaagcaacaataaaagacaacaacatgagaagacaagaagcaaaattcagtcctatcaagcataccgctgcatgaactttgctcaaaatcaatataatggcacaaagggatgcatcaacatgagaagataagatgcaaaatncacgcctatcaagcatactgctatatgagataatattgacctctcaactacttaatataaccatcattctctangtcatgcaaatttcaaaatatat

SEQ ID NO: 199602 - DNA, 436 bp, Glycine max
  unsure (1)..(436): unsure at all n locations
tggagaggatgcttcaatggaggttaagaatgagggagtattagagagaggggggagcacgaaattgaaggaagaaaaagggagagaagttgaactttgagttgtgtctcacaagactctcattcatcaaagttacaacaagtgttaaacatgcttctatttatagactaggtagcttccttgagaagctntcttaagaaaacttccttgagaagcttctttgagaaaacttccttgagaagctagagtttagctacacacacccatctaaaaactaagctcacctccttgagaagctagagcttagctacacacccctataatagctaagctcacccctatgacaaaaaaaacatganaatacaaaaaaaatcctactacaaagactactcaaaatgccctanaatacaagggctaaaccctatactactacaat

SEQ ID NO: 199603 - DNA, 352 bp, Glycine max
  unsure (1)..(352): unsure at all n locations
agcttggcaagatgccttataaaggactttctctttggtaagggtatcaccccacaaagtttgacaaagggtatctaagaaaaaataggaaatattagttgaacagtaacatagccaaaagttgtaatggattggatgcttaattttgaggaactaaatcttctgatgcagcctaagtactattgttttatgaagcacanaatagctttgcttctcatgtcttcgtgtgatgaaagtgatataatggatatggatctacccttgttgagtaatataattgcttttgttaaaaagagaaaggcaatttgttttttaaatatatttactggaccttanaacaatatcctgtcat

SEQ ID NO: 199604 - DNA, 455 bp, Glycine max
  unsure (1)..(455): unsure at all n locations
tatgctacanacatttataatagaccccctcatcagcataaccatcaacaacagaataattatgatctttcaagcgacagatacaatccaggttggagaaatcatccaaatctgagatgggcaagtcctccacaacaacaacagcctatccctcctttccagaatgctgctggtccaagcaagccatatgttcctcctccaatacagcagcaacaatagcagcagtcacaacaaagacaacaagcaactgaggctcctcctcaaccttccttagaagagttagtgaggcaaatgaccatccaaaatatgcaattntagcaagagacaagagcctccattcagagtctgacaaatcagatggtgcagatggctactcacttgaaccanactcaatcccaaaattctgacanattgccttcacaaattgtgcagaatccgtgagtgccatcaccttg

SEQ ID NO: 199605 - DNA, 391 bp, Glycine max
  unsure (1)..(391): unsure at all n locations
gctgcttgagaagcgtcatccactagagtataagtcatggaangagaagcttcaccaccaagagagtgccttggataagaagcttatagaggaagcttcaatggagaaagagaatgagagagagggggcatgggaattgaaggaaattatggagagaagttgaactttgaagtgtgtctcacaagtttctcattcatcaaagttatgacaagtgttacacatgtttctatttatagcctagcacatgggaagcttccttgagaagcaaggaaggtagcttcttgggaagctagagggagaaagcttccttgataagctagaggggggctactcacacccttccaatagcttagctcaccccatgccaaaatacatgaaaatcaatggaaag

SEQ ID NO: 199606 - DNA, 382 bp, Glycine max
gtcatcagaatcaccttgatttacgatgtaccacttattgacgatgagatccgcctgtacgttatgagcctcatcggataacatctctttgtgcccatgatacactcacgcttgggctaacgttgattgctcatctgaggcactaggagatttcatatcttacatatataatcagatgtctcgtactgcaatacaatgatgatgtgactaaggtgtcttctctctctctctactgctatatgtcagcgtcaacaacaaatcatgaatatatatgagaatgatgtatccacttggtgcactgcatgataatctcgcgatactaacatgccttaatgcgatcattcgatgtcaatcttgcttatacacgctctgttgcacatca

SEQ ID NO: 199607 - DNA, 357 bp, Glycine max
  unsure (1)..(357): unsure at all n locations
aagtggagatgttttactttgttccctttcatcaacaacagcactatgaaagggatttgaatttcctaaaggagcagcaagggtcatactcaaatntgtctgtgccaatgattcatatatatctcgcatttctgtctctggcttacagntctctgctttggaagccttagacgatccattagactcacaatgaaattgtgatatcaatgtgtttccaagttctccaactgagggtaaaatttctggtttcatttcttgcaaaggcccatctgtttcaacgttgtgagntttgaaccaacactgaagctcatcattctctgcataatgccctacttgcatacccctcacagtaaattg

SEQ ID NO: 199608 - DNA, 451 bp, Glycine max
  unsure (1)..(451): unsure at all n locations
attgaaattattagttctccaataatagaggttgtntttgttatagaccaccgtggtcaggtggtgttntcgcatactgcagacattggtttctgctcagttattgctgcggaaatatgggccattctgactggtatttaaattgtcgaatcttggagtcgcaggtttaagtgtttaattgtcgggagttgctangtgcacccagcatcttttaaaatgacaaaattgcccctgccttctttctccttttaaaagctgtgtttttattaaaaaaatcatagcagccattgttgtgcactcttcttctcacttctctcttcggtgccatattttcttcggttccttggcaacggttaggttcgatgaacgtgaagatagcggtgttcaatattgcggtggtcgtcggcagccgcatacaaggtatgcattattgatccgttaagcaccacca

SEQ ID NO: 199609 - DNA, 332 bp, Glycine max
aaaataccttacatagtagttgcgagttttatcttttgtcctatcttggattatttttggatctatacatatattatattattctatataatcttaaatatcacagggaagtcctaccctccttgtctgatccttggtgggatctattggtttggtaacctcttggaagtaatgctgcagaactcttgaaattacttatactttgccttgttgatttattactaaaccatcatggtggaatctgataaattttagtagccatgttgtagggtttatacttgtacttctgttttatcccccactgttatataatacaagaactgcaatggcag

SEQ ID NO: 199610 - DNA, 344 bp, Glycine max
taacaccggtcaaaacctttaattaattacattttttccttacatccaatcatataatttatataatcacgcttatatttctttctcattagacctatatactagcatttgggtggcaacatatatatatattatctgatggagaataacttgaacttacttgcatagaggaattatctccgtctcaatgtcacgagtccatatggaccactccattagaacagcaatgattggatgaacagcatgtgctctccttataggatctgcactagcttcagataattcaatataccttcactttatcctattccaacagtttcttcaagtcaccaatctatatgaca

SEQ ID NO: 199611 - DNA, 441 bp, Glycine max
  unsure (1)..(441): unsure at all n locations
acctgaggcatgcaagcttcgaaagaatgtgttacgaacctattcttcttatttaagatganccaacggntaacgaatccagaatcatagttttatcggaataggtttaggtaaaatttgaaatcttataatttcaacttaggtcaataaaactccacacaactcaacataacatcaagaaaatcacacatgaccaattcacaccattcctcaagtcattcaagtcaatcatataatcaaataacaagataaatacatttaaacatcgatttatagttagcgaaatttcaaggcattacaactctctctcccttttagaaatgtcgtcccctaaatttacctaacttaaacaaggctggataggcttctcgcatctgactctctagttcccacgtggtgtcttttgctgatgcaccctcccaaacaccttgaccatggaat

SEQ ID NO: 199612 - DNA, 373 bp, Glycine max
  unsure (1)..(373): unsure at all n locations
cctactgactagagcacttatacgacgaggcgattccaagaacttggaacctcactcatcttaaattttatcacagctaaacttataagtggcgatgtgctctntttcctactctaacattttatcccatgaggctttgttgagagagattctaatgaggcacaccaaaattttacattgaataacagcattattttcatcaatattgacttgttagatctgagtagaacgatagatttcttcgactaaaagacctaaatagaggtatagagaagttcacatagaaattggcttctaataaactgacaccacagtttgaaaaacatactatagatacttaatatttggtaaaagaagaccaagaaacaagtac

SEQ ID NO: 199613 - DNA, 375 bp, Glycine max
tcgacaaggcttgaagtagaggagacctttaatcctatcacgcaacgtggcggacaaaaatgggcagttaacttgaatggccattattgtcaatgcggaaagtattctgcgcttcactatccatgttcacacattatcgcagcttgtggttacgtgagcatgaactactaccaatatatagatgttgtttacaccaatgaacacatcttaaaagcatactccgcacagtggtggcctcttgggaaagaagcggcgagatactcttctgatgaagaatggacactaatccctgacccaactacaattcgtgcgaaaggtcgccaaaataacaagataaggatgatatggttgggcgaacattgaccaccgcaaaat

SEQ ID NO: 199614 - DNA, 435 bp, Glycine max
  unsure (1)..(435): unsure at all n locations
acttaatcacaatgtttacatcttatgaccatgtgagtggggatacgccaatttgcactaccacagatccatgagactaaaacttaagcactcgatcaatcctcccaccttgccactttgaacactttaatcacaagttgatatacaaacaaaagaaacaaagcatgtctagacaaaagtgagactatccttgaggaatacttttaacaaatacaacttttatattaaaaaataggttaaattatacatttaatgttttatcaatgacttggctcattctattttttctctcccacagatttagatctcctcctgtataaaagaatatanaaatatggttcaatacttaatttgcatatcttttatatctattattgtgatccaaacaaaattagatctaacttattcatgtaacggaacatatgaaataattta

SEQ ID NO: 199615 - DNA, 179 bp, Glycine max
taggtggagtgaaactgaaacatgccatgttttgctggattaaaaaggagataagtgaagcttcttctgctcctacgccaaattcaagaatctttctttttttggcgccacttgccctgaggaaattatggtaagcctgggaaccaccttttatttttttataggggcgcatggaatcg

SEQ ID NO: 199616 - DNA, 387 bp, Glycine max
atagatttggtgttatttgtactatgacatcaatttcttgaattgttgtgtttctaaatgtattattgaattgttgtgcttcattgtgttaattgttatgaagcgggaattgatacaataaaaattggaagatgtggatgctactatattagatgtctgtgtagctcttacagaggctatgaacacttaaaaatatcatggtatgtatgcctattggcatgtggttttgtcagtctgagatttctgaaaaatcttcctatagttaagtcttcttcccaaaaagtgaacctatgaaagagttgcccactaaatccacggcacactacaaactctagcattatatgtagcaacccgtctcatctgtacaatatcattactccaaatctt

SEQ ID NO: 199617 - DNA, 438 bp, Glycine max
agcttatcgtaatcgaggaggaaattattttttagacaatgactggtttttcaggagtctttactttaatcaattaccaggtgatgtaatcgattacttctctcttaaaagtggttctgaagggatcaataacactttatcgattatatcaagaatctaaatgaatacattgttcttgaaagttttccagaatttgggaagaatactttaatcgattgaaatgataatataatcgattacttctttgaaataattgattacattgtatatttaatcgattacatgcgattataactattttctctataaatagccaccttgtgttctcacttcaatgtggaaaaattaagcgtgaaattatatgaagttgaagtaacagataaagagaatagaaaaaaagtgcttagatacaatgtgactcacaacttctaatctttg

SEQ ID NO: 199618 - DNA, 248 bp, Glycine max
ggatcccttgatacttgaagggtccatctcagggacaacaacttcagcaattttggggaaaggaacataaggaagttggctcgtggccgacgccaagacgtttccttctaaatcacgacaaactacgcccatgccaattccaataccgttcttgcaagcggctataaagtttaactttattaagtgctgacggtggacaccatctattctgatgactacctgttgtggcggctatatagcactgtgtc

SEQ ID NO: 199619 - DNA, 463 bp, Glycine max
  unsure (1)..(463): unsure at all n locations
gatccttaagtcacctgcggcatgcaagctngtcatagcggttatgcgagacatatatctacatngtagccatcatcaacaagtaccaagaagaattagatctagccacgacccacgagcacaaagtggcggacgagtatgcccgagtgtacgctgaataggaggctagaggaaggttaattgactcgttacatcaagaggcaacaatgtggatggaccgatttgctcttactatgaatgggagtcaggaacttccccgattgctagccaaggccaaagcaatggcagacacctactccgcccctgatgagatccacagacttctcagctattgccaacatatgatagatgtgacattcctgaatttctacctagaattntgtaagtattacatttaaacaatcatatatatatatatatatatatacttattcctggcagaagatgcacattggtggggaaa

SEQ ID NO: 199620 - DNA, 325 bp, Glycine max
aacttccctccgtggtgtcagagcacaggagctacatatatgtgctttcttaaaccaccagtgagaactctgctttacctgctattacattgaagaatcttcactttttctccatgtatataacaacatgtcttgtgctaaatgttgctgacatgattctttatagatttcaccacttaaacttgctattgaaacaagatttgataaaatatggttcaaatatcttgatctagttcttgaaccatgaattgtgacgagtctacgctcctttgagatatgtcttgatattctttgtggctgacacctctaccataacactcttaca

SEQ ID NO: 199621 - DNA, 430 bp, Glycine max
  unsure (1)..(430): unsure at all n locations
agcttcttttggaccttgaacaggcttctatctcctctttcaaaaccatgctatgtgctcgcgactggtccctttcttccttgagttcactattgctaccccatagagctccgcgaaatttgttccgaccatactcttccttgcgagccctcttggtctcttgttcaagggctcttgcggtaattgcattctcttcccgtaacccggcacactccttccgaacgtgtgtagcggccaacttgaacttctccttggcaagttttgcctttcctaactcgcttttgagagcttggacttcttcgtcctcttccagtgcttcaaagctctctttgctgacgaactttaactttgcgagccaatctanacctcgtacatgaactttcagccattcgtgtacccaccaatgatgccaataccaatgcctctaagc

SEQ ID NO: 199622 - DNA, 407 bp, Glycine max
  unsure (1)..(407): unsure at all n locations
tttcatacangnccaccaaagaacttactcttcttggagtagactctccccaccgatagctctcgatcttgttcttgcgagggaggtgaaggtggttcacctgtgtcttcttcctcagcttcttcttgaggtagttgagcgggtataagaacgatcttctccaccttttcttcatcccaaatccaagaagcgcactcatcaactacaacatctcgactgatgacgagttttttattttgcaagttgtagacaccgtaacccttagagatattgctatacccaaggaagatacctcgtatagtcttgtcttcaagctcgtgcctcttcacgtctggaatatgaatgtagcatatagatcccacagacccttacgtgctttgttgatggcttcttcccgtccaagcttc

SEQ ID NO: 199623 - DNA, 457 bp, Glycine max
  unsure (1)..(457): unsure at all n locations
cgccttgtggttatttctttaagccctgtattttggctttttttgcttatactttggttatggttgtcttggatgtttaccattttgttttgctgtgtgtttggttattttagactctgttttggatggttaagacttgcttggtttattctatggattgaatcagtttatggatgaattgtgctatgatcttgatgttgccttagttcctttctccaggcgtttttggctttntgatgttgccaaagggggagagaacaagggtagaatttatcatgaacttaggcataaattccaatcttaagggggagtaagggttgtgagcacgcattatcaaatngtatattgtttatcttgatttcagattattgtcatcatcaaaaaatgggagattgtagaagcatatatgatgtgaagttttgatgatgccaaagatgagtgcaattcangtcaagaa

SEQ ID NO: 199624 - DNA, 469 bp, Glycine max
agaggatgcttcaatggaggaaaagaaagagggagttaaagagagaggggggagcacgaaattgaaggaagaaaaagggagagaagttgaactttgagttgtgtctcacaagactctcattcatcaaagttataacaagtgttacacatgcttctatttatagactaagttgcttccttgagaagcttctttgagaaaatttccttgagaagctagagcttagcgacacacacccatctaaaaactaagctcacctccttgacaaaattcatgaaaatacaaaaaaaaaatccctactacaaagactacccaaaatgccctcaaatacaaggctaaaaccctatactacaagaatggccaaaatacaaggcccaaaagaaggaaaaacctattctaatatttacatagataagcgggctcatacttagcccatgggcccaaaatctaccctaaggctcatgagaaccct

SEQ ID NO: 199625 - DNA, 424 bp, Glycine max
agctttgaactggttatttatcaaggggattggttgtttggtttatgcaaacagcactgcttaaagttactttactttcattaggcagtggggaagcacctctattggacattatagcgtacgccgggtacacttttcctggcttgtgtttggctgtttctggaagaataatatggagttactcctactactttctgatgctgtggacctgcttatgtatggcagtgtacttggttaaaacaatgaagagagtcctttttgcagaagttaggagttatgattcaagcaaacaccactatctcttgctcctcattgctttggctcagttcccattgttcacatggctttgaaacattactgtcaattggctaatatagagtgatagcatttacactgtactttggaagcactgggtgattttttt

SEQ ID NO: 199626 - DNA, 464 bp, Glycine max
actcagctaccttaaagttcactcccttacgagaaagcaaagcattcgcttatctttctaacaagaaagatgtgaaactgagaagagctattcctcttggagtccccatattcaactgaaattttccaagaacaagatgcaagtacacttcacttgaggcttttctaactgtaagtgtaaatcaacaaagatgttaatatggaacgttaacagtcctcaaatgggtgttgtttcatcactgtggtgttcaaaataagaaaagaaactcacttccttctttccatgctagaatctcattcaccgaaaaatcttctgtcagaccaaggggggggaaaatgacatgtttttggacagcataaagggaactagcatgcttgtcactgattcacgaagctgtaaacaaaatattatatataatggccttaatcttagaaacaacacagggatgaataataaaccatatg

SEQ ID NO: 199627 - DNA, 414 bp, Glycine max
  unsure (1)..(414): unsure at all n locations
ctgcaagctcaatggtattattgtcagcagcactttttatttgctctgatngaccatcaacactgaccccgctattctgcacactacttttatcatcctgggaccttgtgtagaaagaatactgattgatatcatatcccttccaagttggaacattcatatttggacccacggctagcaatcttaatgtgtctgaagcactgtcatcggcgaagattgtttgtctaaaccacgatatgaaagttctattgtgctcttgcaacaacctcatcatgttcatttttgggtgaatacgacacaaatgttgttngtgagcatctatgtaagggattacctcagctgtgttgtgtaatacatatagatgagcttgtgctaacctgntggtgatccatgggtacaacaatgaacccccgt

SEQ ID NO: 199628 - DNA, 285 bp, Glycine max
ggccgcctaagagagcaagactagtctgaccactctgacagaccatatgatattagttgagtgagaaaactgctcatgcgcactgatacaaagatggagcatatacggacttgacgtgatggaactctgctttctctttattgagactgtgagacacacttaatacccccgctcctgaagaccaataacatgcttagcatagagcattcgcctgtgggatctattggaccagagttatactatgtctaagtcattatgcctacaccatgtggcgaaaacttggct

SEQ ID NO: 199629 - DNA, 311 bp, Glycine max
gttctatcttcttagtgatatttttcccacttataccgggaccataacatccatcccgtataccggccaaaaaggtgtcttttgggttggaaatccgggagtaaaccaatgtgcccataagattttaaggagctcctcagcccatctttccaatggcattgtgtagccatttctttagttccaccaaaattacttggtccgttgtttaagggttgtctaccagcgtcactcgtgcttgatgtcgaggcttgcaataaactcgttcatatttcaatctgggaatggtaacaattatcggttacacaacacat

SEQ ID NO: 199630 - DNA, 361 bp, Glycine max
agacatcttgccatgcgaagtcatgttcaccataactcacctgtgctatttcttccatgctatatgtagcaaagtgattgatccactaatgtttgatgagttggaaaatgaggccgcaattatactgtgccagatggagatgtattttccccctgcattctatgacatcatgattcacttgattgtgcatctggtcagagaaattaaatgttgtggtcctgtttatctacggtggatgtacccgattgagcgatacatgaagatcttataagggtatactaataatctatatcgtccggaagcttctattgttaagaggtacattgcagaagatgccattgcatcttgtacagaatactta

SEQ ID NO: 199631 - DNA, 364 bp, Glycine max
  unsure (1)..(364): unsure at all n locations
actttctaactatttgtccttcagattttattatttccttttgctaatatgtaaatataaatagtataaggctatggcttatggacatggtcttttttacccctaacaatcttagaagtaaatatagaccatgtttttacgaataacaagtacctgatagatgggtatggaaacatgagcctaatggactntattcgactaggactgtatataaattgctgcaggggaagccaggatcgcaaaggtacatgggaagccaggatcgcagaggtataactgatggaagacttggtggatagccttaacttggtctatatggaggcatcggaatgaggtcattttccataatgcacaattcaatgga

SEQ ID NO: 199632 - DNA, 349 bp, Glycine max
  unsure (1)..(349): unsure at all n locations
agctntctagctttaattggagattatgtcttcttttgtgctctaaagtgtgggaatgtgctcaaatatgtagggcaattttggtttgttttcttgctcgattgggttggattgagggtttgtatgggatggctctacgcctataatgcattttgaaacaatgggacatgccacattgtccccattctcttgctattgatgcctaaacgcgcgcccaccaagtgtttcgggaaatgcctcaatggcattagtgcgtgacttttgtaaggaaacataccctggggcactttggtttgcacatattgtttattttttgggacatgcattcttttcccacaaaatgctagat

SEQ ID NO: 199633 - DNA, 431 bp, Glycine max
  unsure (1)..(431): unsure at all n locations
accgcagcatgcagcttgaggaggagggggcagtaccttgtttagnctgaaaagagggaaaggtggtcttcccttttgaccccttgtgaaaatggaggaagaagagcaactttggtgagttttggattttaaatggacttgctaaagaagctcatatcatgttccattggattgttgtgtacgcttatcttattcactcaatcttgacccatgaatgacccttgcttactcatggaaaatgtgtacatcactaccaaatgtggtgcacatatttttctctatcgatctgaccaaatgtggtgctacccttattttccaagggtatgccctctattggtggacttccctcgttcgggagagaaagatcatcgtgaacctctcatacaatcatggaatgatcttcagagtgccctangaaaaaaccctttcct

SEQ ID NO: 199634 - DNA, 403 bp, Glycine max
  unsure (1)..(403): unsure at all n locations
aaagctcatgattacattctcccgcttttgatgatgacaaccacctgttgttaggagcaacaacaaagaaaatatctatttgcatatagtttactcccccttggntttacaatgattgcttatatgagacaattgaagatttcatatttttcatatatagaaacgtgtctcataaaccaatagataatttttcttactattctatcttttatctttctctacccctttgtcaacatcaaatacaaatcatgaatagagaggagaaagatgtaccacttgttgcaatgtatgagaatcaagtgatatcaacaggcattaaaacaatcattcaatattaatcaagcataaacaagtgcattatctcatcactcaaacacagtcaaacacaatctatcatcagata

SEQ ID NO: 199635 - DNA, 373 bp, Glycine max
  unsure (1)..(373): unsure at all n locations
gcacaagaatgatctaatcctaatntatgactacattccaaatggtagtcttgactctctcctattcaacgataacattgctttggattgggatcagaaattcaatatcatcaaaggtgtagctgcagggttgttgtatcttcatgaagagtgggagcaagttgtgatccatagagatgtgaaatcaagcaatattctaatagatggcgagctcaatgctcgcttgtgtgattttggactagctaggctttatagccatgatcaagtgtcacacacaacaagtgttgtggcaccattgggtatattgcaccagagttaactataacacgaaaagcctctgcaagctctgatgtgtatgcattttgggtcctac

SEQ ID NO: 199636 - DNA, 415 bp, Glycine max
  unsure (1)..(415): unsure at all n locations
agcttctcccgcaattttctatatttatggttataagngaagngaaaaggggttcagccccttaggcacttctctctctttcgaatttgcttggaaaaattgtttccgtgaagaaaatctaagccgaggcgcttccgaaacatttccgtaatgtttccgtaaggaatttcgcgaaggtttcgaccgttcttcgacgttcttcatccgttcttcatcgttcttcgatcttcaacgggtaagtacctcgaaccaagcttttcgattcattctatgtacccgtggtggtccacattgtgttttgtgtattattattctcgttttatttactttttatacccccttttgacgtgcttaagccattatatttaagtcatntctcacttaacctaaaaataaaataaatcttcaccgatcg

SEQ ID NO: 199637 - DNA, 465 bp, Glycine max
  unsure (1)..(465): unsure at all n locations
taataggctctgattacgacactgcctttcgctgntagtggaattggacttagtgctagtcttgcgcttagcctggctgaaggcacctgctgcgcttagcgcgcggctttgatgttgatgctctgccagattctccttcgcgctaagcatgctgaagctacgcttagcagtggatgcacgcttagcccaactgctgagctaagcccaactgctactttttgcaattcaaaacttagcctctttttcacctgaaaatgcacaaatttcatcattaaatccaatggatatgttctagagacagcgttaaccataaaattgtagaagtaaagactttgactntggtgttttgatgatgtcatatgatcatggcgttntgatgccttatggaaatgcgcttctcaangttaattcatgacaacaatccgagaatacaagatacaacatcaagaagatgtctagtatttt

SEQ ID NO: 199638 - DNA, 309 bp, Glycine max
tagctaaagatacactcctcaacgaactttatttaacaccataagccactaacacacgtccgtacaaacacacctatgagttattgtggtaagttaaatttatctatacattacacaaattaaaacagaaaataataatgaaaccctacacacaattgaggatgtcccaacaaaacttccatctaataataaaagatatattcaaaaaaaaaattagagcatttagcatttctcatgctacaaataactattaccctatatgacccagcaatttcaacgcaagggcaaaatgagcttactatcataaag

SEQ ID NO: 199639 - DNA, 332 bp, Glycine max
  unsure (1)..(332): unsure at all n locations
taacatatatggtaataaatcgagtgcgagactaangttgnncttccgancgaaacaaaagttccttggagactcgtcatgcgtcgtgcacgtgaacttcacgtgccaagaccctacttggggctgcgtgcggtattgtttttagttggctatacatgtgaacagcgtgacagtcttcgatgatgacaatggatattgttcacccatgaaaaaaaacataaagatccactggtgatgccttggggcggagggagggaagatcagtatgatgctagctagaaagagatgaagcatgatggggcggtcagccaaacagcagcaaaacagaacca

SEQ ID NO: 199640 - DNA, 421 bp, Glycine max
  unsure (1)..(421): unsure at all n locations
ggatcttaagcacctgagctgcagctttcttgttattcaatttgtgttctatcactttntctcatcttgggctatgaagtagttcgttactacctgtaataaccagcttgaactgctcctgatggggaagaacaaggatcgtcaatcacactcagttgcaaagcaaattatggtgaagggttcaagttcacgcaatgtgcttgtaaaaaggcaaggacaagttctgcaaaaactgatgatgtcgcacaccaagtgtttgataatttgtccgaatgcagtgttgaatctgaatcttccccagaggtttcttgcaccttatgggataatgattcaactattgttgatgattcatctcactcctgtggctctaagtcatcaccgcagctagacgacaataacgctaccactccttgggtaatct

SEQ ID NO: 199641 - DNA, 405 bp, Glycine max
  unsure (1)..(405): unsure at all n locations
tataaagaaatgatgaataaggagagcattgtctgtctttcttctcacaaaaataatnatgtctctctccataatttgtcattaaggaagagatgtacgttgtgtattctaattctttttttctattttaaaattaaataattctgtcaaatacaaatttaataatattttgtgaagagcaactgatgatgtagtaaaacgtgtaaaatatctaagttaaatttaattttttaatcagcatagaatgtcttttattctacttatttatttttttccacttgttcaaacatgtgaaaaaaaaacattatccatttctctcatttttatccatccaaataatagatcttatatattgtatttctatattaccttctatgatcatacttatttggtttcatttaattc

SEQ ID NO: 199642 - DNA, 416 bp, Glycine max
  unsure (1)..(416): unsure at all n locations
agctttgagaagggctattgtttctccttctcgctaagccaatctgctggcttagcgagcgtccgctaagcgcaaccctcattggcgaagcacaaggaagaatctggaagaagataagctatacaggttcactaagcacaccacttcagtccatccgctaagcgagaaaggcacgcgctaagccgaaattcactaatgtgcgctaagcggtccagaattgcgctaagcgcacgagcacgaacaaggccacctatttaagcctgaaatcagattttgtgaagggagtttgggctaagagctgaagctntgcatgtctagtgattctagagagataaaggtccaagttccagagaattttaagagatttgctgtgtgaagatctgcagagaccagagcttgaagaggaagctggtcta

SEQ ID NO: 199643 - DNA, 474 bp, Glycine max
  unsure (1)..(474): unsure at all n locations
tctcccttattntcctataaatatggggagaagttaagtgattaaatgttcaaccctcctagtaattcgagatcacttcaaattagtgaagaaaatcgtttccgtgaagaaaatccaagccaaagcgcttccgtaacgtttctgtgggtgatttcgcgaagattttcgaccgttcttcgttcgttctttggtcttcaactggtaagttcccgaaatcgaacttttcaattcattctatgtacccttagtggtcgtcatttgtttcgcgtacttttattttcatttcatttacttttcgtacccccttttgacatgctttagtcatttacttaagtcattttctcgtccaatcaaaaataaaataaattttcaccgatcgtttgaattgtaacatccattaatttctgtaaaaatganatcttgaccgtcggtcatgccgtaaccacgttggaaaccanaaagacgtaaaataat

SEQ ID NO: 199644 - DNA, 358 bp, Glycine max
  unsure (1)..(358): unsure at all n locations
agcttcaatgcatcctggatgctntaatgattgacaatgttatgggttgggtttagttgttgtttgtcttaatgatataatggagttaggacgttctttgaaaaagtgtttgtgcatatggttgtagcttattcagtttaataccagaatgaagatggtttgtgggtatgatattccatcaaaagacacgattatttgtcaatgtttgggctattggtagggatcccaatcactgggagaacccttttgagtttaggccagagaggtttatcagagatgggtagaatgaatttgatgtgaggggacaccattatcattttattccatttgggagtggaaaaaaacgcgtcctggtgct

SEQ ID NO: 199645 - DNA, 438 bp, Glycine max
  unsure (1)..(438): unsure at all n locations
nttgcatgtttaggaagttctagagagtatagtgttcttgttcaaagagttctgagagaatttgctgtgtgaagatctgcagagatgtgagttcgaaccgaacgccattctgagaacttgagatgactttgtgagtgattgtgagatcctagcagtgaaggagacatcttgatgagaatcctgaaactagccaaatacaggctaaaggcccaagtggagaagaacaaaggcccaagtggagaaggacaaagcccccaagtggagaaggatgaaggcccanaggcagagacattatcaagactgttaattgttgttgaaggcccagattaatttgaaggcccataataaatatgttctaattttntatttattaattttttggcccacactgttttagaggcccatgtctattttttatcttttgttcagatacactat

SEQ ID NO: 199646 - DNA, 384 bp, Glycine max
  unsure (1)..(384): unsure at all n locations
ggcgatggtgcacaacaagttttccacatccacaatgcgcgcataaacccaccatcccctgttgcccacctccaactgagctcacgtactcccacgtagcccatatcctcatttctctcaataccgggtccccatcaatcctcccaagcttccacaacatccaagcaaaacaacattcaaacagcacaagctatcacagccaagcaaaacagagcaaaggcagaaaactctgctcaacacatcaaccaaaatcacagcttttctcacttaaagaccacagtaacaattccttcgatccaattcgttaaccgttggatcgactccaaaaatttactggaagtctctagtgcataagcctacantttgaaccgtgggatctactgg

SEQ ID NO: 199647 - DNA, 419 bp, Glycine max
  unsure (1)..(419): unsure at all n locations
ccaaactccaaaatggaggacaaatgaacagccctaagcaatatcattcatgtggctccganaaagggtgagaatgaaggattgccttgagggtcctcacttatgcaatcatggaacacagctcccaactccaaaatggaggacacatgaacaaccctaaccaataacattcatgtggctccgaaaaagggtgagaatggataatggccttgatggtcctcagttaggcaatcatggaacacaactcctaactcgacaatggaggacacatgaacatccctaagcaattacattcatgtggctccgaaaacggtgagaaggatgattgccttggtggcctcacttagccatcatggaacacagctccaactctaaatggaggaccatgacagccttagcaataacattatgtggctcct

SEQ ID NO: 199648 - DNA, 435 bp, Glycine max
agtcacctgcagctgcagcttgaaggggttgttagccctgcttttctcatattactcagctagtgctcaatatgtcttgaaacacgatttgtttgaccactatcccatcttcctcaataattatttggtggattaagggcctaaacccttatagttcatcaatgattggttatcgatgaacgggttcgatgattttatgaaagagtgatttggcaacatccccatgagaggatgagatgcattttttttaaaagaaaatagaaaaaaaagaggctaaagtcagagatgaattcagtggagtaaacttcaatatgaaaacttggaggttaggcataacaacctcgtgggacaaaattattgagatagatattaatgcccagtagcaaggccttttcgacgaggaagttacattaaagggtattctgtgggtgattt

SEQ ID NO: 199649 - DNA, 415 bp, Glycine max
aacacagaaaccaaaatctgttgataaaaagataaagatttatccaacgaaaaaaatcaataacatattacaaaggcatgcccacagagcactcagcagtcaccaccgaataccaataattgatcattctcctcctaatcccttatgtatacaagctgtcacactatcactctggctttgccttctccttctcttcttcgccaaatcccaatctcaatcccgaaaaccatttcactgatcccctacccctccccctccctccaacaatgttccgacacccttaaaaaatcaaaacctcagataccataatacatcaaaccatgttttcctttcctcacaatgtctttctacccatacatgtctttccaatcattatttgttgctgctccgcctccttgtcgtgtcggagcaatgc

SEQ ID NO: 199650 - DNA, 197 bp, Glycine max
tccactcttaaccgcccatgtttcagagctatgaacaccattgaagacccgggcttttcacatgattaaaaaaaacacatcacagaattgcttagcaggacttgggtcaaaatccccaacttcattgacgttcgccgaccctttaaatgtcgccactgaatggaattaccccatgtgattggaacaaccttacaaaa

SEQ ID NO: 199651 - DNA, 401 bp, Glycine max
ctctcggcccctgaaggagaaattattttggccccatatgaaaaagatgtccataggtattgcactaggtatgtggcttgtttacaagccaagtctagggtgatgcctcatgggctatacacacctttacccattccatctacaccttgggtagatattagtatggactttgtccttgggcttcctaggacccagaggggtgtagactctatcttggtggtggtggataggtttaggaagatggctcattacataccatgccacaaggtagatgatgctatttacatctcaagaatcttcttttgagaaggtatgatgcttcatgtgtttcctaagactatgtgtctgaaaagatgctaagtccttacccattttgaaaacttatggctaactaggactaa

SEQ ID NO: 199652 - DNA, 51 bp, Glycine max
ttttgaagctcactacacgcctctagtgaaaaaccatgatctcaccttaac

SEQ ID NO: 199653 - DNA, 281 bp, Glycine max
  unsure (1)..(281): unsure at all n locations
aaaaacgagcagcacagaaaaaaaagacacaatttttttnncccaacaccccacaacgacaacccaccgagacccccaaaccaaaccaaccaaaacaaccccaacgccaacccaagaaacacgcacacaacaaaacccgcaacccacccaacaccacaaccaaccaaacaacaccaacaaaccaaccccaccaaaaaaccctacccaaagcaggcccacacccaaccaaacaccaaccacatcaccaaaaaacaccccaagacacaaaccacccacaaaca

SEQ ID NO: 199654 - DNA, 354 bp, Glycine max
  unsure (1)..(354): unsure at all n locations
tggagctggtggtggagcataagtgggtacacacaagtcctgaggagtggatgaggaatggatctcagctgctctggccctagccttgcgagtccttggaaaatagaccgaagtttcatccacgttccaacaatttttcatgatatatgccaaattaatggttgggctcagtgattcataagagagggaataagaaatgactccttttgccttacagagagctgtgatcaaggcaggaaatcccaacctataggagttggactgagcaatgagtgagatttgtcctgaaattaatgctcccatgtncatgtccatcctcattacccaccttataactaactatgccctgtccag

SEQ ID NO: 199655 - DNA, 404 bp, Glycine max
aaattatttggtataattagttgctaagctaaacgataactgtcaaataacgtaaaaggacatatttaatatttctaaaaccttctcatcttaaaaagaagactataattttttaaaatttcgtattataaaaagaatggtaaaattcggttattttactcagtgtttaaattattagttttaaattattttttagtataaaaattccaaccttctaatataaatattattcaaacataaaattgttgatgaagctatttaaagtttttctatatacattatagctaaaaatgattttataggattctaaacgtaaaaaaaatattaatgactcttgagtatgtaattgtgttaaatattcagagagaaaagagtcttatcactcataatgattctatctgact

SEQ ID NO: 199656 - DNA, 362 bp, Glycine max
  unsure (1)..(362): unsure at all n locations
agctnngatttcctttgttccggatacctttcttttctcatgtgcacccaaacccaatctccgggttcgaagacaaccttctttctccctttgatggcttgtttagcatagcttttacttttcctctcaatttgatctttgactctataatgaagcttcttcacatagtccgcctttgcttgaccttctttatgcttaaaaacagaaacattaggcataggcaaaagatcaagaggagttagtggattacaaccataaacaacttcaaggtttaagaaagaagaatcatcggatgacgccgatcgaacatttcctaatagacctcatccaaatattattcccggattgaatagaagatacaa

SEQ ID NO: 199657 - DNA, 485 bp, Glycine max
  unsure (1)..(485): unsure at all n locations
taagcttcaaaccacagcaacacaaaatctaggtgtgcttaacctttttatttanggattctctaggcttgagaagtgaaatttagaatgagggtatattgaagcaaactctcaccttacacaagtccataacctcaatctaaactggctcaaactgaatttacacctaanattccaccgaatcaaaatttgactcttcaacacccaattttgccctagaaatggctctntattcactttgatcatttngttttctctctagcacagtccaaactttctcccaagtcctaaatgacatttcaagctaatattaactcactttaacctccatttaccacagaattcagacttagccttccaaccctcaaagcctcactctttgtccactcataacatcacattctcactttctaaccctagggtaactctaccattcatcttaacagttttccataagagatctcagcatatatacatcacaaaca

SEQ ID NO: 199658 - DNA, 400 bp, Glycine max
acacacaccaaacaaccaaatcacgtcgtttcatttaacaacaatcaatcttttccctctttctcttaattcccaatattcttcacattcacttctcttctgccatgtgaacaaacatcaaacatagcaagcacaaaacaaaatcgcagttccatccatagcactgcctcaattcttcccccaaaaaaatgagccagtgtgttcccagttgggatgtcgaagacaacccaccaccctcaagagtctcacttcgctccaactctaattcaactgcccctgatgttcccatgatagctctcttttcttcttctttgggctctggatcatacgagaaattattttataattcgagactataactagtgtgatcattcttatgaattaattttgtcgacaataa

SEQ ID NO: 199659 - DNA, 393 bp, Glycine max
ttctcaaggaaggtttctcaatgaagcttctcaaggaagtttttctcaagaaagcttcttaaggaagctacctagtctataaatagaagcatgtgtaacacttgttgtaactatgaagaatgagagtcttgtgagacatacttcaatgatccacttctctccccctttttattccttcaatttcgtgctcccccctctctctttctcttcctctttcttttcctacattgaagcatccttctaagcttgttatccaaggctcatcttggttgtgaagctccttctttcatggcttattccgaaatggatggtgcctcctctcacctcttatcctttgtcatacgctgcacactcatggtggaagatcaccattaaaggacctcattgtagctc

SEQ ID NO: 199660 - DNA, 415 bp, Glycine max
  unsure (1)..(415): unsure at all n locations
agctntgtctgcaaaaatcacttaaaaccattttaggtccaacgccttaaacggtcctctttgcttttatcagttaacatggaccgttcaaaagcataaaatcaacatgtaactttaccacttttgcaagaactacgtaggtctgatttcctcatcgcaattgaggatacgtaggagcaaaagcctcgcttttgtcgaccaccccaagagatcgttaatggtccaacgccttaacgtttctctcctttcaaaaacaagagatcgttaatggtccaacgccttaacgtttctctcctttcaaaatcaaaagatcgtttaatggtccaatgccttaaatgacctttgtttggttaaaattgatcttgcggacaatgattaaaaaaacttaacaacgtttagttctgaaagactacct

SEQ ID NO: 199661 - DNA, 478 bp, Glycine max
  unsure (1)..(478): unsure at all n locations
ctaagcttcacatcagaccacttccgggtgctggtacttctcttatggactnganggggcctatgcaagttgaaagccttggatgaaagaggtatgcctatgttgttgtggatgatttctccagaattacctgcgtcaactttatcagagagaaatcagacacctttgaagtattcaaagaattgagtctaatacttcaaagagaaaaagactgtgtcatcaagagaatcaggagtgaccatggcagagagtttgaaaacagcaagtttactgaattttgcacatctgaaggcatcactcatgagttctctgcagccattacaccacaacaaaatggcatagtntgaaggaaaaacaggactttgcaagaagctgctatggtcatgcttcatgccaaagaaacttcctataatctctgggctgaagccatgaacacagcatgctatatccacaacagagtcacactgagaagagggac

SEQ ID NO: 199662 - DNA, 416 bp, Glycine max
  unsure (1)..(416): unsure at all n locations
agcttataatatatntaagacacactaagatgaaagcaaataatatatttaaggtcaattagtcaattgcttaggcatgagcattntattgcccagaaaatttagagaagattaaatagtaacatgtgtaagacacactaagatgaaagcaaagaatatatttcaggtcaagcagtcaggactcgaatataaattaaaatgttacattaattcttcactagcttaatttcaagagcaccagctgggcttcactataatcaaaagaaaaggttaaaactgtgtgaaaggcaatctaatcacaaactaacctgtctgatgacatcattaagaccagggcagagccctccacaagtaacaattgctgcctttacttcttctcgcttatagtatatcttttcacgagggccagctcgatg

SEQ ID NO: 199663 - DNA, 489 bp, Glycine max
  unsure (1)..(489): unsure at all n locations
catctaagctttaccatctgattaaaacgttcaataagctgctggtatatctattaccatatatgnngaancgaatacacaatgcaaattttgaattcaaattctaatagctgttgtaaatcatttttggccactggtaatcgattaccagagagtaaatctcttgaaaaagactttttaacttaaatttcttggccaaacctttntctacttcaattaggaattcccttcctatttaatatacccttcctaagactctagagactgtcttgatcatccatcttgaatatctttaatttctttgtcttgaataaagctctgagaaacatgtgatcctttggcatcatcaaaacattcagcttgatcctttgtctacaatctccccctctttgatgatgacaatccctgaaatcaagacaagctatatacaagatgatagcacgttcacacaacccttactccctctatcttttggcatgtatgcctaac

SEQ ID NO: 199664 - DNA, 442 bp, Glycine max
  unsure (1)..(442): unsure at all n locations
agcttcttcttctggaagtacgcgcttcaatatatcatatttgcaaaccagaaactgcaatgcacatagccaaggacataatgctaaaccatgccactctgccatttgttttttcactcacaatcctcatctcaacttccctgaaacccanaaaccaaaaattaaacatatgaaaagtttttttaaaaaaaaattgaaataaactatctatagggggagatattgatgtgattggaattacctgcccttaagatagagcaaattctcatggatggcctctactgctccctctagctttctcagctcaagctcaactccctaggtatcaatcacgtgtagagacaaaaataagcaaagagaagcattcaagagaaaaaggtttaggtatagattcaattcaagtttgatcatctcatgtcttatgtatgagagaaaaatgcaa

SEQ ID NO: 199665 - DNA, 384 bp, Glycine max
  unsure (1)..(384): unsure at all n locations
atttattttcttctaaaattaattgatgctaatgtattgtttagcttttataatgatacaaaacttggtagaaaataaggtgaagcaagatttaagacaaaatntaacatggtttaacctaatggctagtatgcattgttgacatgagataatcagttgtttggctgtattttgctgaagttgggtgagagcaggtaacagtttttacttctggtgagataggagttatagtatcttttttaatacttaatactaattcaataaacaatatatttgtaaaacatgcaaaatattgacgtttaagtgctttgttaagagaccactgtatcatatgatgatgttaatatatcatgttttgtatcttacatatctcttngtattact

SEQ ID NO: 199666 - DNA, 327 bp, Glycine max
tcatcaatcatcaatcatcgatcatcaatcatctatgaataatctatctttcaatctttacatcatctctcaacatctttcaatcaatctttcaatatctttctacaaaattttatgattcatttctcttcatctttctgaaagtttttgttcaacactttctcttccaagaaaagttctttgatcaaaaacttgtgctattcatctttttcttgctcttctccctttgccaaaggaacgaaggactaaccgcctgaattcttttatgtctctcttctcccttacaaaagattcaaatgactaaccccctgagaattcttttgaatc

SEQ ID NO: 199667 - DNA, 348 bp, Glycine max
  unsure (1)..(348): unsure at all n locations
atgctagcattaatgaatcttcaaatgatgggtatttcttttttttttgcaccagccaaccatgaccccttgaccatgtgtatcagtgaccaagcctcctgtgtgtgtatatagtccttatacaccaatatatgatgcaataattaagtctcttgagtgtacaattattaaataactggtatatagttaacttgtacgtgctaggagtaaatatcatggcactgcattattttcatgtgcttcatttagatacattatcanatcatagttatttgcaagctactattgtggacctaaaatgaatagagagcttggaataacatgctggaacaatcnttgattgtttga

SEQ ID NO: 199668 - DNA, 411 bp, Glycine max
  unsure (1)..(411): unsure at all n locations
cttaagtcacctgcngcatgcaagctttganagttgccatcgctattggaaatggaattttcatttgagtttggatttggggcacagtgggggcttgctcgtatcttctgccatatcttctgccatagaagagtcaaaaaactccccttggggtgctacgctttctgatccgcagaaatatggaatttagtttttctattgtccttctcatgctatttcatgaaaataacaaacaactatattaatatttaatgataatatttaattttaaaaattattaaaattatataattttaaaagaacaacataaaaataacaaaaaaataacagacaagtcagatccagaaatatgtatttggtttgacatctttgtcaccgccaacgatgctataaaagtctatgacaaaacct

SEQ ID NO: 199669 - DNA, 422 bp, Glycine max
  unsure (1)..(422): unsure at all n locations
tctacacattaaaccaaataatggtagtgtcaaatctattcagaaaaattattaagtagccgaagaaaatactgcaccattcacaacacaactcaaagaatagttggtggtgaaattgctaccatagtgggtgcattcaggacccaacatcttagaatgctctagatcgaggtacatggtttgctaatttaatatctataggattaaatatatttggtagtcatcaacaaataaaatatcttaatttaatatccattttcaaacatatatatcttcctttcacataactcaagcacaacaaatacttgatataagacctcttacaatctggtatccctnctctagacactttaacttgcatcctgcaaaattatatgcagacttctaactgtacacccaacgcanatatgaagatcatagac

SEQ ID NO: 199670 - DNA, 444 bp, Glycine max
  unsure (1)..(444): unsure at all n locations
gcttcatgatatataaaagagccttncatgttttgttttcttctactacccacaattattataacaactagtagaactcgctgcttattagaccaaacaatgcaattatgaaatagagtatctagagacacacgtggaacagcacagcggaggaatatttatgtagattcactaaataaagtctaaaccattagagtggattaaaattaatttaaaaattatatgaaataaataattgtttatattaaataacatattttgtatatctcttccatcgatattgacaaaaaaaaaatgaccagcaaatattcttcatattaattaacttacataaaattggtgaattgcggcacaatcaagtttctgaagaaaaaaaacagcagaatcaagtcaatcaatagcagccgggcagaaatttaatcgaatttaaatattaaagtaaat

SEQ ID NO: 199671 - DNA, 309 bp, Glycine max
agcctgggctaagtgagataggcttattaattctaaggcaatttagttttttgagtttctgttcatgtgctaagcaagtcagtctcgctaagcgtaatctcttctctatttcagaattaggtttagcgagctgcttgctaaaccaattatgttccaatggtcaagtttggctaagccgcctgctggcgccaagcctgtatagtgcgtcgtgctaagagagttagtctcgctaagcacaattaactctctgtcagagaataaggcttagcgagccatgctcgcttaaccattgggctgtttaactaaacg

SEQ ID NO: 199672 - DNA, 465 bp, Glycine max
cacataaattaatgcgcgcaggtgggatttcattcttctgccagatatcctctagtgcacgggagagaaaagaaccaggtgcaatgctacgctcatactgacacttaaggcatgatccttcttcacacgtagataacacttttccatacttgatgggggcagatacttttgtagatcttgaacaacaaaaatactgaatccatcatgtgacatatccataatgaagctgtgacagatgttcaccgcctctaaatgttccaaggaagtgagcacactcctcaaagccttcatgctcactaccgtggaccgaatgctgaacaccttcaagttaggggtagattcaatcaaggctactgcgtgcttttcttcaaattcgcaatggaatttgatcccactgacgctcttacagtattcgcgaattgcacgaaatatgtaatcaacaccagagctaatgttgatggactc

SEQ ID NO: 199673 - DNA, 327 bp, Glycine max
  unsure (1)..(327): unsure at all n locations
taaataaacataccatgttntaaaagaggccaaatcatagcccctgtaagtagcttgacctattcgcatccctaagcctaggagtgatataaggtgagtttggtaagctcttttttatatagaaaaaatcacttattttatataaaaaaaacactcgttataaaattttggatgtatgtataaacttatttaaaaaagcggaagttgaaaataagctacaagcagcttattgataagctgctccaaataagctggtgcagaaacaagaattggaataaacacggaggtgggttaatgaaatatttggatgggactacccctgctttt

SEQ ID NO: 199674 - DNA, 375 bp, Glycine max
  unsure (1)..(375): unsure at all n locations
gctctggagnacgacagtcaccgctttatgagcgctgtacaccaacagcgcttctaggccatcaagggatggacgnttctccgggagcgacgcgtccagctcatggacgacgagtatactgatttccatgaggaaatatggcgccggcggtggacatcactagttactcccatggccaagttcgatccagaaatagtccttgatatttatgccaatgcttggccaacagaggatggcgtgcgtgacatgagatcctgtgtaaggggtcagtggatctcgtttgatgccgacgctatcggccagctcctgtgatataccgtggtgttggaagagggccaggaatgtgagtatggccagaggaggaaccggtctgat

SEQ ID NO: 199675 - DNA, 404 bp, Glycine max
  unsure (1)..(404): unsure at all n locations
agctngngtaacccagactaccttatggcttttataangatcatcaaaataattctccctagcataatcactaaatatgtttatattttgataatcttcaacatattgtgcaagtaatattgaaattactccacatatggctttcaacgaatcatcaaaaccaaacttgaaagagtgaattatcattttcttctctctttgttccttgcttgatattttctttttgaaacctaggggtcggccttcggttattctgtcaaagactgaaggtctgacaccacccttttgttgcattgccaatattgcatcccttttcatcctttgatgccttctacactatgttttcaacatgttcccattcacccatggaagattctagtattataatatgtttcctagaacct

SEQ ID NO: 199676 - DNA, 422 bp, Glycine max
tgaacaagaacactttaattgattacttaagtcatctaatcgattaaattgttcttgagttgctttccagatgttggatgaacactttaatcgattacttcgataatctaatcaattacttcattgaaataatcaattaccttatagatttaatcgattacaaacggttataattattttctctataaataaccagctcgtgttcacatcttaacaatcaaaaaatcaagagatcattagaggatactcaatacatctcacaaattacttcttagcctcagaatgagcaagatttcatgctgtcattagaacaagagaagagaataaaagagccttatagtaattcacaacttaatcttctgatttggaagatcttttcttaaaagtgagttgtgtctctcgagtagaagatgatcaacttc

SEQ ID NO: 199677 - DNA, 344 bp, Glycine max
  unsure (1)..(344): unsure at all n locations
tgctnctactaagttcggactggcggcggtttattttttttttaaagccgcacacagcttggatatcatgctgaactccatacacgctctggctgtggatgcagaacctatgcatttcacagatacacgtgtcagggactggcttcttaaggtcaaagacgctctgtttgacgcagaggatctcttgtatgatatacaatatgagatctccacatgccatgtctaagctgaatctaaacctgctctggctgacttgctaggaccaaatatcttcaaatattcttctgttagttccaatgaaattaaatcaatgatgaaacaagcccttgcggaccttgaaatca

SEQ ID NO: 199678 - DNA, 417 bp, Glycine max
  unsure (1)..(417): unsure at all n locations
agcttggcagtaggatacattgctatgttgttatggcgacaatcaagcatacttgtctcagttaggatgtccaaagcatactttcgttaggagacaacaatgccagatgaggatttgtcaacctcaatgcctaaggaatgcttgagcaaacataaatgtgaatgctgattctaaggcaaataagctattatttagggactcccactaattgtaacactccccctcaagctggtgcagatcttaaattgagcaaacaaaaatgtgaatgctgatcgattataatgcctcattatggtgggcagatcttaaattagcccttcataatcccccacatgagatggtgtataagggagggctaacatggaaggtggcgaatggaactaaaatcacgtnttgtgaggaacattggggctttgg

SEQ ID NO: 199679 - DNA, 471 bp, Glycine max
  unsure (1)..(471): unsure at all n locations
tctattggaagcaggtagtaatctggcaaccatttctattattttgggaaaacagctttgcattctgctgcgagaaatggacatttggaggttgtgaaagcgcttctggggaaggagccttcagttgcaacacggactgataagaagggacaaacagcaattcacatggcagtgaagggacagagtcttgaggtggtggaggagttgataaaagctgatccctcaacaataaacatggttgataataagggtaacacagcattgcatatagcaaccaggaagggcagggctcgggtaaattagactatgcctgtcataattatgcttatatntacataaaaacttcatatgtaagatcgtaatgataagaagaagaatgtgatttatatcaccattcacttataatgttcttttcgtgtgtgcctatcctgcatagaaaacaagaatatcatattgtgngatagtactcta

SEQ ID NO: 199680 - DNA, 429 bp, Glycine max
  unsure (1)..(429): unsure at all n locations
agcttagcgggacaagtgtttctatcgttttataaaanngnncgaanatagagaattttttcatattattaaatcgatgcaaaaatttatgttgtaatattatttctcgacactgtcttcctcgaggcatcacataagtcataaggcaatgcgttgtcaagtgtattcgaaataagtcttgacatactattttagttaatttttaaatttttctttcatcagctaaaaaaatattttaatacatttacttttaactttttttaatttaattactctgttaaaaattcatcactatttagatataattcgttttctttggttcttctttcctaaatgattttttattaaatttattaacaccaaattcacataattaacaaatgtggttaaaaataatataaacattgaccaatgtattaaaataaatta

SEQ ID NO: 199681 - DNA, 436 bp, Glycine max
  unsure (1)..(436): unsure at all n locations
gcggagctntgatgtcaccgaatttgctccaccattattgatcngagctcccctgagttctttaagtaaatctcccaattccttatcatcttgttcaagttgaacaattttacgttccggttctctcaccaccatctctttctctcttattgcgtttctcatctgtgctatttcttcatttctcagaatcgtcaatagttgtatctctgacttctttcctactctactgagaactttaaaaagtggagtggctaaaaggttcaatgttntgtctatcttacaataacttcgtttacctttctccagacagtaaagttgtttgcatataaataacctctacataagaacatgcacactcgcaagcacagaatgtctgttngcacacctcaatgcacaaaatagagaagtaataacactggtagaacttatcttttta

SEQ ID NO: 199682 - DNA, 372 bp, Glycine max
  unsure (1)..(372): unsure at all n locations
agcttctcccncaattttctataaatagggttgtaagngaagngaaaaagggttaagccccttaggcacttctctctctttcngaattgcttggaaaaattgtttccgtgaagaaaatccaagccgaggcgcttccgaaacgtttgcgcaacgtttccgtgaggaatttcgcgaaggtttcgaccgttcttcgatgttcttcattcgttcttcatcgttcttcgatcttgaatgggtaagtacctcgaaccaagcttttcgattcattctatgtacccgtggtggtccacattgtgtttcgtgtatttntattcttgtttcatttaccttttataccccccctttgacgtgctaagccattttatttaagtc

SEQ ID NO: 199683 - DNA, 452 bp, Glycine max
  unsure (1)..(452): unsure at all n locations
tcctctnttcttcagttgccgggggcgtttcttctgtgtacaaaaccataggttgtgtcgtgatgttgggttgaggcaacgtgctgggtgccggcccttcggggatcggtggatagaactcgacatcccttcgagcatagtcttgagggtctttgtggacttcttcgggctgttgaggaggctctctttcaaggacgggagaagcaatatgacccgcatcgtcttgcaagacgggtggtgagtagttgggcggcaatccataagggtaagccgctcggttgtatcccaagtgagggctgccatcgtgccccagtgtgtcccttccccgtcctactatgtatgagggaggatggtgcgcagttgccaagagagttgggtctgcttctgcagccgaactgacagcggcagcggtggccacatttntctcaatgagctgcctcattactaacatg

SEQ ID NO: 199684 - DNA, 350 bp, Glycine max
  unsure (1)..(350): unsure at all n locations
gtatgactttngaaagaatcttcagaaacaagtccttgaagaaatgtgacttttggaaatgtatttttcaaaatcagtcactggtaatcgattaccattaaggtgtaatcgattacacatcaacagatgtgacttcattttgaaatttgaaaatcttaaccatttaaaacactggtaatcgattacatgattatggtaactgattacagctttgtaaatcagtttgaaaaaaatgctggctactggtaatcgattactaccttctggtaatcgattaccagagagtaaaacactttggtaaaaaatttggtgaaaacttcatgtcctactcaatgttnntgaaaagtttt

SEQ ID NO: 199685 - DNA, 464 bp, Glycine max
  unsure (1)..(464): unsure at all n locations
atgagaaccacgtacaaatcattttcatttctgaataaagttcaaaacgaccccaaatggggaataagtttgcaaaaggaccccaaatggggaaatttgcccttctagcacgctccagaaatcttctcaaagatcccaacggtcagatcctgtaaaattgtcttgtgaagttgcagaccaaatttcgagaagatccaacggttaacgaagtctataaagcgtttttaccgaggcagcttcatgtagctntctctagaagcttcattaagaggcttcctccaaaagcttcctcgtggcttctttgagaagctttctcaagaggcttctttgagaagctagatccttatctatctacacccctctattaactaaattaacttccttaaaataattacggatgaaaataacgcaacaaataatcaaacattcaacataattactaataatatatagatatatatatc

SEQ ID NO: 199686 - DNA, 376 bp, Glycine max
  unsure (1)..(376): unsure at all n locations
aaatattgccatcgacttccaagatatgacaatnttaagaatgatgtacgactttcaaaaggatttccacttaatttattaatagacagatcaagatatcctaatgttgaaagctttccaaatgatcttggaatagcaccaccaattgagttgcttgtaaaaactaccatctcatctgtctgaaatgcccccaattgatcggttagattgcctgaaagttgggaactctgaactgcaaatgatgtgagtctctgggaaatacaatgaacctaaattttaaatatcataacttgtggttgagttgagatacaaaatcaagtccctaagtgcagaattaccaaagaattggatggtccttaagttattactgataaat

SEQ ID NO: 199687 - DNA, 437 bp, Glycine max
  unsure (1)..(437): unsure at all n locations
agcttgctngtggggcttctatggaggctgtatcttttatcttcaatgagggcctttaatggtgaatttgcaccatggagatgcagcggaagacaaaggagaagaggtgagaggacgcgccatcctcttgggaataatccatggaagaaggagcttcaccaccaagatgagccttggataagaagctcggaaagatgcttcaatggacgataagatagagggacagaaagagaaaggcgggagcacgaaattgaaggaataaaaaagggagagaagttgaactttgagttgtgtcttacaagactctcattcatcacaggtacaacaagtgttacacatgtttttatttatagactacgtagctttcttgagaagaattctngagaaaactttcttgagatccttctttgagaaaacttcttgaaaactaaacttac

SEQ ID NO: 199688 - DNA, 361 bp, Glycine max
  unsure (1)..(361): unsure at all n locations
agcttttatccaaagctcatcttggtggcttaattcgntcttccatggcttattccctagaggatggcgcctcctctcacctcttctcctttgccttctgctgcatctccatggtggcaaatcaccattgaaggacctcattgaagctcaaagatccagcctccatagaagccccacaagcaagctttcatcacccatataacatggtgtactatctttcaaatgacacttatcctgattaggtcacttttttaaagaccaccccaatgccacaagataaaaaaaagaaagttatttccaaaatgtcaagatggggtgagaaatgatctgtgatgcaatcccaccccccaatggcactgga

SEQ ID NO: 199689 - DNA, 464 bp, Glycine max
  unsure (1)..(464): unsure at all n locations
ctacctaggcacgtgccgcatagagaagtttctttttctgttaacgaanaaaattgtgagttcattgatgctgttttatcgccaatatctgcaaatggtaaccgtgttatttttagcttggtaatattctgaactctccatgtagccgacctcacctagggggacaatgctttgatgatgttgttgtagtattctgaactctgttactttttacctgcattgagtaaaatcagttaaaaaattatgaattgaaccatcgtttctggtttctcaaaatgtaattgatcagtaacattgttggctttggtctttatttaattatcagttctagctgcttgtagatcgtcattttgcaagttactctatacattatcttgtataatatattgcgtgaagactattgtgaatttggaagtacatactgtattgctacactcaccttatattaacagtgactttttgat

SEQ ID NO: 199690 - DNA, 386 bp, Glycine max
agcttgcattctatgcccagaaagttctctttatgtgccagctgcttaagagaaaaggtagcattctacttgttcacactgaggataatagcagtgttggaagaacccgtgatgattatatcatctacataaatgagaataagcatgcagcagccatgtttgttgaatatgagaagagagggatcacacttggattgttgaaaaccaaaggagatgagagtatttgtcaaactcttataccaagccctcggggcttgttttaaaccatatattgccttgtgaagtttgcatacaagaatggattcaccctgaataaagccttgaggctgtttcatgtagacatcttcatggagttgcccattaagaaaggcatcgttgacatcaag

SEQ ID NO: 199691 - DNA, 443 bp, Glycine max
  unsure (1)..(443): unsure at all n locations
atccttaagtcacctgagcatgcaactggnggagccttgtgcacttttgttanatgagagccgcatatgaaaaaatggaggccttcctgagaccaatccttttgcaagtggcaccataagagtctatcttagaaaggtgagagattctcacgctaaggctagaagaatcccttatacgaagaaaaagaagaagaggattgttatcaggcccaacggagacacctcctcctcaaacttgccttatgcagaataataattaaagaggagcatgtggtagagttttcttgcttagtactactgttataatctgtggatttgcttgctgctgttttcgacatggaaatttaattataacgatgattattctatttgaacgcttgtacattgggtgctatagtttttggacaattatatactcctgacgattgaatggttgctgggtg

SEQ ID NO: 199692 - DNA, 439 bp, Glycine max
  unsure (1)..(439): unsure at all n locations
tgccttcggaccttaaatatagctggaggaacagggtatatctgaggcttctttttttttatcgatggcctctaagaaaagaatgactactacacaattatccatatcattaactgagaagcccattcaaagtcttggagaatgtgatctaaatcaccattattggaacgaaccaacatggaaaagtatctagaagaggcaacattgagaattgaagcagtgcttccttttgcacctctttaaattgttggtacaagtgatcttcaatggttattagatacgagagagagaacatcctcttatggtcttaagagctctcanactcaatggaaagaacatggtttgtgctctatatttctcatgtgatgctatattacaagcacatattattcatgaacatagaacatagaatcatcttatatataggatgactctttac

SEQ ID NO: 199693 - DNA, 368 bp, Glycine max
  unsure (1)..(368): unsure at all n locations
agctntgtgtgtgcatttatttgatctgcgttaaatgtaaataactgttgtctattttgcattctttacactgcattctaagcacccacgggtttgagtaaaaaaggggccctatacccgggttcatgggaatttaaggagtggaggtgaatctatcatcatgctaggtctctgacttgcttgataatagtgaaacctcatctagagctttctctctttataatgtattgtcgctggtattccataccgccacaatattgttatcttgagtgatgatacctctagaaaacagccgtgtgagttatgaattgttggggaatagttattagagacccctagatattgtcctatatggttccaaatagggg

SEQ ID NO: 199694 - DNA, 476 bp, Glycine max
  unsure (1)..(476): unsure at all n locations
tatacttatggtctgggtaaacttcttcagaaacatctttaagagaaaaaaaaaatattgagatgaacttctctataagataaaatgagttcttcattaattaatttgtaaagctcttttatataacttttctaaaaaataagaagacatctacaaattaactaataattaactaatggagaacttattttaatttatgaagaaactcaattcatttttttcttcttactaggcattttccaaagaggaagaattgataggttatgcatgatattaacttgaagaacctcaaacttgggacactttgaaggaagttcaaaaagtaaggaatcatcccttttaagaaaaatccttagctgaactaaattcttaaacagtggaagatcaggagtggaagcagcgtccatctcatccctaatataattcanagacaganattcgacgttacgtagcccttgaagaatggcggaaagaat

SEQ ID NO: 199695 - DNA, 358 bp, Glycine max
  unsure (1)..(358): unsure at all n locations
agcttggaagaccccgcaattactctgttttgtaaacggcnttcggccaaaagttatctaaaatggagtagaccatgttcctgcattccaactggaattgtgggaccattctacccatggcaggagcttgccccactgacctggtcgtctatgaacaaagaccctcaagtattgctcaatcactcaattgaggacttctgtctggccatcactctgagggtgataggtggagctgagccgcagttgggtgccactcgtgcgaaacaaggcctgccaaaattggcttgacgataagggggtctctgtccgagacgaggctgcgtggaaagccatggatcttcacgacaatgtctacaaa

SEQ ID NO: 199696 - DNA, 364 bp, Glycine max
gattaagacaactttgccccatatttgtgggagtctctttgatagataatttaaaaggtaagaaacaactacacacacaacaaattattaaaatgttgtgttataaaaagagagagaaattcaaatatgtgtgtgctgttaaaacaaagtcaagtgaaaggctagtgaatggactaagtggattgaaaagacaaactgggttagtctaggattcgtgctctcttataatttaagcctttgaatcctagaaaaaccaataaattttgtatccaagcctcactacaagcctttgaaagtccttctgattctattcatgtatttctgactttatggcatgagatgatgtacagagaatagaaatctt

SEQ ID NO: 199697 - DNA, 395 bp, Glycine max
agcttgctctaaatatacattgatgtttgtatttatgggaggaggttatatgccatttttgtcttaagagtaatgtcccactggtaaaactaactttccgaatgtttgccttcgcaggaatggccccgaggaagcttgcctcatagaggtccaggaaggacaaggctgccgaaggaactagttccgctccggagtacgacagtcaccgctttaggagcgctgtacaccagcagcgcttcgaagccatcaagggatggtcgtttctccgggagcgacgcgtccagctcagggacgacgagtatactgattttcaggaggaaatagggcgccggcggtgggcaccactggttactcctatggccaagtttgatccaaaaatagttccttgattttat

SEQ ID NO: 199698 - DNA, 431 bp, Glycine max
  unsure (1)..(431): unsure at all n locations
gtttgtcttttacatgcccaactcccttatgtagtatttgtattggttattatattgaatgttacatcttagtccatatcatatcttttgttcatcatgcatcatcatgagtgatgcaatcctaccccccaagagcattggatagaagactccaagaagattgtgccagagatgccagagaaggccccagggttctcatgagccttagggtagatttcgggcccatgggctaagtatgagcccacttatctntgtacatattatattaagggtttcattatattgggccttgtatttagggcttcatagtgtaggaaaggtaccctagtaatgtaggaattttaagccctcgtattttanggcttcattggtatgtctggtattggtttaatcgaatattggccttatcataatcgatacacaactatttt

SEQ ID NO: 199699 - DNA, 433 bp, Glycine max
  unsure (1)..(433): unsure at all n locations
agctntganatgtgaaactgggtactganatcncattctattatgatatcaatagcatacaaaaaatntctaacctgtctgaccataagcgaaacaggtagctttggttcgctcaaatattgtaggaataattggttcaactgtgcttcggtatacctgttattataaagcaagaccaagatgcacattcactttcataaacctcaaataacagcaataacaaagaaatgaatagatgatatcaaaacaaatgaataagtcattaatattagtaaacagcaacaaaaattaatattggacaagacatagccttacttcatcattggtcacatgctcatcaagcacagcatcaaaacaaaactcatgcttctccacataagctgtcaaatcaaccttttcatgatagaacaaacagattttttagtatgtaaat

SEQ ID NO: 199700 - DNA, 402 bp, Glycine max
  unsure (1)..(402): unsure at all n locations
tgacagaataactacttttccggagtaaaaaaattacaagtttcattaacttgaacttgaatcataatatcgtgcaatcacatacatattcaagcaaaagccccgagattatagactgtgaatgatgcttganagattaattgcacaagataattttcaaagattcaataaagagcatcaattgtaaatatgttttaatcttcaaaaggttcttgtaacaagcggagggcttgacattgagatatctacagaaaaagatagacagacacatactgtggggaagaagatataatagaaatagccccttctttacagcagaaaacttaccagtcatgtttcttcagcctgaatcatatctcactagattaacttgatattcatcctccctatagtcattactca

SEQ ID NO: 199701 - DNA, 251 bp, Glycine max
ggaattcaacgtttgtgattggtttgaatcgatcaattgtatgatgtgagtgaattgaaatacgtagatcatatgccttgaacgagcatgcagtcattagaagagaaagaacatggaattaagatcatgactggaaatgttagttgttttgtcaggttgattgcgaaggaacgcattatccgcaacccagtgagagtgtgatctttaattgtgagagaacgacattgtttattgtactcaaaaggcgataa

SEQ ID NO: 199702 - DNA, 386 bp, Glycine max
  unsure (1)..(386): unsure at all n locations
cttgccatggttggatgagttagacataccctttctttttaggntanatgaganngcttggatgtcatgtgctgaaatgcttatggaaactgttagagatgaaggtaaactaacctaggttaaaagtggaatgggtgtaggagtggaaaaagtgaatttttgaggctggaagcaattggaatggtgtattgaggtagagtggtaatttatttgaatgctttagacttatgaaagctgactgtgctaggaaaaacaacaaccagtgaccagagccttttaggcaattggggtgaaagcaaatttgatcggaatttagtgtaatcagttgagcagtttaatgatgttatgactgtgtagggagagttgctcnatctacctatctaatt

SEQ ID NO: 199703 - DNA, 433 bp, Glycine max
  unsure (1)..(433): unsure at all n locations
gaattgagagtgtggtgatttgtgtttatatttcacaccttgttagattctagctattgaanaacaccaaccattttcctataaaagttatcatctatacggcaacttaaccatcatggagtcnaaatgtggttgtagaggaaagtggcgtggaagatgaatattccaacctctctatttctaaatgcttagataggcagatcattgtttgtgatgcgacgatagttttgcgtccggttgttattctttcggcatggagaggaaaaagaacaagtacaattagtttaacgggaaggatttcacaatacgcagtttacacataccccacggtacataaatctggatcacatttattatatttgttacaatgaacactttaaaagcaaatcgaacctcgaaaatcttgaattaattcattagtattttaattaaa

SEQ ID NO: 199704 - DNA, 394 bp, Glycine max
  unsure (1)..(394): unsure at all n locations
acttcattgttttttttactacaggatgcatatacgaaacatggacatgccacacatagcacagatatgaatagttatagacagaaccaagtaaacagtgacaatattcatttttatatcctgatgccaacatacagatcgacactttattcatggcttccaacgaacacacaggaaaatattacatttcctatatctcaaatcactcactacctccctacctcatgagtaaaccattcaaacttacaactgtgacaagaatatgtggaaaaagaaacatatcggttaatgagctacatagcaacaaacacacattgatnttaagatgaaactgcagtctgtgtatggcttacctagctgcacggtttaaattgtggtagcgttcattgttatt

SEQ ID NO: 199705 - DNA, 360 bp, Glycine max
  unsure (1)..(360): unsure at all n locations
aagtcacctgaggctgcagctgacacatggaggttcacctgtgatcttaaataagcattctccagaggactcaaccacgccggcgagaagaacacaagcacctcttcatgtgcggatgcccactttatagtgtagtattccttcaaatgggatgtgacttttgacaccaaaacctgcagctcttgctcagttntgaccacctcagttctctgtttggacacctcgaggagctggtgtaggatctcctcgagcttccaaacccacttgtcgtagaagtcggtgaaactctcggccacgggattcttcatgagtgaaaaggggtgaagaggagagagatgaatgaatgtgttatgtgtgtaa

SEQ ID NO: 199706 - DNA, 481 bp, Glycine max
  unsure (1)..(481): unsure at all n locations
gaatctcagctaattggctaatgtgattgtaacaccggttaggatttattctctccacggtattatgaacatggacctgaaattattagggtatatattcagtatgacacaccttgggtctcgcactaaagaatctaactaatctttatatgtctaaaaagatcattattgaacagattgccctaaaaaaattaagaaactaccgtgccataccctcatagtaccatttgaaatatgaaggtataacattcccttatccacaatatcttaatcatgtcaaagtgtagtagtgtcatccaatccatatgcatcanattagtcgaaacctcaaacaaaatatcaagagtgtggtcaaatattaaagttctaccttggattcaacaatatggttgcgagaatactttgagacgttanaaagttctacatttatattaaaatttaatgtgataagattacattagattttttctaagatatatac

SEQ ID NO: 199707 - DNA, 442 bp, Glycine max
ttaatcacctgcggcatgcaagctgcttgcccatacctaccgatgtatttgttttcattgctctcttttgaagccgcatttgggaccttctcccacttctttttaacacattccccctcaatctcgtgccaatgatcccttagtcactcctttgactattctaaaccttcgcatcgtggaggttaatagtgctctcacccccaaagctttggtccaatggtgtggtctttcccttgatgacacttcttgggggaaattgggatgagttatgtgccatccacaaccttgaggacaagattggttttgatggggaaggtattgataccgacgagccaattatgtagaagtttccaattcataatccaattgaagaagcccaaggttatgctaatagaccatcaagaggcgatggtaggtctaataggaactctgattttatata

SEQ ID NO: 199708 - DNA, 401 bp, Glycine max
gctagagcttaactacgcgcacgtctctaataactaagctcacctccttgagaatctttcttgagaagcttctttgagatgcttccttgagaagattcctagagaagctagagcttagctacacacacccctctgatagctgagctcacctccttgagatgagaagctagaacttaactacacacacccgctattatagctaagctcaccctcatgccaaaatacatgaaaatacaaaaaaagtcctactacaaagactactctacatgccttgaaatacatggctaaaccctatactactagaatgggcttatacaacgtccataagaaggagaacctattctaatattaccaagatgagtggactcaaccttgacccatgggctcagaaatctaccttg

SEQ ID NO: 199709 - DNA, 443 bp, Glycine max
  unsure (1)..(443): unsure at all n locations
gactcttaagncacctgcggctgcagcttgacagatgaaacgactttaacttttttctcagangnccggntatggcccgtattatatctacacgctcgcaattgaaaacagaagctcgtagcaaattcaaacgacaataacgtttaactaagatgtccgaatgagtgctctaatatttcgagacgctagaaattgaaaatagaagctctgggcaaattcaaccgacaataacttttatctcggatgtcggaacgagtcacgtaatatatcgagacgctcgaaattgaaaacagatgctctgagcaaattcaaacgacaataaccttttactcggatgtccgattgtgtcccgtaatatatctagacgctcgtaattgagatggaagcttatataaaataaaacaggaataaatttttactcggatgttcaatatgccccgaat

SEQ ID NO: 199710 - DNA, 415 bp, Glycine max
  unsure (1)..(415): unsure at all n locations
agcctaattgatattgaaattaattactagttttatttaagcnaagcaatgtagaaaaaattgaattgtattgatgtagctccaagtaaagctggtaggccttggatcttcttcatcaatggagtcttttgtttcttgaagatcaatggcagcggaatggagaagaaggtgttggatcgagtggcctcagaataattaagaaggggggggggggttgaattaattattcctaaaactttaccaatcaaaaattactcttttaaggcttttactaaattgttaagagaacgaggagtagaagaaaacttaacataaagtaaaacggaaattaaatgcacaacggaaagtaaagagtagggaagagaaaacaacactcagagttttatctggtcggaacaactgtgctactccatcc

SEQ ID NO: 199711 - DNA, 483 bp, Glycine max
  unsure (1)..(483): unsure at all n locations
actacgcttatacaattctcaactctttagccatgcgatatgcttanggttgggtctggcttgccttgggtagtagccttcttagagagagaacaaaaccaaccatttctccatttgaactgcaagttcaagtataaccaagataacaacttatatatctagtgaatccaatatttattccactaaccctatcatttacctccttaactgccgtgggaaagtgggctacaactcgagaatatacacataagcgctcttccatggcttcttcaaatgttaaccccttttcacttactgctgctggtgccagttctgttataaggctggacaactaanagtgcaaacatcagtcagttctcattgtagtgttaacattattagtggtgcatacgttatcaatattagctctagatgtttgtcananaatctctacattttactccttatattggtatgggccaacatttatgcccacattatatg

SEQ ID NO: 199712 - DNA, 400 bp, Glycine max
agcttcgcatgagtatggctgaccttctctttactgacgatcagaccaaggttcttaacagagtcctcaaacagtatttgcgctcattcacacatgaccaacctcatcattggtacaaattcttatccttggcagaatggtcttataacacctatgtatatgtcaacacgaacttttctccatttgaagttacatatggcaaaccatcatcttcccttccaccataccttcaaggttcttcaacaatggaagtcgttgacacaatactcactttacgagccgccattcatttcgtccttcaacgacgtttacagaaatatcaggcttcaaatgaaacccatgctgatgttcaccgacgggatttagaatttgctataagcggatggggttatgttaaact

SEQ ID NO: 199713 - DNA, 349 bp, Glycine max
  unsure (1)..(349): unsure at all n locations
aaacagaacaagatattacaaagncagatatgggtacttaattttgtcaagtactttagaaatctttagaaaataaagattaatttaatcatacaggaaatctctcatactatttgcttgtatttttcttacttaattaaaaataaaaataaaaaaataggatcgaaaatgttattatntttaaagattattgaggtattaaattttaacaaaggaaaataaatgaacatggataaatattattagcaattttgttaagagaaatgtaccaatactgttatacgataaacctttatataatttttatgcgctcactgtttttctttatatctgcataccttacttatct

SEQ ID NO: 199714 - DNA, 420 bp, Glycine max
  unsure (1)..(420): unsure at all n locations
cctgaggcatgcaagcnncgggggaagatggagagtttatttttttttcttcaanccagaccattatgtattctacatattgtggagcagaaacctcaataggtctcttaatttgtacaccatctgccgatctatattcatacctaaaggtttcgtgcagaaagacaagacaacataagagctacgaatgtataaatatttagcacagatggatctagaattctcattggcattaaaggaatgattatataaaacacacatgcaagatggatccagaaagggagtgctaaagtaactctgtactaaatatngtctagattcaagaaaatgagcaactgccattaatattccaacaacactggttttgaagaaagaaatgacaactttacatcttttgcatagaaatcttttcttaaccaa

SEQ ID NO: 199715 - DNA, 452 bp, Glycine max
  unsure (1)..(452): unsure at all n locations
ttgatcactgctgagatgggtaccacgagccgtgtaaattgnttttatgcgganagggcatcatctgctttgggtaccttatgggggtttcaccaaggttggatgaaatggcttactgtggtgatagacatcgcattataccccgtcttatttcttgactatctgaagtcaggaatcccggctttaggtggcgggtttactatagttgtagcaacatggggactgactatagttctcacttacttgaactatacgggtatgaccattgtgggatgggatgctgtttgattgggggtgttatcactccttccatttgtggttatgggagttttggcgattccagacctatagctcttaagatggacagtgacaaactccatagatattaactggaattctatctgatactctatattggaactcaactacggaattcatactactcttgtgga

SEQ ID NO: 199716 - DNA, 403 bp, Glycine max
gagcaaaaaaagcgtaaaccaaaattaactttaatttttgattggttcgcaagataaataagcaaaggccaacaccccaagattcactcatttcattcttctctattttcaccaccaataattccaattgcaaaaaggcaactcggcatgcacagactcacacaaacatacatatatacaaacaccaatatatatgtatatgtatattgagaagagagagaaacttacctttggtgactaaacagtgaagtaatgtgagaaggtaagtaattcaatggaagaagcagagttatataaaaacaccctccacacaacaagtccaacataaactgtatgacacacaaatatgcttccctcttgaactagtagcgtagagaaaaattaattacgcatatttatattt

SEQ ID NO: 199717 - DNA, 311 bp, Glycine max
caggtaaggaagctacttggattgctgaattggatgcaagaagaagcaaggagagcatgcaaagaatgagatcacagtgcagaaaagagcacaaataaatgccaagtgcagttataagccaaatgaaaatgtactaccaaagcagttatgccttattttggcagttgaatgcctccttacggtaactcgtaacgagcatacatgacgttaaattcacactcaccctttcgggcaactgttatccatgcaaaattaatttccaaaaactttggttacgcaaagtctgttacaagttgacttgatggctcact

SEQ ID NO: 199718 - DNA, 387 bp, Glycine max
  unsure (1)..(387): unsure at all n locations
tatatctttcaattgttatatgattacttgcatgatatgtttagaagtattcgattgattgctcatgtntttcaaaaccattatattatataaaattacttttgatatattaaaactttctatgttcatcttggtaagtgtcgatttcttgttgttgttttagaagaagtgtctggtaatcgattactttctcaagaatcgattacaggcagttaggctaagtgtaattgattacaacattcctgtaattgattacctaattgattacaacatttatggaattgattatagagcatctgtgtctataatatcgaaattctcaaagcccgggagaacgcgatttctgcagcaactcgaaccccaaatgcctaaaactttataactcga

SEQ ID NO: 199719 - DNA, 450 bp, Glycine max
  unsure (1)..(450): unsure at all n locations
taaggattatcccatggagaacaaactttattgtagngtttgtgtaaacagacaagacggggccgagggtattttaccagtggacaccgatgaccacgttgacgccacatatggtcaggacaaggaggtttgtggtgaacgcatggccttgtacttggatcgtggtaccgacacacagctgatgggagtcaatcacatttccgtttccggcaagaaccccacgtggtggtgtgggttgcgcggcgaggtccatgtggctaacgacgcacgcctggatgaaattgtgtgtgctgccaccgtctaccataatgacaacgggttgattggcgatacggtccaacaagcgtatggttttcggtgcggattgacccgacaacgcataataactgatttgggccttaagcggttcgggtatgggttggtcttttatgtctgggacaaggcatggta

SEQ ID NO: 199720 - DNA, 383 bp, Glycine max
  unsure (1)..(383): unsure at all n locations
gacctctaatcaccgcggctgcagctatcacggagcagctacctactatctgggcaaagatcatcaaatatctcttgtccaacagactcagtcttctcattggacttcttctctggaacatgagaaatgaatgtatcataaattgtattgctataaacagacttttcccgtacaaggtctgtggcagatgagttgaatgcaattggatggtataacaaanaaagattttggttttgaagaaccaacccaggtttcctctccatcttcagcaagggagactgcatgatcatcaaggtgtgcaaggccataagctgaaacagcgatctcaccagccacctgcataacttctttgtatttgaggccaagctctgcttctactagaa

SEQ ID NO: 199721 - DNA, 434 bp, Glycine max
tcgctctctctcgaggccgtggaccgcttattttttgttttatcaagcatacgaacttggagacactatagagaagcaatggttatattggtctctctcagacacacacacattttctatctaaaatacactaaaaatgtgcattttcactctactaacttacaggtaggtttgatcttattgtgccaaactccagcagtggtactagcaacagtatcacatcacttccttacattgtctttcttccagcagataaaaaagcggttaaagggagaaaagataaagaggtggatgtaatgatgaggctagcattgatatgatatacgtataaatttctcttgttctgtatattggtatgtggaatcatttgcattgcacaaatattacttttgactgtgactgtgtctatgcatatttgttgcatacattatata

SEQ ID NO: 199722 - DNA, 329 bp, Glycine max
  unsure (1)..(329): unsure at all n locations
accactagatgcttgacacatggttctccaaagtggacttctcgcgctgagcgcgcacaggcacaccaagtgaacggcttaagttctaacatttttcagtccattgttgttgtactaaaactctataaaacaagctaaaactataaaattcattaacattaacttcctgaaggcaaaaaaaacaatcgaaatttttatcgaaaaccgagcattaaaagagaaaaaaaatgagataattgctatttaatttaagtgcaaaaaccaagtatacataacaantttcatatagtgtagatggaactctattgcttatattaaagggatagttg

SEQ ID NO: 199723 - DNA, 417 bp, Glycine max
  unsure (1)..(417): unsure at all n locations
agctnnntatggaagtagacctcgacatggttttttattcttatgaccaagggatcaagagtttgattcttgtngccttctgtaacatcccaatntttcgtcaataaaattaaaaagtgttttagtaattaataaataaataaattgatttagagcaaataataggctgagtaccctaggtataaataagtatgttaagtcagctgcctccttttagccccattttcgtttttccccttctcctctcaaaaccctttctttttcccgcagcccaccaaaccagtctcaaaaaacgacgatctcgaacccgttcaccggttgatcatcgagaaaattgattatcatggacgcaacacaattccgagcattcttcaccgtgggagattcgaaaacatgtctgactcgagagaaaaccct

SEQ ID NO: 199724 - DNA, 322 bp, Glycine max
ataattttatcctgcttgaatacaagcgttttcaactataccaaaaaaatagaaacacatttgtatggaaaaaaattacattttacttcactataaattttatctatataaaatattaaatttaaaataatattttaaaatatacatagttagcctacatggttatacctaataatattataaatatcgcataaccctcatacgagggatcataaatacaatatagtgaaattaagtagatattaaaaaaaatctaattaaaatatgtctttccccccctattttttttttactgatcctcattaatttttttcagattttt

SEQ ID NO: 199725 - DNA, 126 bp, Glycine max
tttttttttccccccaagccgatcataaccccaaaccgaccccaaagggagtgacgctctgctttaacaaatgttatctaagcaccctttatttcataaaacatataaaaatctcctccttaaact

SEQ ID NO: 199726 - DNA, 333 bp, Glycine max
ttagagtttatctcttttatcttaccgagagtgattctcctaaattcttgagtgattcaagaacaccttggctgtatcaaaagactttcacaacctttgtgtgttgccctcgctggaaagagtgattctttccttcctttatcatcacccttgttctttcaaaccacaataccagaaaatccacctctgcccagaattatctcgtggccataactcccattttacgcactcaaattaagtgattcttgagcctaaaatgaattttcaaacgagacctttcacctctgtttggaatcacctcatttggagccctgtaccttcagttatgggcat

SEQ ID NO: 199727 - DNA, 330 bp, Glycine max
  unsure (1)..(330): unsure at all n locations
aacgaacgaagaacgccgaagaacggtcgaaaatctttccgaaattcctcacggaaacgttacggagacgtttcggaagcgcctcggcttggattttcttcacggaaataatttttccaagcatattctaaagagagagaagtgcctaaggggctgataccttttccatctcacttcctcccctatttatagcanaataggggagatgcttgccgcccagctcgcccaggcgagcagggttgcttcctctatggcccaagtgggcctggttgctatctgcaccaccattttactaagcacacccctgctttttttttgtgatctttttcc

SEQ ID NO: 199728 - DNA, 414 bp, Glycine max
  unsure (1)..(414): unsure at all n locations
cattagagctacagacgtcttggaatagatacatacagacatctgtgggccatttcatacaccttcatggaatggtcaacagtattttatatcatttatagacgattactctagatatgcatacttgtttcttatacatganaagtcacaatctctagatatgttcaaaacatntaaagttgaagttgaaaaccaactcaacaaaagaataaagtgtgtttgaccatggtggtgaatactatggcagatacgacggttcaggtgaacaacgtctggcgccatttgccaagtacctagaggaatgtggaatcgtcccacaatacaccatgcgagggtcacctatcatgaatggtgtggctgaaagacgatacagaactcttaagatatggtacaagtatgatttgcatactactt

SEQ ID NO: 199729 - DNA, 425 bp, Glycine max
  unsure (1)..(425): unsure at all n locations
tttactgaccacccactgtctatttgcttgtttgttgtacactactctgcagcaattatggttatgcttaaatgtctttatctgaatagagtttctaactacattctttgcacagtagatttcccaatcacaaaatgccttctngcattttgctctaaccctctgtttatcattcttcttccactcgaactccctgcccatcaatatgctatactccctcaacgcaaatttaaattcatctagagtaccatactccatccctaattccaacttctgttcaccaactccactactttgactatattgaggataaacttcaacatcctcatcttctcatcactctaatggggatataagctctatgaatgataccatctgtctaactcagcttcacttcattcacatacagagaaattataaccact

SEQ ID NO: 199730 - DNA, 254 bp, Glycine max
  unsure (1)..(254): unsure at all n locations
agtgcgtggctactaatgggacttcaaaaatccancgctgggtggacttctttctcctttgatcctcgtgggtatgggggattgggagatatgatgggtagtcttgctagggttctgctgtgcgatgactatttgtgaagactcttgttgaaagcttgctgaaattgccatgtttggatgagttaaacatacccattctgttttacggtatttgtgatgatatttgtgatgtatatatgctgaaactactcatg

SEQ ID NO: 199731 - DNA, 330 bp, Glycine max
  unsure (1)..(330): unsure at all n locations
agcttcttagtgtcagatgattcatctgattttgtanctacctcatgcactcctctaatgactatagcatcatttctggcgctacactgctgagagatggaagccatcttctcaattaaatctctgactttacaggagtcatgtctccaagggctccaccactggcagcatctatcatacttctctcatattactgagtctttcataaaaatattgagaaacagctgctccgaaatctgatggttagggcaactggcacatagttttttaaatctctcccagtattcataccagctctcttcactaaattgtctaatacccaagatatcc

SEQ ID NO: 199732 - DNA, 481 bp, Glycine max
  unsure (1)..(481): unsure at all n locations
cgcctcatgatgttgaatcaagattgaggcatggagttttgatgataacaaagangacgacaaaagcccaagacaatgagttcaagattgaatcatgaacacttcaagaatcaagaggaaattcgatttcaagattcaagaatcaagtttcaagatttaagttttcaagaatcaagaataatcaagatcaagattcaagactcaagattcaagaatcaagaataggctcaatcaagataagtacaaaaaagtttttcaaaacatcgagtagcacatgaagttttcacaaaagcttttaccaaagagtttttactctctggtaatcgattacctgtttactgtaatcgattaccagtggaaagtatctgtttcaaaaagctttcaactgaatatacaacgttccaatcaattccacaatggtgtaatcaattacaatatattggtagtcaataccaatgcgttgaacgttgaaatcaattca

SEQ ID NO: 199733 - DNA, 297 bp, Glycine max
gacccaagcaccgcgctgcactacaggaggaattttctttttaacaccacatgttgccccatttgataatccattaacatctcttatttgttgatcatataataaaaaattgacacccagtgagtatagatatcttaaaaatcgcctagaccttgtatacttcataatgcgtgtttatacgtgtgtgttgaggatatataggggaatatatatatatatatatatattatatatatatatatatataagctgcgatgtaataatatgactatatatatattagtgaagttagaaatc

SEQ ID NO: 199734 - DNA, 334 bp, Glycine max
gcctacacggatgtactaactcaaatctccaaatgaggacatcacctctctcattaaacctcacaggggtcacttcaaattcttgaccattgtgagacacttcaaactactccagttgtcggtaagacataaattcccaaataatgtattactaccgacagtgatctatctactggctccatgtgcactagagtgtgacacatgtacaccgacatgtttgtctttcaacacagccacactctttgtatctacctactactccaagcttacaaagagcacggctccctcaacatctcctgaccctgtaagatgttggttgtaccattgagttctc

SEQ ID NO: 199735 - DNA, 434 bp, Glycine max
  unsure (1)..(434): unsure at all n locations
gcttgcttcccccatccttccacaattcatgtgatagntctgctggtaggagttgtgttttaaacaacaataagccttattccaccaagtggagctaatatacatgtcaaaatcactaattggcatccacatttgagaatccaaagtgcataaattttattgattactaagttactaacttcctttacttacaattttggcaatgatcgttctatttcaatctcgttaacctatgctctgctcattcttatttttccctgcatgatttccttgggactacagatactgatgttatttttagttgcataattggtaacgtttataatattgttgcatgcttttgaaggtttaattacggaactgggtagaaattanaaaattaccataatgggtatttttttaaataaattacgaaaatggggtaatcgtacttt

SEQ ID NO: 199736 - DNA, 434 bp, Glycine max
  unsure (1)..(434): unsure at all n locations
ntctcgttgcaaaattcattactaggatggtgtttatgttttgtgctaaaggcggtgttcgtcattggaagtgcggtagacagactttgtggttgatttagggatgtccattgtggataactaagtggtgggtaaggaggaggtttgttattggttgagtaatgacattgttgggttggtgggaaacttggccgtataggaatggcagtcacaacatgggtttctccctctttctcaccctcttcatttgccccagttttctcagtcgtcctagtaggatgatcaaatttgcctcttttcggacccacatcgatcctttcactggcgaagaccaaatccgcanagctttgagggtgcgtagcccaccatcttttcatagtggagtatcgataatgtgtctaccatcacgaatatcgtctccctttccatcattg

SEQ ID NO: 199737 - DNA, 344 bp, Glycine max
tcgagtttgatagccaccgtttctggagcgccaaccaccagcagtgcttctaggccatcaaaggatggtcgtttcacagagagaggcacgtccagatcatggaggatgagtatacggatttttaggaggagatagctcgcaggcattagacgtcgctggtgactcccatggctaagtttgaccctgaggtagtcctggagttatatgctaatgcttggcgcacagaggtgggagtgcgagacatgcgttcatgggtaaggggtcagtggattccctttgacgtagatgccctcagccagttcctgggtgacccgctagtgttggaggaaggacagcagtgcgag

SEQ ID NO: 199738 - DNA, 404 bp, Glycine max
taagtcacctgcggcatgcagctatagttcccttcaacagatgattattttgtggttattcaacagatggagcttcctgagtggaccgatattgtaaaaacagcaaaatttaaggagttggctccatatgatcctgactggtactacattagggctggtgagtacacttcactaagtgcaagtttgccatattctacactattaatgttggaaatgtttttgttgcatttactggtagattaatggtgttcaaccttggttacagcctcaatggcaagatagatctatttgagaggtggtcttggtgttggtgctttccaaaggatctatggtggaagcaaaagaaatggaagccgtcccccacattttttgcacgaacagcggtgcaattgccagacacattc

SEQ ID NO: 199739 - DNA, 229 bp, Glycine max
  unsure (1)..(229): unsure at all n locations
tgaatcaaggaatcaagatcaagattcaagattcaaggttcaagaactcaagagaagacttaatcaagataagtatgaaaaggatttttcanaaactgagtagcacatggaattttcacaaaacatgtttaccaaagagtttttactctttggtaatcgataccacattgctgtaatcgatactagtagcaaaatgtttttgaaaaatttcaaattgaattacaatgtt

SEQ ID NO: 199740 - DNA, 365 bp, Glycine max
  unsure (1)..(365): unsure at all n locations
ttgaagcacttaacgcatcaaacggcatatcaactatctcgccatataactacttcgggcagcatactataaactccaaaaagatccctttttacaatgctacgcacgttacgaatactcatattttctctggtgaaacgaattgcgtccatgaatctacaaaatagagagaattctcgatatccctcaacactcttctcacatccaaaatccacgattngaattgacgccctttcattgaatcctcctacatgcattgataagaaaccatcataaaacaagtcctcaacatatatacatatatgaccactcatttctcataagaaccaattcataataaacatttaacattgaaaacgatgacg

SEQ ID NO: 199741 - DNA, 283 bp, Glycine max
tagtccctcgtactaaaaaactgccacagattataccctaatcgtggaacatcagtccgaatgcactgcaaagaacatttttgaactgtgggaataaaaaacatatttaagttagaggggaacacatacaatacctaaatttgagggacaacaaacatatctaagcatactttatatattaatttatgttagcatggagtatatgcataattaatacactatgtgtggatatgctcaacaataactcatggttcctcctcttcacttacatctttataactag

SEQ ID NO: 199742 - DNA, 381 bp, Glycine max
  unsure (1)..(381): unsure at all n locations
ttgagcttcaatgaggacctttaatggtgattttccaccatggagatgcaggggaagacaaaggagaagaggtgagaggaagcgccatccactanggaataagccatggaagaaggagcttcaccaccaagatgagccttggataagaagattggaaggatggttcaatggaggaaaagaatgagggagagaaagagagaggagggagcatgaaattgaaggaataaaagagggagataagtggaactttgaagtatgtctcacaagactcttattcatcaaangtacaacaagtgttacacatgcctctatttatagactaggtggcttccttgagaactttcttgaaaaaccttcttgaaagctttttgagaaaacttc

SEQ ID NO: 199743 - DNA, 413 bp, Glycine max
  unsure (1)..(413): unsure at all n locations
tgcatgaaagtgcactgataccatttactagtcagcaagttcttgagtgggttgaggacatcaatacgatatntggaaaaaccctaaagaaggaaataaaagtaaaacttgcacatggaagaaaattgtgtgtgatagtgtcatcagcatgcttcttaacattcaaggcaagaaaaatgatggtttgaatattcatcaagatctagttgggatgggtatatgagaccaattacatcctaggtctgatggtaagaaaatatacttgcctctagcttgtcatactttgttcaaaaaggagaagataagnttttgtcagtgtttgcactgtgtcaaagtaccacaaggatactcttcaatattaagagccttgtgcattcaagatctaagttagtggctagagtctttgatgaatg

SEQ ID NO: 199744 - DNA, 467 bp, Glycine max
  unsure (1)..(467): unsure at all n locations
ttcgctgtgcagatggtccggcgcaatgataataccatttttgtttcctaccggcagcactntttctaattctgcggcatcgcgggcaattaactcaaacaggtgctgagtcagcggcacaatcatcttttgcgattcggcaaagttaatgaaggcatccgggggaatttctcccgcgacaggatgccgccagcgtagcagtacttccaggcccgttactcgcaaagcttgtgtatccaccaccggttgatacgccacgtaaaattgttcgcgcttgatggcggtcatgatttctctgccggngcgcatacgtacgctcatcaggtaatagcagagcaggccaacgacagttccactcatgccgcccagtaaaaatgcgtaccacacatcgttccatgtccagtcatctgcatanagccgaacggtcagaggaatgcccgcaattttagttcacggactggcatgtc

SEQ ID NO: 199745 - DNA, 340 bp, Glycine max
  unsure (1)..(340): unsure at all n locations
agctnngnggatagtagcgtgaagctcttgtttttggctttnatcgcttcatactttggttatggttgtcttggatgtttaccattttgttttgctgggtgtttgcgtattttagactctgttctggatggttcagacttgctcggtttattctatggattgaatcagtttatggatgaattgtgctatgatcttgatgttgccttagttcctttctccaggcgtttttggctttttgatgttgccaaaggtggagagaacaagggtagaatctatcatgaacttacgcataaatctcaatcttaagggggagtaacggttgtgagcacgccttatcaaa

SEQ ID NO: 199746 - DNA, 288 bp, Glycine max
aggaattcctcgatgacttgaataatgctccatgaagaaaccatcaatgaggataacttacggcgcaaactttaactcctggcctagcgattattatgccatttggcgaaatagaggttgatcaaaaacttgaggaccgttttgaccaaccaaatattgtagagtctatgatgagaaaagggacgaatgcaacaacatcattgtgttaaaaacacacatattctaccttcgtatttctacagcatagcctgtatgatggtcccccttcatcaaaaccaaagctgatca

SEQ ID NO: 199747 - DNA, 401 bp, Glycine max
  unsure (1)..(401): unsure at all n locations
tgcatgcanagcacactaatacagcatggagcgctggtattctacaatcctcgncatcgggaatgcaactgtgcgaacaagaactatgtcataacgtggtacaccgacgggattcgtttccgagaaagattatacaagggtagcaaacggcggccatggagatcggaggcattccaaaggcttggttcaacaagctactgacattctaacctcgcatcaatggaaaccaatgtgaaaggcatgggagccacaggggttgctacaaagctgaataccacaatcaaacacaactggggcagtgaaaaaatagtggagaacaggaactgacattgaagaacgaagcactgatgacctcgttggagaggagaatgctctaaggaggctaacgcatacgaacactg

SEQ ID NO: 199748 - DNA, 445 bp, Glycine max
  unsure (1)..(445): unsure at all n locations
agcttgaaggggcacccatttttcctactccaagnatctcttctaacaaaatctttcttcctacacctatattgaccattcctttcacaaccaattaacacaaatgaactccttcctctactactagtcagtgtgtcagacctcataatgattgcaacaaatccactttcatgagcaactgatcaagcccattgcaaaacatcatctcggataccaaacacctataatgcaacctagacaattttagtcttctacaacacattcattttatcaaatcactcacaataatgaacattattacttgagaagtattgaacgcattcgaacaatcaacatgttgttcattcacaccacattcttggtcattttgatcatccatatcaacttctttagacattatactatcatacatccattgatcttcattcatcttaacaacaaaata

SEQ ID NO: 199749 - DNA, 492 bp, Glycine max
  unsure (1)..(492): unsure at all n locations
acactatcnaacactcacgcttctactnatgtggcagggcgggctctctttactcttttgtcttcaacgcgaactttgaccattgctcttccttcccgcgatccttcttttcatgtccgcctgagtgggcttatagcctaaaccatacttcccacgatttccttgggtatttatcaagctagttatgccgccgttgctttttcctaaacccatcccgggttcataaccgttctccaacaaaactctggccatcattaccgctgcatcggacagacaaggctgcccaaagagggagttcacggaggaaatgctgaccacctccaaagactggaaagcagtttctaacgattcttctgcggcttccacatatggcatggaggatgggcagcttaccaagatatcttcctcgcctgacacgatgaccaagtgcccttccactacgaatttcatcttttggtggagtgtagaatgcacaactctcactgagtggat

SEQ ID NO: 199750 - DNA, 358 bp, Glycine max
  unsure (1)..(358): unsure at all n locations
agcttcccagatatggaaagtctaattctctgttggttcttccttgtaggtacttgatgtaaatacttgtatatctatttaatgatgttttatgtgttctctgtgctatcagtacgtcatttcagtgtgatttttccttgatcacatagatgcatgctttgtcaggatcattcaatagtggaaataggtctgattcttataacgtgataggacggcgctagtttatcgtattatcacgagggatcggggtacgataaactagttgttgtatgtttgtctgaatgcggttctggtcaagtttantccaacaagaggaatataaggatgatgctngatcaggattaggctanactatcat

SEQ ID NO: 199751 - DNA, 455 bp, Glycine max
  unsure (1)..(455): unsure at all n locations
taaaaaaacaagaaatgaattgaaagtctcggattcgataacttacccgttgaagaatgaagaaccgatgaagaacggtgaagaacggatgaaaaccttcacggatttgcttacggaaacatctcggaagcgttacggaagcacctcggcttcaattttcatcacggaaacaatttttttcacccaaaacagctgaaatacatagccagggggctgggggatccttagaacagcccccttcagcctatttataggaaaaagggggatgaggttgccgcccagctcgcccaggcgagctggattgcttcctccagaagcaacccagcttcaaaaaacattctggaaggcccaattcaaaatttcgaaatggctatttgcacccnccaatttggataagttcaccccccttctttcgtaatttatgggaaaagtacggaagccttacggaatcatat

SEQ ID NO: 199752 - DNA, 464 bp, Glycine max
agcttctacttatgtgggagggcgggcgttccttcattttcttgtctccaacgcgagctttgaccaccgctctttctttccgcgatgctcctctttatatccgcctgagtgggtttatagcctaaaccatacttcccacgatttcctttggcatttatcaagctagttatgccgccggtggctttgcctaaacccattccgggttcgtaaccatgtcccaacataacttgggccaatcattattgctgcatcgggcaggcaaggctgcccagagaaggattccacagaggagatgctgaccacctcaaaagactggaaagcggtttctaacgattcttctgcggcttccacataaggcatagaggatgggcagctcaccaagatgtctttctcgcctgacacaatgaccaagtgcccttccaccacaaacttcaacgtttggtggagtgtggagggaacaactc

SEQ ID NO: 199753 - DNA, 325 bp, Glycine max
  unsure (1)..(325): unsure at all n locations
atactaagctgggggaagtngggggaaacctctagaatataccggatatgtgtgtaaccttanggaagagtatggaaggatatggaagggagtataagagtgtacagactcctanaatgtgtggagcattctagagaattaatcttcaccctaggatacaagtaatctccaccattcattgtggaggaagagtagtatatataacggtaggagccttcattcttaaccattccagacaagagtgaattcacttcttacagtgagaaagctagaaagtcagagagcctctttgagagacatgataaaatagttgagaagtctctat

SEQ ID NO: 199754 - DNA, 472 bp, Glycine max
  unsure (1)..(472): unsure at all n locations
agctttgatactntgtgaatggggatacaaaagaattctcatttggtttgttctttgaacacttttgtataaggaaatgggaagaatcaaaagaattcttagactgtgtcattttgaattctttgacaagggagaagggagacacacaaaaattcaggcggttagtccttcattcttttggaaaagggagaagagagacacacaaagaattcaggcggttagtccttggcgaattctttntggcaaagggagaagagatgaaaaagaatgaatagcacaagttttcaaggtttagaaaaccagaaaactctggaaagcttttggcacacaaaagaagaagaagttcacagagattcatggctttgtaaggattgtgtaagattgattggaaaagtatattgaaaagttaccaaagccttgctttatagactcttcatgtcttgccagatgaccatttataagagtattactt

SEQ ID NO: 199755 - DNA, 456 bp, Glycine max
agcttccatcaccttgtatagaaacttgttattttatgaaactcttaatatctcctacacatttttggggtgggccactcttggatggccttgattttctcaaggtccacatggaccccatttttgctaaccacaaaacctaagactacactattcacacagaaggtgaatttatctatattagcaaagagagtgtgtttcctaaaaaccataagaacttgccttagatgtcctaagtgatcatctaggtccctactatagactaagatatgatcaaaataaacaactacaaacctacctatgaactcccttaggacatgattcattagcctcataaaggtgtttggtgcattagtgagcccaaaaggcatcactacccactcatacaacccaaactattgtctgaaagcgggtttcactcatcaccttctctcattcttatttggtgataaccac

SEQ ID NO: 199756 - DNA, 396 bp, Glycine max
  unsure (1)..(396): unsure at all n locations
cagctcaccgaagcgagctcagctcgcccattctattattgttcttcctccacaagcaacagccttctggaggaatcttctggagggcccaagtgggcctgattgctatttgcaccaccctttctatntctttgtaatgcttattccggaacgttacgaaactttacgaatgtcataacgatacttattttccttgcgcaaagttacgaatccttacggattatgtatttactcttttttagctctcgaagaagttacggaaactcacggattgtgcaaaaacacctcttttcgatttccgccacattacggaatttcacgaatcacgctagcctgcttgctttcgatttctgagacctctcgggacttcatttattgcatgtcatcagtaataat

SEQ ID NO: 199757 - DNA, 423 bp, Glycine max
  unsure (1)..(423): unsure at all n locations
agctttgngctcaatagctacaatcacgtctattcctcacatagagaacgaccaaggtgctgccaatacgttcaaaggtgcgggcagagcattgacattataggagaaggcttggcacttatggcacttcctcacatggatacaacaatcattttccatagggagccattaataccctgccctcaggatcttataggccatggcatgtctattggcatgggttccaaaggatccctcatgcacttccactagcatttactcagcctccctgacgtccacacatcagagcaaaaccatatcatgggtcctcttgtacaggatattcccactcaagaagaagccagctgccaaccttcgcaatgtctcttgtcatgtcagagcctcccagggtatccctgtcncgatatattgcttgtatcgaag

SEQ ID NO: 199758 - DNA, 202 bp, Glycine max
tccacaacaactgagggcaagtggccaggaatgtttctattacaccattactagagattggattatgaatggtctaacccacatgatgtccttgaatttcttaaggtaaaccttgcaagaatcgttttataactgaatcttcaaccctgaactggtactctaaaaagaccaggacctaaaaatgtcagcacccataatacta

SEQ ID NO: 199759 - DNA, 205 bp, Glycine max
gtacctgtaaatatgtcgcgggggtcatgatacacttgggacatcaggtggggggctattgcccaaaaccaagcttgacctatcccgacccaaccccggcattatcggtcaatgagaacctgtgatgtacctaagcaggcgaactcctggccttctacagataaaaggataacaagacctctaatccaggaggcttgtggtggct

SEQ ID NO: 199760 - DNA, 394 bp, Glycine max
  unsure (1)..(394): unsure at all n locations
agcttctgagataatcagttgtgcaagagtttgtgttttgtcttagctgacgaaaaanagcccaaagaatgatttcaagattgagtcaacaagttccagaatcaagattcaagtcaacaagtttcaagactcaagagaatgatttcaagattccacaaaagatgaattcaagattcaagagaagaaatcaagaggacttccaagggaagtatngacaagttttttcaaaaacaaacatatcacaattttgtttttcaaagagttttcttcaaatttctaagtaccagagttttactctctggtatcgataccagttctattataattaccaggcctagttgattccaaagcttcactaattggaccgtccatgattcaaaggggaatcattaaa

SEQ ID NO: 199761 - DNA, 440 bp, Glycine max
  unsure (1)..(440): unsure at all n locations
agcttgcaaatgatagactacattgtgttttatttanaaagcccaccagtatactgataggcatgtccatttagatcccgaccatttaacaagattcgcatcagcaattccaaaaattaatcacgtgaatctgccccaaaaaattgactaagatgctctataatagttatctaaatggaacacgcataagcatgaacaaaccttccctgtatttccttcactgaggtgagagcttgctttaccgagaactaggcttttgcttcatcagatttataccccgtatgtcactaaataggattccttatgggatacaccttcttgacggaaaagatgcttctttcttttatgtctttattgtatagaaactaagacggattttcttagatgtgtggtaccaactgttctgatttagcaccatcaactgtcttctgtgcagcact

SEQ ID NO: 199762 - DNA, 383 bp, Glycine max
  unsure (1)..(383): unsure at all n locations
agcttgcttctacataaagggcaaattgtaatacattangtaatattnataaagacaaattcatgaattcttgaaggtcatggctgaggagctcaatctccttgacgatcaaggttgaggagctcagtctcctccaatgaaataatcaataggatttgccatgtcttcaccctcttcctgaaaaataggcctgtccccaagccatgcaatgatatctctaacaaaatagattagaaattttataacataattcatgaataaagactcaaaagtaagtttcagccatataagacataagattaaagtaacacaaattaagacaaagtttaaaaaacactgtgttgcctcccaggagcacttcttaacatctttaagctgacatt

SEQ ID NO: 199763 - DNA, 453 bp, Glycine max
  unsure (1)..(453): unsure at all n locations
agctngagacttaatagctatgatcttcttcattgcagnagtcaacaatgcactctcacccatctccattacaagcctttcttcttcctgaacacacatggtcattaattcattgatagaccatttatctctatgtgtgttgtaggaaatcttaaatggcccatattcatgcggaggggtgttcaaaatgaaatgcactatgaaggactcagacatatcaacctctagttcttaagttgagctgaaatatcttgcattttcatgatgtactcacgcacacctttcacactggtgagccgaatagaagaaaacttcatgatcaacgtgcttgctagagtcttatctgaagggatgaactgatcatcaatgaccttaagcaagtcttggacctttttatgctggtcaacagaaccacttatccacaccgagattatggtcttaatgaacatcact

SEQ ID NO: 199764 - DNA, 291 bp, Glycine max
ctctgccggaccataatttcaacacgacaaggaacttccctccgaagccatcttcggaagtcaccccactcccaatgacgtacgaagatcttttgccatccctcaatcgcaatcatgtggccgtggtaactcccggaaaggtcctcgaaccccctttcccgaagtggtatgaccctaacgcgacctgcaagtaccatgggggtggtccaggcattccgttgaaaaatgcttggccctttaatacaagggcccaacattaatggatggtggatggttgatttccaaaagatc

SEQ ID NO: 199765 - DNA, 381 bp, Glycine max
  unsure (1)..(381): unsure at all n locations
gctacatcatagaacacaaaagcatgattaattagagaaacatctttatatacttcagctggttggttagaaagacccaacatctntacctactgcagncaaacttacttacttgcattgttactgtatttagcctagactttgtttaattctgttctaaatcatcaattatcaatgtttctttcaacaatgccttatttctaaatttaaccctgtctaagactagttccctgagttcgatactcggattcatccattttaattttaaatacttgacgatccggtgcgctttccggcaaaccggatttcccttgaacatatttgtataaagaaaaagtggaccaaaaagtaattgcaggggaaatccaacaaagtatttat

SEQ ID NO: 199766 - DNA, 259 bp, Glycine max
  unsure (1)..(259): unsure at all n locations
ctctctaaagactagctcaccttcttgagatgagaagctagagcttancttcacaccccctataataactaagctcacccccatgacaaaaaaatgaaaataacaaaataaagtccttattacaaatacaactcaaaatgccccgaaatacaaggctaaaaccctatactactagaatggcccaaatacaaggcccggacgaagggtaacctattctatatttacaagatatcgggctcatactatcccatgggctcaa

SEQ ID NO: 199767 - DNA, 415 bp, Glycine max
  unsure (1)..(415): unsure at all n locations
agctagagactgaaatgctatgtttttactttanagcaggagacaaggagtgcactgctcacccatcatccagaacaatgcctttcttccttcctgaacacacattggtcattaattcattgatagaccatttatctttatgtgtgttgtaggaaatcttaaatggcccatattcatgcggaagggtgttcaaaatgaaatgctctaggaaggactcagacttatcaacctctatttctttaagtcgagctgaaatatctcgcattttcatgaggtactcacgctcacctttcacactggtgagccgaagagaacataactgcatgatctatgtgttcgctaatgtcttatctgaagtgatgaactggtcatcaatgtgcctaatcaagttttggaccttttcatgctggtcaac

SEQ ID NO: 199768 - DNA, 360 bp, Glycine max
taagttctttattaatgccatgattgctgaataaatttggatttcctttatatatgaaattggatatagattaatggatatgatgatagaggactgagctacactaaggtaagtaagagctaattgataaacgttttcttgctcattttattcactgatatggtgtatatagtgatgtcattgatgaatacaaagccaatcattggctgttcacaatatgacaaattatgttatgggataataaccataataggtagtggagtaggtaactaatttagtgatcctaactaattctgtagagcaagaatgagataatgtcactgatagtccagatatgggcatgtttcttatatacttttg

SEQ ID NO: 199769 - DNA, 446 bp, Glycine max
  unsure (1)..(446): unsure at all n locations
agctnttaatggaagtgaagagcacgaattttcgctgttccgntaatnggngagcaggtcttccagcgggttgaacaccttaatactgtatttggaaagaccaaaaaagaatgataaaagtaatagttgcatatggaagaagaggtccattttctttgatcttccgtactgatctgatttagatgttaaacattgtattgatgttatgcatgtagagaaaaatgtatgtgatagtgtcattgggacactccttaacattcagggcaagacgaaagatggtctaaatacccgacaagatctagctgacatgggcatacgatcgcagttgcatccaaggtctgatggtaaaaaaatatacctgcctccagcttgtcatactntatccagaaaggagaagatcattttgtgccagtgctgcgccgggtaaagcccacaagatactttca

SEQ ID NO: 199770 - DNA, 299 bp, Glycine max
  unsure (1)..(299): unsure at all n locations
actaagcttctagtccatggcttcctcaattgtggaggatgttctctctttggttattcactncaattggagtgcttcttagtccaatagctcttaaagtggttgggccctttcttcttgactcaaattcttcaaagggatggcatcaatccttcttcacaattcctatatggcaacccacaaccatggaaccaaagagacagccattaaaaagaaccaaaaaaatgaaatgaaagctaaaccaatggatttttaacacaaaattttttcagggttacctcaccatttaaagcaatgaa

SEQ ID NO: 199771 - DNA, 431 bp, Glycine max
  unsure (1)..(431): unsure at all n locations
cgatccttaagtcacctgcggcatgcaacttttggggtagaataaggggaccaactcantttattccaaaaagttgtacctagttaaggtctgagagaccatacatgtttcctagcaatttctaattatgtgggtcattaagtctatcatatgctgacaatagctgagaagcccatgaatttcttcgggggcggagtaggtgtccgccatcgacttggccttggctaacaatcggggaagttcttgactcccgttcaaggtaagagcaaacctatccatccacatggttgcctcttggcggaaagagtcgatcaccctttctctagcctatttttccgcggatacttgggcatactcgaccgcgaccctatgctcgtgggcctgggctagacactactcttcttggtcttggcgaagatactacctgttga

SEQ ID NO: 199772 - DNA, 459 bp, Glycine max
agcttcttggatagtgtatgggttacaatttattgaaagacaggttaacatgcctgtggagattaattgtagggttcgatatccttgatattgacaacaatttctatatggtgaatattgatatggagatggacataaccaaggtcatgaaggaagggtgattgatataaaggaagggataagcacgattccttgtgttcgaggccaaggtacctcctcactacactaaatagttggtatcaaatttcactctatgtgctgttattcatatattgatgtattgatagagtttatcaggctatatcataacagaaatgattccatttgctaacaacctatacaattccactactaacaattatcacaaacttttggtgtttttctacaacacactaacactagtggctcctgcattccctacacgagaatcttcatatatccaggcctgatgttgtcctt

SEQ ID NO: 199773 - DNA, 471 bp, Glycine max
taagctggaaacctccccaaggaatcgcatgatcgattgtattttacactggaaggggcaaattagtaaccctaattttaagtaatcttaactccttttcattaatcctcttaagcaataaacaaatcgagtattatttcatctttaggaagattgcatgcatttaataattaagaaaatgttctaagatattgcagaatttatttcaacaccaggaaggctaccaaatccaaagataatgaaaagattgtctacggaacagattgcaattaactatatttttcaaaagtccttacagttaaaaaatgcacgttgtctcgagatgaacacaaaaatttcaagtaacaaaaccaaagcatgttgctcctatgagagaacagccatgacatctgagactctcaaggtaatatagtcagaaccatctttgcccttgagtcatttcagcatattggagtacaaactgtgttcccg

SEQ ID NO: 199774 - DNA, 327 bp, Glycine max
  unsure (1)..(327): unsure at all n locations
ctaagctaaccagactcggctctcgttaagggccttttttttctttaacggatcctgagcaccccctgaatnggaggatggccaactgtgcgagcacaaccagagagggaggctatcacacagctattatgcataccggagcaagatttcacccgggccactgcaaagagacgagtgtggatcatgcgcaccaacatgaccactcttacacatatataaatgacgttgttacttatcaacattctgccaagtgatcgtatagccaatctccccctgcagatgtatcggttggtctgtgtcgccatgacataggaaagattgcacaat

SEQ ID NO: 199775 - DNA, 242 bp, Glycine max
aaccccaggggaaacgggcccgaaaacaaaacgggggggaaaaagacacacaaactaagccccaaaaaaaagcaccgcaccaccatgcgagaacaaatgcccaaacaagagccccgaaaaaggatcaaaagagcacccgaacaaaagcgaacaaccgagaccaaaagcaaggggaagagaaaggaactgggaggaacgggacggaacaccccgggcacacgccatccccggcacccgcggga

SEQ ID NO: 199776 - DNA, 376 bp, Glycine max
taaaactctttctctgtatgtcaacacagtctatatatataaactctattcctgttcaaatatttctttttcggttttctttggacacctacattcttatacacgacaaactctttctgtatacacacgcattaaaaactctttctctttatgtcaacacagtctatatgtaaaactctattcctgttcaaagatttctttttcgttattcaacatacactcgtggtttatacaaaaatttctttatatacacacattgctcacacacaagaatgtcttttcacacattatttacacacacagaatcgttacatacactttatacatataaaagactcttttctttttttatatatagacacgacatttgttcaca

SEQ ID NO: 199777 - DNA, 449 bp, Glycine max
  unsure (1)..(449): unsure at all n locations
gctttngtaagaatggaggaggtattttgttttanaacagcacacatttttgccaaatgaacttttcttgacaaagcaagtattgaacaaaaaattttataaagatgttcacaatgaaagaaaaaaatcagttttgaaattcgtgcatggtcacatatttatagccatttgatggctcttgaaaaaaccgtgttaaaatttgtgactcttggcaatttcttcaaaactagtcactttaaaagttgtgactctcttgaaaactagtcacttgaaaagttgtgactctcttgaaaactaatcactttaatagatgtgactcttggcaaattcttcaaaaactagtcactttaaaatatgtgactcttggcaatttatttctcaaaccagtcacaggtaatcgattaccattatagtgtaatcgattacacattaacatatgtgactcttca

SEQ ID NO: 199778 - DNA, 266 bp, Glycine max
  unsure (1)..(266): unsure at all n locations
agctcggattgattcagaatatttggtttttcacgntcactaattttggctacgtcatagaacacaaaagcatgattaattagagaaacatctttatatacttcagctggattgatagaaagacccaacatctttacctacttgcagcaatcttacttacttgcatttttaactgtttttagccctaactttcgttaattctgtcttaaccactatttatcattgtttttttaacaatgccttatttttaaattaaaccctgtcta

SEQ ID NO: 199779 - DNA, 451 bp, Glycine max
  unsure (1)..(451): unsure at all n locations
cgacccggatccttaagcaccgcggctgcagctagcccagatggctctgttatctttcgactttaaacaaaaaatttgactaagttacctgtgcttatcgattcagcctcgcatagccataggtatctcaacaggaggatgactgttcatcctcataagatgaactctcttatcacagtaggcgcgcttagcgaggtcatctagaaactcttatattcaatgaattttgatgaacttgcttagagagttcatcgcgttttccagaaaaaacgcaaaaaacacagatcgttttcttccatttttgagcttctaaaaggcttatcaaacatgtaagccagtcaaaactatctacacagcacaatcattcacaaaatgctaatctttcactaatctanatacattcaaaccctagcaatcataagctaaatctatggtcttctaacctaaggtt

SEQ ID NO: 199780 - DNA, 312 bp, Glycine max
taaggtaccaaccttagcacttttatgacaacttctacaaaacaccacggcacaaaattttagaacagccacctgccttattggggaaaagagccctaaaagcagaacataggagcagcttgtgcattgaagccctacgttttgccatttgaaaaaaaatatcgagtatagagtgaatgtgagatgctgagaagaggagggtgaatcccccttcttgtgtaaggactatcaatctctgttttaatctcattattgtagggttctttgtatggtgtctaacacctattagggattctatgaacactaatgtaa

SEQ ID NO: 199781 - DNA, 338 bp, Glycine max
agcttacaaaaccatgctcatatgtcattgatttatttcaccaagcacttggtgggcgcatgtttaggcatgaatagcaagagagtgggggcaatgtggcatgccccattgcttcagaacgcagcataggcctagggccatcccatacaaacccctaactcacatcaatcaagcatgaaaacaaaccaaaattgccccacaaatttgagcacattcccacaatttagagcatcaaaagaagaccaaaatacaccaatggaaagctaaaaagctcaaggatgagatacttacttgttggagtgagtaacaacactaagaatggaagcaaagcgcaaaaa

SEQ ID NO: 199782 - DNA, 241 bp, Glycine max
  unsure (1)..(241): unsure at all n locations
tctaagcttgatcgctcaacaatgattttgggcaacaatatattatacagcttcgggctcttcaaatagatttaaccttttgacatttacatattnttacattcctatcatttataatcgcgactttctctctttctctcttccttcttatgactttacattcttaattcttcattgtcctccattgtcatggcattcattgaagcatgtgcactaaatcttcacttgctgaataaaacgg

SEQ ID NO: 199783 - DNA, 361 bp, Glycine max
  unsure (1)..(361): unsure at all n locations
gatccctaagtcacctgcggcatgcaagcttcttatccaaggctcatctgtggggtgtttctccttcttccatggcttattccctagtggatggcgcctcccttctcctcttctcctttgccttccgctgcatctccatggtgaaaaatcaccattgaaggacctcattgaagctcaaagatccagcctccataaaaacttcacaagcaagctttcatcaagtggtaatcagagcacaagaacttccagtaggtgctccttaaactccattaatttttcttgctntaccttctctttcattgttggttcttcattttttctccatgtatctcctcatatgacttgtgctaaattttggtaa

SEQ ID NO: 199784 - DNA, 402 bp, Glycine max
  unsure (1)..(402): unsure at all n locations
actaagctctaacttgtcaagatgaagctctgatcccttttttattttggctcagaatttaagaaggggggttgaattaaatatttaaactgntcccctaataaaaatctattcacttttactcaagtatgaattcccttaaaacaatcttcttatatataattcaatgacactatttgaatctgaattaaagcactaatgataaggagataatggaagaaaaatgcagactcagttttactggttcggcacaccttggcctctttcgtcccaagcacccgctgaagtccatatctgtaattctttacagtctaacaccaaggacatcttctttggttaaaaccttacacagagacccagctcttatccttgaaagaaagagaaaaacaatctttagaaaat

SEQ ID NO: 199785 - DNA, 424 bp, Glycine max
agcttatgcacggaaaatgtaattatgatatttagatgcccgaagaaacaccatttcctagttaaccatgcattaggtaccatgtccaattatcttgtttttaagtgaaatgggtttatgatcccaacatggttggctcgtggtgcctaacacatgaaactaagaatgttgtgtgaatcttcacgcttcccccttttttgttgtgttttggaaggaaaacacaaggatgagcaaacatgaaaacaaatggtatgcaattttgcaaatcaaaaagtgtgatgaacgcatatgcatgatgatgccatgactcatgcaaaatgtgaggtcggaatatgattacagacaaatgcaggatatgtccattatgaagttatgaagagatgcttatgcgatgcatgatatgaatgcactttacggacaccga

SEQ ID NO: 199786 - DNA, 318 bp, Glycine max
gggcaaaacacaccaaatgaataaaaagaaggatggctcaaattctcacaaagggaaaaccatcactttcaaatcgagccttcaaaactatcatgacatgtagagaagaacaaagattcaaagcacaaacgcaaaaactttatttcaaacaatacccaatcttgaaccacctaaatcaaagaaaacacgcaagccgacgtgcacagaaatgacccaaaaataactgaaaaccgcgaaacaacaacttaacaaataaccaacaacaataacaaaccacaaacagcaaccaaaacatccccccccaacaaacacacatgc

SEQ ID NO: 199787 - DNA, 458 bp, Glycine max
agcttgtcttcaaaaactctcctcccttgttgttattgcaccaatttcctcgaaattgtagccccatgttgatgtgtgccaccaccgttgatgacattgctgaattcaacgagaaatgtgaagtaggcacagctgaacactacatggaaaggcacagtttgtttctagccatgcatgcttctaacttatactacattcttttctcgtacggaccgtgtctagtgatgaagtgcgtgactaattaattaaggttattgttcaaaagatgtctaataaatgaattaataacgtatacgaaagcatttgagttctgtcgcttgtcacgtttgaccttttgttttatctttaaatggatatttatcagttcggagaaacagctatgtcatgtgctacatgtttattttaatttggttgctctatctcaacttgaaacaatagccctatttgatgtgtacggg

SEQ ID NO: 199788 - DNA, 394 bp, Glycine max
agcttgccagaagttcttagatgaggaggttttctctgacagcgacgaagatgatgaggaggcttaggatgatgagctgctacataatgattctaaagaatctgaggagtataagttctttgaaaaagtgtttgcaaaagatggtgaccttaggagatatgttgagaacaatcataaggaaggatattcttattgtttggtttgtgggggtattgggaacaaggtatggaagaggtttaaggattgttttggactaattcaacactccactgccatactattgacaggaaggaagcgagctcactgggcctatgcacaagtcatcttgcaatttgtaggtggggatactgatcatatgccagctatggtgttaaaggatttggattcctcattg

SEQ ID NO: 199789 - DNA, 459 bp, Glycine max
gcttatttactctacaagacgggtacttgcgcttggactttccatttgacatcatcaaaaatcaccggctgtttctttgtattatttttcagcaaagatatatatatatatatatttgaaagggtaaggctgcgtacaatatccctcccccataccttcgcatagcgaagagcctttgggcaatggggtacgaagttttatatatatatatatatgaaagtaccaaaggttctaaattacatattaggaaatgtccagtctattggttccaaatcagacttgaagcagtgtagtataaaatcaaaagctagttacatattagtctataggctactgagaacctatatttattgccctctcctgatacaaagccttctctaaggtacttgtcctttgttaaaaaggattacaaatctttttcatttttcgactctgccaaggaatatattgctcatcata

SEQ ID NO: 199790 - DNA, 462 bp, Glycine max
  unsure (1)..(462): unsure at all n locations
agctnatgatgaatggaatataaatctttttgtgttnaagcatgggagggttatgcacaagatagagtttgtagctccactcttgtatcttatcaaaattcaaaagtgaacaagtgaaaatttccactaatcaagcaattgatgattcaaagctgctgaagaagatcatttaccgcagggagatttgactatatagaacatgcaaccatcagttcagcctcccttccatggagtaacatcttcaatgcaacaatgagcatatgtagactgctgtttctaacagtcgcctctaaacatttggaatatggcaccaaaatctcagccatacaggtgaccttaatatagaaagattatataatatgttgaaaacattttacccttctctgtgngaattccaacaagggaagcaacatgctcagccagcatcctcttgtctcctgatagcatgtatacacctatatt

SEQ ID NO: 199791 - DNA, 453 bp, Glycine max
  unsure (1)..(453): unsure at all n locations
agctnggntatctccttcttcactacatttagaatcaccgggttgagtcttctctgtggctgtcttactggttgagctccatcctctaaatttattcgatgcatacatgtggatgggctaataccaggaatgtctgccagggtccagcctatagccttcttatgcttcttgagaactgacaacaacttctcctcttgctcatcagcaagggaggcagatataatcactggaaaactcttgctatcatccaagtaagcgtattttaaatttgacggcagaagcttcaattctggtgtggtcggctggacagtggtaaaaggagatggtttctcaacttttacctcataaagaaagtcagaggtatgtgtacttcctgaaacatggttagccctatctgactctataaaatcaatcttgataggtaaaacaccaccaccagatatgcaatcaata

SEQ ID NO: 199792 - DNA, 427 bp, Glycine max
  unsure (1)..(427): unsure at all n locations
agctnctaagcataagatgtggtcgacgatcttctagnncacgggtgaaggtagctctccgccatccatgttggtaagcaccacggctcctccggagaaagccctcttcacaacaaaaggcccttcgttgttcggggcccatttccctcggtggtccttgacagcatgggacattttctttagcacaaggtctccctcatggaacttgcgcaagcgtacttttttgtcgaacgcgctcttcattctttgctggtacaagcgcccatgactcatggccgttaagcgcttacccttaatgaggttgagctgatcgtagcgtgtttgagcccactctgattcctataatccggattctgccaagatccttaatgacgggacttttacctcaaatggaacaccgcctccatccatatacaatgagaacggc

SEQ ID NO: 199793 - DNA, 446 bp, Glycine max
  unsure (1)..(446): unsure at all n locations
agctngtggaatgacaaatatacagngtcctgtttggaccttggatctctctgctctgcttttctgatttgtccctagagggggaaaatggtactattagacccaaaccgttgaacttttcttcccaaacacaaaaacattttaccttgtctcataatcatttggttaattttattttttattgtctgcctatgcaatagccaccacttagatgaataattccgatcccactcagtgttggtctgccattccgttgtgtttatgaagtgacacgactcctttgttggaacaacatctctcttggtaagatagtgatttgtgcatcttcctagaccggttgttctttttccgttaaggttaaagctagatgaaactattacaaataagatctcataattagagtgagagtagactaatataatatattatattctaataagtctaac

SEQ ID NO: 199794 - DNA, 228 bp, Glycine max
aagttggcctgtcaggcaatgaagctactgggaagagaccaactggacgttctatgcttcttgaaagtggaagtccatgagaaatcgcctagggaaagacatattcaaattcctgcaataaggggagaacactaggagaaacataaagagccgactgaatagaaatatctctctctcactagtggatcactccatcgcacaaggtgggcactctgcctttatctattc

SEQ ID NO: 199795 - DNA, 378 bp, Glycine max
agcttagaccagataggctcttgcttatctcgcgactataaacaaaaaatctgactaagttacctgggcttatccatacagcctcgcatagccataggtatctcaacaagaggatgagtgttcatcctcataagatgaactcgcttagcacagtaggcgcgcttatcgaggtcatctagaaacgtttatattcaatgaattttgatgaacttgcttattgagttcatcgcgttttccataataaactcataaaacacagttcgttgtcttccatttatgagcttctaaaaggcatatctaacatgtaagccagtcaaatctatctactcagcacaatcatacacaaaatgctaagtcttatcctaatttaaatcattc

SEQ ID NO: 199796 - DNA, 339 bp, Glycine max
ctaagcttaagttgaatagtgctaagtttctggtttaggttctccatattgtgacaattaacttgggtttctacctttgtgatcatttagtttaatgtgctaagttgtttcaagtttggtctttggcaagtgtgacaaagttagtacctatcactttctatttttttgttgttcagacctcactatgaaaactaaaagttccaagtctttatatgttacttttaaattattttgcaggtaaaggtgaaggtccttactcttgcccttggggagacctaattttctgaaaggtttgtaatttttaaaaaaaggctgttcaattttaaaagtgccttttgg

SEQ ID NO: 199797 - DNA, 230 bp, Glycine max
  unsure (1)..(230): unsure at all n locations
gtcacctgcggcatgcaagcttgggcttgacttataattagctttatctcactcattagatgttgntcgcngcggttaaanggactacgttttaataaaaatattaattagtggacagaatcctaactaaattatcaatatggcgaccctgttaaattttttgacgaaaggatcatgcccaatgatttgttatgggaccaaacatcttgcgatggctcaggtttgcaccc

SEQ ID NO: 199798 - DNA, 421 bp, Glycine max
ctaagctaaggaatgtgaggccttgaaggaactacctactgatattgttacactctatgaggagatagacaccctgagagataaactacgagaatttctggttgtcatgaagcccttaacaagattattaaggtgcaaagacacctcacagacaaatttggccatggttttaaaggcaaaaagatggtacatggtgaacaagatattgattgtcacttttatggaaaattgggtcatgaaactcacaatttgtgataccttcttgaaaggaggacccataacgtgtttcattagcactttcatcccctttttctctcagagaaaggacctcaaatatcgtctcctttaacataatatcctatgcgatcttttttaccaaacgaaaacaatgtggccctctttaaggtgttcattacataca

SEQ ID NO: 199799 - DNA, 429 bp, Glycine max
  unsure (1)..(429): unsure at all n locations
agctntaaaaatngcaacaacaagaaatatcatttcataacacccatgataaaagtaatgaaaatataggtagagaatatccacacaatcatagttaggactcgtctggataatcaaatgaaccattaaaaacatttaaattttattcaaatcactttgctacctagctatgaatcataaaaggaaaaagtgcaatgctctataaaaatgtaaattcataacttataacttatgagaccatgtgtgcatcaattcataaaacactttaaatgggcaagtaaaatcatcataaaaacactaccagcccttgacccaagtgaaagaatatttacactcgactgaacctcattgagatgctctatcaaattcattcgaagaactaggaggaacatatatttgaaaaacaaatgcttacatcaaccaatgctt

SEQ ID NO: 199800 - DNA, 377 bp, Glycine max
  unsure (1)..(377): unsure at all n locations
gctttgagccncaatcctgactcaccacaatccttaccctttgtatcaaaataaatagaagggaaatttccaatcaaagaaaaagagaaggaaaatttccaatgaaagcaaaaaaagaaaagaaggaaaattccccaatcaaagaatgggagaaagttaaaaaggaagaagaagaatgaaagaaagctcctgatcagggatcgaaggaaaaacagatgaaatgtgcagagaggtctttggaccggacaatatttgaacaatacagaattgtcaccaaatgaacaaataaaaaggaaaggaaaccacgacctaagatggtcttctccctttgattaccaaccaanatcccgtgcgctagcgactatttttgcccgcac

SEQ ID NO: 199801 - DNA, 373 bp, Glycine max
  unsure (1)..(373): unsure at all n locations
catgcaagctatagcgacgacccaagttgtgatctttttcanataaaacatgtaaaatgcctattggtaatcttaaccttctctttcaactcctgcacctgttccacttgaaccccgtcaaactaaaggcgtgaaatcccctccctcttccgattcttaacaacataagcatgataaaacttagtttgtgtctccctcctttaaccactagagtcatgactttcggaagactacattgcataccataagattgttagatttattcctatttggcctatgagaggccttgctcttcttagaattgtactgtgtttattatgtaaagggttatattatttatgattgttgatattctaaagaaagatattacaaa

SEQ ID NO: 199802 - DNA, 450 bp, Glycine max
  unsure (1)..(450): unsure at all n locations
caagctcgcagtcatctttgaactctagactcnttaagcaagacactgggttatactagacaagggattgatagttttgtcaagggacttatattatttccatctaatggatcagggttagaatatttttgtgagttgatgataataattagactttgaactacataactgatctttgtttggctgataaagtgatttagtgaaatcaatcccaactattatattctttgctattgtacgttttttttatcacactttgtgtccgtaaaatgttaaaaacagggttttatttatttatgctatttttatttatattatctcgcccaacataaaattgttgtttgtgaaggtcatagttaataaacattattattttgtctattatgcatgtctctgcgaatatgatacctataatttcatatatactatttgcctgccttgtatgcttgc

SEQ ID NO: 199803 - DNA, 373 bp, Glycine max
  unsure (1)..(373): unsure at all n locations
catagtnaagcatcgataatgtgtctaccatcacgatcatcgtctccctttccatcattgtgggtaccacctgtgccgtcagatccctccacctttggggcgtgttctttgaaagatccgtcccccttttggcaaatgttctgatgtggcgatctatccggaaccatatgaaaattggctgatactggctaaaaaggcgacctttatgccttccaaaagtgactcgaaagcatccacttagtgtccaggtacagcttcctagtagactctctggaaggatgtatacaattctcacatttgcgaaccccctcctttgcatacattttgatggcttggacaaggtccctgtactgcaagtcacccttaacttggg

SEQ ID NO: 199804 - DNA, 420 bp, Glycine max
  unsure (1)..(420): unsure at all n locations
ctaagctggccacccagctcgcccaggcgagcaaggttgctattcttataagcaacagccttatggaggaatcttctggagggccaaagtgggccttgttgctatttgcacccccatttttactatatgcacccnctaccttttttggagattctttttttccgaaagttacggaaacttacgaatttcgtaacgatacttgttttttttcataatgtacggaaccttgcggatacataatcatccccttntttaactacggaatgtacggaacctcactatttgtgcacgatgcttcttttgatttcagtgtgtacggaacctacggatgggcataatattttctttgattccggccgtacggatttccaattgctaatgagggtgcagcccttaaatgaacaaccacattgttgcccc

SEQ ID NO: 199805 - DNA, 400 bp, Glycine max
  unsure (1)..(400): unsure at all n locations
ttactcggatgtctgattgagtcccgaaatatatcgagacgctcgaaatngaataccgaagcgctaagcaaattcaaacgacaaaaactttttactcggatgtctgattgagtcccgtaatatatcgaaaagctcgaatgtgaatgtagaagctctgagcaaattcaaacaacaataacattttactcggatgtctgattgagtcccgtaatatatcgagatgctcgaaatggaataccgaagctcggagcaaattcaaacaataataactctttactcggatgtccgattgagtcccgtaatatatcggaacgctcgaaattgaatgtagaagctctgagcanattcaaacgacaataactttttactcggatgcctgatagagccctcgaatatatcg

SEQ ID NO: 199806 - DNA, 295 bp, Glycine max
caaaaccccctcgatcctttacgcgatttattgatcttcaactcgatagggtatgcgtgattggcaactcacattcattcagcgtcgattatacggatcatcaactcgataaaagtattgcgttgattgtcaactcgatcattcagcatctgaaatacggactcaatctgacatcgataaaagtatgcgttgaattttaaactcgattcttcagcttcatttacggactatcagactcgataattatgcgtgattgtaagctacatcattcagcgtccattatcgatctcgacat

SEQ ID NO: 199807 - DNA, 458 bp, Glycine max
  unsure (1)..(458): unsure at all n locations
agcttagagctccagctaattactgtgttgtcatcatcgtataaaagaagggtaattcaaaaaacacatctcattataagggcaaattataaagctttataagaattggaattagtacttaattatcatgtcgtcaaattaaaatggtactgaggatgttacatttattaagacccttttttgaagaacagtgtgaagaattctttatatacaaccaattggtttacaacctgaaggagttctgtttgcatgttaaatgaaaatatttacgacatcaagtcacgaagactcattccacacgtcaaagagaaataaaagaattcataaaaaggtatgtaaagatttcgatgaggaagattaagacgtacgttgaatactttaatgttctgattgacgaaaaaggtatgnttattaaaaatatcggaaagagtggagaatgtctatcttattttccttga

SEQ ID NO: 199808 - DNA, 358 bp, Glycine max
  unsure (1)..(358): unsure at all n locations
aagctttcctcntggagtggacataattgcatggtgtggtggtctaaccctagctgttccaattctagccttcatttccttccacatcaatggccactttcaaacactcataacaacaataaccatgggcattggagtctttttatgcctcccagtaaacctcttcaaaaccaccaagatcttcatttcctacattgcaaccatttttgctgccatcactgtaacaacttcaacctacacacaccacttaaacctcatggctcgtgccttcttagggccaacaagacaaaccctaaagaataaaataaccctatcttcttacacaaagcaaggagtctctagttggctatctctttat

SEQ ID NO: 199809 - DNA, 449 bp, Glycine max
  unsure (1)..(449): unsure at all n locations
agctgtnttatttatttatttgttttaatagacataattctggaatttaagtcacattgaaatgaaagatgatttcctgctttttatgtcacgcgttttttactagaaaacaaataatgaatttcaaagaccgtaataaccttttatatgaatcttttaaatatcatactactataaaatgcatactcttgttaagaatttcatatttgaaagcattttttttattggccataagtatttttcttataggagatatttctgctcaagtcaagtataaccagtatggagagctctttctcgaagtaatgttagaacaaatgagacaatgactgaaagtttaaataagaagagaaagataaatttcaagtctcacattgctcaaaggaaacatttgaatagtgtttcactccctatatatagagagtccctttcctattatttcttggcta

SEQ ID NO: 199810 - DNA, 425 bp, Glycine max
  unsure (1)..(425): unsure at all n locations
agcatgggggatatggggtacccatctcatgtggtactaggtggcaatccgacgatggtgcacaaaaagtgttccacatacacaaagcgcgcataaacccaccttcccctgaagcccacctccaactgagctcacgtactcccaccgagcccatatccgtcgattctatcaacacagggttaccataaatcctaccaagcttccacagtattcatgcaaaacaacattcaagcaacacaagctatggcagccaagcaaaacatagcaaaggcagaaaactgtgtgaacataggaaccaaaatcacagactttctcacttaaagaccacattaacaattccttcgatccaattcgttaaccgtnggatcgactccaaaattatactggaagatatagagcataatcctacattgagaccggtggga

SEQ ID NO: 199811 - DNA, 368 bp, Glycine max
  unsure (1)..(368): unsure at all n locations
ttttccaaagaaacccatttcttcctttcaacagaattgtgatgtaaaattgaggcagaaacacaacccagttttattgagtatacagagtagaaaatcaaacaagagattttttgaagtatcttatgagcactcccaactcgttggatgaatcatgcatgaaaatttgcacgctcctctgctctgtagaaatacaagggaaaaggagaatagagtgatgcaaaaggtgtagtacctgaggcaaagtcggcgacacagaggtcttgaagaacgtcatgatctgatgagatngcggcggctaagagctgagccaaagtcacgagaagcaacaagttgagcatctcatggtatggtagccatcatatgat

SEQ ID NO: 199812 - DNA, 283 bp, Glycine max
gcttttgcaccggcgcgggactttactcttagatatagtgcattgatgggcttctacataataatcctgatctaatccgctacaaagtttatctatttttaataaaatgtgattcatatagagagatattaatataatggtattattaaaaaaattgcatacagatactacaataaccctaaattttatgtttattatcggaaatacgggagctgcacgcctgtatgttcataattctattgcgctggcgagtttataaaatgaatatatgataacaatctat

SEQ ID NO: 199813 - DNA, 327 bp, Glycine max
  unsure (1)..(327): unsure at all n locations
atattccttgcacctcttctantctcttctatattgncattttcttgaatttaaatgttagatttcaaatataataaagacaaatgaaatttgaataaaataatatatgtgcacattcctttttcgtgatactcaatccttaagaatgaagataaaaaaacttatgacaatgtgttatattttatggacaagagtggactctcacttaatatagcatattagatactatgttgaagcaacatactctctatagttgtggacaatatttctctaatataataattctattcacttattcaaaactcattaaatatcaatatttatact

SEQ ID NO: 199814 - DNA, 403 bp, Glycine max
  unsure (1)..(403): unsure at all n locations
agtttaatgaatgtgcataccatacagaatggtttcaaaacttcaagtgcttcactctaattntggtctaaattataaaatttattatgcagtaatttttggttgaattttggtgtattgtggtataaatattgaattaaattatgctttgaattccttgtagtttgcattctcaatataattagtgtatattcaaacatgttttcaatatatagataagatcctgacttgtagtataaatctataaatttatttattgatgcggctgcaccaactcattatagattgtaattttgtatatgatatatatttactcaagtatactttacgaatcagttcgcgagtcacgaacccaaaattgttacatttaaaaattatactccatatattatagcatatatgt

SEQ ID NO: 199815 - DNA, 314 bp, Glycine max
taccgcaactcttttgtacatactctaattaacgtgaagctttaataatttttagcagagcactttggttttattgccatttaatgtattttgctgtgttactagcccactaagtttgcccattaactcattcaatctatcattgctgggtaaatggaaatggaacctgtttcatatccaaggagagctgtgggctaaggtactagaatcgaagtatgtgggctggaagggtttaagccaaataactagagggaaaggtgaatcggtatggtggatggattctaagctcgtgcctaatcactcgcatcatggag

SEQ ID NO: 199816 - DNA, 431 bp, Glycine max
  unsure (1)..(431): unsure at all n locations
agcttatatatgtttgaatattacttatgtattgattttngacagagntatatatatatatatatatatatatatatatatgacaaatagttttgtttgaattatataaaaagagtaattttctgattaagtaatatatgtgttgtaaatataaagaaattttttactgtggaaaacattaactccctctaaaaaaattaacttataggatattttttaataatcaaattattaatacaaagcattcaatatcttaaccataatattgacataatgatgtaagacattattatattcacatatgggaaaatagtttatttagaatttatgtcctattttttttgtgtataaaattctctttagttagaacaataacgtatgaggggcatgggtattatttgacttatgaagatgtccatggtctcttacca

SEQ ID NO: 199817 - DNA, 115 bp, Glycine max
gcaacgaacaagggagagtaccaccggacagaagccggccggaaccagcacaacgccggcgcgcagacaaaagaaaggcagcggcgaccccaagaccaagaaggcaggcacggaa

SEQ ID NO: 199818 - DNA, 93 bp, Glycine max
aagaatacacctgcaagggaaaaagcagcaaaatgaagaagactcacgcgaaaaggagagggcaaccagagcaacacctgcaaagaaaaaaac

SEQ ID NO: 199819 - DNA, 440 bp, Glycine max
  unsure (1)..(440): unsure at all n locations
agctngcttctacatgatgtaatttagttatattgagagacacggacgtcaaatttatccctattattagaattatgagtgttgtttatagtaatggcataaaattgaaaatcctaatgagtcattggagacatcaaacaacaaccttcaaattgccccatgcatagtgtcgcttgacaacgttagaattcacaagtgattgtcttcctcgaatttcaactagcccgcatcacttacactttgcatcttacgtttcagggtcatacaatgctcaacggaatgccctggaactccttcatgataagcacatgttggatccgagttgtattctcgaaataatggaggtcgaggaatctttgttgggattaccactaccattgcattattgagtagataagggagcaaattagcatacgacaccagaattgtggtgattctac

SEQ ID NO: 199820 - DNA, 199 bp, Glycine max
  unsure (1)..(199): unsure at all n locations
tgcttgaatcggacatatgtgtggaaagtttttttcttntcatntctcgggagcttccgtggctcaattccgatcctctctacttattatacacctgaatccgacacctgtgtgataaggcatgaactttatggattacgtgagagtttttaatgttatattaccagcggttcaatatatatatagctctgaatctgac

SEQ ID NO: 199821 - DNA, 313 bp, Glycine max
ctcagcttataaggcggctctgggagaccaacgtcgagtgattttcttatgttaaaaagatgtcccgagtacttcctgatttgtccgaccatgccctcctgatctccagctgggaaattggcgagtggaggaacgccccggcgtttacacaacaagcataaagttcacctttactgtttagaagctctatatttgggactacgctcttgagctttctttctgtaaggctgtgcgtcttatgtttttgaaatatcatacaaggatctcttttcatctcgatctggtctctacccatatctcatatcatttgcgt

SEQ ID NO: 199822 - DNA, 277 bp, Glycine max
aaagcaccgagcagcaccgccgaaacagcagatgcggaccagacacaacaagccacaagggacgcccaccaggagcacaccgagaaaagacaaacggaaagagccccaccccaggaacagccaggaagaacacccccaccagagacgacggaaaaagccgacaagagcaacaggagaaacacgaaaagagaacaccgcgggaaacgaggagacgggaaagcgaacgcgaagggcacaaaccgaccaaaaggggaaccggaacagaccaacaccaagg

SEQ ID NO: 199823 - DNA, 390 bp, Glycine max
  unsure (1)..(390): unsure at all n locations
ttatcggctgacctcgacattgctatttttggatgacattggtcagagcagattttggtcgaccttgggcaaagctgttttcacccaacctcagccaagactggttttggctgacatcggttaagattgtttttgattgacctctgccagactgtctttgtcaaccttgacaagggttaatatttaatagatctcggctaaggttaatgtcaatcgacctcggtcacatattattggtcgaactcgagtaaggttaattttcgaccaaccttgggtagggttaactttggccgacgtgactanggatgttttcggatgactcgactaggctatttgtgttacctcacataggttatgtctttgcactctcacatgattgttttcacctac

SEQ ID NO: 199824 - DNA, 390 bp, Glycine max
  unsure (1)..(390): unsure at all n locations
taagagatcngacatgaaagtcgccgcagcagaggaggcccagcacatccgcaacatgagacgagatgaactcatggggccccatcaaaccttggagcgaggacccgcggataggactgaaaagaagagcaagagcctggcgctcgtgcccaatgaggaaggagaagaacatgagtatgactcggataccgaggaggggcagactaacgcagatgtgctccttggaaaacacggcaacaaagtgcggaacagaatggacaggaggcgaaaaccacatgtccggaacatccctcgcgacatcaggaaagggagtgaataccagataaagccgaaagaaaagcccagcacaacaaaggaatacaacgccacgggggcgaaggctatggacac

SEQ ID NO: 199825 - DNA, 302 bp, Glycine max
gagaaggcagccacaggccggagccagagaaaacgagaaccaacaacccggaaaggcccaggaaacaatcaaaaaaggcaggagaaagaagggggcataacagaggaacaacacaaaagaaaacagagaagaggaagacaagaacaggtggctccacagggccgagaaaaggaaaaccactaaaaagccacggtacaaggggcccaaagcaaacccaccccggaagcaccaaccgaaacaaacccaaacccgggggaaaccacaaacgggaaacacaacaacacaggacaaccgaccccgga

SEQ ID NO: 199826 - DNA, 367 bp, Glycine max
  unsure (1)..(367): unsure at all n locations
ggaagtcaagagcatgatattgagccgatacctttgactggttatcaagtatatcagcgggttgaacacctgaataatgtatatggaaagacccaaaagaaggataaaagttagagttgcatatggaagaagaggtccattttctttgatctttncgactgatctgaacttgatgttaaacattgtattgatgttatgcatgtggagaanaatgtttgtgatagtgtgatagggactctccttaacattcaaggcaagatgaaggatggcttcaatacctgtcaagatctagctgatatgggcatacgatcacaagtgcatccaagggctaatgggaagaaaatttacttgcccctagcttgccata

SEQ ID NO: 199827 - DNA, 434 bp, Glycine max
agctggctctaaatatacattgatgtttttatttatgggaggaggttgtatgccattgttgttttatgagtagtgtcccactggttagactaactttccaaatgttttccttcacaggaaatggccccgaggaagcttgcctcacaaaggtccaggaatgacaaggcatccgaaggaactatttccgctccggagtatgacagtcaccgctttatgagtgctgtacaccaccgtcgcttcgaggccatcaagggatggtctgttttccgggagcgacgcatccagctcagggacgacgagtatactgattttcaggaggaaataaggctccggcggtgggcaccactggttactcctatgggcaagtttgatccagagatagtccttgagttttatgccaatgcttggcaacagaggatggtgtgcgtgacatg

SEQ ID NO: 199828 - DNA, 463 bp, Glycine max
  unsure (1)..(463): unsure at all n locations
gatggngtcgagaagaaatacatgtttgcatcattattaggggagaatgtgaatgtatgtatacatgattttgatgatgtcaaagaagaatctaacaaggctgcttcaaatgataagcatttgcttcaagaataattcaagattgcttcaacaaacaaagccttgttttaagattcactaaagaccaagccttgccttaaaacaaagtgctttcaagacatgcaaggctctggtaatcgattaccagaagacagggttgagaaatagctgctgaaaaaggttttgaatttgaactttcaacatgtaatcgattaccatatgtctgtaatcgattaccagcaacgaaactctggagattcaaattcaaaagtcataattcttcaaattataactgtgtaatcgatacacacacattgtaatcattaccaatggaaagtctcagagaatctgccaacagtcacat

SEQ ID NO: 199829 - DNA, 444 bp, Glycine max
  unsure (1)..(444): unsure at all n locations
agcttaggtcatggttcaatgtatggtttccttgagcctcagtttatacacaatgcaaaggatagatgtcaaaaatttcaacattacattaaaacatgggtgaaggaatcacaacgagaagcatacttaggagcttacttgaatcaatatgtaaaatataactagtacgttcaaaaaaatatttgcattatacgtacctaattatagttctggactttagggcacaatggaagcttgttgttgtgtgtccatgggacaatactattgtttggttttgttctttgcgtaagaagcctgatgttaacatcaaagctacaattaacaggttatgtttaaaattataattcatttattggataacaattgtaggatatgtaaacagaattttgatgttatatacgtttaagttnttttttaactagtgcaatgaagacattaaccact

SEQ ID NO: 199830 - DNA, 454 bp, Glycine max
  unsure (1)..(454): unsure at all n locations
ctaagcctatgctgcnacatttatatagacctcctcagtagcataaccaataacaacagaataattatgacctttcaagtaatagatacaatccaggttggaggaatcatccaaatctgagatggacaagtcctccacaaaaacaacagtctgtccctcattttcagaatgctgctggtccaagcaagccatatgttcctcctccaatacagcaataggaacaacaacagtcaccacaaagacaacaagcaactgaggctcctcctcaaccttccttagaagagttagtgaggaaaatgaccatccaaaatatgcaatttcagcaagagacaagagcctccattcagagtctgacaaattagatggngcagatggctactcagttgaaccaagctcagtcccanaattctgacaaatttgcttcacaaactatgcagaatccgaaaatgtgagt

SEQ ID NO: 199831 - DNA, 442 bp, Glycine max
  unsure (1)..(442): unsure at all n locations
tgcttagagccaattcagacgacaataactttttactcggatgtctgaatgagtcccgtcatatatcgagacgctcgatatttaatgtcgaagctcttagccaattcaaacgacaataactttgtactcgaatgtctgattgagtcctgtaatataacgagtcgctcgatattgaatgttgaagctctgagccaattcaaacgacaataacttnttacacggatgtctgattgagtcccgtcatatatcgagacgctcgaaattgaatattgaatctctgagccaattcaaactacaataactttttactcggatgtctgattgagtcccgtaattaacgagacgcttaaaattgaatgtgtgagcattgagccaattcaaacgacaataactttttactctgatgtattattgagtcccgtatatatcgagacctctaaat

SEQ ID NO: 199832 - DNA, 433 bp, Glycine max
  unsure (1)..(433): unsure at all n locations
agctngcactggaatcgaatataattctttgaatcgattacacaaagcttttatgaaaggatgtgactcttcacacttgattttgaattgcaacgttcagatacactggtaatcgattaccaatatcttgtaatcgattacacccttttgaaatcaattggaacgttgcaaattcagttaaaagcttttgaaatcaaactctgtcactggtaaccgattaccataaagtaaaaactctggtgactaataaaatcttgagaaaaactctttagaaaaacaaaattgcgctatgtttgttttatgaaaagctttacatacttcccttgggaagcctatttgattacttttcttgaaccttgaatccatcttttcttgaatcangaaagcaaacttgtcttgatacttgaatcttgttcttgaaatcattctcttg

SEQ ID NO: 199833 - DNA, 419 bp, Glycine max
  unsure (1)..(419): unsure at all n locations
acatgcaatcaacaaaaacttcctctagtaactgaatacatatatgattaacggtttgtacacgtctcgcttatcgtctgcacaactctaaacattagctcatgtgtttcagagatacgaacgaagaaataactacactgtttgagtggatatatnttaccggacaattgctaatgatgatcacaatttaagattataagaacggataactctgcttaacgtacgggaaaattgagtatgaaattgtgtcaaacacatatattaattagaaaagaaatacttattgaaaatatcaaataaagaatgacgttcagaaaatagtatatatcaatttataatacctctacccctatcttcattgaacagaaatgctaccttaagcgtgaacaacctgttcatggggagaatatattaaatat

SEQ ID NO: 199834 - DNA, 336 bp, Glycine max
  unsure (1)..(336): unsure at all n locations
aagcttagcggcggggganagtgaacggttcttcctgcgcactttcatcaactggccgtcaacaaccggcgtaatgcgctttaccaccagtgggctaccttcaggcaatggtagcgccagtgcgggaagaatactgatgccgatgcctgcggctaccatcgggaacagcgtcgccggatgtccaatctcctgcacaatattcgcctgaataccattgcgcgccagcgctgcgtcaatcagcggtcggctgcctgacgcgtaatcctgcaacaccaatttcgctccctgtaatgcctgccaaggtacataatcttccacggccaaagcgctttcgcg

SEQ ID NO: 199835 - DNA, 372 bp, Glycine max
  unsure (1)..(372): unsure at all n locations
cttgnggctgatttaaggatggcctttgtggttgattgttgtttcttgtctgatacgatgtcggataatgagaaggggtgacattggctaactaatgatattgttgatctggtgggaagtttggccatgtaggaatggcagtcacaacatgggatccttccttcttctcatcctctctattcgccccaggctttttatttggcaaagcacgatgatcaaatttgcctcttttcagactcactttgattcctttgccagcaaaaactatatccacaaagcttgaaggtgtgttacccaccatcttctcatagtaaagggcctatcatcattgtgggatcatctccctttccttcattggaggcgccacttgag

SEQ ID NO: 199836 - DNA, 443 bp, Glycine max
agctaggaggggtagatggaggacccgtcgctgataggagcgaggataagggctatgtatgagtgcgtgagctcaagttaaaggtgggcaactggggatggtctgcttgtgtttgacttgtgggaatgatagagttgatttgcgccatcacccgatcgccacctattaccgcatatgatgggtgccccataatccactaagcttgatgtgagaaagcgtggaagagtcagtcttcctacttaagtttgttgaccacagagtggtacctggagatatgtcccgggggtcaagagaccttggggacgtcaggtggggtgctattgcccaaaaccaatcttggctaatcccgacccaccctgggcatagtcatttagtgagaacatgtgatgtacctaaacaggcaagctcttggcagtcaccaataaataacaatgtcacaagca

SEQ ID NO: 199837 - DNA, 430 bp, Glycine max
  unsure (1)..(430): unsure at all n locations
aactcagcttagatcanaaagnncctcgtttcgcttcttgttcttctttcttctccctcatttcaaatttgttcttcctttttcttgcagaaatttccgggctcttccactaatgatgatcatggaagactaaacactcaatcgatccaaggattcactccaagccaggctaaatttgagtgctggcttagtatttcaattttggataaatgttcatctttctcttcaatcttatttttaattttcatgattattaataggcttatgattgaaaatgaattangtcatggattcatttcctaatattgaaaattaatcatagggtgttccgatgatattccaactaatttgtgatctcaatggaattatgggataaattcgattggaactactctaatgcatttgattgaaccttcattacatgatcatt

SEQ ID NO: 199838 - DNA, 312 bp, Glycine max
aagaggaaataggtgcaaccccttaagcacttctctcccttcccaatttgctaggaaaaattgtatccgtgaagaaaattcataccgaggcgcttacgaaacgtttccgtaactattcctagaggaatttcgataaggttccgaccgagctgccaagatctcatacaatcttacatcgtctgcgatcttcaacgggtaagtacctcgaaccaagcttttctatgcattctatgtacccgaggcggtccacattgtgttacgggtatgtttattctcagtccatttacatattatacccctcttgacgtgctt

SEQ ID NO: 199839 - DNA, 448 bp, Glycine max
  unsure (1)..(448): unsure at all n locations
ngcgagattgagaagacaatatgtatgcttgancntcaagcttcaatgaggtctttcaatggtgattctcaaccatagagatgcaacgtgagataaaggataagacatgagaggaagcgccttccactagggaataagccatggaaggaggagttccaccaccaagagagtgtcatggattaaaatctcatagagaaaactttcatggaggaaaacaatgagagagaggggtggctctaaactgaaggagaaaaagagggagagaaatcgaactttagagtgtgtctcacatatgtcacacttctcaaatgtataaaagttataacaagtgtaacacatgcttctattgatagcctaagtcacttactaaatgaatgctttctagagatgatataccagagcttatctacacacacccctctaatatctaancacaccccatgccaaa

SEQ ID NO: 199840 - DNA, 461 bp, Glycine max
  unsure (1)..(461): unsure at all n locations
agctngcttgtggagcttctatggaggctggtatcttgaacttcaatgaggtccttcaatggtgatttttcaccatggagatgcaccggaaggcaaaggagaagaggagaggggaggcaccatccactagggaataagccaaggaagaaggagcttcaccaccaagaattgccttggataagaagcttgaagaggatgctttaatggaggaaaagaaaaagagaaggggggagcacgaaattgaaggaataaaagagggaaagaagtggaactttgaagtgtatctcataagactttgattcatcaaagttacaacaagtgttacacatgtttctatttatagactaggtagcttccttgagaagttttcttgagaaaactaccttgagaagcttcgttgagaaaacttccttgagaagctagagcttatctacacacacccctctaataactatgctcac

SEQ ID NO: 199841 - DNA, 449 bp, Glycine max
tgtaagagacatcttcttcgaccttggttattcttgaatccatctcatcaaatctcatgtccacttgtaactccaaagcatcaaacctttcaccaacaaaggtttgaagaccatcgaacctgtccaaaatcttttgaagaagagaggaatcttctccaccttgtaaatgtccttctccatcattgggttgagcaccctttttcacccaagagccatcatgctcttttcggtaaccaaaggatgcaatcacagcgacaccaattaagaaggatctcttgattggaacataaggttcagaatcaagagggatgttaaagtgttgaaggaagagagtgactaagtgtggatatggtaatggagcatttaatcgcaatgccttatgcatgcgatatcagactaagtgtgcccaatcaatttgtcggtctgtgtgaaaagcccacatgacaata

SEQ ID NO: 199842 - DNA, 469 bp, Glycine max
  unsure (1)..(469): unsure at all n locations
ttaagcaccgcggctgcaacttgggctaggacatatataacatccttttgnttnagtagagggggggtggacagaggagaaaaattttagggttttgcatgttactgttcatgcgcactgntcacgtagcaataaatttcattttctacttcaatttgcaattgtgttttgtgcttctgtccttgaatacattttcattttctgttgattaatggaaggctaagattccagtgttgttttctattgaggatcaagcacaactctctttgaggttttgttattactattgaattatgttcaggttttccccttcaccaattgctctgtatttgttgctattaatccatgcatgcttaatgcttgattaattgtctctgtgcttaatttacattcatgcttaatgatcaatttcactcatgcttaatggacatgngagagggattaattggtgtatgtgttgcataatcac

SEQ ID NO: 199843 - DNA, 190 bp, Glycine max
gaccggaagggcgacaacaactccaacaaaggaattgccccaacaccaatcaggaatgaaaaccaatcccattcggacccagcaaaaagcaggggcactacctgacatgaaaaactcagcaactctaagccaatcgcccctcccctaaacaccacgaaccacaccccaggggacccaaccaccacgaggc

SEQ ID NO: 199844 - DNA, 455 bp, Glycine max
agctttcaattgatctaatgtctcaagtaattttttctttctcagcactcataattttagaccaaataaacaatttttgataattagtttcatgtttcttacttttcctcctcttaactatggttagggacataaacaaggtcaatcttacactcatataatgtacaagggaacaaaagaatcattcctaactaggtacaaggactttaaatggtcaaaggaacacctaaaccgcaacattatgcagagaattttacaacttcacagctttgacatgttctggcattatatttgtcaaatattatacgggtctttaaatattatgggaccaaaagcatttgaaatataaagaggaccaccaaagtgtttaatctgattcaatccaagtcactactagttctaattttaatacaatacattttttttagataggagtcaacatactttcctggtgt

SEQ ID NO: 199845 - DNA, 368 bp, Glycine max
atccttaagtcaccgcagctgcaactgaaataggaaatgagaaggcatacttcctgtttattcgtagacccaaagggtacctggagatatgtcagcggggtaggagacctggggacgtcggtggggtgctattgccacaaccaagcttgaccaatcccgacccaacccgagcatattcagtcaatgagaacctgtgatgtacctaagcaagcgagctcctgacagtcaacagataaaaggaataaagaccacaaagcaaggaggcttgtgtggtggctggccacatgtgaactttgattgataaatgggatatggcctcctggaatcaattaccaacggtgggtaatcgattcaaggcttaaaaatga

SEQ ID NO: 199846 - DNA, 102 bp, Glycine max
ctgcccggcgagcaggggcttctagctcctccagtatctttcgccttctggaggaactttctggaacgccctagatgatcacattctacccctcccgaatat

SEQ ID NO: 199847 - DNA, 306 bp, Glycine max
ctccttaaactcccatcaattatcttgcagttaccttcactaccataggggcgtcctcattctttctccatgtatctactcacatgtcttgtgctaaatgatgataacatgatcctctacagtttccaccaattatacttgctatagaagctagatatgagtctctaaggtccaaatttcttgttcttgctcataaaccacgaattgcgctgagttcaggtccctacgagatcagaccggaaattctcgtggctcaaacctgaaccatacaatccttacaagcatatctaagtataacataacctc

SEQ ID NO: 199848 - DNA, 437 bp, Glycine max
  unsure (1)..(437): unsure at all n locations
aaatttacatgcatgtagtanaagagaacacactttctctctctttctcnanaaaataaaaaaaatacatcatttaatatgccttgtgtcacaacaaatattatcactgcttgccagatcgttgatgtaatattggtaagcaccatttgttcttgagtatatttactgacagatttgtgtaccctcttttatttccctttttttgctcctgccagctaaaaatgagaatgctgacgacactgaggatgggattcgacacttcatggttaatattattgaacctcagtttaatcttcactcagaggacgcgaatgtaagttatagaatacttttttttttcattctaatagagctatgggctgtacacaagcatgttattattggcctgcctttatatggaacttgatctacataaaacatttcgttattcaattttt

SEQ ID NO: 199849 - DNA, 355 bp, Glycine max
  unsure (1)..(355): unsure at all n locations
agccgagatggaaggaacctctttatctctngcangaaggctggaagatagaagaaatggactcctctctcccttggtcaacccatgcaaatggagaataaagggctccactttggtgtctaaaaacacatgagggtgaggtttaaggctttgtccaaatgacacttaggcatacttaatacgacaagcttaattgaaaatataaatgactcacggaaagccatggtgaacgtgtcaagacatgctatttatgcgcattctgccttctgaaattctaaccaaaaatggccaaagttaacataagcaaaaatggcaaaaaatatgcttttaccaaaactgataaatcctattctaa

SEQ ID NO: 199850 - DNA, 175 bp, Glycine max
gaggatctacctcaaattggatcgtcagcgtcacaagaaaccatgcctggatctgaccagagggatcgtgcaaaagatggctggcatgaactagaagcctttaaacgaagcttccggacggaacatcctaaagaagcttctggagagaacaacatgaagcggccgcggcacaaac

SEQ ID NO: 199851 - DNA, 421 bp, Glycine max
  unsure (1)..(421): unsure at all n locations
ngctcgtaaggctaagtgtggtaaatgatattgagacccaacttggataccaaccttgtgctacaacaattgcagcacgacccattatccacaatgagagaacaatttttgtttaaaaccttgcatcttgatgaaagatgtttatctttgggtctgggttaactcacaagattgactcccaaggagccttctcaccattagaagatcaccttcttcataggggagaacctgtttaatatgctcatcacccttggcttcaccctcactttcacttgatgaaggagaagaagtactctcctcttgtgtattatagatgtcttgacccctcatgaacttggatttctttgtggaactttgataatcaaagggattttcccacgaattataaacacttgatgatactagtctatcatggaactac

SEQ ID NO: 199852 - DNA, 331 bp, Glycine max
  unsure (1)..(331): unsure at all n locations
aagcttgcggtgatccgaccattggagagttgtgaaatattgncnangngaccaaaatccagtggaatgtcgtgggagcgaccaatttggacttctgatttggggaaaatttacatcacacatgtagatctagcggaaatatatcggtgaaagtgttaaacatacgatctatatttgggccatgtagtattttctgcaccttatgttgattacctaataccatattttaaatgtaacattaaaataacatgacttgcttccaatagatatgaatgatgggttagcaaactatagtactgatggttctgacctcatctatcaaagctatgaa

SEQ ID NO: 199853 - DNA, 403 bp, Glycine max
  unsure (1)..(403): unsure at all n locations
agcttgactntggtttagacatgattgattcatgatttgggacttgtaggaattgatttgggcaagattggatgagggaaagtgtgattttcgaaatctgcacttatgcagaattttgctgtcaaaatgggtgcagcagaattttggctttgtgcanaaaaacgcttgtgtgtggttggctgtgggaagagtagtaccgaatgagttctggatgtttgctattagatcccaacggtcacaatgtaggcttatgtactaaagacttccagtaaaattttcgagtcgatccaacggttaatgaaccggaacgagggaattgttactgggatctttaagtgagaaaagctgcgatttggttgggtttttctttggcagagttttctgcctttgctctgttttgctt

SEQ ID NO: 199854 - DNA, 439 bp, Glycine max
  unsure (1)..(439): unsure at all n locations
ctaagcttgtagaggcttagagaatagtagggaaaagcccagaaatgcttgagaatattgagtgaaatctacataggtttagaataatgatgcaacctgcagaggcttaagaagaatactaagaaagtctaaagaggcttaaggagaaaaaatatattgtattttatgcttgtgttagtggaaatcctacagttgtagggactggatgtaacattgttgcccaagatttatgggtgaaccaatatagttttgtgtgtgttgtcttccttttgtttatgcttcttatacatgtgtacgctctatattcattatatntacattgaaatttagttaacagttttacacttcaacaaagcttttaaaaaccattttacttcataagaacacatcattttaagagaaaaatgattatgatagtgaaaaatgatatgagtatttt

SEQ ID NO: 199855 - DNA, 430 bp, Glycine max
agcttacaaaacataggcatctctgcaaatgctgctcctcttgctgcttccagagctcttttcccgaagtaggtgatggaagcttgcttgtggggcttctatggaggctggatctttgagctttaatgaggtcctttaatggtgattttccaccatggagatgcagcggaagacaaaggagaagaggtgagaggaggcaccatccactagggaataagcaatggaagaaggagcttcaccaccaagatgagccttggataagaagcttggagaggatgcttcaatggaggaaaagaaagagggagagaaagagagaggggggagcactatattgaaggataataaagagagagaagttgaactgtgagttgtgtctcacaagactctcattcataaaagttacaacaagagttacacatgcctttattta

SEQ ID NO: 199856 - DNA, 349 bp, Glycine max
  unsure (1)..(349): unsure at all n locations
gcatgcanagcttcanaaagacaacgaacattccttctattctctcctcaagatcttggatgtggatcatcaaggcagctataatgtcactcatgacttcaccgcaataaagactaccaaatctataaacggacctaatgaattgaagtcaatatttcactttgggatgaattatataaaacgaaagatgtaaaagccacagttgctttccaccataaacaccgatttatgctggaagtgacacatggtcactggctcttgctctagtgtaactcccgcccgaacgacacgagtaatgataagaataaacgcatacgttcgtgatgagcgatcccccacataccaaaaa

SEQ ID NO: 199857 - DNA, 412 bp, Glycine max
  unsure (1)..(412): unsure at all n locations
agctngccaaggttaagctaagcccaaattatttcgagttgaattcagctaagcttcagcttgaacgctaagcgacagcttatccgtggctaagcgggatctattgtcgccaagtgcaattccttacggctttaattgaggtccatgatgctaagcgccagtcatggtagctaagagagattctttgtggcaatataagcgctaagagagtacctctcagctaagcgcgtgctcctttgtacttaagatgcatcattttagctaagatggccagggccaggcttggcgagagttgcaacttttctaatctacaggtctcactaaggggacgtactctcgcgctaagacgagtttctgttaaaaaaaanttgtttttgaatttgaaacgtcggctaagcgcacagtgttgcta

SEQ ID NO: 199858 - DNA, 168 bp, Glycine max
aaggaaagaaaaaagaagaaacccacaaaaggaaaaaaaaaacccacaaaaaccaaaaggcaaagccggacaacaacgacacaaagccaagacaaaaaagagaaccacaaagcccccaaaccaccaacccccacacagcccccccacaaaacgaaaaagcaaacaacc

SEQ ID NO: 199859 - DNA, 167 bp, Glycine max
ggacgcgaaagcgaaaagaacccgaaaaaacgaaaggaagacaggcgagagagggccccccaaaggggcagagagcaaggcccaagcatccagagaaaaggcaagacccgacacataaagagggcccgagccccaaacaaggggggaccaaggcggacaaaagcagc

SEQ ID NO: 199860 - DNA, 392 bp, Glycine max
  unsure (1)..(392): unsure at all n locations
aactcaagccttgggtttatttcaagtagttaatgacttgttttatcctgttggacagaactcgagaatcagagaggatgctcacgtgctcactatatttcttcttaccaagatttaatatgttctgtctctataaatcttgataactaaattgagagtaaagattggattaggttattttttaccctctttgacatgccattagttccctctagtccacaaattttgattataaagtacattaaccatggtgatttagggatcaattcatgtggntcagtgacttgaatgtggatcagacactgacatcaatctatgtagatgaatgctatataaaaatcatggactataggcaccttggataactcatatttgaatatagagcacgtgtt

SEQ ID NO: 199861 - DNA, 388 bp, Glycine max
agcttaacaccggtgattgtgcggttcttttacggcgtaaatttataatgggctctggatatgaggattgtggcaatttctagaattgcttgttaggatctggcttttaatgtattgcagagggggtatgatatggtattctttaatcatatgatttctgaaggatatatatggcaattatttaaaactaactatgtcatgtcgcataactggatctttttaatgtcttttctttttgtaaaataaatatgatgttgttttcaaccaatggagcttacgcaccatgatctgatatatttgcacaattggcatgagcgatattttttcattttcgcacaaaagcgccacgataatctgataaatatcgtctaaaggataattatcatat

SEQ ID NO: 199862 - DNA, 452 bp, Glycine max
  unsure (1)..(452): unsure at all n locations
tagcttannaacattcatattccgacattgttgaatttaaattctcattactatgagaagtacaaaaaatagaggctcttataaccctgtgctgattatccaggaatgctctaatgattattttttcctccccaaatacctatttttttttcttttctaagtaatttcaaaaacaacactttcgcttagcaaaaattaggtctcactaataaaaattcaccttgaggcgaagggagtctgaaggactccttcctcaacaaaaagtaggggtcgttgagaaaaagcattgatacacgcaactttaattaagacattctcattgagcaaggtgatatatttgctaagcaaaactgaattgaagaacaacataagtgcctccagaactcctctccattatgcttcattacctacgaaggtaccaaaaggtgaataaaagcctataatcacctaac

SEQ ID NO: 199863 - DNA, 451 bp, Glycine max
  unsure (1)..(451): unsure at all n locations
agctngatttgctttgacacgaaactaataattgaatatggggctgaactaatggttttgctggggaaagcaaatatttcatattccagctgaaggaggttattcgctctggtctagcatcagcaaattaactatagttttcttaattcaatttcgccgtcggctcatttctaaaacagaatttgactttatgttgtttttggcaagtggggagtcgtcaaattaaagtaacataatggtgggcaaactcctaggagagaggttttcttttctatgatgaaacacgtaaattcgaaatcgacttaattttatttttagtatctcatgtattataattattcaatttcagtctttaagatttaattgtgcaaattgggtcttcaagtgtcataaatgtgttattttttccccaaaattagttggtcaattaggctttatgatcacactacat

SEQ ID NO: 199864 - DNA, 396 bp, Glycine max
ctaagcttactgtagctcataagggcttaattctaaggttatggctcgtcatctccataaagaccacaatgactcgtcttaccctcgaaaggttgaccagagtgatggatgtggtatggtaagggaggctagttgcatattacgctttgaagcattaattgggataatgtgaagaaagagtcaatggatcatgggggaaggcgtttgtaccacgtcagtgccaaccctttgagggaggtgggaaagaccttgcacatcaccgtgtcatcattagagtactaattgactcgcatggtgaatatgtctaagtgctcatccagatctaaggcatcatcatatcatttgatgtttatagggattcatgtggcgggttatgtatccatgatgccatccatg

SEQ ID NO: 199865 - DNA, 457 bp, Glycine max
actcagcttgtggcctggtgagatcacttgttggttatgtacaattctataatcaataacctagcaaaatccaggcttagaaaagaaagagaaaaccaactcttcaagagaccatgcttcaatatatggcctagaatgaccaaagaatgaagttgttgtcccaattgaccaacatacaatccctcttatcacaaagaaagtcaagcaaccttcacaacctaaaccaaatcctaagaaggaggatgtcaatgctgtgatgactagaagcaagatgattcaaaaggactccgaggagaatgaaggttctttcccaaaaactgtagatgacatccttctaagaagaaccaagcaactatgaaagtaacgttcctactgatgggaatcactggcaagccagaatggtgagaacgacgtactgacacctcctcagataagtgttcctttccttctcaaatga

SEQ ID NO: 199866 - DNA, 405 bp, Glycine max
agctagcatcagtataacccttctatttctattcagagtctccataaatgaggaattggtctttagtgcttcttaagtacttaagtatggtcttaacaactttccaatgatcctcactcgagttcgcttgatatcgactagttacatgtagtgcataagcgacatcagaatgtgtacaagtcatggtgtacatgatagctcccactgcactagcatagtggactctactcatgtgttctctctcttcaggagttggtggacaattctccctactaagagtatattcaacacctacaggcaaatagcctcgtttggaattatgcatgtaatatctctttaagatagtatcaatgtacatagatcgggagagcccaacaacctttatattatctctataatctttat

SEQ ID NO: 199867 - DNA, 455 bp, Glycine max
agcttgttagagtatattacaattaagataaaagtcctttacataaagaaaaaatatagaaataattaaataaaataatatataaaaaattaaataaaattaaaattaaaaatattaatttaaataaaaaagtcataaataatttatgacttcaaaatcccatttaaaagaaaagacgaagtcacaattttttttacgacttcaatagagaagaaaaaggttgtaaaatgaattacgactttgaactgagaaatcgtgagatatactacgacttatttgtttttgggtgtttttgggtatttatttaaaatttatttagaaacaaattacccattttagatcttttcgcctgaaaaatgcaattcggaagagattgatggtagaaagtttctcctcccaacaactatcttagtatataagagaccatatgagagtttcagaatcaataaacaaaa

SEQ ID NO: 199868 - DNA, 425 bp, Glycine max
  unsure (1)..(425): unsure at all n locations
ctcggcttancgcgcgactatcaacaaataatatttgattaagttacctgcgcttagcgattcaacctcgcttagccacaggtaattcatcaaaaggatgagtgttcatcctcaaaagatgaactcgcttatcgcggtaagcgcgcttagcgagttcttcagagaaacacttacatacaatgagtattgatgaaatcgcttagcgtagcatgcttgcttagcgagttcatcacgatttccagaaaatgcagaaaacaccgctcgttttcttgtacttttcaagcctctaaaaggcatatcacacatgcaatgtgtgcctcatactcaattcgatatacaagcatgtatagccctactcttaaactaattctaacaaaacataagaccccgcaaaatctaaagctactgttaatggcttctatcct

SEQ ID NO: 199869 - DNA, 311 bp, Glycine max
acacgaaaagggagccgagcgcaaacaaaagaaaacgcctgcactggacaaccaaaaggtgaagaaaagcaagaaatcctcacatatgacacttgcaaacaatcacaaagaaaacacaaaccagactgtaccaaaacaagcacaaacccacaatgcgcccaaaggaagccaccatcggaactagaaatagaacgacaaatttattgcagcaaaacagcccctgagaaccaggacaaaaacctcaagaaagaaactcgagaacggtacccccaccgccaagcacaataaaaaagaaggctcccaccacgaac

SEQ ID NO: 199870 - DNA, 334 bp, Glycine max
agaagcacaccaactggaacagcctaacatacacccataaactacttgcctaaatcaccacagtaactaagcacgagaaggatcttatactcttgactcatcactattaatagaaagagcattgacaacacacattggatcaattgatccctaactagaatgacagcatcgccactgggcagactcggctcagaataatcgtatattaccactctaaaatttcaaaactggactctcgggacaacaggagactatatagaatatgcaacctgaaaccacagcgtcattaccgtgcttgacagaaatcacttacagaggcagaagacatcaatga

SEQ ID NO: 199871 - DNA, 344 bp, Glycine max
  unsure (1)..(344): unsure at all n locations
agcttgcttcgcaggctgatgaggaagcttcttgtgtgctgggntngaacgaccatctcaaaaaccttaaagacaccctatcattactccaggctgtcctgttggacgctgatcaaaagcaggagaagaaccatgagctgcgggaatggctgaggcagatcaaacctgtcttctttgatgccgaaaatgttctacatgaatttgaatgccaaacactgcaaaaccatgtatcaaacctcatggaccaccagagaaaagaaagtcacttcttataacttctaatccacttgattttcgttacaaaatggctcaacaaatcaaatatatcagcttgagactaaaca

SEQ ID NO: 199872 - DNA, 377 bp, Glycine max
  unsure (1)..(377): unsure at all n locations
agcttgctaattaacctgaagttgagagatattgtattttcaacacacataatgaaaatactaattatttattacctatacttaatagaaaatacgtataacactacaaaataaccataaatggggagagtttgattcaatttatacaagtcttatacacaaaagttagtcatttttaccgactaacaactccaccatatttatagatttgcttggcacttagcctcaagtgacaatgacatgcagtgaactatgtacaaaggtgtatgctacaaagtattngtcgcatgatgagacacaataaacaatggtgacctataacttgtctacacaaaatatgcggatactcaaagagaagaaataaatgggaactgaac

SEQ ID NO: 199873 - DNA, 401 bp, Glycine max
actaagctctcgatattataccgccgaacgggctgcgaaggatatatcttggccattagaatttctcgagagcttgtgctgtttaatttctagcatctcgatatattacgtccctgaatcggtcatcagtgtgaaaattcatgaccatttgaattcatcaagagcttctattgttcaattctgagcgtctcgatatattatgtccatgaatcggacatctgagtgaaaagttatgaccatttgaatcactcgagaggttccgctgttcaatttcgagcgtctcggtatattatatccccaaatctgacatccgcgtgataagttattaacatttgaatttctcgagaggttccgcagttcaatatccagcgttttgatatattatgaccccaaactagaca

SEQ ID NO: 199874 - DNA, 396 bp, Glycine max
  unsure (1)..(396): unsure at all n locations
agcttctcccccaattttttataaataggtggagattttaagtanaaaagggttcagccccttaggcacttctctctctttcgaatttgcttaggaaaattgtttccatgaagaaaatccaagcctaggcgcttccgtaacgtttctgtgagtgatttcgcgaaggttttcgaccgttcttcgacgttcttcattcgctcttcatcgctcttcagtcttcaacgggtaagtacctcgaaccaagcttttcgattcattctatgtacctgtggcggcccacattttgattcatgtatttttattctcgttttcattcgctatctatacccccttttgacgtgcttcagtcatatatataagttgtttctcgactaatctagaaataaaataaaattt

SEQ ID NO: 199875 - DNA, 437 bp, Glycine max
  unsure (1)..(437): unsure at all n locations
taaagctttctccgcgaggtacgtaggtcaacttcgtgtattcttttttccatgggtgttcatgttttattgatgataataataataatacgtcttcaattgtagtattgctgattgaggtacgaggaaagcttcaagtttcatgccattttgttagatctcacagccattgtcactgtttgggtttgaggtaagcttggtctctttttcatttgtagtatagtttactctttttcactgccattgtctctgtttcagtgggtgttcactctttttcattgtcactgccattgtcactgtgtgtaaaagtaatatagtttactaatttgtcctgtactttnttcgtcaatgttgtaaatagtggctaggtatgaagtgactgattgggttagtgaaaactgattgtgtagggtctgagcacaaagatggtccatcta

SEQ ID NO: 199876 - DNA, 426 bp, Glycine max
  unsure (1)..(426): unsure at all n locations
agctcatgtagcactagtccactactttatcttattttttngcagatggaagttgttgtgctcaaagtctctggatgaaacaacaacttgaagactttggagtaatccttgatcgcattcctttgaaatatgacaacataagtgttatcaatctatctaaaaatcctgtcatgcattctagaaccaaacatatagagataagacatcattttcttagagatcatatatcaaagggtgattgatgcattgagtttattgatagtgagcatcaactagctgacttcttcactaaacctcttgctagagataggttcttcttcattaggaatgaactagatatcttagatgggtctacgtatgaatgagggttaagcttatcacatgcaacctgttatatatgctcaatgggttattaattctctttaa

SEQ ID NO: 199877 - DNA, 475 bp, Glycine max
gtacgcccttgcccttccaacagcttgagtggaacttgtatttggctcctctaaagcggggatcaagcactttataaaataaagtgcaataaagacattaattagaaaatcaacaattgatattataattaattttaggttttgtcaaatatgtatttgattttatcacaattttcaaccatcgattttttaatcaatgattgtaattgcactttatcctctaaagtacacctcacttcagaagagccaactacgtaaaccttgatacaatcctttgatgatttgatcttgatcccagttcacacttgaaagcataaaagtaatatcgtaagagttattatcacaaaaattaagagttctttcataaatttggggagagggagggtttacattatcaccattgtattctaaagaaacaagagaggaaagaaagtatctacaattgatttttaaataagttaaatatagtaaaagt

SEQ ID NO: 199878 - DNA, 400 bp, Glycine max
agcttgtagcccttggctgctgtatgatttcttatccaacaccagtattaccacttggtggctcaatgaggatactcttcagtaaaataagataatccacatgcaacaaaaacaatacttgaaaactcatggttatcccaaattaataccaacaatttttttttcacacatccacttcctagtatttctccacaaaagttgtagcagaaactaacttaacagtgcatcattcacctggtatttaaataactgctatgaaatttagtaaagttgaatatgagaaaactgcacattttatttcaattagggccacatgcttacatctaccattcatgtgatggccttcatacacaagcgacatagctatcataaaattacagaatgcactcacaaatagatt

SEQ ID NO: 199879 - DNA, 357 bp, Glycine max
aatctgatgcacacgcttagtttcccccttctttcctagttttcttaaggagtcaagtttgaattcttcacatcatttctccaacagttcattgtggcttaatgggcacttcaaatcttaagattccttacaagctgtggcaaaattctgttccttcaaggcatgttggttattgctgagtttttcctggggaacattgaccaatacttgttaaaaaatgcagaacaaactttatataatgtgtgatcaactggcttaaccttctaaagtgatcaattgataattaacttgcagtgtgaataaactctttcccctacgaacttttttccattgagcttagtatctacatcaaaaatg

SEQ ID NO: 199880 - DNA, 412 bp, Glycine max
agcttagcttgaaagcgcaacttacataatgaatctgggcttaacgcaggatggcgcatttagcgcagctataataaattttcacagagaggaagtgacacttagcgcatcatccacgctaagcccactacttaaggtgcaacttacagtgaagatgttgggcttaacccagcgatgtgtgcttagctgaaccattcagccaatcaatcaggggtctttgcacttagcacgagcaagctcgacttagcgtgtgaagagatggcgcttaccgcaaagtttgcgtttagcgaataagcaatctaacaatttttctgagtcattttctgcttatctcttcacacataatttagaaaccccttttggtcttactacacaagcctaaataaatcacatcacaagcaagatgtctaac

SEQ ID NO: 199881 - DNA, 468 bp, Glycine max
  unsure (1)..(468): unsure at all n locations
tgcttctacaatctncccctttgttatgatgacaacttctgatatcaagaaacacacatacacactntttcctagtcgatcactcacataaatttccattctccccctttgtttttgaatttatgcttctcttaaaattaagttgattactcatgtgagttcttgatttaatccctatttctctccccctttggcatcaacaaaaagccaaagtgcgtaacaagtttgaggcatacaaatacaactaagcatccacacaacattcatggaaaaatataaaccaaatcatgaagcaagatccatgaagcaagaaccatgaatatttcaaatatataaagaccacatagtcaaataacataattaatatttgttcaaacataccatgcaaataaagaaatagtaaattgttcaaatatcttaataatatagccaaatacaaggctggaaatcaagtactagtatataaat

SEQ ID NO: 199882 - DNA, 371 bp, Glycine max
agcttgaaggaacagtggatgcctttgtttgttttctaactcccctttcatgaggcagaacacgcacgagtgagagagtatgatcgtgattcagcaacacctccagatcttgcctttgtgcacaatacaagcaaatgtgcgatcctgacctttatgctgcacacatctacaacaaacttcttaaccctcaacattaccataaaacagaacatagcatttactacctctatagcatcttgtacattgcccggtggaggaattatcctaaccttagatggacgattcctactaggattcaactataacaacctattttacaactgtgttgggataagcgaccatacttcatccccattcttttccactctgca

SEQ ID NO: 199883 - DNA, 306 bp, Glycine max
tgatgctacactgcgcctctcatctcagactaagcacatgttgtctttagatgagtggtgatgcacaaagctctaagcgccacctgccacactatggcccagatgcacactggattctacaacttcaagttgggcttagtgctaggctgagctaaaagctagtgttgtaaactaaaatgtcacatgagcacgctaagcacagatgcgcgctaaacgcgccatacaaatgtcatgttttaaaaagtataggcacacgaacttgtgttgctacctttgcaaccatacctatgatacctatcatcccta

SEQ ID NO: 199884 - DNA, 456 bp, Glycine max
ctgtaggattatggggtacccatcacatgtggtactatgttgcggtcgggcgatggtgcacaacaagttttccacatccacaatgcgcgcataaacccaccatcccctgttgcccacctccaactgagctcacgtactcccacgtagcccatatcctcgtttctctcaacccgggtccccatcaatcctcccaagcttccacaacatccatgcaaaacacattcaaacagcacaagctatcacagccaagcaaaacagagctgtcataccctaatttcgtccggcgacctttgctcgatgacgtgcgaccattctttggtcctcgtgaggtgcttggcacccatcattaggcaatctatgaaattccaggacatgccgaaaaaccaaaaaaatgttgatgcacaatctgtaagtttccgtgacacatcggaaatcaaatggaagcatcattgcata

SEQ ID NO: 199885 - DNA, 251 bp, Glycine max
cccgccactccgcagcacgtgctgaatattcaactttgaatgagccatgtgtgccgttgctcctgaggatacaatctaaatatgtacccgtgttaattaacaaagggattttcattgaggaaacctgaactcctgccgaccctgtctgacttctcttaaacccccccaaccatctcctactctaccttcatttccaatcatggaaacatgctgagtcaagaatttctgaacacgccattaattatacagct

SEQ ID NO: 199886 - DNA, 372 bp, Glycine max
  unsure (1)..(372): unsure at all n locations
agcttaaagatattgtagccgattctcaagttatactagntagccaacggtgcaaacgagacaaataatattgaactcaaaatcatttgactataaccagttggtgatgaaaaaggatgaagcctcaagccattgatggttatggagaaatagctcaaaacgcctattaaaagatccctttgtcaatgaatgtcaacaacaaaaagcataatcatgttttgtatcccccattccttactatattcactcttcgcggctgccactcgcttgagccaagcataatactctagaagtgccttgggccaaatgcgaaagttaaaagggaaagtttgaaccctataccagtcaccacttggggaaataatgccattt

SEQ ID NO: 199887 - DNA, 474 bp, Glycine max
  unsure (1)..(474): unsure at all n locations
tggctctggccatcanaaccatctcattcttaattacctctatcttagaacagatgttctggtcaagtaagtgcttttctgcatcaaacaaatcaaatttgatcttctgatcatctacacccatttccattttacctttccccatatccaccacacaattggcagttaacatgaagggaaggcccaaaatcagagggatcttagcatcctcttcaatgtccatgacaacaaaatccgtagggaaggtaaagtgttgcaccttgaccaaaacatcttcaattactccataaggccttgtaatcgatctgtctgccaactgtagtgtcattctagttggcataatttccaactctccaattcttctgcacatggagagaggcatcaaatttatgctggcccccaagtcaataacgggctttctaactgacattgaccaatagagcaagggattggacactccttgatccttgtatt

SEQ ID NO: 199888 - DNA, 461 bp, Glycine max
  unsure (1)..(461): unsure at all n locations
taagcttaacactgaaatgagacactctaagagctcaagctaattccttattctacacatccattcctagacctgtgatagatgtgggattgtgcatgggctgngagaatgcactgttaatgatgagatacctacagccatgaatgagattaactttgtttggggaagcaactattcttataatcagtaccccaataatttcaatcaacgatagggcttcaagaagaatcacagaatgtttaggtcttaacctatgcaaaattagaggcctacaaaagaggagacaacccactcttcaaganatcatgcttcaatatatgacccacaatgatcaaagaatgaagtaggttgagtcctaattgaccaacatacaatctctcttgtcacaaagacaactaagaaaccttccttataagactgaaccaaatcctaagaggaagaatgccaaagctatgatgact

SEQ ID NO: 199889 - DNA, 428 bp, Glycine max
  unsure (1)..(428): unsure at all n locations
agctttgaatacattctatggaccctgatgtgtccatccttgctnagaatggctncatcttcattcttctaccatcggtattctttttcttgtgatcaccgagttttgaccgatcgtttaagccataatctcacttaatcaatgctaaaatgaatttcaaccattcgattgtgctgtaatcttgtttaatcacctttaaaataaaatccaactgatcgtttatgctgtaacctctattaatcataaacaaataagtttcaaccaatcatttactttgaaagttctcttttaataagttgataataacccaagtgaaaccaatgcttagatcacactcacacatcaagctttgtccgcaagaaatacgttgaatctgtcaaagtctaacgccttaacggtctcctttttactttatcagtaaaacaaac

SEQ ID NO: 199890 - DNA, 382 bp, Glycine max
  unsure (1)..(382): unsure at all n locations
atgatanaccagctcggtgttggcaaatggaagcttagtagaggaagcatagtcgttactcgaggtaagaaggaaggctccttgtacatcatgtagggaactatatgcaaaggggagacaaatgttgctcaagatgcagccaaagaattatggcacaagagattgggtcacatgagtgagaaaggtttggagtttctagcaaaggatcactttccaaacataaagtgatgtaagctccatgtggagcttgaaggcctaagatcttcttcatcaatggattcctttgcttcttggaagatgaatggcagcggagtaaagaaggaagagagagaggagacgccacttcaaggagaagatgagtctagaagaagctcaccaccat

SEQ ID NO: 199891 - DNA, 246 bp, Glycine max
aagcgcgggcccacgcaaagaaagttttcctgtgaaaccacacccaatggccggctagagtccacaacaaacacacacccataaaaccaaacgcaactgccgaccaaagtttatgaccaccgaggagcacaaatctcgaacctaactcacacgaaacctacatccataaaacggcccccttgcaaaacaccaatgacagatggaggaaccaattgtatgggcctctcccgcacaatcagcacccca

SEQ ID NO: 199892 - DNA, 422 bp, Glycine max
agcttgtccaatgctttcccataagaacttttttgatgtcgcacataagacggagtggccccgtaaaaaaccggccaaaccaagcgacccttcttcattatgcactcaaggatcatgacaagctcttcaagacagtaagttgaggaagcatagttttcagagaaaacaacaatggcaattcttgactgctgaattgccttgaaaagagcatgtctaatctcttcccctcttctgagcccctcatcatccatgaaggtgtggattccctggtcacaaagagactagtaaaggcttccagtgaaaccactccgagtatcatcgcctttgagactgaggaacacattataagtccactcccatgtggaagaagaggaacatgattgctgttcatgatatatgatactactgaaacaacaaccttg

SEQ ID NO: 199893 - DNA, 480 bp, Glycine max
gtttgagtaattgagtctgagcagtgtgtaacctattttttttcacacatcttttccggtacacttgtgatttgaaccaagttgagaatctcagaatcagcaaagtacattaccggttgcccgtttgctagatgggggtttggtattcgagaatcatgtccagacgatgaagagaggtcagcatcttcttcccatagcatccccggcttggaactgtttccttggccataggtgatctcattattctagatcatcagcatcgtcttcatcatcatcatctacctccacttcaccaccctctgatatccacattcatcttgctcaacgtaaattctgatgagggaaagacctataaatctaacatttatgcacaagctaaccttggtgacttgtgaatgcagtcttgcactgcggacaagactggctcatatgtttcagctcatactcgtaacacgaatgacaaagtgggaagccacactc

SEQ ID NO: 199894 - DNA, 287 bp, Glycine max
  unsure (1)..(287): unsure at all n locations
ctgcaagctcaccaaggacgaccggattttttccttnganagccctatagagccttgtttccctttccttgttttgaagctcactacaagccttaaatgaaaaaccatgatatcaccatatccttaaggaattttggagctttggaattgatttaggaataagtgtggggggtttttgtttcattggacaacttgtttgtcggctatgcttcatgatgtatttagggccatactcgatgtacattgaatattggtaaaatgttggacatgctgaatgaaatattggt

SEQ ID NO: 199895 - DNA, 314 bp, Glycine max
  unsure (1)..(314): unsure at all n locations
aatctgttgttatgtcttttctatgaatcctatattgttaatgaaaacaatnnntaacggaaggtttgagttggagattttaacactagaacattgtataagtaatggtaaagaaaaataagtacttcatgggatgcaaggttcacaagatgtgtctaccatgcaatgaatgtgtcaagggcttgcctgacatactaaatctttgacgtcaaaaaagggacttatgtgtcaccattgtaaactgttgcaatactcaccttcaccagatcatcaccataaggcacgttgtgtatggtggatactccatcatatat

SEQ ID NO: 199896 - DNA, 328 bp, Glycine max
  unsure (1)..(328): unsure at all n locations
agcttcatgatgaatcgggagggagtcagttactttttaangaggacaaaaagcgccaagatcaagaacaattcctgataacaaagatgatgatctcaagaatcaaagaatgatttcacgatagaatcaagaacacttcttggttcaagaggaaattcgacttttaagaattaagtttcacgattctcgcttcctagaattaagatcaagattcgttctcgaatcaagagaggacttactcgggataagttttaaaaagcttttttctaatactgagtagcacatgaaattgtctcacaaccttttaccaaagagcttttactctctg

SEQ ID NO: 199897 - DNA, 431 bp, Glycine max
agcataacacgactttgtgtgattggtttaaagatacaatctttgcagatgagaatgcttcataaacattaagaaagctagcacatgggcctaaaagaaatgttataacctggcaaggatacgacataaacaggtattcattttacacaaaagcacaagatgacaaaagtacaatgcagaacaacggggtcaccctaagggctgaatctcaacactttgctactgtcaatgacaccaatccctactgtgtagcttccatcccttactttgggttcattgaagaaatttgggagcttgattatgtgaaatttacacgatgtgctttcaaatgtgaatgggttgacagcaacaccggtatgcgcaccgatgatataggatctgccctggtagatctaaagaaacttggttaccacaatgaccctctcatcatg

SEQ ID NO: 199898 - DNA, 431 bp, Glycine max
  unsure (1)..(431): unsure at all n locations
agcttacctaaaacctacctcctgtactgtgatcctttaagagaagggtctgtgcagagcattccccttatcaaatccttagcatattcaggaatgcgatcccaaggttccaaaggaaacttcagggatgtagcttaaatggcttcagcgacttggtcttccccgaaaactgaggcatcccactcaacaaagtgtaaagaataacactagtccttcacccatcagcagcctggttatatgcaccagctagtacctgtggactcgaatggactccccattaacccatgcaaactctgacatgcttagacaaataccaatatttgaatattaataccacacatgttcatgagactaggagtaaccaanattgaaaagaagattatgatatgcaaacttgaaaggaagccggggaagtaagtaccgcttgattc

SEQ ID NO: 199899 - DNA, 439 bp, Glycine max
aggtgccggaagagaatctctgtaactctttttttattatttctgatagcagacgcaagaaaagctggtgcaattgcccatccaaccctccaacctgatgatacatgacagaccaacactgagttaaaggcattctttataacaatgatgagaaagctaaaaaaacttccaatgtagtttggttcatacagctttgacctgttacctgtgacgctggatgattttgacaaagaagatgttataacagtctgctattgcattccagtaaatgaggctagggatatatgttttaggttgtcatacgttatatgctcatatacctacattaaaagaaggcaaaacattacactatttaaatgcaacacaaatattctagtcttgcaaatgtgaaattccaagtaattttccttggtgttaggcaaattcatacagagaagta

SEQ ID NO: 199900 - DNA, 374 bp, Glycine max
cgggaccttaagccacctgcggcatgcaactcttatcaaggaactctctttgtttttaatctccttcttccatggcttagtccctagaggatggcgcctcctctcacctcttctactttatcttccgctgcatctccatggtgtaaaatcaccattgaaggacctcattgaagctcaaagatctagcctccatagaagcttgacaatcaagcttacatcataattcttagagaaaaagattctaagctatatcttgaaattgagacaaatgctaaagaaaaagctatctctctcaagaactctcaggagtttgaaaaaaaactaaaagatcttcaaaattattcgaagaactgaatgaacctcatgattatcaa

SEQ ID NO: 199901 - DNA, 455 bp, Glycine max
  unsure (1)..(455): unsure at all n locations
nntgttctttttaaaatgagaagttctgaacttatcacgttatcttcaaaccttgnggtggatccaagtgctccaatcattcatttgcatattcatgttttggtggcatactcaccgttgtttatttctttaggaatttcatcataactaagaaaacaccaaggcacccctataacactcgatccagaaaaatggataatgaagagggcctgcaggaacagatgaaggccgatctatcggccttaaaagatcaaatggcttccatctcggaggtcatgttaaaactccagacaactatagaggataaagccaccgcaaccgcctccagtacagttagggaagcggagccggtgctgtagcccgccttaaattctggccgagacagaaacacgacagtgtttggtcggaggtatagtccgcaagcttacccctatggcttggctccggacttcact

SEQ ID NO: 199902 - DNA, 342 bp, Glycine max
ggcagcaagctctagaaaagggatcctctttctaaacttctagatgaattttaccctttactgaagctaaaaatagtggcgaggaacgtcgagaagcagatcccgccggagccgtactgggcattcttcattttgtacacatcagtgtcactagaataatatcttctctcccggtctctcttttcgcttctctatttctttgctagacaagtgttttttccattaaaaaaaaaattgttttcagtggaataacaaaagaaaagaaaaatggatttggacaggaaaacaaaggcttgtgtgagagaaacgttaaaaccttgtttctgttttttttcctcttcg

SEQ ID NO: 199903 - DNA, 449 bp, Glycine max
  unsure (1)..(449): unsure at all n locations
tccacaatanaagtggagctgcaatcaatgctttctctcaagtaagaattgctctttcttgctctataaatactggatcatggttcagtgcttggaagcatagcagcatcatacaaagcattgaattcaaaaactaagttcatttcttgtgctttgctttattcctcaaaaccaaacatgtcgaacacatgcggcaactgtgactgcgctgacaagactaactgcacgtaagtgcttcatttgttttctgcatttgtgtgtaaagcaagatttacatatatatatatatatgtagttcatgttacaattagtcaattaccatatttgatctctaaaggattaatctgtataggacatatattatgcatacagtagactgaggtctgatgtatagcttgcatgatacatataaaggctggtntacttatatccttacatactatgccatg

SEQ ID NO: 199904 - DNA, 419 bp, Glycine max
agctacgagctagaagaggtgttgtctctatatagccgcattagtttggttgatacgatcacctagaaaagatgcaaaaatatttgatattccttctttgcgtgcgcggaaagcagtaatcacattctgtatacttccccttgttttatcttttacaaatcaaaatagatcctgggtgtatatgaataagttaagcactcaatctataaaaaggttatgaaataaaatctgtgtatgatcttaaatgcgaaatttactgaattaaatccaaaagttctgatgttcagtatatatttctgcttacatggccattattttacttatgcaacttacagcgtctctggctgcagtgtttacatgagtggctcaacttttagcgtatatataacaataaattgtgtcttttctatttttggaat

SEQ ID NO: 199905 - DNA, 133 bp, Glycine max
  unsure (1)..(133): unsure at all n locations
actcagcttgaaactatgnaccatagatcgtgggttgtaaatanctccaaacttcttccctagcatagcaagattaataacatgtaaatgttgacatgggaaaattgatcccaaggggtcaatcctacaaact

SEQ ID NO: 199906 - DNA, 203 bp, Glycine max
tttggcttaaagaccagtacctcaacctcaaaagcgtgcctctaaaggctaaaacacaaccggaacctggttgactctattaaaaatgggacgtctaccccaaagaaaaacaaataaagaccgtaacctgatggagagaagataaaataggaaacagggtaaaataacaccaagcgaaatgaagctgcaaaacacaaaacccc

SEQ ID NO: 199907 - DNA, 458 bp, Glycine max
  unsure (1)..(458): unsure at all n locations
nntgcaaatttcttcaagttttcgcatagattcatctttatttttgcactcactccgtgctttttcaagctaaagccaaagtgtaaaaggaagacaacattaacttgtattctagaacatggtgaaatagaaaataatttttaatgtgttcaagtaggatcagcaacctaccattgctttcatcttttgaacttcacttgtatcaatttgcttcttaacaggacctaactcaacacccctcactctagttgcaaaattaagtgagctcagtgtctcacctacgtcctggtctgatggacttatttgtacaaacatcaaagttttggagtcacctcctgcaatgttttacgaaaaataagcaaggaatgttaccaatatattcttgcataatcaggatcttactcctcanaaacacaaacacacaaaaagctgaagtgactagacatacctagtgagtc

SEQ ID NO: 199908 - DNA, 481 bp, Glycine max
  unsure (1)..(481): unsure at all n locations
ctggacagggcgaaagcctagncttaagaacttagtagttactttattggatactctgaacactctaggggctataatttttatgatcccacacttaagactatatttaagatgggaaccacacaattttttgaggatgttgagtttggggggaataaggttagaaacattatttttaggaagaattggtttgaattcctaaaccaattcatattactgcttctgacaatgcatagattattgtcataccctaatttcattcgggaactattgcttgatggcatgcaacctttgattgaccgcttcaaggtacttggcaccctttgttacgcaatctgtgaaattctgtaacgtgacgaanatcaaaaggaagtattgttacgcaatccgtgagttttcataactcttcgaaagctaaaaaaggagtaattatatgatccgtaaggttatgtaacctttcanatagtaattntcaaatctg

SEQ ID NO: 199909 - DNA, 429 bp, Glycine max
  unsure (1)..(429): unsure at all n locations
agccttgacttcagttatcaagagattattttatgtggccatggcatgaatttcaataatcaataatctatctttcaatcttctctcaacatcattcaatatctttcaactctttctacacaattttctgattcatttctcttcatctttctaaaagtttttgttcaacactttctcttatgagaaaagttctttgttcaaaaacttgtgttattcatccttttcattctcttctccctttgccaaaagaatgaaggactaaccgcctgaattcttttgtgtctctcatctcccttagaaaagattcaaaggactaaccgcctgagaattcttttgattcttcccttccccttaggcaaaagatttctaaggactaaccgcctgagatattttttgttnccctttacaaagattcaaacgacatacccc

SEQ ID NO: 199910 - DNA, 480 bp, Glycine max
  unsure (1)..(480): unsure at all n locations
atgctctattcaatggagttgacaagaatatcttcagactgatcaacacttgcacagtggccaaagatgcatgggagatcctgannatcactcatgaaggaacctccaaagtgaagatgtccagattgcaactattggctacaaaattcgaaaatctgaagatgaaggaggaagagtgtattcatgacttccacatgaacattcttgaaattgccaatgcctgcactgccttgggagagaggataacagatgataagctggtgagaaagatcctcagatccttgcctaagagatttgacatgaaagtcactgcaatagaggaggcccaagacatttgcaacatgagagtggatgaactcattggttcccttcaaacctttgagctangactctcggatagggctgaaaagaagagcaagaacttggcgttcgtgtccaatgatgaaggagaagaagatgagcatgacctgnatactgatg

SEQ ID NO: 199911 - DNA, 434 bp, Glycine max
  unsure (1)..(434): unsure at all n locations
agctnttaactntttccagcttaccctgtttgtattcaggccagctcaatatctaagtacaactacagtctgtatgcctttattgattatctttacttcgcacttccttgttccttacatcatgaccacatgatgttctactcgttttcccctttgttccactgagctgcattccatctacttgtctgataaaatttaggacaaagaccttttcatttcaggaacatatactgtgaggtagctgataatgttccaatttgacatatgatcagttcttgagagggtacttagggaaagccggatatttcattttcatttctgtttggagatattgtaatgttttataatggcagggcatccctttgatcacgcacttgcataaataaaataaaatgcattgctacatcatcatcatcaccctgtgatgttatttc

SEQ ID NO: 199912 - DNA, 424 bp, Glycine max
tctacaaggagatcaactagatgttctatgcttcttgaatgtggtactccatgacgaatctccttgggaaagacatctttaaattcctgcaataatggttgaacactacgagaaacataaatagttaactgattagaattatcactcttttcctcaggtgtatcactcttctttttcatattcctttgtggtgcctcactattttctttctcttgtactctcttttctctcattctgatttggacatcacacacttctctaggggatagaggtttaagagtaaacgaggaagatctggctattcatctgtaaggctcttctttgatacggttcaacaaacgttgcatttgtagagtgcacgcatctagaaataagcgctgagattcatccagttgatgatatacaccaccattgtcaccagctc

SEQ ID NO: 199913 - DNA, 435 bp, Glycine max
  unsure (1)..(435): unsure at all n locations
atcccaacggtgagagtgttcggatttgtgttntgaacatgatactcaaatttcacgacgatccaacggtaaacaggttcgagatcgtcgtttttctgagacaggtttggtgggctgcgggaaaaagaaagggttttgagaggagaaggggaaaaacgaaaatgaggccaaaaaggaggcagctgacttaacataactatttatacctacggtactcagcctattatttgctctatatttatttatttatttatttttactaaaaaactttttaaatttatttacgaaaaattgggatgttacacattctacgttgtaattgctgcaaggggtttgacctgtacccacttggtaaagtaatcgcccccaaatgtacggaagggttctacggccttacggaagggttctaagatatctaccccaaatgtatgatgg

SEQ ID NO: 199914 - DNA, 374 bp, Glycine max
  unsure (1)..(374): unsure at all n locations
tgcaagctgngactcggttatgttaattgttattgtnggattagactttgttccggctttattatcaaacgctgntttagtggatgtatcttcaaccgtgttcccttgnagnttntaattgggtttttggggcttaaacccttatatttcacaaaaaaaaaaaaaacatgttcatttgcctgatggccctactaataagttctgtaatttataggttcgggtatctgctgttctcacaaatgctcctttcatgttgaactcggattgtgatcactatgtcaataacagcaaggctgtccgagaggccatgtgctttttgatggacccacaaactgagaagaaggtctgctatgtccatttcctcaaagatttga

SEQ ID NO: 199915 - DNA, 367 bp, Glycine max
ctaagcttaactcccttgaagtgaacttgaggacgctatttttcattaagctatccttatgtgaaaatatcggtgtgaaagcgctacacacctgtgtcctaaccgctatgctattggacatacaactcgagttggctaacacaggaaagctaacgctgcgttaaactcaaacctcatgtgccatgctacgcataggcgcaacgcccatacaatttattttaaaatatggccagcatggtgtacccaaaaccttactatgctcggaccgagaaatggattgtctgattgtctgctggacatttatactcatttagacagtcactagccatcaagcatttaatttcatctcaaccttagaaatgctcta

SEQ ID NO: 199916 - DNA, 356 bp, Glycine max
tagcttgtgactgtgagtgcaggagtttatttctgccatatacgccatactactatcatcagtactgggctatggaatagctatgggcatcaactacgcatatatccagtttgtcacttggagacttcacgtttctcatgatgataacccaatatgaatctcctcacaagggaaacaacttcatgaaatttttttctctgtatctactgacatgatgatgacctgccacaatgactttatgaaccttgtgtttggcaatcaataccactaccatgtgggatatttttgccacataaatatcatgaaatgcgtatgcacgatagagaaagaatcagaatctttttacattttcctat

SEQ ID NO: 199917 - DNA, 418 bp, Glycine max
acaagtatagtatatcgatccctattttgttagttcttttaccactacgttacaagagatcattttcaattttttttacaaaggtctcctattgtgctgttcatataactggaaattggacactatcttcatttatataacaataacaaggtaatgttcttatttaatatacacattttttatagactattttacctgttgattactattttcgcacgtcactcactactttgctttaatttcaatttctctattttttattcaacctcctcaacatttaagtagcaaatgtgtccccaaccttctcttaaactacggagctgaagtataagggccgacaataattaatagtagcttacagccatcggtcatagctacctcatttatgataacatggcattggatacgtctactcata

SEQ ID NO: 199918 - DNA, 318 bp, Glycine max
acctgcggcatgcagctcttcgctcgaagagagcatttgtttatgccagggaaatttgtaagaaactgaataagaacatgtccatactataattataaagcatatggtaacatggtgcatgagcatgggaggcagagaggtttgaatctgcactattaacaattaactaacatctgctgttaaaaaaaaataatactatagcaacgagagcatggatttttgattgtaccaatgatgtctgatggggttaaaccatagctaagcactccgcgtgtgtgatttcctccaccaaaatctttaccataaggaaagaaattg

SEQ ID NO: 199919 - DNA, 478 bp, Glycine max
tagttatatagcttccacaaaattgagtaagcctaaatttatatgctcgagctcatgtgcatagttggacacttaaccctacttgaaagaccgtgaaaattgctaaaataagatagaaatagcttagtacaataaagtttacgacaaaaattatttacataagtcaagaaaacgtataaaaagattattatgagcctaaatataagttttagaataaactctccaaaataccaccgtaattaagaaaaattaggcatatttatatcttaaaaggatacaatatattattattaaaaaaagtattttataataaatataagctatgtaatatttaattattaaataattaaaattttaaataaaatatatttaacgttctttaatttgtccttagtcccctaatttatttatttttctttgttttgttcaactgtagctctaataaaagagatattagacaaaagaccagagctaattt

SEQ ID NO: 199920 - DNA, 321 bp, Glycine max
  unsure (1)..(321): unsure at all n locations
accgcagcagcaagctgnaggatagggggcaccatttttgtggtactaggcggcggccgggcgatggtgcaaatcaattctccacatccacaaatcacacataagcccaccatccccagttgcccacctacaacgagatcacgtactcccacgtagccctaatactcggtgctctcaacgccgggtccccatcaatcctcccaagcacccacaacatccaattaattgaacatccaagcataatgaactaacacacgcaagaaaacagggcagaggcagaaaactctgcgcaaaaacagacaaatagcacaaccttcccta

SEQ ID NO: 199921 - DNA, 466 bp, Glycine max
tgtcattgagcaggttaacgaggtcttccaagctagatttttacaaatgtagaagtactaccactaggtcaaactcttggagcatttcaaaaagaaagaactggtccatgttgataaggaataaaacgaccaagctgatgctttagcccacctagtgtgctttaaaagaccaagttagcaccagacatttatccaagatgccctaacctcccctaccaccgatgttattgaggtttgctcaagtcggattgctcccagcagatggatgtctcccatatggaccttcttggtcacctacgccttactccaggaagtggtaggagccgaataggtaagacaccaagcttcacactatgttatcattaacaatgaaatggttagaagagccatctcaaggccattgttgaagttcgttgacaaagatcacatatagtgcgtccttgatgaggtagacagaagaatttgt

SEQ ID NO: 199922 - DNA, 418 bp, Glycine max
agcttccatcagcaaatttggaagatctcttatcagacatgataggggcgtccattagttggttcccacaatggaaagaaggaggggcaagagtgttatgcttatgtgaaggatttccaaatatccctttgataggaacgagggattgtattaattataatcccatgttggccataagacagttggattaccatatgagaggtgcgccattgaaggagaccatcacgcctttcatcgtgtgaggtttcaatgaagctaatgcaaagacactttagaggatccgtaaggcatggaataaagtggaaagaaaagataaagaacttaggggaagtagcaatggtgtcataggcggctatcacaaatggttgaagtctataattgcagggataacttggctccaaagctaagagtctgagtc

SEQ ID NO: 199923 - DNA, 434 bp, Glycine max
  unsure (1)..(434): unsure at all n locations
tgctaacccatggaagctcctaatatctcccacactntntgttgtgggccattcttggatggccttgattntctcaaggtccacttggaccccatttctaccaactacaaaacctaagaaaactatattatctacacaaaaggtacacttctctatatttgcatagagggtgttnttcctaaggactgaaagaacttgcctgagatgtcctaagtgatcatctaggctcctactgtacactaaaatatcatcaaaataaacaactacaaatctacctatgaaatcccttaagacatgatgcataagcctcataaaggtgcttggtgcattagtgagctctaaaggcatcactagccatncatacaaaccaaacttggtcttgaaagtggtnttccactcatcaccctttctcatcctgatttggtgataaccac

SEQ ID NO: 199924 - DNA, 145 bp, Glycine max
aaacttcttccctagcatagcaagattaataacatgtaaatgttgaaatgggaaaattgatcccaacgggccaatttctttgcattgcttcttaaccagaatcttttggatcatcatctgtcaaggctaccctccaccaaatttc

SEQ ID NO: 199925 - DNA, 440 bp, Glycine max
  unsure (1)..(440): unsure at all n locations
actcttcacatatgattttttatttcaacgnncaaacacaccgataatcgattaccaatatattgtaatcgattacaccattttgaaattgattggaacgttgtaaattcagttgaaagctttgtgaaaacaaaacttgctactggtaatcgattacagtaaactggtaatcgattaccagagagtaaaaactctttggtaaaaggttttgtgataaattcatgtgctactcaatgtttttgaaaaattttttagtacttatcttgattgagtcttttcttgattcttgaatcttcaacttgattattcttgattcttgaaacttgaatcttgaaacttgattcttgaatcttgaaatcaaatttctcttgattcttgaagtggtcttgactcaatcttgaactcattctcttgagctttatgcatcatctttgtatcat

SEQ ID NO: 199926 - DNA, 468 bp, Glycine max
  unsure (1)..(468): unsure at all n locations
ngtgaacttggtgataacaaaaccccactgtgtattgtttgttgangncgaaaacaatggcgtctctaatggcctctgcaaatcttacctgataactacttgtactcatctctaatggggtctctcatgtcaacaacttcacaaatggcatgttcggattcataatttagaagcttcctgttatttctacaattccagtaagcaaacaaccaaacacttatttgattaatcaactttatgatcaattacgcatgctcatctgtggaatgaattttcatacatggaagcatttgatttgacacaccacatgttggtgtacatgaatgagacaatcatctttcttaatcacacactatgaatgagacaatcatcttattttctcagccactatgaatgagacaatcatcttcttaaataccattgtcaacactatgaatgacacactcatcttgctctctacaactttat

SEQ ID NO: 199927 - DNA, 414 bp, Glycine max
  unsure (1)..(414): unsure at all n locations
agcttggctggactcggctcatttccacctttagtggtaaggcaatcttggtggtgggaggaccaaatgcacggcgtggtggttagcacgtgccccagtaagagaatcaccataggtttcttttaagttattgaatttttataattttaaaaatatttttaaattattagataataaattttcttatattatttgtatttaatttgttattaaaatttcttccctctctaaatataaaatagaataactattttaaatgataattttttcttgccttttaaaacaagaacatttaanaaaaatctttaaaaaatatctttgaatattttcgatatttttattttctttcaatctatttttcatcgatgcaaaatgagcaaatagatttcaagagagagattacaaaaagtatta

SEQ ID NO: 199928 - DNA, 60 bp, Glycine max
gaatttttggattttactgtagccatgtcttgctgttcttagattcacatttgggatata

SEQ ID NO: 199929 - DNA, 432 bp, Glycine max
  unsure (1)..(432): unsure at all n locations
agctngaaggtaaactagatgccttggttaacctggtaacccaactagccttgaataaaaaatctgcacctgtcgccagactctgtggtttatgctcctctgccgaccaccacacagacctttgcccttctcaaccttatgctacaaacatctacaatagacctcctcaacctcagcagcaaaatcaaccacaacagaacaattatgacctctccagcaacaggtacaatcacgggaggaggaatcatcccaaccttatatggtcgagtccttcacaacagcagcaacaacaacagccttattttcagaatgttgttggcccaagaagaccatacgttcctccaccaatctagcagcaacaacaacaacaacagcaacagccccagaaacagcaaacagttgaggctcctccgcaaccttccttgaaaactt

SEQ ID NO: 199930 - DNA, 464 bp, Glycine max
  unsure (1)..(464): unsure at all n locations
ntgagccaaaatcctgactcaccatanaccttgacccagtgtgagaatgtcaatccttacccttggaagcggaaagaatagaagggaaatttccaatcaaagaaaaggaaagaaggaagatttccaatcaaagagaaagcaaaaaaagaaaagaaggaaaattccccaatcaaagagtgggagaaagcaaaaagaaaagaaagaaaattcccaatcaaagaatgggagaaagtaaaaaatgaagaagaagaaggaaagaaagctcctgatcagggatcgaagganaacagaagaaatgtgcagaaaggtctttggaccgaacaatatctgaacaatacaaaattgtcaccaaatgaacaaaaagaaggaaaggaaaccacgacctanaatggtcttctccctttgattaccaaccaaaatcccgtgcgctagtgactntntcgccccgcactaaacaaaaacag

SEQ ID NO: 199931 - DNA, 372 bp, Glycine max
  unsure (1)..(372): unsure at all n locations
agctntcagccaatgcacacgacagtaactttttactcggatttctgattgagtcccgtaatataacgagacgctcgaaattgaatgttgaagctctgaactagttcaaacgacaataactttttactcggatgtctgattgagtcccggaatatatcgatactctcgaaattgaatgttgaatctctgagccaattcaaacgacgataactttttactcggatgtctgattgagtcccgtaatatatcgagacgctcgaaattgaatgttgaagctctgagctaattcaaacgacaattactttatactcggatggctgatcgagtcccggcatatatcgagacgctcgatattgaatgctgaagctctga

SEQ ID NO: 199932 - DNA, 500 bp, Glycine max
gacctatgaatctcagcttcacattcaatttcgagcgtctcgatatatgacgggactcattcatacattcgagtaaaaagttattgtcgtttgaattggctcagagcttcaacattcaatttcgagggtctcgatatattacgggactcaatcacacatctgagtaaaaagttattgtcgtttgaattggctcagaggttcaacattcaatttcgagcgtctcgatatattacgggactcaatcagacatccgagtaaaaagttattgtcgtttgaattggctcagagcttcaacattcaatttcgagggtatcgatatattgcgggactcaatcagacatccgactaaaaagttattgtcgtttgaattggctcagagcttcaacattcaatttcgagcgtctcgatatatgacgggactcaatcagacattcgcgtaaaacgttattgtcgtttgaattggctcagagcttcaacattcaatttcgacggtctcgata

SEQ ID NO: 199933 - DNA, 341 bp, Glycine max
  unsure (1)..(341): unsure at all n locations
agcntaaagactctgtgtgggatccatactttttatgtaagagataggagcatttgcagcgcgattggattcatntttctaataaaaatcatcgttaaatgtaatattagatttgaactaaacaaaactaaaattttgtaatgcggttgggtttaatcttttaaatctattattataatactgaatttagtaacaattttgcataacttttatattatatcgattaattgttttttatataaactagtttaaaaaaattgtttaatattattctttaataatatggacacatccttctttaagataaaattaacatatggatcactttgatatttatacaa

SEQ ID NO: 199934 - DNA, 358 bp, Glycine max
acgaaaacacttcattcatatggcgaggattaacatctaactggtagtgaccttacaaattattgattctttaatgattttgtggtgatctaatatattcttcattttgtatttgcttgaatgtttgtactcgggattctatctcacattcatatccttctctagttgctggagtaatggctggatcatcttactatatgtgggcatgtaatgatcatttatcatagttcttgagagactgagcttgctatacagctgtctaggagttgcatataagctgacatgttcactaatggacggtgaactatagtcatctgacgaaggtgcggacataatatgcatgattgtacctggggga

SEQ ID NO: 199935 - DNA, 365 bp, Glycine max
  unsure (1)..(365): unsure at all n locations
agcttcgnccgcgaaagtcactcatttattgtttaaggcccaacgccttagacggacatctttgctcttatcggttaacatggaccgttcaaaagcataaaatcaacacataactttaccgcttttgcaagaactacgtaggtctgagttcctcatcgcaattgaggatatgtaggagcaaaagccccgcttttgtcggccaccccaagagatcgttaatggtccaacgccttaacgtttctctcctttcaaaatcaaaagatcgtttaatggtccaacgccttaaatgacctttgttcggttaaaattgatcttgcagaaaatgatccaaacaacttatcccacgtttagttctgatagaacta

SEQ ID NO: 199936 - DNA, 458 bp, Glycine max
  unsure (1)..(458): unsure at all n locations
nntgaaagtgttggttttcaccttctcgctaagcctatctgctggcttagcgagcgtccgctaagcgcaacactcatgggctaagcgcgaggaagactctggaagaagatgagttgtacaggttccctaagcgcaccgcttcatctcactaagcacaccgcttcagttcatctgctaagcgagaaaggcacgcgctaagccagaattcactaatgtgcgctaagcggtccataagtgcgctaagcacacgagcacgaactaggctacctatttaagcctgaaatcagattttagaaagagagtttggatttggattcagagctttgcatgtctagggtttctagagagagaaaggtccaagttccaaagagttttgagagattttgttgtgtgaagatctacagagaccacagcttgaagcaggagccggtttgaaagcttgagatgagtttatgagt

SEQ ID NO: 199937 - DNA, 420 bp, Glycine max
  unsure (1)..(420): unsure at all n locations
agcntatgcttttgaacactcgaatgtctttntcttgagctnngagcttcttgtgtgtgtgcttttgaatagtgaagacattatttgtgtctcattctctgttcagttttgtattttctgattatacttaggtcatatcttgcttttgaagatctacctcttggccagagattcattcttaccatgcttttgatcatacacaattattttgttagaactgtgatttttgggtcatgtacattatacagtagtgaattatgtatcatagtgtgattggtttagtggaaagtttccttcggagggtataatttgactaaattttcccctcaattttaaacttcttatacaacgattgatattaaagggctgcttagcggttgaatatgattatagaaagaatattgcccttttttgcatgtt

SEQ ID NO: 199938 - DNA, 454 bp, Glycine max
tcttgaggaagcctcttaatgaagcttcttgaggaagctatatgagctgcctcggtaaaaatgcttcctagccttcgttaaccgttggatcttctcgaaatttggtctgcagcttcacaagacaatggtccacgatctgaccgttgggatctttgagaagatgtctggagtgtgctcgaagcttccgttcccgagagcatttcttatttaagcattccagcctttgttttcgtgtagcttaggaaaaatgccatttcttctcctttctttcttccaaagacatttctaacgtcccaagcactttctccatcacccacagccaccattagccaccataaaccgttgttgttcttcgttgaaactccacaacgagaggaacccgtcgattggagcggaatcttccaacttgacttgcgatttcggtagagaacgaaaccctaatctgacctttcat

SEQ ID NO: 199939 - DNA, 357 bp, Glycine max
  unsure (1)..(357): unsure at all n locations
agcttcctaagacccagagggtggtttatttatcgccgnggnggtggataggtttatcaagatgacactcttcataccatgccacaaggtatatgatgctagccacatctcaagacttttttttggagaagttgtgaggcttcatggtttgcctaagactattcgatctgatagagatgctaagctccttaaccatttttggaaaactttatgggctaagctaggaactaagctccttatctccaccacttgtcacccacaaactgatgggcacaccaaggaagtgaatatatctctatccacattgttaagggcttctctagaaggcaatcacaagtcttgggatgagtaccttcc

SEQ ID NO: 199940 - DNA, 487 bp, Glycine max
  unsure (1)..(487): unsure at all n locations
tctccttcaatggtttattccctagtggatgacgccttctctcacttcttctcctttatcttctgctgcatctccacggccgaaaatcaccattgaaggacctcattgaagatcaaatatccagcctccatagaagcttctcaatcaagattccatacaaaattaaaagcttatcaattcttcaacatccatggtaactctaaccaacaacactctaaaaaaaattaaaagataaggatcgaatacacttgaaatgtgcaattctttgatttgcaatatttcttcacaagttgatcaattcatgtttgtaaaatgagtgacttttagatcaactntaatctttagacgtattatagttctattcttctttaagactctcttganatgtttntcacaaattctgaacgaatcaagagtctgttaacaagaatacacataggggtctttataaattctgactattaanatacatctaatcgattattaa

SEQ ID NO: 199941 - DNA, 415 bp, Glycine max
agcttacccaaacagaaggttaaaagttattccatcactaaattatgactagataatagtgtaaaattattttacactattaatattattttagatcaacaaaaaatattatatataacgatacatgaagtaccacattgaaggttacatgaagtaattctgacatcaaatctctccacatatgaacctgcaattcgatggagggttgagataaatggttataacttgttgatgaccatgattgtattgaaataaagacaacaatgatctcagctaggggtaagaacgcgggtccatctatcttgcttaagtctgcattggaaatggactgagatagtctgttctccactcttacatgaacataacatattgtccaccttcacccctggatccactaaccaaaggacctaatttg

SEQ ID NO: 199942 - DNA, 427 bp, Glycine max
  unsure (1)..(427): unsure at all n locations
tgctctanattacattgatgtttgtatttatgggaggatgttatatgccatttttgctttaaagagtaatgtcccactaaaactaactctccaaatgtttgccttcgcaagaatggcaccgaggaagcttgcctcatagaggtccaggaaggacaaggcggccgaaggaactagttccgccccggagtacgacagtcaccgctttatgagcgttgtacaccaacagcgcttcgaagccatcaagggatggtcgtttctccgggagcgacgcgtccagctcatggacgacgagtatactgatttccaggaggaaatatggcgccggcggtgggcaccactggttactcccatggccaagtttgatccagaaatagtccttgagttttacgccaatgcttggccaacagaggaaggcgtgcgtgacatg

SEQ ID NO: 199943 - DNA, 425 bp, Glycine max
  unsure (1)..(425): unsure at all n locations
ggcattgttcaatnttgaacgtctcgatatattatgcgcctgtttcgcacatccgagttaaaggttatgaccttttgaatatctcgagagcttccgttgttcaatttcgagcgtctcaatatattatgcgcctgaatctgacctccgtgtggaaagttatgaccatttgaatttctcgacagcttccgttgttcaatttcgaggtcctcgatatattatgtgcctgaatcggacatccgagtgaaaagttatgaccattttaattgctcaagagctctcattgttcaactttgaacgtctcgatatattatgcgcctgaatcggacatcgagctaaaagctatgaacatttgaatttctcgacagccttcgatgatccatttcgagcgtctcgatatatgatgagcctgaatcggaccttcgagt

SEQ ID NO: 199944 - DNA, 413 bp, Glycine max
agctaaagatggtgtaatctctttatttatggttacaatttttcaaaacatactaacctgtacacttaacctgtacactaaagacactggttaaggaagtagaagggaaaaaaatttgttgggagacaaaaaaaataagcctccttatgatcttaaaatgtgtgcccacatgatttccaataaaatcttacttcttttaattctttaactaatatttttaaaatattgattagtaagaccctaattttttaagtgtccaagttaatattttttgtcttttaaacttcaaaattaccttttttagtttgaaaatcactgtttttagtctatttctccatatgacaataattcatattatttgtagccgtcaaagttacacaattattatatcatatttactttttatggaagac

SEQ ID NO: 199945 - DNA, 412 bp, Glycine max
  unsure (1)..(412): unsure at all n locations
tgcaagaaactaaacaataacaaatgtcagatatattattacttacagtattatcatatgggttttcctcgtcttccagcaattcttttatcgcagctctatcttccatttatgtagactttaagcttgttactacaactcagttggttttcccagagtgacaccaaacttttgaagcataactatatagtgggtgtagtctgcagcgtttatggacgaaatttctgcactgtacacaccaccaatataagtcctcgctaagtctatatttttctagtagtttgtttttccaccgatccgaatatataattccgtttgttaaattaatacttttctacataaattntagaaaaaagacctcgataaggagcggagaacacagatatagataagagggagaacgtcgcatcat

SEQ ID NO: 199946 - DNA, 322 bp, Glycine max
agcttagctccatactcgaaggtggaggacacatgaacagtgctaggcaatgacattcaaggggcttcgaaaaaagtggagaatggaggattgcacttgagggtccacacttaggcaatcatgaagtatagctccaaactcgaagatggaggacacatgaacaacgctaggcaatgacattcatggggcttcgaaaaaagtggagaatggaggattgcacttgagggtccacacttaggcaataatgaagcataactccaaactcgaagatggaggacacatgaacaacgctaggcaatgagattcatggggcttccaaaaa

SEQ ID NO: 199947 - DNA, 384 bp, Glycine max
  unsure (1)..(384): unsure at all n locations
tgattaaccaatgagaatgtttgagccttatctttttcttgatcttgnttgcttgatcttgaattaatcttgaagcaatggttaacctttgaatgtattttgaattaatcttgaaagcaaccttgtttgattattctttggcatcatcaaaaccatgcacttatacattcacatcccctgcctttttgatgatgacaatcatcatcaagtgaattcttttcggcatcatcaaaagctgcatgattcacattcttcccctttttgatgataacaatcattgtcaagcgaattcttttcggcatcatccaaacctgaaagctgcatgagtcacattctcctcctctttgatgacgacctcatacacccctctcctccatctacctc

SEQ ID NO: 199948 - DNA, 277 bp, Glycine max
tcacacccctacgccctgatacttcatggatatcacgttctgaaggagagtcctcatttccaccttatcgctgtttgcaaagcacttctcaattccagcgaggaatccaccggcatcaacaatatcatatgaatcagtacccctaaagacctcaagacatgtacactgaacgatcatacgactaatgcgactcgagcgatcccacttctcaagaagctccctctgtcaaaggcactacaatccgcacgagaatggggcttaccaatccttaatgcaa

SEQ ID NO: 199949 - DNA, 305 bp, Glycine max
agcatagcatgcatgagggcgcagagtctgtatacccaacaatgaatatcgtgcgcaaaaaatcgaaacataactttactaaattgaacacaacatctcaatcacaaattaaaaacgtatctttggccaaaatcaaacaacttcctaaaccacagaaacaatggatatttcctaaataatctgcgtcttctaaaaagatcaaatccatatcccttactatcaataggagtctctgcctaagaagaaaaatgctccacacacaaacaaaataagctcaacaagagctcaatatccatgtataaaaa

SEQ ID NO: 199950 - DNA, 483 bp, Glycine max
  unsure (1)..(483): unsure at all n locations
tactaagctcgggcattaatgcataacatatgcctgacagaattttttgtcataaaaattngtagatgggaacaagagacagtcaatgtgcaaacaggtcaccataccagctgccttcccgagtgtgcaaaggtaaaaatttccggtggtgctgatacagcatatttaacgaaagacagctgaccctcagtattcttccagactggcccacagatggcatggagaggaaatggtctctgctagatcattttcatacactcagaattttatgccacagtttgcatgtagatcaattaagctcccagaaaagcatatgtaaagctcagatattataccttacaggcatgcttatatacagacatgagaaaagagaacgcttcttcactatgaagagaaaacncttcatgatcaatggtttcaataacacgtacccaattagtatgaggtgcctgtccacaaagcacacacaatgaaagcatcttg

SEQ ID NO: 199951 - DNA, 438 bp, Glycine max
  unsure (1)..(438): unsure at all n locations
actaagcttaactaataattcaaagcctttgtgcttgtgatgctacctctacacacccttcttcaaacattcggncataggacttgctatagtgctaaaattctggataaagcgtcgataagatgatgcaagaccaaggaaagatctcacctccgaaactgttgtagggctcggccaagtcttgatagcatccacttttgtttgatcaacggatactccatctttagacaccacatatcctagaaacaccacactttcaaccaagaaatcacacttttccctcttcccatagagtttttgtgctctgacggtctcaaatattcgtctcacatgagtgaaatgctcctctatagatatgctatacaccaatatgtcatcaagataaacaacgactaacttacccataaaaggcttgagtactatcgtcatgagcctcat

SEQ ID NO: 199952 - DNA, 427 bp, Glycine max
agctttccgattcattctatgtgcccatggtgttccacatggcgtttcgagtattttttttctcgttctagttactttctatacccactttgcgacgcgcttaagccattttatttaagtcattgctcgcttaacccaaaaagaaaataaatttccatcgatcgtttgaattgaattatgcgttaactttagttaaaaggaatttcgaccgcacagtcatgccgtaaccacgttggaaatctaaaacgaggtcacaaataatatagtaatcagaaaacatctttttagtcaaataagtgggataatcaatcggacgtttcctctttgggattactaatcttaaccgaatcgactaataactaaagtgaaactcagggtaaattcactctgctaatcaagctcgccataatataagttttgaagttat

SEQ ID NO: 199953 - DNA, 478 bp, Glycine max
  unsure (1)..(478): unsure at all n locations
taccgaaataagcctaaaataatntattgtaataatcgcgtcttttagcttatngaaataaagctagaaagatcttattagaaagtcacaaaccacttctataaacccatgtaagcacttctaaatgccctccagatctgagattattgcagtgggattttgtttctcaaaatttctcttgatcctatttccagatgtattagaatctcctgcttgccttgctttagaatgtcgaattcaaacagttattaatgaattagtatctaaaatggtattattttctgcacacatgggcgttgaattgcattgatgtcaggcatgtaactttaaacggttntaatgagagaaccaaggtcatctccatttatagtactctaattctgtagcacgataagtgaatctctgtgcattggaattgacactaccaatagagaacttcttcatcttatgaacactatacatggttcatttcctcgta

SEQ ID NO: 199954 - DNA, 380 bp, Glycine max
  unsure (1)..(380): unsure at all n locations
agctttcatcaaatatagtgcatgtgtgctttattgcatntacgaaaccaatcacacaaaccaatcttatatgatccattcacatatgattggcctgtgtacactctatttagtttcaatgttatattctaaataaaaatctagtattgatttgctccattttatggattgattttaaatagctcagaaatgtataccaaccggcaggattatgtaacgcctcttttcacattgaagtatgctttgtttatattgaggtttggtgttactcgatactatatataaatgtggataaaatattatcaatctgattaatgttatgacttatgaaatgaatcacccaatcaatttatatttaacaatacttaacgatgttatta

SEQ ID NO: 199955 - DNA, 487 bp, Glycine max
  unsure (1)..(487): unsure at all n locations
tctcagcttaaatactgttaggagcaataaataggggtaaatattttattttaataactcatactgtctaataatttccttaattatagtctatctatcttaaaccaaaaataaaacaaaaagggagtagtgcaatttgttaaacagctctgtactaatccaaaaaagtgatacctctattgattttagattcatgtaacttcactttcagatttgtgacatgggggacatatataatgttgtcatgtctaaccatgttttctgtcaaaaacaagaaggccagcaatgttttctgtacctctctctaatgaatatgtctttgtgtatgaggtccccctccaatcccttttctactataggtatcaacaaaaaaaagaaaacacaatcccaaaatatatttctttccttggctctcctctggctctctctttataccctcggattcatattaatnttaagcaaaccccacaaaccatcatcatcatta

SEQ ID NO: 199956 - DNA, 220 bp, Glycine max
cgagaccacaatgtgtgcacaacttactctctcttcccctgagtccctatccaaaccacctggtagctcttcctcatctagaagtatacttacgaggaaaaccaaccctcttaaacacctaccaacaatgtgatcatccttgccacaataggcgcacgaactacctgcgcccgatgaaccggtattaactgcaccaactacacacgtatgtcccattaca

SEQ ID NO: 199957 - DNA, 456 bp, Glycine max
  unsure (1)..(456): unsure at all n locations
tactaagctgctcggagccaattcatacacttgatgttttctgtacaacattaaattaatatgacgcatgggattaaggaaaggaatgtccaaacatgcctggtgctgatgagctgtaacaataaatagaagaggtttgcagcagctgagcaacgtggagaagaggagtggatgtattggtagggcaactataataaacccaaaaaaaaaatgttccaacttccatcccctacccccaaattgggcacggaggggggaatgaaggtgagtagtggaattggatggaatgaattctattgggttccatgtcatgccatctttttnttcaatccaaaccaaacaatggaatatgatatcatctccttcctccaatccaaacataaccttactaaacttacccttcttgaaaactggaataaactattacacgaatgattatctatgtgctcacaacta

SEQ ID NO: 199958 - DNA, 413 bp, Glycine max
  unsure (1)..(413): unsure at all n locations
gatccttaagtcacctgcggcatgcagcttgggctagtgagcttgcccgttatattccaggcactngtgattttctttatgttttgccttgcgctaagcgcgccctgtcgcgctaagcgcaatttactctttgtttctgtaattgatggaattgggcttagtgagccttctcgctaagtcatttatgtccagtattgttgtcacgctaagcgcgtctgcccgtgctaagcgcaatttggtttctgttgtggaattgctcgctaagccaattctgcagaaaattttgatttgtgtcaactcgctaagcacgtggctgtcgcactaagcacttgagtaatttttcataaggcgcactaagcgcattngtcaccctaagagcccaatttgaattcagttttatttttcacttgcta

SEQ ID NO: 199959 - DNA, 431 bp, Glycine max
  unsure (1)..(431): unsure at all n locations
tcagtgaanagataatataattacaaatttataatgctcttgttaaatctcaataccttaaattaactaaagaggtaattgtaggaagttaatttttgttttatcccatttttaaggtgtgttggagtgagggagttcctttgggaaccattttgttggtagtttacttcaactattgggggctcacttagctgtttctttacctacccaggtttactttggtatgcttgatgctttattggctgctgaggagcttcctgaagagtacagggatcgctatcaggtattacttgtctgatgaatatttatttggtccatctaatattaatcttcacttaattcctttcgaaaggtaatgtnggttttataattaaacgcatggtggctttctaagaatatgtaaatttaatctaacaatgagaaattagagt

SEQ ID NO: 199960 - DNA, 347 bp, Glycine max
agcttgacggagttgggtgcatcatgtattaatttcactttaaaagtgggtcccaatcggcgtcctaattttcggctttcctatttggatgtgacatcatggcagttaagtcccaactttccatcgtggattcagtcacaaaacaaacttgaatatgctggactatctaacacggggattttcgattctattcccacacagatgtgggaaacacttcctcaggttttgtatttaaacctctctcataatcacatccatggtgagagtgggactacattaaagaatcccatatctatccccgtgattgatctcaactgaaatcacttgtgtgggaaaataccctatct

SEQ ID NO: 199961 - DNA, 434 bp, Glycine max
  unsure (1)..(434): unsure at all n locations
tgtaagattngcaagatcatcttcgttgacaactccttgttatttattgccatcaataagaagaaatgacaatttagtgatccaagactttgaaatggatttccactgaatttgttagtggacaaatcaagatatcttaatgatgaaagttttccaaatgatctaggaagagcaccaccaattgagttgtcgtaaaaatgtagcatgtcaatatttttaaatgtcccaatatgatctgtcagattgcctgaaagtcatgaactctcaactgcaagatttgtgagtccatgggaaatacaaggagctagaatttctaaaagttcattaacctgttggttaagtttgagaattgagaaattaatgtcccttaagttgcatagattacccaaagaagttggaatggttcctctgaagtgattatatgacaaatcaag

SEQ ID NO: 199962 - DNA, 353 bp, Glycine max
  unsure (1)..(353): unsure at all n locations
agcttatgcgcatatttgcttacatactttcttttgcacaagacattctattaaccgaaaaaaatgcacccatatacaatcaacgcagcttcgttacctatattatttacaccttcttccaaggtgtatttgttacttacatcacacacatctccttggctaaattcacatacattgcatactcaaagcatttttgggggaccaanaattgcacatgtgcccatcttgggatttttaatacctatacatacacaaacctcatgatgaatcttgactatttacacaataaggtgctacatttcatgctcttttcaagtttttgtacccaaggccgcatgcaaattcaagatatt

SEQ ID NO: 199963 - DNA, 474 bp, Glycine max
  unsure (1)..(474): unsure at all n locations
aggcatgtgaagtgggtggaattcctagagtcttttccttatgttatcaaacataaaaagggaaaaggtaatattgtagccgatgctctatctcggcgtcatgcattactttctatgcttgaaacaaaattgattggtcttgaatgtttgaaaagcatgtatgaaaatgatgaaacttttggagaaatttttaaaaattgtgaaaaattttcagaaaatggtttctttagacatgaaggctttcttttcaaagaaaacaaattgtgtgtgcctaaatgttctactagaaatttgcttgtttgtgaagcacatgaaggaggtttaatggggcattttggggtccaaaagactctagaaacattacaagaacatttttattggcctcatatganaaaggatgtgcagaaattttgtgaacattgcattgtatgtaaaaaggcanagtctaaggtaagcctcatggattgatactca

SEQ ID NO: 199964 - DNA, 436 bp, Glycine max
  unsure (1)..(436): unsure at all n locations
tcatcctcaaagaaggaagacacaagtgctgctgttatattattaanaagatcccttttaccaaaacgaagatgattgttttggtatctgtttatattaaatttaatttcggtcacaaaaccgtctgtttgtaattaatatgtaattaatgctggacaatactacctgtcctgtagccattaaagtcccggtcaaaactacttgtcttgtaacaaacagtcaaatagtcccggtcaaaactaccggcaactaccggtcttagattcttggctatataaggagtcctcaagcatgttgtgaggcaccctctcatttagccatttttcaggtttctgaagagaggtgctctgaaacaagattttcgttagcgctcctttctaaatacaataaatatctatatttcatccttctctctactcccttcacagatcctgtg

SEQ ID NO: 199965 - DNA, 355 bp, Glycine max
  unsure (1)..(355): unsure at all n locations
agctgtgaggccgaaccttattaatcttttgaaatnctntnaacaaacaaaactaagccttatctttctcgatcttgttttcttgatcttgaatttcgacttgaagtaactttagacttgaagcaatcttgtacttttggcatcatcaaaacctgtatacattcattcacaattgtcacgtttaagcttcatacaactcgtattcaacacattcatcaccaacataaattggttgacggtaaaaaaattcaagtaaaatggtgcaacctccaatggcgtcaataattatttttcttaaggcatcaagcgacatgtgatcacttattgtgatgacttgaggatcactaggactttc

SEQ ID NO: 199966 - DNA, 462 bp, Glycine max
  unsure (1)..(462): unsure at all n locations
ctttcaaggttntcttcgtaggaggatagtgtacccaatntgttccttaataaatgtaatcacataattagcaatttcagaaacacctgtgacattaactatgacatccatcgccacccccttgtgctatctgggaattataatggaagacacggaacataagcaataaatacttaattatattaaatgctattgtactgctctcaaattcataaattcattcaacactctaatctttcttgtataatgatccattacagatacaaacagagtttaaaatttggttctttgaatatctaattaagctaaatagaagatcatcctttgaccattatgttaattcaaactttatattattcatataaaacaatgacatttataaattcaagttaaggtgaaagaataacatttatatctattaaagttgttcatcacaatgatcaccagaatatcattcattat

SEQ ID NO: 199967 - DNA, 422 bp, Glycine max
agcttcaagaaaaggccgagctgccatattattctgatttcaggcttaaataggtggctttgttcatgctcatgcgcttagcgcaattctgaaccgcttagtgcgcattagtgaatttaagcttagcgcgacttttctcgctcagcggatggactgaagtggtgtgcttagtgggatggcccttcactcagcgaacaagcataactcatccttcttcttgattcttcctcgtgcttagccgaggaatgttgcgctcagcggatggctcgctaagccagcagattggtttagcgagagggtgaaaatcatcacttcaaaacttgccaaattaacttgaaattgagggaagatgattattaaacacacaaaatggaagtactatctatttattacctatctttaaccaaaagttattaccacac

SEQ ID NO: 199968 - DNA, 478 bp, Glycine max
  unsure (1)..(478): unsure at all n locations
tgtaaaggatggtatanaataagtgttcaagagtgaatgattgtattattcganaagcaaatcaaagcctggcttttatagactcttcatgtctggccaagaggaccatttacaagagttacaacttttagaagaacttaaaaccaatttgaaaaagtcaaaacctttttgaagagttacatctttcgatttattcagaaacaatcactggtaatcgattaccaaatcagtgtaatcgattacacaaggcttttatgtgaaaggatgtgactcttcacatttgaatttgaatttcaacattcaaagggactggtaatcgattaccaaaacattgtaattgattacagctttttgaaattaattggaacgttgaaattcaatttgaaaacttctttcaaacaattttgctactggtaatcgattacaacaatctggtatcgattacgagagagtaaaactctttggtaacatgtttgag

SEQ ID NO: 199969 - DNA, 289 bp, Glycine max
tgcttgaggtcggcgccaacgggtcatactcattaatctatctagacatcacgacaatgaccaaatcatggctctcggatgcatgggcgggtcatgtaaacaaaatgacaagtttcaacaaagctgaagaagaaataacatgggaaattggcggcaatataacacctaattacctcggtgatgatgctatactgctcctcagccttaccgacaatagggcacaggacctagctaacgtataaaacacacacaggaccacgctgttttatgcttatgagaaatggaatcc

SEQ ID NO: 199970 - DNA, 432 bp, Glycine max
  unsure (1)..(432): unsure at all n locations
catattctnttactacctagccactgtatcattctntaaatttgacccggtaagtaaacacataagcaatttgattaggatctatttgaactttaattgtttttaatgagaaaaacgtgtcttgagtaattgcatgtgactagtaattaatcaagtaattaaagaaaagaatggataatagaggaaattaaaatttcttaattagggttaagttcaagaatttacaatatacatatattctttgtgattaatttctttaattgttgtttgtaatcaaatttgtctatgattgaattatttgtagtatcttaattagatatttattatagtgtctgaaattaattgtcttgtttgtcgctgatataaattactttgagttctaagtctcttcgttagtactcgagaaattttacctataaataaatgtttaca

SEQ ID NO: 199971 - DNA, 354 bp, Glycine max
gacacaccccaagagttggttaatgataatacttcatgaagaagacattgatgattcttcaaattcattttgtcttgcctttccttaaggtggagcgtggcgatgctcctctcactaatacacctgagggtataagatattttgtttaaattggtcccaaaccttcggcatcatcagacttagtctttcaataattaatctaaacaaaagtggttctggccatgggtttctccttctgttattgatacaaagaattattggtccaaacaatatcatttgtatatcctcaaagaataatcgttatttctatgcaaacttccatatgtttaatattattcattatgcgtaacattc

SEQ ID NO: 199972 - DNA, 411 bp, Glycine max
  unsure (1)..(411): unsure at all n locations
actatanatactcaacctaacataaagntcctaaactttaacacagaagagaaggaatattcttataaccttnccggatcgatcttcaatccatccctgataacgactcaccacgatctataactcaacattgtgtccaaccataaatcatatcaacatatcaacgtaacactctaatccaccaaaaaagaacaaagtaacacgatgtaatgtgaagaaaagacatggcctaagtttctatttagtaaagtctgaaccgctggattatagagaacatttttttctttcgataggctgatagtgacttatatcttattacccaacaacctttttctattactcgcgactaatataaaaattcgcggcataaatacctcttccctttatattcgcggcactcaacctacctta

SEQ ID NO: 199973 - DNA, 346 bp, Glycine max
  unsure (1)..(346): unsure at all n locations
tgtagcaatttagaacgacaataactgtatactcggatgttctattgagncccgtaatatatcgagacgctcgtaattgaaaacacaagctctgagaaaattcaaaccacaataactttttactcggatgtccgatcgagccccgtcatatattcagacgctcgtaattgagaacagaagctctgagcaaattcaaacgacaataacttttgactcggatgttcgattgagacccgtagtatatctagacgctcggaacttagaactgaagctctgataaaaatcaaacgacgataactttttactcggatgtctgattgtgcatcgtgcccttcgcatatcttga

SEQ ID NO: 199974 - DNA, 296 bp, Glycine max
gcatgcaagcctacaaagaaagctacgtgaagccgtttcttgtaaaacgcagcacagccttcgttaaccgaaggatcatctcgaaacaaggatcgcaactatgcaagacacatgtccatgacctgaccgttgggatctttgagaaaataattggagcgagctacaagcctcttaatgaagcctctggaggaaccctcttaatgaagcgccaagaaaaagctacatgaagctgcctcgagaaaaacgccgcccaaccttccctaaccaataaaaattctcgaaaattggaaagcaac

SEQ ID NO: 199975 - DNA, 335 bp, Glycine max
  unsure (1)..(335): unsure at all n locations
gcccaanttttttacactgtgtttcttccctangaatgancnnangggtaagggcatgggaaccccttgatcacaattaaaaaattaagaaaagaaagcaataaaacataccttttttgattttcatgtgattattcctaccaaaaagtatgacaaacctaagtgtccatatgatgcctaagttgattgaaactaaaataaaacaacctacctaatgagtcctatgtacacaaatatgaaatgtggggccgatgatttataaagaggtgcccaccaaaattatacaccacatttaggattgggctatatcctattggcccacaaccaagattatt

SEQ ID NO: 199976 - DNA, 408 bp, Glycine max
  unsure (1)..(408): unsure at all n locations
aatcaccgcggctgcagctatgcacggagaatgtatttgtttttggnagcccgaaaaaacaccatttcctagttaaccatgcattaggtaccatgttcaattaatttgttttgctgttgtgtgttttattttttagaaatgggtttatgatcccaacatggatggctcatggtgcctaacacatgcaactaagaatgtagtgtgaagtttcacgcttccccttttttgtttttgttttgtagaggaaaacgcacggatgaccaacatgaaaactaatggtatgcaattttgcagattcaaaagtttgttgaacgcatatgcatgatgattgcctgactcatgcaaaatatgaggcttgaatattattacggaccaatgcaagaatgatttgtttatatgatgttttaa

SEQ ID NO: 199977 - DNA, 479 bp, Glycine max
  unsure (1)..(479): unsure at all n locations
nttctttncacaatcaattgtctactcactaacaattctatttgcaagttcaaattcttgttctttctttgtctaacatacacatttgttcaaacttatgaacagagacataaacttcatcctaatcatgcatttaatccaaaatacgacatacaaccattttcacaaaataagtaaactgcttcactgccataccattcaaaattaagttaaactgtttaggatgcttcaggctaagcaactaagctacccatgcacaaaattaacaaaaaagaaatattgttctaaaaccataattatactaatagtaaaccaaaaagcgcaacacaagaagcacacaatcatcaaanatatccacattcttgtcaagatgaaccacatcttcctcagnagtccatccaatcagaaaagtccgaaccatcctctaggtagcaggttggtgaattangaggagcagcaacttcatcaactgagtcatc

SEQ ID NO: 199978 - DNA, 356 bp, Glycine max
  unsure (1)..(356): unsure at all n locations
ctaacatancctccgcgtctctctctatgtacccttatgtcctcctgcagcgcatggngattatgaataaaaaagatgcgatactgtcaacaaagaacacaaaaatatgtaccttctgttcataacttcagatagctggtccgaattcttaaaacttcccgtgctttgaaattcgtccctcttatcttttctctatcatgaaatttgtttcttataggcgagactctgcacgccaaaaccgttaataaaagcgccaatcgaccagatatgcaccactctctgcttgcactgtactgcacgtattgtatgcctttcctttttgatgctatgcctattgccattgctgtcacgacaac

SEQ ID NO: 199979 - DNA, 484 bp, Glycine max
  unsure (1)..(484): unsure at all n locations
aaaactcaccttagataccatncgctttcctacaaaaaagcgcgatatattattctcacgaatcctaaacaaaataatcattctgagattattttatgcagtttctaaacaacgacatgataattaacttataaattcataactcaaaaaaatctatctttatataacattttcaataaataaccaaatttgtccctacttgcaacacactactaatttagtccattgaaaataataaaatgaacaaaaaaatcctgacagcccctttgacgtcactttagtccttcaaaataaataatccctaaaaatatgttaatattgtcattaaagccataggacctttaaattttggaccgcgaacaaccacactcttaacgatattgtctcttcactctatcattttcacagactatactatcaacatctcacactcttagagatcaaatcgattatttatcctacctcctccccagtttattaccta

SEQ ID NO: 199980 - DNA, 432 bp, Glycine max
  unsure (1)..(432): unsure at all n locations
aactctctagaagcgggagaggaacggtctttttatatataaccggcttctgcggaatagttttaacatcaattggaacttgagatttcaattgaacgatcccaagttaaactttgatatagctccagcacaaggagcttacaaaaacaaatcattggcaacaagcttaacttgttatctgttcatggttgtcacttcactcgatttgaagctgtctgtttagatgcaataaaattgtattctacgtcaacttttatagcaatatttttcggattatagttgcagcacctataaataacataatattatgtgcataagtgtcctttgcttcctaatcccatatgaagtctggagattacggcactggacaattttatattaatatgtttagcaataaggcattgctaaanaactaaaagaccaaaatattta

SEQ ID NO: 199981 - DNA, 153 bp, Glycine max
ctttcggggggcgactcccaccttatgatgactgtgccgcgcattgacgatgacgaaggatatacccttcttggccacctgctgcacttaaaagattcgtccaaccatggactaccccaaccgaaccaactccggcatattcccggtttaccc

SEQ ID NO: 199982 - DNA, 437 bp, Glycine max
gttatgtctattggccctaaatgtagaatgcgatgatatttcttgctctgttcctacgtgtctacgcattcgcatccatttgcatgtttatttctttatgtgtaaaacgccagatctggcgatgagtacctcaaacgtactagatacctgtgacctgaccatctatatcgagcaggagactaatccgatggaatatgaacaggaccaagatgtttgactttccccggagttggagaagatagtcgctcatgaggaccaatagatggcgcctcatcgtgaatagaaagaactggtggacttatgaacgcgctgtgggataaaagaagtgaagataggcacgggtatgaccacacccatccgtgaagaatagatagccctgctaaaagactgccaagacatctttgcttggtcgtgccacgatatgcccggtgtgagtt

SEQ ID NO: 199983 - DNA, 415 bp, Glycine max
agctttgagccaaaatcctgactctccatataccttgacccagggtgagaatgtcaatccttaccctcggaagcaaaaaaagaatataggggaaatttccaatcaaagaaaaagagaaggaaaatttccattgaaagcaaaaaaagaaaagaaggaaaattccccaatcaaagagtgggagaaagcaataagaaaagaaaggaaaattcccaatcaaagaatgggagaaagtaaaaaaaggaagaagaagaaggaaagatagctcctgatcaaggatcgaaagaaaacagaagatatgtgcagagaggtctttggaccggacaatatctgaacaatacagaattgccaccatatgaacgaaaaaagaatgaaagggaaccacgacctaaaatagtcttcttcctttgattaccaa

SEQ ID NO: 199984 - DNA, 473 bp, Glycine max
  unsure (1)..(473): unsure at all n locations
tctggtgggacatcttgacttgctgtccaatctgtctttctccacagattctgccttcttctattttcagattgggaatgcctctaacagcacctttgtcaatgattttcttcatgcctcttaagtgcagatgtccaaatctttgatgccatattctgacttcatcttctttggaggatagacatgtggaggagtaactggtttcttgaggtgtccataggtaacagatgtcctttgatctgctgcccttcattagaacttcactcttctcatttgtcaccaagcattctgactttgtgaagtttacattgaatccttcatcacacaactgactgatgctgatcaggtttgcagtcagtcccttcaccagcagtactttgttcagactangaagtccatcatgaactagctntcccattccaatgatctttcctttagagccatcttcaaatgtcacatagctagtggagcaa

SEQ ID NO: 199985 - DNA, 424 bp, Glycine max
agcttgagatgaggaagtgttgaagggttatacttcttttttttattggtgatcacagagtggtacctggagatatgtcgcgggggtcaggagaccttggggacgtcaggtggggtgctattgcccaaaaccaagcttgaccaatcccgacccaacccgggcatattcggtcagtgagaacctgtgatgtacctaaacaagcgagctcctggcagtcaacagataaaaggaataaagaccacaaagcaaggatgcttgtggtggctggccagctgtgaattttgtgtgatatgtggattatggcctcttgtaatcgattaccaagggttggtaatcgattacaaggcttaaaaatgaagacaggaggctaagatggtctctggtaatccattaccacggggtgtaatcgataccaggcttgaaa

SEQ ID NO: 199986 - DNA, 493 bp, Glycine max
  unsure (1)..(493): unsure at all n locations
ctaagcttacaagcaagcttccatccncatcaaacatcagaatgcaccattgtaccaaccgaggaggttaactacatgggaggacaacaacgatcgtataataacttcaaacaaagaggtttccaaaacatacatggatactacaaccgagcaggagacaacaaactacaacaaagagaaaatttgtgggaccacaccgcaaagttggtagaagccttgaccaaattcaccgaagtggtcatcgccaaccacaaaaacaccaaagccacgatcaaaagcatgtaaaatcacatagggaaattgtccaaacaattgcaaaccttttcaatttgcttttctgcaaccaccgaggggaacccaaagtgccattgcaaggctattatctccaccatagagtgtgatgtggaagatgaagaagaanaacaggtacaagaaagcacaatgctagaggaagagatganagcacaactcaaccctttaacccaaggtatgc

SEQ ID NO: 199987 - DNA, 427 bp, Glycine max
tgcttcaagaaaaagatggcctcagcaatttctttatttccagaagggaattctatcaataaacctccaatctttaatggagagggttaccactactggaaaacccgaatgcaaatttttatcgaggcaatagatctaaatatctgggaagccatataaatagggcctcttatacccaccacagtagaaagagtttcaatagatggtagttcatcaagtgaaagcataaccatataaaaacctaaagatatatggtctgaagaggatataaaacgagttcattacaacctagatgccaaaaacataataacatctgccctaagaatggatgaatattcagggtttcaaattgaagagtgctaaggaaatgtgggacactctttcattaacacatgaatgacctcagatgttaaaagatcttgataat

SEQ ID NO: 199988 - DNA, 392 bp, Glycine max
  unsure (1)..(392): unsure at all n locations
ctttcctagctagacgattgagatgatgcatgtttatatgtgtagtcctatgatgcaacaaccaagaatcatctatcttacttaccaaacaacgcagctcatgaaatgatgcatgttcaatgtttaacatatagaaattacctattctctctccaatatggacaacctaatcgaacatagcttcactaataagacaacaattcttgctgaattcaattttgatgtcgctgtcacaaagaagactatgctntagtccatccacatatagaacattctttatctaagtattgtacttgtcgcaacctacccttcggcgggagggcgacgcgagactcacgggatgcgtgttccacgataggaatacgcgtggagtcaccaccaatcgttatttg

SEQ ID NO: 199989 - DNA, 390 bp, Glycine max
agctagctagcggggatgctatggaggctgtttctttgagcttcaatgacgggctttaatggtgattcttcaccttggagatgcagcgaatgacatgggatattaggtgacaagaggtgccatccactagggatttagccatggaagtaggatcttcaccgccaatatgagctttggataagaggctaggagaggatgcttcaatggaggaatccaaatagggggagatagagaggggggagctctaatttgatggagaaaaagagatacagatttcgaacttttagttgcctcacacaagactctcattcgtgttaggtacatcaagtgttacacatgcttctatttatacactaagtagctttcttgagaagatttgttgagaaaact

SEQ ID NO: 199990 - DNA, 476 bp, Glycine max
  unsure (1)..(476): unsure at all n locations
tcctannaattggagttctatttcctttcacaattcttcgttcatattagtcatctctcctgctggttgatctttccagtatttttcttctctagtcagaaaagcatctctggtcaggtcactaatcgcctgtactttggcagtagttcattgttgtgacatctccaatgttgaacacccatgtttttctgctgtatatgatttctgctgtgcatttttctaccatgtttcaaacagttttccagttgccatgtcctcctttcagaagtttgaagagtatccttgacttgttctatactctggctgtctcctccactggttgtctccactgtcagcttcttctgtcatgagatgattatggtgaatggatattaagaatgtttgccgggttgtggcatcaattgtcccgtggtggaggctcaagtgggtcaagtcacagtcaactcatggcgccttgggctgtatgctnttaagta

SEQ ID NO: 199991 - DNA, 395 bp, Glycine max
agctttggtaccaattgatggaaacctaattttcggatctcaattttagcattaacaaactgtggaacctatttaggactctctaaaattagggaaaagaaaaaggaaaaagcagaattagaacaggagatggaaaaaacaatgtcacaatcttgaaagattgataagttgataatgattcgccacaaagaatataattgtttgataagaatctaaggattcacacaagaactaagagaggcactctcttaactatgtttaatatgaaatttcatcaaaaactgacaacaaagtatttaaggagactatttatacttctactaataaccctatattaggcccaatgcccaatgactaatctaataattaaaagacttaaaataacaatgaaaggt

SEQ ID NO: 199992 - DNA, 485 bp, Glycine max
  unsure (1)..(485): unsure at all n locations
ntgacatatatgctaaatagtcttctctagctcgttgttattatttccgaaatngacttctttntttcttttctgtcaatagggatatggttcaatctgctatcatttgcagtaggtaaggattttataaccttaattttttgttttatctcaaatcaaaatatattgaaatttttgtaataattatttcaaaagtcatattaagaatattttttattggttgattgtataaaattgttttaggttttgttaataattaagtattttaagaaattaaaaaaacatttattgtcgaaattatatataaatgtaaaaaaaaaagtcataaataatataattttatggaactcaaatnttgtttcttccttttagttccttaatcatcatttgtcaattattntatttacattgtctctgcatgtatagccattaaaccgtaatactattccatccaatgaatcatccttcttaaatgtatgtatata

SEQ ID NO: 199993 - DNA, 443 bp, Glycine max
  unsure (1)..(443): unsure at all n locations
cctgcggcagcaagcttgaaaaataaaggggaaggnctaattacccattnnctctcccccttcggcagcatcaaaaaggccaaagtgcgtaaaacaaaacatacatgaatatatttaaaacatacacacagtacaataccaaatgtaagtacataccactagacatatatatcataaaaaataattaagtttaacacacataaccataaacaaccaaaagcaagtaaatataatcatcatgttcagtcatactaagaaaatattaatagacatactaagtgttcatatgtcataaaagaaacatagccaaatacaaggctttaaaaacaaaatatataatctaaatctatgaggatggtggtggaaggtcaaaacactgacgaacaaagctacatcctctcaagttggtgatacggtgccatccctgcaattatgctacatga

SEQ ID NO: 199994 - DNA, 459 bp, Glycine max
  unsure (1)..(459): unsure at all n locations
ccgcgtcataggacttccaacacgcgtgtggtgtctttattgttnncatttggggttaattcccgctatttgatgggaagtgcaggtgatgcaactacaatccttgactcaggcagtctcctttgcaaggcttcatgaagagaagctatgggatggtcaccgtcagaacacacgctccacaaagttccctccctcgtaaaccattccctcgccatccgccaatttctttaaaccttctntgcaccagggcccaaccaaacctcagactaccattgttccttttaaacgcttatcaccggcagagttggcccttcgccgggagaagggattatgttttaactgcgacgagaagtcttctcgtgggcacaagtgcactcctntattcgttctgtntgttacagaagaagaggaaggaagccctgaacctgcccgacctaattattgttctgttagtatctc

SEQ ID NO: 199995 - DNA, 394 bp, Glycine max
  unsure (1)..(394): unsure at all n locations
agcttcacctttttgtcctcctcatagttttngcatgagaatacatgctctattttcatctcccactccaagtaggcctccggatcattctttcctttaaatggaggaatgttgagtttaataccatcaattcggttttgtctacgaacaccatcattccctcttctcctcctttcttcttcattatgatctctattctccatttgatccaacctctcatggagcgcatcatctcgttgtttcattaacctctccaaatgttgcatcaaatcttgcatttggaattgcgaaagccccactccatcattaggattattacactgacgtcgtaaacaaacaaatcgtatcgaacaagacaaatgataggtgctgtgtgaatacctaatccactcca

SEQ ID NO: 199996 - DNA, 386 bp, Glycine max
  unsure (1)..(386): unsure at all n locations
tggcattggaattgcgaaagccgcactccatcattatgatttgtacctgacatctcanacaaacaaatcagacgtaacaagacaattatagttgctgtttgaatacctcacccactcaagtgtatcacacaattatggcttttctctaatgaaacactcttgccttttaccactctaattccccttgagttcttaggcaattcaagagattatggccacaacaaagaacaattcaccaatatgtgtaaggtaaggctagacaaggaaaaggttaaccaagaaaaaggctaacaatgtttttaggcacaaatgaaggaaataaaattcagaatttaggaattcaagtaacaatccttcatgcaaccaatatattaccttaaagagtt

SEQ ID NO: 199997 - DNA, 346 bp, Glycine max
  unsure (1)..(346): unsure at all n locations
tgcttanagaggatgcttcaaaggattattgtattganatanagagaaagtgacatggaaaattgatggaagatagggagagaagctgaactttgaagtatgtctcacaagactctaattcatcaaagttgtgacaagaattacatatgtttctatatatagcctaggtcactaactaaatgaaaagggaatttcattttcatttcatgcgaatctaaaaggaatattccatggatatgccaaaggccttttaacatattccaagaatatgccaaaggcatcttagcatatggcaagaatatgccaaaggcatcttggcatttgtctttagatgctacgagaatgg

SEQ ID NO: 199998 - DNA, 176 bp, Glycine max
  unsure (1)..(176): unsure at all n locations
catgtgaaactctctgtttaatcgattcacctgctatctgcaatcgattacatcagttttttgagactttacagacagatcttcactcttgttaaaaccgatactccttatccgcaattgatgactctgtcctttgagaccatcgtagttntcctacgatctctggtataatcgat

SEQ ID NO: 199999 - DNA, 320 bp, Glycine max
  unsure (1)..(320): unsure at all n locations
ttaagtcacctgaggcatgcagccacgcctacgaggagatactactttttaattacncatcaaatcaaaagaagggaattaccttagaaacttggctaatcgtataaataggcgttatgggcctttgtttacatagcaaatattcagagaatccctactgataaaaagaatattcagagaattcctaagacagagatgactgtcattaaggaaaaccaacaacctacccaattagctggccaccaaaaacttggtctcaatattctacttaatagcgacgcactctattaggttcattcaataatccttaattccatttt

SEQ ID NO: 200000 - DNA, 425 bp, Glycine max
aaggaaagggaagaagtgaaattgaatcatagagagaaaataaaagtcggataaatataccagaatataatgaagtaacggaacatacttaaataaaatattttggtacaaaaaaaaggaagagaaattaatattaaataaatgacttatctattagtattagtatttactatgtgctattattatagttttaaataatcttaatatatataaattcattttatgtacaagacatttgtttcttccaatacctccacaatagttataccctatcatattaaatttattcattgtcagcctaccattagatgtagactaccatattaaagctataagtgcttagatataacttactaatactaactcctactaactctctacctcttcgctctctattattcttctttctggcgatctctatattt

SEQ ID NO: 200001 - DNA, 365 bp, Glycine max
agctgtggtctctacagatcttcacatagcaaaatctctcaaaactctctagaacttggacctttctctctttagaaaccgtagaatgcaaaactttgaatcccagtccaaaccctctttctaaaatctgatttcaggcttaaataggtggcctagttcgtgctcgtgcgcttagcgcacttatggaccgcttagcacacattagtgaattccggcttagcgcgtgcctttctcgcttagcagatgaactgaagcggtgcgcttagtgagatgaaacggtgcgcttagtgaacctatacagctcatcttcttccagagtcttcctcgcgcttagcccatgagttgtgcgcttagcggacgctcgc

SEQ ID NO: 200002 - DNA, 435 bp, Glycine max
  unsure (1)..(435): unsure at all n locations
acctattctgatataggttccttctaatgaagatagcgtgatatgacattgtaaatagtccagctctatcaatcaaaacacttcatnacaacatagataattttgaagtaacatacttcaacataggtaacatgtgaaggttgttgttgtgttagtattatgtcattggttcagacttcacaaagtctctctagtctttattctaatgtgtcacaccagcttttcttaaggacatttttaactttgaacttgtgcatcttcaaatgcagttagcgttcactnctttatgtgcccttggtgtgtgtggaagcatatggaaagtgagatgcaacctcaatattttgatgtgccttctatatgtgtgacaacatatggaagacatcatgtngctntgtatctcattctggcgatatatccttcatgatcttgacttca

SEQ ID NO: 200003 - DNA, 364 bp, Glycine max
  unsure (1)..(364): unsure at all n locations
agctagaaaacggagatcttatttatntagcgaggcgaaatatcctggcgctggcgcacgtataagtattgtcacagactaggaaagaccttttaaatctacactggatatggataaacaatgacatgtgtaataacactgcaatactatcaccctagctaatttatgtcttagcaaactgagggaattggctattcattcaacatgatacatctattcttgtttgtgtcaaaactaaaaaatttcgaaaggctatctgagtagatgctgcattttaccaattcaacacatcatggaattttaagatgcgcagaggaaaggaaggaagaccgaagggaacactatagccacagggattctccca

SEQ ID NO: 200004 - DNA, 396 bp, Glycine max
  unsure (1)..(396): unsure at all n locations
agcttcctccagttntttctttctcttctcatccattaacttcttttctaaatattcataacccccatgagacaacacgtgaggggctgtgttttgctttttgatggcctgtgcctttttttgcacatcttgcaaaaagtcaacattaatgaaactcatgattacaatgtattataataagtgaatttaaagttgaaaacaatgaaaatcacaaattagttacctcccacaatgggtctctgcgggtttgacaaaattgggcccacttgtccttgctaatgtcgtacttttcgcatacagtgttgttgacactttccttgtcggctacaagtgcccatttcaacatcaaatcaaacttgaattgtctccaccgctctcccatagtctgaagtattt

SEQ ID NO: 200005 - DNA, 473 bp, Glycine max
tccttgagaagattcctaaagaagctagagcttattacacacacctctctaatagctaaactcacatccttgagatgagaagctagagcttagctacacaccccctataatagctaagctcacccccattccaaaaatacatgaaaattcaaaaaataaaagtccctactacaaagactactcaaaatgccctgaaatacaaggctaaaaccctatactactggaatgaccaaaatacaaggcccaaaagaaggaaaaacctattctaatatttacaaagaagagtggatccaaccatgacccatgggctcaaaaatctactctaaggttcatgagaaccctagggccttctttagtagctctagcccgatcctcttggagtcttctatccaatgcccttgggggggaggattgcatcatccccttcaccttggaaaggagtttacctcaaatcccgagggtcttcatactct

SEQ ID NO: 200006 - DNA, 409 bp, Glycine max
  unsure (1)..(409): unsure at all n locations
agcttgtcaagccttataggctagacaagtgntgtctagtgttaagggtggtaacttcgataggtgtgaaagatgcaggttgtccagggaggacatgcttttcattttgcatgaagagttaggcatgcaggtgagtggagtccctgcatttgacaatttttctctttttcgaccattggagaacacattgaagacaaacattttgtttgtcttttgctgcagccgagtgtagcacacacacgttactattgcatatgtgtcacccatggagtgggcatgtaatggagatgcagtacatggatgagtgaggctgcatcatggtgcagaattttagggcgtcattcagcttccgccagttactgtagagtcatgcctccacttaaatggagtggatgtttgatattttatc

SEQ ID NO: 200007 - DNA, 493 bp, Glycine max
tatgatactaagctgctttcatcattatgccctaatgggaagcacctttatattatataaagctgagtgttggggaacaaactcccaacaacactaacaaaaagataagcagaatcacaacatatcctaacaatattattcttttctaacgacctatctaaataacacgttttacttcttgcagtagtatccgtatcagtactatccctatcagtcagagagtgggaaaaaatccatttaactctcattaataaacctctatagaagaggacaaattaaaatgtaacttgagaaaatccaaaccctgacaggatgtacatttgccaataaaggcaaagtaataaagtcaggaacagtaacaaagaaagtagcatatgcatgtctctgccaatcaatggataaaccatgcttagacaaacgcgccgcctggttcgcttcgcgataaatatgtaacctgcaggaatagcaaccacctttcagattataatccaat

SEQ ID NO: 200008 - DNA, 324 bp, Glycine max
aaatgcaaaatttcacggcatggtgtaattcattcctatttaagtaagctctcgatatctatgctgaaagatacagcgaaatgataaatgtaaagagatttaaaatttgtgtttagttgacaagaatttgtcaagcaaaatattacctttgctagccttgcggtcgtttttatttgcacacatgtgtcatttagaaaatgtacattcgatatcacggtatggtgaacaacatttagatttaagaccttgatatctatgtattcgatatggatcatccgccaaatactgctactatcgaaagtttgatatacatatcaaaaaaat

SEQ ID NO: 200009 - DNA, 437 bp, Glycine max
  unsure (1)..(437): unsure at all n locations
atataatatacattcccaaatcacataacataattgattttttaattggngaaacacacagtcttatcctcccaaatatcatgaggcactgtcatttctcggaaaaaccttgataactctagaagaagtcttaatcatataaaccatgaacaggaataaacatgtaattgttaacatcaagtacacaaaaatgtttcaacatatggtccaaaatttgccggctgagtaagccaaaaaaaaagtttcgatgttgacggcttttttacaaaaaagggacaaaattttacattttttttatcggatgtatgttttaaaaaattacctaagagtggataagtcataacaggtgagttagaagtcgtaacatttgttatcactccttattttctaaaaaaaaaactgaaatcatagaattaattagttaaaacaaattgact

SEQ ID NO: 200010 - DNA, 350 bp, Glycine max
  unsure (1)..(350): unsure at all n locations
agctntgcagncgtgacaactgtcccaattcttgtgggatgaccccatagaagtagttgctgttgaggttgaagattctcatgtacgagagagggcctatgtggggagatatggaacccttcaacttgtatcctcccagatttaactttgtaactctttgatcccatgttagttaaaaaactgaggagaactattccaggagagcacgattccaagtgggactctctatctggattcccagaatttatgttagtctaatgaataatatcatttcctgatgcacaggctatatgtttggattgacccagttgttattctatcgtatgaaagaaaacaggtgcacatttgta

SEQ ID NO: 200011 - DNA, 460 bp, Glycine max
  unsure (1)..(460): unsure at all n locations
tataggcttgaactcctagaggcaagttggttgatcaactttgtgggatcaaaacaaggactgtatggaaaagactatcctcagtaaagctagacttggaaagcctcctggtgtgatccttattaggagtggatcccttggtgcaggtcaaggaattagatgatgccacttcctgagatggaagataagtcaagggtaaacgccacaagggttcaaccttgataagtttgaaggttcaacaagaaacctagagagaaactctcacaaaatacacacaaattttctcaaaatgccaaaagttcattttcttcaaaatgagttcaatacatatagtgtagctgaggtgcaattgaaaagacaccaatttatttaattaaaattacaaaaatagaanaatatttgatatggatcttcaaattagtttggatcttcaacaatcaagaatattgggagtgcttct

SEQ ID NO: 200012 - DNA, 431 bp, Glycine max
agcttgcatttggaattgcgaaagccccactctatcattaggattagtacctgacatctcaaacaaacaaatcaaacgtaacaagacaattatagttgctgtttgaatacctcacccactcaagtgtatcacacaattatggcttttctctaatgaaacactcttgccttttaccactctaattccccttgagttcttaggcaattcaagagattatggccacaacaaagaacaattcaccaatatgtgtaaggtaaggctagacaaggaaaaggttaaccaagaaaaaggctaacaattgttttaggcacaaatgaaggaaataaaactcataatttaggaattcaagaacaatccttcatgcaaccaatattttaccttaaagagtttttttttaagttcttcaacatgaacattcagccaattttttt

SEQ ID NO: 200013 - DNA, 345 bp, Glycine max
tgtagcaatttagaacgacaataactgtttactcggatgttctattgagtcccgtaatatatcgagacgctcgtaattgaaaacagaagctctgataaaattcaaaccacaataactttttactcggatgtccgattgagtcccgtaatatatcgagacgctcgtaattgaaaacagaagctctgagcagatttagacgacaataactcttgactcggatgtccgattgagtcccgtagtatatctagacgctcggaattgaaaactgaagctctgagaaaaatcaaacggcaataactctttactcggatgtacgattgtggattgagcacatagagtctcccg

SEQ ID NO: 200014 - DNA, 401 bp, Glycine max
agctctgtgaggtacataatcttgttttatatggaacatattcttatgatatcatggactttttaagttttaagagaaccctttaaatattgtcaaagacagactgtattagtagagttgcttcttatatgttggtcagcgatgcaaggtcttcaatatttctctgctgagtatgcctgtattctgtctactttcatttggtcctcgagctcaccaatcaagggggtagccagtggctggatcagaatttcatttccctccaaaacctgtctgcttttgaagggtttgtcctgaatcttgattaggataggttagataattaccaaatgaaaccattactatggttatagtgcaagcctaatttatgagtttgacacacgacctcgcattgctaaaagatt

SEQ ID NO: 200015 - DNA, 477 bp, Glycine max
  unsure (1)..(477): unsure at all n locations
nntgttttatntcaggtagttaatgacttgttatatccttctggacagaacttgagaatcagagaggatgctcaggtgctcattatatttttttcttaccaagttttaatatgttctgtctttataaatcttgataactaaattgagagtaaagattggattaggttattttttaccctctttgacatgccattagttccctctagtccaaaattttgattataaagtacattaaccatggtgatttagggatcaattcatgtggttcagtgacttgaatgtggatcagacactgacatcaatttatgtagatgaatgctatataaaatcatggactttaggcacttggattaactagtattagaatattagagcacgtgttgtataactgtataaacagttntgtaattntgtgtacttgtaagggctgttagcctttgctaacaacacttctctagcattagatatctgataaca

SEQ ID NO: 200016 - DNA, 351 bp, Glycine max
agcttaatcagatacgcgaaacggttttggttggagtaaaataatttttaacaaaaagagtgtgacaaaaaacaatgaaatgaaagagtacttcgaaattggtcttctacaggtgtactgatggcccatccattattacgacagataaaaacaacaggggcctccatgactgctgcaaaaatcatagcaacatgaaaatctccctgcaatgtttgatgttgtcagataataccaatcaacatggtggtgttccattttatactagttaattgagagagatagtttatcaccactaacctcactggtggcaccatccccacaaaaagagactgcacatgcacttttcccatc

SEQ ID NO: 200017 - DNA, 487 bp, Glycine max
  unsure (1)..(487): unsure at all n locations
ctatctatttgactattatacaataatgtttccccatatattaattgatatatggagaacttaatcccaaactcgagttgcataactgtgtttaagaatttcgagttcggtgtacttcattccacctcaaccatgaataaacaaagagtattcactcaagcatgatttaaaaaggtattgcgtagagcaaccataattgagcaataaccaatgctacataataattctcctgtataaaaataaaaaaatccaacccatcacgacaagcaaatcatgcaaacatcatcataggtataaacaaaaaaagggaacgggcattctattggtttaggatgcaccataactaaaggaatagtccaaacgcaaaagaataggggaagaaagaaagtgatacaacatacaaattgcaatgacaccaagagaatctctattaccagtttccctctctctagtntcggtcatagaagcagacaccatatgctgaaaa

SEQ ID NO: 200018 - DNA, 393 bp, Glycine max
  unsure (1)..(393): unsure at all n locations
agctntgtacaaccactgcattgttgattttctgcagcttactaacagaagctgctgccctgtttttaccaacatcattctctgaaaacacaaagttactggatagatcccacagctccacagtcccctcatcatgcaaggtcacggacttgacaccagcaagaatgagattcttcgctgcagacaggaagtaaactttattagaattcaaaaacatgatttaaaattatagagttagcactatcatctttaaagcttgaacctaaatatcacaaccatcaaataaaaaatcaagtcacacaaccaaaagtaagttaaataatctcttgaataattactaatgataaaactacaacctatgttaacaaaaaaaaaattacaactggcaactgg

SEQ ID NO: 200019 - DNA, 437 bp, Glycine max
  unsure (1)..(437): unsure at all n locations
ctatgaaactcagctctatactactgacatccagagtggatagaacagttattgaacttttagctntaattacctatttattgaaaaaaagtctagaaaatatagactcataactctctagctcataattacttgccttttttttttttctggcttctaacatattcacgcgtgagttgctctagttttcaagtctaactggctagacataattatacttttgtagcctaactaaatttgtatttaaagtttcgactttcgataatgattatttttttataaaattaactaaaatttaacaaattaatttattaaattataattatttgataaaattaattattaaaataattgaataatatataaaatggcaaaaacacatatttatataatacttttatataaattttagctctattntatggataaaaatatac

SEQ ID NO: 200020 - DNA, 402 bp, Glycine max
agcttgggatgttacaagcaccgtcatgtacaaggtatgaaataggttgatatcttcttactgaattggtgacaggggtattagcaaggtacaaaatattttccatcatctttctcctctaaaccctaacctaattttttttatttcaattcacttgtaaaggaacacaaacacgagttactgtgttgatttgattaaaagaaaatactgaaatgggaactaatcttttgctatcaacttaccataagcatttaaactacttaattaaattatgagcaagctaatgattttttttttgttaaaaagctttcattgttgataactaacattgttaattgatgaccgtgatgcatgtttgtgccatatcattgacaatgtttcataatgcagaataatttattc

SEQ ID NO: 200021 - DNA, 469 bp, Glycine max
  unsure (1)..(469): unsure at all n locations
taagctccttcaactgcacaaggctcttaatatttgtatagtatccttgnggaaccttcacccgacgaagacactgacaaaaacttatcttttccttcttggacaaagtatggcaggttgggggcaagtaaattttcttcccatcagaccttggatgcaactgtgatcttatacccatatcagctagatcttgatgggtattcaagccatccttcgtcttgccttgaatgttaaggagcgtcccaatcacactgtcacaaacatttttctccacatgtataacatcaatacaatgtctaacgtcaagatcacaccagtacggaagatcaaagaanattgacctcttcttccatatgcaactctgactnttatccttcttttgggtcttcccaaatacagtgttcaggtgttgaacccgctgatatacctgctcacaagtgaacggtatcggcgcaatatcatgctcttg

SEQ ID NO: 200022 - DNA, 392 bp, Glycine max
agctttattcaagacaaagaaattaatgatatttttgatggatgatcaagacagtctctacagtcttagaaagggtatattaaataggaagggaattccaattgaagtagcaaaaggtttggccaagaaatttaagttaaaaagtctttttcaaacaaatttactctctggtaatcgattaccagaggatgtaatcgattactagtggccaaaagtaatttacaacagctattaaaatttgaattcaaaatttgcactatgtaatcgattacacatatatggtaatcgattaccagcagtttctgaacgttttaattcaaattttaaaagcttgcaatcgattacacatatacttgtatcgattaccaaagcagattgtgagaaaatattct

SEQ ID NO: 200023 - DNA, 442 bp, Glycine max
  unsure (1)..(442): unsure at all n locations
cgcattcctctcttcccttaaacttctttatagattgctatttatctcncgctttaaagaagattattntgaattgtcttttgagtgattcatgttaagggtgcattgttaatccgaaaagagagagtgaaagtttaattggggaatagtctttgtatcttaattcaaccccccctttcttaaggtaactgaggccatttgtctaacatcctattcttgataactcacttctctctaaaaagacaaaatgaggtcacatgaacgtctatatttttacttgaaaacacagtcaatcaaatgccttgttttatttctgtattatgaaactctctctttcttattttgaaacttatttgttttgaactttactcgttgttttatgacaccctcaccaacgtgcaagacgagtaatctctgatcgaacagtcttggaagtcaacac

SEQ ID NO: 200024 - DNA, 335 bp, Glycine max
  unsure (1)..(335): unsure at all n locations
ggcatgccaagctgagagcaaaaggagatcttacattgaacgagagaagtgactgggcggatatatttccacatttagttgtcaaagagatgaactcattccaactatttgaaggtcctgagagactgtaattcttgacctatataaattcataanttacaactaaagatgtccattcgctaatatttatctacggcatagctgattgaggaacaaatatgaggttataagagaaaccatccgttaattatatttaaaaaaacacaagacagtcgttatatagagaaatatcaccacaagagatctcacgccatgataattattttattagtaat

SEQ ID NO: 200025 - DNA, 370 bp, Glycine max
  unsure (1)..(370): unsure at all n locations
tganatcagagacagtccattgtgaggatggagcttttctttctggcttgcatcatctttacaacatgaggttcctctggatgtcctcatgtaagttgacgcgccaagcttgccgggaagtcgcacgaatgctgccccatctggtgttggaagtcatcaatagtgaagaggacaaagccgatgatattgagattctgtacatgtatccgtctctggacaagccacgggatgatgctccaaaagtcgttaccatcctttgctgattctttcaaactcaacaagtttatggccttttaccttgttatgggggctgctgagtgaaattatagagcagggattcttaaatacacctaacctgccacaagattca

SEQ ID NO: 200026 - DNA, 393 bp, Glycine max
  unsure (1)..(393): unsure at all n locations
ggcagcaagcttgcattgggaaaacactggtttttatgatgncttacatgttccctctatcagatttaacattgctcctgtagcattgttgggaaaggttggaataaagatatcctttgagtctgataagatagttatgactaagaataacatatttttgggcaaaggttattgtgatcagggtctttttatactcaatgttcctgaagtgattaataagaatgtatcttcttctgcttacttgattgattcttatgatatatgacatgctagattaggacatgttaatccaacatatgtatgaaatttcaatgactaagtttaattaatatgcatgataaacaaagtattatatgtgaaatatctgttgactcaaattaacctaaaaatcat

SEQ ID NO: 200027 - DNA, 380 bp, Glycine max
agcttataagaccaaaacatatacaaagtatgtttccaacaatctaattctcacgctaatctagttgtccaaaacacaaatgaattatacaaaaatacttctcacaacatgggaagtaaaacccctcaaacaatttcacataatcatatcacaatcataggttcaaaaacaccaagagcattaaattttatcaaccaattcgcattagggcatcaattgccccatcaaacataataatctcatgattataataataaaggcataattacaatacaataaacatcccaaaataaatctcaatttgatcctctaaggatccctacacatgttcattataacctcaattgcgataaactcatctcttaccttaagcgggttta

SEQ ID NO: 200028 - DNA, 478 bp, Glycine max
  unsure (1)..(478): unsure at all n locations
tgttgaccattgaataggtgaatcgtgtgcaatttcttgtttataaattagattctctaaaggcaagaaacgccaacccttttagcaacagtagcaatgatgtcaaagtaacaacccaatgggaaacctttgattctggaatggaaagctcggatgccccatccgataactcgtcttcaacgaaagtaactcaagattgggagcagtttgattaaatcttgtacatcatactactgtcccttcatcctttgttcgagattcatatatatattgagaggtcttggtacaacgatgttgccttgtgatttggtaggcagaaattntaattgcagaaatgttctctccgcttaagtaaagttgcatatgttaatctatctcgtgcacttagttttaggcaaaacatgtaaaaccaaattgtattcttgttacttgaatatattattgcatgttntctaaaaatttgagctgtgtatatatt

SEQ ID NO: 200029 - DNA, 414 bp, Glycine max
agcttattcattttaaaatattattgccacattttggtttcatcaattcctctctaatcaattacagccttttttctttaatatattattgcaaactatttttccaaactactcccaactaccccatatatatatatatatatatatatatatatatatatataatataaataaaaaatcagcggaataagatcaaacggacagctatgaagtaagaatgcaatatgataaatgaaaaatataaacttgtaaagcagatatcaagggcacaccgaaacggcttacaaacccaggtttatgaaaacaaagaaaccgaagcgactgcagaacctcacaggatctgtgaggggagaatggagatattaaaaataaagctttgaatttattgacaccgagagaaaagcttacaaagac

SEQ ID NO: 200030 - DNA, 291 bp, Glycine max
ataagatttgataaaatcgactctagatgaaataaaatctacatcagatcagatcggatggaataatatctagatgagataaaatctggataagatacgatttgataaaataaaattgtctgctctcttcaagtccaagcccaattgcttataattcttctgaaactaaattaaaaacacacaattagtccagtaggcccaaatgataaaactgcctaattaatttgaccactaacgctcatcagtaattaaaatggtaacaaaaagggttaacaaataggagaaaataat

SEQ ID NO: 200031 - DNA, 275 bp, Glycine max
gaacctggacagggatgctagactacctttcatcttctgaactttttggatgtaggccgagcgtcccatctccaatatgacagtgcatctgtcggggtctgcttcatatccccctgagagtgattatatagctcaagtactcgccttcgcctacctcgatagtgcctttttaagacgcactgtctattttcaaagttttccgaacacttctttacgtctgacacatgttggcgtctgctttgagacttgatgaccatgtcctcctcatatacctt

SEQ ID NO: 200032 - DNA, 209 bp, Glycine max
agaccacaacactaggctaaaaaaccaaatggtgcatttccaccttcaccaccaacaattgcatggccagatcacaaagcttatgcagcaggtccattctttttatatactctctaccctgacagagacattcttctctctagagcactctctctgcgctcgcagcaaaactatacattgattgagaaaatgtcaaaaacaaaccacac

SEQ ID NO: 200033 - DNA, 453 bp, Glycine max
  unsure (1)..(453): unsure at all n locations
aactcaagcttatgtctaacggctgaaatagatcttctttaacacactangttatacaactgctacttcaaacaaatagcgcggcaactctatcgcattaaattatttgtcattcaagataatgaatataacagtaacattttaaactctataataataaaatcatttaatataaaatatttttgcgacaacattattaaactataactaacaattaattattatttttgaaatatttaaaacaaaagaggtaattctgtggcatttaactactagtcaaatgactgttataaaacataaattttggtaataaaacggcatgagatgattgtttgtcgcgttttccgatgaatggaagattctgaaatagcatgaaaatcagcgctcttttcgtgctggattcgaattcgtaaataggaacaccaacaacaatatcttactttactcttacta

SEQ ID NO: 200034 - DNA, 216 bp, Glycine max
aacaaaaccacagatactagcagatatattaattctcttcgaacatcatagagagacgacgagacctctgctacttatccataaagaccaacaacattaggagggctagttgcagaaaaccgagcggtcatttctcctaaagacacagcaacacccatccaacttaaaagaaagagaattctctccctccaaaccggataatcgccccctctcaat

SEQ ID NO: 200035 - DNA, 428 bp, Glycine max
gtttccaagcgttagagagaaagagaatggaatggaagggattggagcttcaatggcactgtcttcatcaatcctaatgctgggaatgtgcaaaaatgagttccgaaggtggtgtctaaatttcatgatgatccaatggttaacaagtctatgattatatttttactgggacatgtatgcgtgcatgcacgacaaagatagggttttgagagaggaagaaagggaaaacaaatttgagatgaagagagagagtagagacgtatcatacatgagaaaattgacttaatatgtctcttactctcagcctatcatttactctatatttcttcatttctttattctataaaaacaactctattctactttttcattaaatagatagccaattataacatttctttatttttacaacatcacttattctggta

SEQ ID NO: 200036 - DNA, 442 bp, Glycine max
  unsure (1)..(442): unsure at all n locations
agctgtgaaggtgtgtaacccaccattnttttatagtagaacaccggtcacgtgtctactatcattgtgataatctctttctctgtttttgggggtgctacttgagttgccaagcctctccatctttgggcgtgttctttgaaagatctgtccccccttttgcacatgttctgtagttgcatcctatccgaagacattatactgacactgcctaacgaaggccaccactaggtccttccaagaatggactcgggaaggttccaagttagtgtaccaggtaacagctacccagtaagactttcttggaatgaatgtatcagtaatttcttatcttttgcgcatgcccccatctttcgataatacatctttagatggctcttggagcaagtagtctccttgtacttgtcaagtccagcaccttgaacttgagaggggtgatgat

SEQ ID NO: 200037 - DNA, 352 bp, Glycine max
acgaaccacgtccgctcctgagatgaatacaccgcttcagacccccgtacaccatcacctcttgaggccatcaagggacggtcatttctccaggagcgaccgcgccagcctaagacgctaaagaaccgccactacgaggccacctagcaactactacaaccccgcccgctatgtgatcacctttaggttctcacatcatataggacgcacctacctgctcatgaccctgggaacctaaataaaacaagcgcaagccgcgaaagtagtcatacctcacaaaatatacttatgctcgttaggcagcgaaacaccttacaatgcatgcatgtaacaaaataccactcacaaaata

SEQ ID NO: 200038 - DNA, 457 bp, Glycine max
agcttgtaagattatggagtacccatcacatgtggtactaggtggcggtcgggcgatggtgcacaacaagttttccacatccacaatgcgcgcataaacccaccatcccctgttgcccacctccaactgagctcacgtactcccacgtagccgatatcctcgtttctctcaacaccgggtccccatcaatcctcccaagcttccacaacatccaagcaaaacaacattcaaacagcacaagctatcacagccaagcaaaacagagcaaaggcagaaaactctgctcaacacatcaaccaaaatcacagcttttctcacttaaagaccacagtaacaattccttcgatccaattcgttaaccgttggatcgactccaaaattttactggaagtctatagtgcataagcctacattgtgacgcgtgggatctactaataaacatccagaactcattctg

SEQ ID NO: 200039 - DNA, 377 bp, Glycine max
  unsure (1)..(377): unsure at all n locations
ntntggagtagaaacatgggaccaactcattttatttcataaaggaagtcgtatctagtcaaggtctgagagaccatacaagtttcctaacgatttctaattatgtgggccattaagtctatcatatgctgacaatagccgagaagcccatgaatctcttctggggcggagtaggtgtctgccatcgccttggccttggctaacaatcggggaagttcttgactcccgttcaaggtaagagcaaaccgatccatccacatggttgcctcttggtgtaaagagtcgatcacccttcctctagcctctttttccgcgtatattcgtccgcaatcctatgctcgtgggccgcggctagacctaactcttcttggtacttg

SEQ ID NO: 200040 - DNA, 455 bp, Glycine max
  unsure (1)..(455): unsure at all n locations
agcttgtatagntccncaatttatggttattttggagtaaattttgtaaataaatcttggtgtatggttaacactgtctctagaacatttccattggatttaatgatgaactctgtgcattttcaggtgaaaaagtggctaagttttgaattgcaaaaaagtagcagttgggctaagtgcttatcctccgctaagcgcagcttcaacgcgcttagtgcaaaggagaatctggcagagcattagcatcaaagccatgtgctaagcgcgagatcagtgtgctaagcacagcatatgccttcagtcaagctaagcacgagattggcgctatgcccaattccacttactcgcgctaagtgcgagggtggcgctaagcacaaggtcgcgaattctgagcctatttaaagcctgtcttatgtagaattagggtacagattgtagacacactctttgagact

SEQ ID NO: 200041 - DNA, 449 bp, Glycine max
  unsure (1)..(449): unsure at all n locations
gcttctaaggaggtgagcttagttatgagaggcgtgtgtgtagctaagctctagcttctcaaggaagttttttcaaagaagcttctcaaggaagttttctcaagaaagcttctcaaggaagctacttagtctataaatagaaacatgtgtaacacttgttgtaactttgatgaatgaaagtcttatgagacacacttcaaagttccacttctctccctcttttattccttcaatttcgtgctcccccccttctctctttcttttcctccattgaagcatcatctccaagcttcttatccaaggctcatcttggtggtgaagctccttcttccatgacttattccttaatggatggcgcctcctctcacctcttttcctttgtcttccgctgcatctccatggnggaatatcaccattaaaggaccccattgaagctcacagatccacct

SEQ ID NO: 200042 - DNA, 453 bp, Glycine max
  unsure (1)..(453): unsure at all n locations
agctntanaatntcaaactccacaaataaattatgttttattaaaattaggtcaaataaataatgatcttaaaataaaaagcgaaactgattgtttagcaacttatgagcttgaaaattttgagtttttgttaagtatgactatttggtatgacatattatttgttgtaaactcaactagtataaagttacaatcaaaagaaatgggtatggatgttgctataaaacaattgaaaggtcttatttctttttttgaaaaatatagagaaaatagatttaaaaatgttataatttctgccaaaaaaattgctacttaaatggatatagaatctagattntgtaaaaaaacgtgttattcgtagaaaaaaacaatttgatgagaatattgataatggaattataaaatcacctaaagaatcatttaaaattgattacttcttgtatataatagatc

SEQ ID NO: 200043 - DNA, 446 bp, Glycine max
  unsure (1)..(446): unsure at all n locations
gtagccttaggttggtcactatgttgctcatgttgctccctctatctctaacaatatgccttantgtggtggaaccaagtgaggagtgatgttaagaggatgagaaggcctttgattcatactaggcaagacatgaagagagttttgagagagagatttgtgtcgtcctattataagagagaccttcacaacaagctccaaagactaattcaaggaaataggagtgtggatgagtatttcaaagaaatggagatttccttgattaggactcaaattaaggagtctcaagagaccaccatggcaaggtttttgcatggtctaaatagggagatccaagacattgtagagttaccccactatgcctatttggaggatctcattcatcaagctatcaaggtggagtagaaattaaagaggaagaaaatatatatgaagtccccatatat

SEQ ID NO: 200044 - DNA, 452 bp, Glycine max
  unsure (1)..(452): unsure at all n locations
agcttgcatgattacattcttcctctttttgatgatgacaaccacctgtagattatgagcaataacaaaagaaaatatcgatttgcatatagttttactcccccttggntttgcaatgattgcttatatgagacaattgaagatttcatagatttcatatataaaacattgtctcataaagaatagataatttcctttactattntatcttctatcttggtatcaggttccttactgggcttcatatggaagcgagggacaaagttgaactccttccacataggaacctagatgagctagtccaactttgtataagaatggagcaataacttaaaagaaagccttcaaaatcttattgctccactcttacacaaagaagggccaagcccaatgatatttgggggatgcacctttcacacccaacgaagataatggttagaccatagagaaat

SEQ ID NO: 200045 - DNA, 405 bp, Glycine max
tctgccctcatttcctataaatagggggagaagtgaagggaaaaaatgttcagccctcctggtaattcgagatcacttgaaattagtgaaaaaaattatttccgtgaagaaaatccaagctgaggcgcttccgtaacgtttccgtgggtgatttctcgaagattttcaaccgttcttcgacgttcttcgtcgttcttcggtcttcaaccggtaagttcccaaaatcgaacttttcaattcattctatgtacccttagtggtcctcatttgttttcacgcgcttttattttcatttcatttacttttcgtacccccttttgacgtgctttaatcatttacttaagtcattctctcgcctaatcaaaaaataaaataaatttccaccgatcatttgaattgtaacat

SEQ ID NO: 200046 - DNA, 404 bp, Glycine max
  unsure (1)..(404): unsure at all n locations
agctnttctattcattctatgtacccgnggtggtccacattgtgtttcgtgtatttttattctcgtttcatttactttttataccccctcttgacgtgcttaagccattttatttaagtcatttctcgcttaacctaaaaataaaataaatttccaccgaacgtttgaattgtattatccgctaacttcgtttaaaatgaattccgaccgttcggtcgtgccgtaaccacgttggaaatcaaaaagagataaattaataatataataacaaaaaaatataccttttagtaaaataaagcggaaaatcaatcgaacattttctctttgggatttctcattcttaattgaattgactaataactaaggtgaaactaaggctaaaatcaactcgcctagtcaagctc

SEQ ID NO: 200047 - DNA, 436 bp, Glycine max
tccaagaatcaagatcaagattcttgactcatgattcaagaatcaagagaagacttaatcaagataagtatgaaaaggttttttcaaaaactgagtagcacatggatttttctcaaaacatgtttaccaaagagtttttactctctggtaatcgattaccagatttttgtaatcgattaccagtagcaaaaatgtttttcaaaaaactttcaactaaatttacaacgttccaattgatttcaaaaagctgtaatcgattacaatgatttggtaatcgattaccagtgtgtttgaacgttgaaattcaaattcaaatgtgaagagtcacatcctttcacataaaagctgtgtaatcgattacactacattggtaatcgattaccagtgattgtttctgaataaatcaaaagatgtaactcttcacatgggttttgac

SEQ ID NO: 200048 - DNA, 440 bp, Glycine max
  unsure (1)..(440): unsure at all n locations
agcttctggtgggacatcttttcttgctnttcaatctgacattcaccacagattctggcttcttctattatcagattgggaatgcctctaacagcacctttgtcaatgattttcttcatgcctcttaagagcagatgtccaaatctttgatgccacattctgacttcatcttctttggaggatggacatgtggaggagtatctggtttcttgaggtgtccataggtagcagttgtcctttgatctgctgcccttcattagaacttcactcttctcatttgtcaccaagcattctgactttgtgaagtttaccttgaatccttcatcacacagctgactgatgctgatcaagtttgcagtcagtcccttcaccagcagtactttgttcagactaagaagtccatcatgaactagctttcccattgcaatgatctgtccttt

SEQ ID NO: 200049 - DNA, 426 bp, Glycine max
gtacagcagaatttagtaatgacccactaacctagaattatttaacttaatgccattaacctagggaattaaaaaaaacttaatggctgagtgtaactgaaattgtggcaaccaaaagtcacccccaacagccaacaagtcagccaccatttggtctcccaaaaggttgatgcctaggttgccaattgggcccttattacaacttgaactaaacctaactaaagcccttttagttgattaacccaaaacatatttttggtcagccaactttacaaggattgggccattatttagacaaactatacactctaaaattgagacaaagtggtatcatttagtcctcctccatttgggccatgatacaactcacaaccttggacttttctccttgaaatttgggcttgtattcaaatagtatggacaaca

SEQ ID NO: 200050 - DNA, 462 bp, Glycine max
  unsure (1)..(462): unsure at all n locations
atcctcagagtcacctgcggctgcagcttctaaaaattagtcgggtgggtggtttttttacttaaaggacttcattgtcaacttaaaaaatgatatgtgactacttcatacctgtatatgagttttgctaattgtgtcgagttgttcctttatccagacagttgttgcttgtagcttttgcaaaagcaatgatatttatgatcaagacatgcacattttctcattacgattgtaagtgatttttattctttgttttcatgtttaattttgtgcaagtaaaataagtatcttctctgtcattcattcttattataactccttccatgtgattgatgtaatattgatgacatacaccactaaaacatatgatacacttgagaagagacccggaaaagattcagtaacatttaaccaacataaatattgtatagaagttatgacaaatggtctttttnttttaca

SEQ ID NO: 200051 - DNA, 455 bp, Glycine max
  unsure (1)..(455): unsure at all n locations
actcaagcctttagtgcanagnttaaaattactcaacatgattatttctttctttgtatcttcgatgatcgnnnntccttttccagccgatggaatgcatcactatcctgtcatcatattactatggtaagaatctttcaatctgttgctcgttggttaaaataaacataatccctatagtttcacttgatttgaatattttattctttttgagattgatccctatagtttattctttttgagtttgatccctatagtttcacttatttagattatggtccttcagtgaccaatatctaatttgaaactataaggaggacctttattttgtttttttggaaggcaaatataaatattattaatagaaagtgcagatggatacccacgaggagtgggaggggaactgcacaacatcaagtacaaaaacagagtccttaaaaaagctcccattgatc

SEQ ID NO: 200052 - DNA, 416 bp, Glycine max
  unsure (1)..(416): unsure at all n locations
agcttngcattccccaaagaaccatcaagaaattacttgttgaaaagagccatgagggtgggctcatgggccactttgtgataaacaagacccttgtcttactcaaagaaaaagtctattggccccatatgaagaaagatgtccataagcattgcactatgtgtgtggctttgttacaagccaagtctaaggtgatgccttatgggctatacacacccttacccattccatctgcaccttgggtagacatttgtatggactttgtccttgggctccctacaacccaaagaggtgtagactctatctttgtagtggtggataggtttagcaagatggcacactttatcccatgccacaaagtggatgatgctctccatatctcacaactcttttttaaggaagtagtgagactccat

SEQ ID NO: 200053 - DNA, 392 bp, Glycine max
  unsure (1)..(392): unsure at all n locations
tntataggaaccattctgccttgcacccgattctcattaaactccttggatgcttcatatgctntggcagngactncagctgttgcacgtgcatcacatattgaacttgacagatgtgtgcatttcaagtcattagagagaaaatctatgcaatcttgcattctgcntcctaatcttttctttgtatgcaatgtcaaaaccttctcagaaaaggagccatttgtatgcttcaattccaactgatattcactttgtctctctattcttactgtcctcttcttcaaatgttcatttcctacaaaagaatctgattcgtcagtagacatggaacacgcatcttgatgacctttaagagaagacaagtatttgctggcgccaattaacttttcatt

SEQ ID NO: 200054 - DNA, 460 bp, Glycine max
  unsure (1)..(460): unsure at all n locations
agcttggactgtgctagagagaaaaacaaatgaccaaagtgaaccaatagccatttctagggcaaaattgtgtgttgaagagtcaaattttgattcggtggaattttaagtgtaaatccagtttgggcaagtttagattgacgttatggactggtgtgaggtgagagtttgcttcatagttacctcattctaaatttcacttttcaaacctagaaaacccattgaattgaggggttttggacacctatattttgtgttgctgtggtttgaagcttggctttggtttagacaggtttgatacctgatttgggacttgtaggatntgatttgagcaagattggatgaggggaagtgtgattttcgaaatctgcacttatgtagaattttgctgtcaaaataggtgcagcaagatcttagcttagtgcacaaaatgcttgtgtgtggttggctgtgaaagagt

SEQ ID NO: 200055 - DNA, 438 bp, Glycine max
tgtatataccttcttcaacaagtgttcattgtctctaaacagatggattatttcacttgagctcacctttgaagaatgtgatcgctgaagaacttaatgcttgcatcaaatgcaagtactccttcatgctagaaaacaaccccatgagctctaatgttgatcatttcagcagaaaaccacttgctttgagtgacattgggtttgtcagaagcagtgcacatcttttaatggtgtttggcaattttcatatcttgaacttttttgctctctcttttggctctatttctcaacttttctagcttatgtgctcaattgttcacacttaactaatacccacgagctttgcgaactaatttagatctaaacaagatataatatgacataattatggctcaaagatagtcaataacagtttatgaactaccccacacttgatca

SEQ ID NO: 200056 - DNA, 465 bp, Glycine max
  unsure (1)..(465): unsure at all n locations
agcttcatgatgaatcaagaatggttcaaagttgttttgatgataacaaagatgatgacaaaggtgatgacaaaaagctcaaagttcaatcaaagaatgagttcaagatgttcaagatagaatcaagaacacttcaagattcaagaggaaagttgaagaacacttctagattcaagaggaaagttgatttcaagaatcaagaatcaagattcaaggatcaagctttcaagaatcaagatcaagattcaagacttaagattcaagaatcaagagaaggcttaatcaagataagtatgaaaaggttttttcaaaaactaagtagcacatggatttttctcaaaacatgtttaccaaagagtttttactctctggtaattgattaccagattgttgtaatcgattaccagtagccaaatggaatttgaaaaagtctcanatgaatttacaacgttccaattgattcta

SEQ ID NO: 200057 - DNA, 422 bp, Glycine max
atagcttaggtgagatctattacacaccagtttagtttttgtatactgttaatagaggagagaaaattttagggttttgcattttcagtttcgtgttactgttcacgtagcaatcataatttcattttttgcttcaaattgcaatttcgttttctacttctgcctttgaattcgttttcatttctgctgattaatggaaggctgagtttccagtgttgttttctcttgaggatcaagcacaactctctttgaggttttgttattactattgaattctgatcagtttttccccttcaccaattgctctgtatttgttgctggtaattcatgcatgcttaatgcttcattaattgtctctgtgcttaatatacagtcatgcttaatgatcagtttcgctcatgcttaatggacatgtgagaggg

SEQ ID NO: 200058 - DNA, 457 bp, Glycine max
  unsure (1)..(457): unsure at all n locations
agctnttctcggtntattcttttttttcattttattccctatatatattgttatttntatatttaaaaagaatagaaatattggacgtcgagtcctatgaagcacatggataaaagatattgaagtttttgagatgaagacatcgtcatcttcgaaagcgtaaatgatggcattatcactttttgaaggcatgcattgactgaagacattgtcgtcttcgaaatgtaaatgaggacattgttgccttttgaaggcatgcaatgactgaagacattgttgtatttgaaatgcaaatgatggccattgtcactttttgaaggcatgtaatgactaaagacattgttgtcttcaaaatgtaaatgaaggtcattgttgccttttgaaagcgtgcaatgattgaagacattgtcgtctttacaatatagataaaggaattgtctcctggagaacacattgt

SEQ ID NO: 200059 - DNA, 445 bp, Glycine max
  unsure (1)..(445): unsure at all n locations
cctgctanaccggaccttagaaactcagcttctaagagggagctagtttgaaagttgtgtgtattttatctctagcttctcaacgaagttttctcatagaagcttctcaaggaagttttctcaagacagcttctcaaggaagctacctagtctataaatagaagcatgtgtaacacttgttgtaactttgatgattgagagtcttgtgagacacaattcatagttcaacttctctccctctttcttccttcaattttgagctcccccctctctctttctctccctctttctttttctccattgaagcatcctctccaagtttcttatccaaggctcatcttggtggtgaagctccttcttccatggcttattccctagtggatggaacctcctctcaactcttctcctttgtcttccactgcatcttcatggtagaaaatcacca

SEQ ID NO: 200060 - DNA, 340 bp, Glycine max
  unsure (1)..(340): unsure at all n locations
aactcagctcaccgttgactctgtgagaaggcctatgaacactcgattattgccgacaagagctaaacttactcatgaataactacttctgcgatcctggccatcattatgcaaagccacatttagtgcaggactatntgctatgaagcccccatcaactttaataccataattctccccttgggtcacacggttttttaatacaattcatattactctcaacatcttcttcacaagaaatgtgacctcctaacaaaacacgttatagtaaaagttatatcggaagaaagaaaaaactaaacaattagcacacaatatgaattacctcttcactaaaata

SEQ ID NO: 200061 - DNA, 456 bp, Glycine max
acctctaagcgaccgcagatgcaactatagagcttatggaggatcttttctgtgatgcctcagagcgcatatatgagtacgtgatgggactgttggccatattaaataccctctataatgggatgaaagaacatgtatagggattacatctcggtcagctatgttcttttgtgcaggagtctcttatagcgatggccatcggctatttatgtcctcgttcttataaataatcaatcacccgtttgctgtccggcgagactctagtatctttgtactttgtctgggcattccttatgcccatttctctctataatacagagttttgtctggctgatcctaaacaacctacaaaactatcggcaaaatcgcaaagactcctgaaatcaataattatctatagatataacgtatgataaaactttatgacatcgccttatttcatgtactcatctaaca

SEQ ID NO: 200062 - DNA, 439 bp, Glycine max
tataagcctaaactgtcaacaataacatctttctatggtcgttatggcgccaacaaaattcttacagacaggatgtccaacaaactatactctggattatattccacgagaaaatcgaaatctctattttgccagaaggaacgtgtcagtcaaagaccaatatctcttgtcaaacatgggctaaagtggttgcgaaatattttttatgcactcaactcctttactcgtttaattaattgggccaactactactactttatgaatcgcatcgcgtatggcatttaaacaaagaataagcactcggagaactttatgtatactaaaaatctatggttattgtagtctaactacacgggttaaatggggtgtcactatttgtacacccatacatataaaataacgtgcatacgatttcctggattctgcttggatgacatat

SEQ ID NO: 200063 - DNA, 429 bp, Glycine max
agcttaacaaaaagcatgcgaagcgggtggaattcctacacaattcccttatgttatcaaacatagaaagggaaaaggtaatattgtagccgatgctctttctcggcgtcatgcattactttctatgcttgaaacaaaattgataggtcttgaatgtttgaaaagcatgtatgaaaatgatgaaatctttggagaaatttttaaaaattgtgaaaaatttctagaaaatggtttctttagacatgaaagctttcttttcaaagaaaacaaatcgtgcgtgcctaaatgttctactaagaatttgcttgtttgtgaagcacatgaaagaggtttaatggggcattttggggtccaaaagactctataaacattacaagaacattcttattggcctcatatgaaacaagatgtgtataaattttgcgaaca

SEQ ID NO: 200064 - DNA, 411 bp, Glycine max
tcagcaaaaccatattcttgttggccagtcgttgtaaccccgtacaatctccctcctgagatgtgcatgacaaaaccctacatgtttttgagttgcattgaccaagaccagataaccccaaagcatgcatagacgtgtttctacaacctttaattgatgatttgaagaggttgtgggttggagaatggacatatgatatttcaagaaaacaaaactttcgaatgagagcagctttgatgtggaccattaacgactttcccgcatatggcatgttgtctggttggagtactcatggtagatttgcatgtccacattgtatggaacatacaaaagcatttactttggataatggagggaagagttccgggtttgactctcatcgtaagcttatgcctcataatcacccgttta

SEQ ID NO: 200065 - DNA, 422 bp, Glycine max
tattctgatcactgcaattggtctgtgcctattttgttttatttctggaagctaatgtaatagctgtagcttatggaacaccttacttgagctacatggtgcattacgcatgggtgatgacctagatgttgatttattcatatcgtgaaatttggtaaagatttgttttggttgccagttgtgtaacacatccctcaacttttgtctgggcttgagatatgtaaaagttgacaataaagtatgatttagccacataggcttagttgttctttgtactgaaagcagatttgaccttgcatgtccccagcacttgtaacttgttcataaggcctagaattcttcatggctccttgaggaacactagtaaattactatagctatgtaacgtggtggtggggagggaataactgaaagggatcaat

SEQ ID NO: 200066 - DNA, 417 bp, Glycine max
  unsure (1)..(417): unsure at all n locations
agcttttcgattcattctatgtacccgtagtggtccacattgtgtttcgagcattnttattctcgttttgtttactttttataccccctcttgacgtgcttaagccattttacttaagtcatttctcgcttaacctaaaaataaaataaatttccaccgaacgtttgaattgtattatccgttaacttcggttaaaatgaattctgaccgttcggtcgtgccgtaaccacgttggaaatcaaaaagaggtaaaaaataatataataataaaaaaaaacatcttttagtaaaataaagcgaagaatcaatcggacgttttctctttgggatttctcattcttaatcgaattgactaataactaaagtgaaactaaaggctaaaatcaactcgtctagtcaagctcgttcacaaaaata

SEQ ID NO: 200067 - DNA, 388 bp, Glycine max
  unsure (1)..(388): unsure at all n locations
tcanacttgcaacanaggagttgagcaggtaataaagattcgtcttcaaactcttagaggtgactntgagcgtttgtttatggaggagtccgagtcaatttctgattatttttctcgagtattggtcgnggtcaatcaacttaaaagaaatggtgaagatgttgatgaggtgaaggtcatggaaaaaatacttcaaactttaaatccaagttttgacttcattgttaccaacattgaagaaaacaaggatttaaagaccatgactattgagcaactcatgggctccttacaagcatacgaagaaaaacaaaaaagaataattaaacaaaaggaggctaccggagcactactacaactcaacgtaaaggaagcanactatgctaattac

SEQ ID NO: 200068 - DNA, 430 bp, Glycine max
agcttgtagaatggctagacatgatacatgttaaggtttggtttggttcaaagataaaagggatgccccacattatttccatgacacaaatgcaaaaatgatgatttggaaactttatgcaaaattggtcatgcatgcacctatgtggacactcaagtgtcaaatttttatggtcatgtgatgctaaggctcaagattcatttcctctattttaaatcaacccaatgtttccaaaatatgttcttttatccatttgtgcattcatccgagtccatttcgggcgtccgggaaaattttcacaacgttcacccttcaggtgtatacacactttttttttcaaaaattggttatgaattttttcaaagaaaagttggaagtcatctcttttcaaaagcatgttggtttttcagctagacaacttatttttctt

SEQ ID NO: 200069 - DNA, 347 bp, Glycine max
tagaaagtcccttcggattcaatttgtgtgttcattggtgtataacatgagatgaaatgcaaaggttgggacttatgttagttttttatgatggaatgagcctaaacacttgagcatgagtgaaacaatgactgtgaggtttggttaatgatccttccttgatttctgccatccatactagcttatttcagttgtgactataatgtgcatgattctatctttgaaaaactgcatgtttgtgaaaattaattgattgaagcagtccatgatattcagttcatatggttgaatttttttttctgtgaagcaaacaccatttttgagtgatcactgtagcttgtcacttg

SEQ ID NO: 200070 - DNA, 464 bp, Glycine max
  unsure (1)..(464): unsure at all n locations
agctnttctccaagctagaagaacccaatattttttgttctacggaaccactacagactctatacaaatcanaatatttgctgtttggttgggtcggtgactacacatatttattgttattaacaattcatagtcattttattaaatttcattccaagtcataaaataatatttacatttatttatgttttgcattcaaacactttcaagcaaatatgtaacatatacatatttattgctaccaataatttcaaagtattcacattaatttaatcctaagacataaactttcaatcctttaatgacattcaataataatattaaaaaaaatgagcaagtgaaattgaaaatagcaaaaaggagttgcaaataacaatttccaaaattttcttctcttcctctgcaaaagaacgtcgtgcggccacagcttttccatgaattggaattgaaactgcacattaatg

SEQ ID NO: 200071 - DNA, 456 bp, Glycine max
  unsure (1)..(456): unsure at all n locations
tctcaagaaaagttctcaaggaagctacctaggctataaatagaagcatgtgtaacactcgttgtaactttgataaatgagagtcttgtgagacacacttcaaaataatgaaagggaaggttgggtttctgatgtaacttttaaaaaccaccaagggccccactggtaatgctatgattgctcaagagcttgtacacttaatgcacaaaaatcaatgatgttcaaaattgtccttaatagaggcacttttaaattttgtcacggaatatgctagataagtcacatggtttttaaaatagtccttgccattaaaattaaaagtattacacatcctttatagtcgcttatagaggcaccactgataatgctgattgctcaagagcttgtacactntatgcacaaaaattaaaggaaggttggttttctaatattcaaaattgattttgaanaaacata

SEQ ID NO: 200072 - DNA, 403 bp, Glycine max
  unsure (1)..(403): unsure at all n locations
agctttanatgcttgntctgcttctatgattctatggaatgttctcttttctaacaaacccttcaaaggtgtagccattatttcataccctttaacaaaccttcagctataaccagttatactaagaaactctcataaagccttagtatcttttggaccaggccagttcagcatagctgcaactctttgtaaatctgcagccactcctctagctgagaccacatgtcctaagaattccgccttctttgcaaaatcacgcttcttcttataagctaaaaaggtattggtccttaataataaaagtaccttccacaaatgatactcatgtgttacgatataacgagaccggagagttatttaagatagttggactattaatgagttagttagttagttagacggg

SEQ ID NO: 200073 - DNA, 426 bp, Glycine max
  unsure (1)..(426): unsure at all n locations
nctaggcacaataacatcagggcatcttggctaagcctcttgggaaattttttatatctgtcaaatatggcttgggtaggtgtagagggtgcctttcttttcctagaagccatctacaaaatataagacaaaacacattagattagcacatgtttattctaaaaaaatagaaaaatgtaaactgaaaatagagctgggcacttagcacaacaagctggcacttagcgcaccttatgaaattaacataagcgctaagcgcagcaagctagcgcttaacttgaagacacaaaaaacatttttttatgctgaataggcttagcgcacaggagcgcttagcctaagtctacaatttttagaaacagtagaggactgtggcttatcaccacattctggcacttagctcagtctcaacagagagacactgag

SEQ ID NO: 200074 - DNA, 460 bp, Glycine max
  unsure (1)..(460): unsure at all n locations
gcttctccgaaaggcatggntatttccagtttcctgaanatatctaagaatctcgccaaatgacggtccttctccttcttggaaggtaccagatgatatggtacttcaacaccttcattcacagctttttctcttttcttctctctagcttgttcacttctactcctctcttcattcttatttttttcatttgtttttctttttctacttctttttctttttcttggtcatttaattcttttctcttgaccattatttgtttttctttttcctgattgccttcacctctcacatcatctttcttttcatcagcacctttcttttcagaaccttttttcttggatacaacactatcctcatcctctgcctccacaaacctcttactccttgtcatcacagctttgcattcatccttaggattcnnttttgtattcgccacaaaactgctagatgacttgtc

SEQ ID NO: 200075 - DNA, 431 bp, Glycine max
  unsure (1)..(431): unsure at all n locations
gtgtgattagctggtaactggtacttcaactcttatataggacttcgcaagtatatgaccgggtgaaactatnattttcaataactaaccgacgtttcgacacaaacaatccgtgaatcttattttacattgattaagcgagattatggctcaaataatccactggacactcactttacaatgataaaaaatgagattacggcgcaattaatcggtcgaaactcgctttacacaaggaaataaatttactgatggtagaagaacgaaaatgaagatgtgaaaagcaagaatggacccctaatggtgcatagaatcaattctaaacttcaaattaaaaactaaccactcgatgaatgaagaacaatcatggacacattacgaatacattaccgaagcacctttgccttgattttcttcttctttctcttctc

SEQ ID NO: 200076 - DNA, 457 bp, Glycine max
agctagcctactagacgacaatatcttctagggcctttgtatgtgctcccctgacttggaagaagcttcatattatgatccatggcagtatgactcaagaataattttgctaggaaatgacaattccagatgaagattgagcaactttgatgccaaagaagtacttgagggggcccaagttcttagtctaaaagcgactatgaaggtgagatttgaggggtaggatacctgcggactcatcgccagtgatgacgatgttatcaacatatacaatgagatagaggcatagtctagacttataatgaaggaaaaatactgagtgatcagcttcacattgagtcataccaaacttaagtagagttgagctgaactatgaccaaaccaggaacggggagattgctttaagcctatattgagccgcgatacttatagataacgcgggagtcaccagagacta

SEQ ID NO: 200077 - DNA, 458 bp, Glycine max
acactatcaccactcaactgcaactcgaaggagagaccatgacgaaatcaattcggggcttttataatgcagagaacgaagaattgcactaatcaatcactacgcatagctccaaactcgaatgtggaggacacatgaacgataacacaattcatggcgctcccaaataggtttataatggagaattgcactaaacaatcactacgcatggctccaaacttcatagtggaggacacatgaacgaaaactcacttcatggggctcccaataaccttgagaatggagaattgcactaagaaatcactactcaaagctccatactcgaaggtggaggacacatgatcgaatacgcatattatgtgctccgaaaatggtggaaaatggaaaattgcactatgcaatcactactcatggctccaaatcggaggtggatgacacatgaacaaaaacgcaatcat

SEQ ID NO: 200078 - DNA, 457 bp, Glycine max
  unsure (1)..(457): unsure at all n locations
agtcacctgccgcatgcaagcttgtagagagatcttcgntatgggttaattgattaccctcatattcgtaatctattactcagtacttttaagaccatggttggttctcttgggtctctactttaatcaattacgtgggtgtagtaatcaattacattcgtttttgaaagtgtttccagaagtgatcaataacactttaatcgattaaaacaagaatctaatcaattacattgttcttgaaagctttctatgtgttgggaagaacactttaatcgattaaagtgagaatctaatcgattacttttttaagttaatagattacattagcacattaattaattacatgcaggtataactattttctctataactaccaccttgtgtttcactttcagcaattacaaagtgaaaaaaacgagctttaccatcccaacttcagttttatttctgaactttc

SEQ ID NO: 200079 - DNA, 452 bp, Glycine max
aaactccagctgaagggattgaagatattgattggaaaagtattccagatttaaagaatgaatttattgaaaatgcacaacaaagccttgcttttatagactcttcatgtctggtcaagaagaccatttataagagttattacttttataaaaacttaaaaccaatttgaaaaagtcaaaacctttttgtagaggtacatcttttgatttattcataaacagtcactggtaatcgattaccaaataaagtgaatcgattacacaaagcttttatgtgaaaggatgtgactcttcacatttgaatttgaatttcaacgatcaaaggcactgtgaatcgataccaaaacattgtaatgaatacaactttctgaaattattggaacgctgtaaatcaatttgaaaactttttcaaaacaattttgctactggtaattgaatacaacaaactctaa

SEQ ID NO: 200080 - DNA, 430 bp, Glycine max
  unsure (1)..(430): unsure at all n locations
agctagaaggtgtgtaacccaccatttntcataatagaacactggtgatgtgtctactatcattgttatcatttctttctccgtcattgagggaaccacttaagctgccagacccctttggcatatgctctgtagttgcatcctatctggagccatatcagaattgtactggtactgcctaatgaaggcaaccattaagcccttccaagaatggacttgggaaggttccaagttagtgtaccaggtaacagctaccccagtaaaactttcatggaagaaatgtatcagcagttcctcatcttttacgtatgcccctatcttccgacaatacatctttagatggttcttggggcaagtagtccccttgtacttgtcaacgttcgacaccttaaacttgggaggggtgatgatattgggtactatgaacaac

SEQ ID NO: 200081 - DNA, 413 bp, Glycine max
tcttgcgtagcccttcttggtgctcagaaaatcccaacaacatatccctcttattactagctattttgaaatctttagttcctgaatgtacaaccttcaaattgttgctcgttcccctctttgttttctgcaagaaagaaaatcaatatcaaacaattcaggctgaattgttatcgttattattactcgaaccataacgaataacaactaaacaagtctctcttattcaaatggaaatggatgttgttccaccagcatcatcagctttggaacaggattttggtctccaaatacaatggttggaggggattagatcaagggcctaaaaagcactatttttctacttggtgggatgacctaagagccatcatccaacaccagagtatgaatcctgctcttaaccaaatttgctg

SEQ ID NO: 200082 - DNA, 439 bp, Glycine max
  unsure (1)..(439): unsure at all n locations
agcctgtggatgttctaagactgtatattgtatcgntctcttggagctcaactgacatgctacgcatagatccaaatttcctccatcacacattgtgtttagacttctcggccaagccagccatccgaaaatgaagaaagttctgagaggataacataaaagtaattactgatgaaacaaagaagttgattcactccaccatgttagaaaaattcaatatttgacttggctggtgaatgtggtgatggttaacaagtcaagcgggaaatggataatatatggtgaccgtacaaatttaaacacagcatgctttaaggattcatatcctctaccaaacatcaatcgcctagtcaatggggcatcatgtcgcaaattgcttagcttcatggacgtgtacttacggtataatcaaatcaagatgcctcctatggacgaggac

SEQ ID NO: 200083 - DNA, 449 bp, Glycine max
  unsure (1)..(449): unsure at all n locations
acacaagaaactaagcttgataggacaccatagctctgccanaatgactctatttgtatatacttgtactganttatttgctataatatataatacatacatattttgcctatcaaaaaaaaatccttgactttttcaggcaagtcttaaaagaaagtatcacacgggctaccttgttttaagaaatacctcaataagaaaaaccacactaagtcttaccttggcaacagcataaacaccaaaaagacccgtgtccttgtaattggtgttgaaagccataatgctctcagcaacttcattaatgccaattcgctgtgctaactccgaactgtttatagtcaaaatgcattcagttagtatcagggagagaatttttcctttttcacgaaggggcgttcaagtcacataccccatgatgtttccacctcctgctgtcttatttcaagaac

SEQ ID NO: 200084 - DNA, 396 bp, Glycine max
ctgcagctttttgttggagtgataaaaatgtcaatgtaggtcgactaggtttctgtgagcgagctcaatcgacgttttgttttggccgaaactggcatgttcccatttattcggccacgaaaacattatcatatcatggcgaaaaaatatttttcaccgatattgattgaaaaaaatgcctgtcgacgtccgccaagaaagatgactgatcgatgtctaaaaaagaagcatcaccgcatgacgccgatcgaacatttccttaccgacatcataaatatttcattaagggattgaatagaaaactcaatagccgacatcggtcgtgaagtagcccgactgatttttctcagctgacattgggcaatttctatataaagacgctcactggccgataat

SEQ ID NO: 200085 - DNA, 445 bp, Glycine max
tctattaagctgaaccattgtatcaataaacacaagttgtgttttattcagaaaaatagagttgatctctcttatcttagtgagagtgattctcctaaattcttgagtgattcaagaacaccctctggctgtatcaaaggactttcacaacctttgtgtgttgccctcgctggacagagagattctttccttccttccatcttcaacctgggttgtttcaaaccacaatatcagaaaatccacttctgcccaaaattatctcgtggccataacccctgttttacacactcaaagtaagtgattcttgagcctaaattgaatttcaagacgagacctttcaccttgctttggaatcacctcatttggagccctgtagcttgagttattgtcaattctatatttctgtccagccaccacttaacctaacgtttctcatctcattatt

SEQ ID NO: 200086 - DNA, 445 bp, Glycine max
  unsure (1)..(445): unsure at all n locations
agcttnttttggaccttgaataagcatcatctccttttcaaccatgctatgcgctcgtgactggtctctttctttccttcgcaactggagttcactattgctaccccatagagctccgcgaaattagatccggccatactcttccttgcgagccctcttggtctcttgttcaaggctctcgcggtaattagattctcttcccgtacaccggcacactccttccgaacgcgtgtagcagctcaactcgaacctctccttggcgagttttgcctttcctaactcgctcttgagagcttggacttcttcgttcttcttccggagcttcataattgtccttcgctgacgacttttaacttggcgagccaatctaaaccatggacgcgaactttcagccattgtggtgccaccactgatgcattacaatgccttaacctctcgatttttc

SEQ ID NO: 200087 - DNA, 355 bp, Glycine max
gaggtccaggaatgacaaggcggtcgatgatctatttcttctccggagtacgacagtcaccgctttatgagcgctgtacaccagcagcgctttgaagccatcaagggatggtcgtttctccgggagcgacgcgttcagctcatggacgacgagtatactgattttcacgaggaaataaggcgccggcagtgggcaccactggttactcctatgaccaagtttgatccagaaatagtccttgagttttatgccaatgcttggccaacagaagagggcgtgcgtgacatgagatcctgcgttaggggtcagaggatcccgttcgatgccgacgctatcaaccagctcctgtgatatc

SEQ ID NO: 200088 - DNA, 412 bp, Glycine max
  unsure (1)..(412): unsure at all n locations
tagctgtatgatntacattcttctctcttttgatgatgacaaccacctgttgattatgagcaataacaaaagaaaatatcgatttgcatatagttctactcccccttggctttgcaaagattgcttatatgaaacaattgaagatttcatagatttcatatataaaacattgtctcatagagaaaaaaataatttctttactattttatcttctatcctggtatcaggttccttagagggcttcatatggaagtgagggacaaagttgaactcctttcacatatgaacctatatgagctactccaactttgtataagaatggagcaataacttataagagagccttcaaattttattgctttactcttacacaagaaggccgaacccaagaaatttggggatcacctttaaa

SEQ ID NO: 200089 - DNA, 428 bp, Glycine max
  unsure (1)..(428): unsure at all n locations
tcttccctattntcctataaatagggggagaagtgaagggataaaatgttcagccctcctggtaattcgagatcacttgacattagtgaaaaaaattatttccgtgaagaaaatccaagctgaggcgcttccgtaacgtttccgtgggtgatttctcgaagattttcaaccgttcttcgacgttcttcgtcgctcttcggtcttcaaccggtaagttcccaaaatcgaacttttcaattcattctatgtacccttagtggtcctcatttgttttcacgtgcttttattttcatttcatttacttttcgtacccccttttgacgtgctttagtcatttacttaagtcattctctcgcctaatcaaaaaataaaataaatttccaccgatcattttgattgtaacatccgttaatttctcttaaaatgaa

SEQ ID NO: 200090 - DNA, 437 bp, Glycine max
  unsure (1)..(437): unsure at all n locations
agcttcctcggagccattttctgcgaaggctaacatttggaaagttagttntaccagtgggacactactcttaaaacaaaaatgacatacaacctcctcccataaatacaaacatcaatgtaaatttagagcaagcttatgcgcatatttccctacgaacgttcacttgcacaagacatcctattaactaagaaaaatgcacccatatacaatcaaggtagcttcattacctagattatttacacgtacttccaaggtgtatttgttatttacatcacacacgcctccttggctaaatttacatacatgcatactcaaagcattttggggtaccaaaaattgcacatgcgctcatcttggtatttctaatacctatacatatacaaacttcatgatgaatcttgactacctacgcaataaggtgctacatttcatgc

SEQ ID NO: 200091 - DNA, 433 bp, Glycine max
  unsure (1)..(433): unsure at all n locations
tcatgatgatgaatcaagtatgagtcaagtagttttgatgatgacaaaaagcccaaaagaacccaaaagaatgatttcaagattgagtcaacaagtttaagatcaagattgatttcaagattcaagaaaagacaccaagaagaatcaagattcaagagaagatgaattcaagattcaagagaagaaatcaagaagcaacaagtcaagacttcacaagggaagtattgaaaaggatttttcaaaaaccaaacatagcatagttttgttttacaaaagagtttttctcaaatttttctaagttaccagagtatttactctctggtaatcgattaccaatttcttgtaatcgattaccagtgttaaaatttgatttcaaaagctttaactgaatntgaacgttccaatggtatggaatcgataccagtgaaagttt

SEQ ID NO: 200092 - DNA, 472 bp, Glycine max
  unsure (1)..(472): unsure at all n locations
agctaggagaanatgccaactaanaagtgatatgattgaagaaacanaaagataagagattaaagaaaaagaggaaacgattgaggaagagaaagagaaagatgaagaaagaaaagattcaagaagagaaagagaaagatggagaaagaagagtgaacaataaataggggctgtggaaatatcataaatgcccccgtttatactacgtgtcaatgctgaagacaggggcaaattcgactacttctagagtgaaaaagacaataaaaccaataaatgtgtaatatgtcaacaaagtagccagggcaaaaaaggatttttgctagactattcttttcatatagatatattagatagatacatcctgcctgcagaggtcatttgcaagttcttgtggcagcatatagccaacatatttcanaattatgacgtacaaaagtttttgttaaagtttaattgaaggaacattgagcat

SEQ ID NO: 200093 - DNA, 439 bp, Glycine max
  unsure (1)..(439): unsure at all n locations
tctaaactntgtacaagaatgaagctctgataccacttgttatacacgtgttctcatatatcttaagaaggcggggttgaattaagatattccaaactgtttcccctaattaaaaatctatttcactttttactcaagttatgaattcccttaatgacaatcttcttaaatattaattcaaatgaagcaacttgaatatgaatataaagcaataataaataaaggagattaagggaagagaaaatgcaaactcagttttatactggttcggccacacccttgtgcctacgtccagtccccaagcaacccgcttgagagttccactatcttgtaaatttcttttacaagttctaaacacacaaggacaatccttcctttgtgtttagagatcctntacaacaagagactcacagtctcttaatcccttatagaatgagaa

SEQ ID NO: 200094 - DNA, 462 bp, Glycine max
  unsure (1)..(462): unsure at all n locations
agcttgtatatctgtctcgtccttccaccttgtttgggtattcctagatcgttgaggcctatcgtaagagtagcttcgttgagggtcatttctttgtctcgagtcctttctcactcccnctctgtttctagaggtgaccctcacccacccctcatctctctccctcgcgggttctcttgctctctctccctctctctctcctgtgactctacctttttcttgatttattttcatattcttcccatgatgaagtcaacaatctataactttgattttagcgctgctgcttacaactattattgctactggtttttaatttttcctacctgtatatatagtccctttcttacttttcaattctgtaagaaggaaatagtcttcttgtccttgtattttctccatacttagatctaaaatttagattcctggtcttcctatccaatgcatagaagagtccacatc

SEQ ID NO: 200095 - DNA, 432 bp, Glycine max
  unsure (1)..(432): unsure at all n locations
ttaaactcaacttggagttccaagtgccaatacgncttcttctttagtccagtcttcttctggcttcaattcattagagggctntccttctgtgtccagcatcttgggatattccagcctttgatgacagcttttcaagttctgctatccagagatatgagaaaggccaccattcttgctttccagaattcatagatggttccatcaagaattggtggcctgtcactgggcctccttctttctccatcgtcatcagaaaatatctccctagatctcactcagtgatatcgagtgcctgctctgataccaattgatattctgatactgcggacagatgtcgtacaggatgtcacgacatcacgcttcagaacatgcagattgtctttgactgtgtgaacagattaagctagtatataacacaagagaattgtt

SEQ ID NO: 200096 - DNA, 452 bp, Glycine max
  unsure (1)..(452): unsure at all n locations
agctngcagactacattaagattagaacctttatatacttatttatattacagaanatggtgcgtaaacattgattacattatcacggacgttttctgtttattcaaataattatcacggaggtttaatagttatatattaacagtctaacagtgtaaagtaattttttattgtcaaccaatcacaaatcacctatttcgcacagtaattggttagcagtataaaactactttacactgttaatacatagcctattttctcaaatatgcatattttcaaatgtttatataggaatggaaacaactttcaagatagaaacaaagaaaagggagtggtattttatgattatttgtaaaaatgtgaaatgaaacaagaaagttgtttccaaaatctcattntctttcatttgtttaagtagaaaggactaggaaagtcacatttgtatgtatgtt

SEQ ID NO: 200097 - DNA, 424 bp, Glycine max
tatcaaactcagctgctgaagtctcttcttttgtaagccttttaccctttgtaactctttttttaagcagcatcatgatcccggaattttatacatttatgcctatgttcttttgttacttcacgtttcatgagtcacgatctttttgatagacatcagagattggataattaaatatttaaatgctaggctcaatcagccataaactctgctagacatatattgttcatatttcactggattatgcatgtctggatttatataaattggttagttttctctagttcagcagcaattatattatgacttgtgtcatctaattggaaaacatttgtggcagaagaaacatgggtattaggtaacaagcacaatcttattcattctctttgcttataatttcggtacatcatggatatcagctttt

SEQ ID NO: 200098 - DNA, 443 bp, Glycine max
gaaccgtcagtggcaatggcgggataattgcttactatgagagagggggaggcgtgcctccatcatcaatggcgggatggggtaaaacatgacagagagaactgtccctcccatggagatggcgggacatgtgagagcggtaccgccaacagtggttgctggacaggcggagagataatgtgtgggtaccgccaacagtggttgccggacatggggagagaaagtgtttgtgtttgtgagaaatacccgtgtgtgggttacgtgaatgaatgacagcttgtacctttctctgaatatcctgcacacctatgttcacgtgaatgaatgaagtaccttgcaagcaataactttcagaggttctgaaatagctgcatatatagcatgataactttaaaaacaatttgaacgttgagggcggggtttaagctctggctataaaaaaa

SEQ ID NO: 200099 - DNA, 431 bp, Glycine max
aactcagcttgaagaacctggagtgaggccaacaataacagcgtttttcttcatagaagtctatcatttacattaaaaaatgacttactctaacttccattatgcatgtgtgcataacaatctataaatactttatagtcagttatatcattaaaaaattctatttatggttgacaaaatggaatggttcgacttggcccgccacccagaaacattataagaaattaaaacattactgacaaaattttactactattgataatatttgtcactaatacttgtgtcagtaaaattttactaacgattgtttaaaaattacatctaaattgctttgtcaatatttttaagttgtttttgtagtgaaaaaatggaccaacttgtcccatcccacattctaaatatgggttaaaagtaccaatccggcccatttt

SEQ ID NO: 200100 - DNA, 442 bp, Glycine max
  unsure (1)..(442): unsure at all n locations
agcttctaatgttgtctttgcagagatccatcagaagttgtcaatcccaaacatcttttcatcaattagtcttgctacaaacaattttcaataagcaaaanagttcanaatctcataaatgaaattactatagatttggaataagactttccaaaatgacctgaaaatcaaaacaacttatgagcacaagcacacactatagagtttatgagcacctganaatcaaaattacttttagtctacaaaagattaacacacagtgactatagattaatttcttggttgaaatatagataattcgttgtaaagtagtccaaaatcttggttgcctaggattgaagggtataagttatttaattctgttttctttgaacaagtttatattgtgatgaatttatgtggtttagtaatggaaattgtgcgttaacatttgcatatcatg

SEQ ID NO: 200101 - DNA, 430 bp, Glycine max
  unsure (1)..(430): unsure at all n locations
tgngcattntcattggtaatgtctaacaaaacatggagagtctaactacaaaaaacaagaagtcaagaacagatgttattaaaggcatgtgttgacgaataaagaggtacataaaacattggtttcttgactcacgttgtagtaattgtatgtgtggaaaaaggaagtatttttcagattttgatgagacgtccatagattcagtaaagttcgacaataactccaatatatggtggtcagtgggaaaggcaacatcaggttggagatgaatcgatttagcagcataaccacgagtcttttatgtgtcagaattgaagaacaatctactgagtcttggacaattgcaagagaaggtactgattgttatatttcagcgaaggcaatgtaaagtgtatatcctacgaaaggctcgattataaaatcaaatatg

SEQ ID NO: 200102 - DNA, 457 bp, Glycine max
  unsure (1)..(457): unsure at all n locations
agctagcttctacaaaatcaacattaacggtttattaacgtataatggatgacaaannattgtatcgcataataaaatatgtgttcgtaattaaggcaccaaaattataaacctaccaaatgttactgcccatacataaatgtatgaaataaataaattatcaaaaaaatacaaatgacatgtataaggcaaataaaaaaacagcttcaatgatcgttcgtacgccacatactcctcgatttgtgacctacaactggttggcaaatgaatcttcttgtgatccccacacattcttcagcaacaatataagcttttgttccttcgatcgggatcctcaagttcaataacctctccaacttatccgcaattgccacaaaagcatcctagcacctttcacctacgttgttgggaatcccaacaaaactagtgggtgcccaaagcaacaccctattatcaa

SEQ ID NO: 200103 - DNA, 442 bp, Glycine max
  unsure (1)..(442): unsure at all n locations
tttctctattcttgaacttatgtataaagagagaaagtcattcattaagctcttggttgcatctggttttgcacttcttctcttgttcaaccaaagtcagtccaacctccatattttactggtttatgcattcacttgggtttggttctacctaaagtccatacaccattcattctactacttctcagccaagtataatgtatgattnttatgctcatcagaaaaggtgttccaacctctcatcctaattgttatcagttgcttatcttattaatgcccagatatccactgtttctgaactcacaaggttgtcaattacttgttgctcaattggtactgacccaactgatgctactgntgtggaattctgcatcgatattgcttgctgcactttggctcgagtatcacccaatctaacagaggtaaccctgaagatgaaaac

SEQ ID NO: 200104 - DNA, 442 bp, Glycine max
gcatccacttctaaataaaaaatgacatagtttatttttattaatataagagatatgaaattattttaaataacatattttctttttctctctgagaaaaggcttatatctatatctccttaacattataaatagaagcctctactaaagagagtgtactctctagagctccattcgtcaagagttataacaaatattggtggtctgggggtggatacacgtacagagtcttcacattattgaagaaaaaattgtgttgcttcaagaatgtgcatctgtgtacacaaatctattttttctctgtttattattctcgcatattttttaatgtaaaacagatcctaattttctgctacaagtgttgagaaaacttctacgtaactattaattggtatcaaccatgggtcctttgtatataaaacgtgaaacttgcctttcttct

SEQ ID NO: 200105 - DNA, 464 bp, Glycine max
  unsure (1)..(464): unsure at all n locations
acttcaaactcagctntcgcanaaaaaagaggaaagatacaactccagctaattactcctatatgtgtnntcctattcccgctatgcaaaaccattatagaacaacaccactctgaagtctgaactcttagaagaatagctcaaactaaaacctagcgacataagaactaagaagagaagataactgattgtaggattgttaaacatacaagaaattaatgagtatgtgtggaacactacaactcaaaagtcataaccattcagtatatccagagagatataacattgaattcaattaacaatggagaaagggaagtttctcatcatcttacaataatttaatcctgatttagaaagacgtactagaatccagcaatgtaagagacaactaaaatctcgtttgcagaaacctttcaagatagtaactattaaggaagtgaaaatgcgaacttttccactactta

SEQ ID NO: 200106 - DNA, 496 bp, Glycine max
  unsure (1)..(496): unsure at all n locations
atcctcagagtcacctgccgcatgcaagcttctggctcgaacttataaatacaatgactatggataganttggtgatgcgggagaaaaacgagaaaaaatatttgcattataatagaaagaaagtacccaagcttataaatacaatggctatggataaatttggttgtgtgaagacaaaagaatataagagaaaagagaaaaaaaatatctgaatctaggtagagagaaaataatgtggaatccacactatattttgaaaatttccccttaaatggtaacttctctcccacaactacccctatgagtgaatgcggtgggggcagagaagatcacgcaaaagaggagttgagttgagagggaagagagaaaacaaatatgaaggagagtgttttgagagtcatcaagtttctgggaagagaagcagcttcggtggagctggtgtagtattagtgctatagttggtgttcttgcctgtgtagctggtgtaatcatgtg

SEQ ID NO: 200107 - DNA, 466 bp, Glycine max
  unsure (1)..(466): unsure at all n locations
gacccttaaactcagcttcatggaggaaaagaatgacaatgagagagaggngganggatgcacgatattgaatgataaaaagagagagaagttgaactttgaagtgtgtctcactagtttcacattcgtcaaaattatgacaagtgttacacatgtttcaatttatagcctaagtcattaactaaatgaaagcttccttgagaagctagagcttagctacacacacccctttaatagctaagctcacctccttgagaagcttccttgagaagctagagcttatctacagacacccctctaatagctaagcttacctccttgagatgaaaagctagagcttaactacacacccccctctactagctaatctcacccccatgccaacatacatgaaaatacaaaaatgtcccaactacaaatactactcaaaatgccctgataataaaggctaaaaccctatactact

SEQ ID NO: 200108 - DNA, 469 bp, Glycine max
agcttcaacatcagaccacttccagggtgctggaactactttacatggacttgatggggcctatgcaagttgaaagccttggaggaaagaggtatgcctatgttgttgtggatgatttctccagattcacctgggtcaactttatcagagaaaaatcagacacctttgaagtattcaaggaagtgagtctaagacttcaaagagaaaaagactgtgtgatcaagagaatcaggagtgaccatggcagagagtttgaaaacagcaagtttactgaatactgcacatctgaaggcatcactcatgagttctctgcagccattacaccacagcaaaatggcatatttgaaaggaaaaacaggactttgcaagaggctgctatggtcatgcttcatgccaaagaacttccctataatctctgggctgaagccatgaacacagcatgctacatccacaacagagtcacactgag

SEQ ID NO: 200109 - DNA, 465 bp, Glycine max
  unsure (1)..(465): unsure at all n locations
ctatacaacactcaagctntgagctttgagcacncatgagtgtgtcagcaccctagtacttatcggatgtgtttatgtaaggctttcttcgagccacagatgctagagcagtgtaaggggttctgtgggttcgagtgagcggtttccggtagtattgaaaacaatgtgggacaatgtgggtgtcgagggagcggtttccggctgatttcatgtgggaggagaaagagaagagctatttttggctggaggagaaagagaatagcgagtgcaaggttttcgagcgcgcgggttgtgaaatgtcaacattttaacttataaacataacaacatcggtttttaaggataaccaatgttaactgaatattattaacatccggtttgggcaaaccgatgttaaccatcacctatgtacatcggtcttttaacaaaccatgttaagacaactacttaacattggtttctcaa

SEQ ID NO: 200110 - DNA, 466 bp, Glycine max
  unsure (1)..(466): unsure at all n locations
agcttggagagactnttttgaaaagatacatgtgtttaacctacagagggataaagaatactagggaggaagcctaaagatgattctagaaagaatacttgggtgaagtatggagagacttttcaaaaacaatacataggggtagcctgtagaggcttggagaatacttgtctaagagcctatgaaagcttcatgaaaaaagaatattgtagttggtgttattgttagtggataatcctacaagtgtagggactagacgtagcctaaggttgtgggtgaaccaatataaattttgtgtgtgctttatccttccttactaatgattagttgcttttatatctttttcttaggaaacaaagtttacaatgttatatctttgatataaaatcataagaagttttccagactattttcttaaagttcagaagcaacctctactcttcactataaagataaagaagattac

SEQ ID NO: 200111 - DNA, 129 bp, Glycine max
  unsure (1)..(129): unsure at all n locations
accctctnttttccccttctataattactgatatcataataagagggattgaggtgtgattattacaaatttttaaaaatctttttaaacacaacaatgttacgtctaaagatgaatatgttagaaaac

SEQ ID NO: 200112 - DNA, 456 bp, Glycine max
  unsure (1)..(456): unsure at all n locations
agctntgagcaaattcaaacgacaataactttttactcggatgtctgattgagtcccgtaatatatcgagacgctcgaaatggaataccgaagccctgagcaaattcaaaagacaataaatnttaactcggatgtctgattgagtcctgtaatatatcgagacactctaaatggattactgaagctctgagcaaattcaaacgacaataactttttactcggatgtctgattgagtcccgtaatatatcggaaagctcgaaattgaatgtagaagctctgagcaaattcaaacgacaataactttttactcggatgtctgattgagtcccgtaatatatcggaacgctcgaaattgaatgttgtagctctgagcaaattcaaacgacagtaaatttttactcggatgtctgatagagtcctgtaatatatcgagacgctcgaaatggattactgaa

SEQ ID NO: 200113 - DNA, 463 bp, Glycine max
  unsure (1)..(463): unsure at all n locations
tacggacctataaaactcagcttcttataagctgaaccattntatcaataaacggaagttgagntttattcagaaaattagagtttatctcttttatcttagtgagagtgattctcctaaattcttgagtgattcaagaacaccttggctgtatcaaaggactttcacaacctttgtgtgttgcccttgctggaaagagtgattctttccttcctttcatcatcacccttgttctttcaaaccacaattccagaaaatccacctctgcccagaattatctcgtggccataactcccattttacgcactcaaattaagtgattcttgagcctaaattgaatttcaaaacgagacctttcacctcgttttggaatcacctcatttggagccctgtagcttcagttattgccatttctatatttctgtccagccaccacttaacctacgttttaccatcccattca

SEQ ID NO: 200114 - DNA, 452 bp, Glycine max
  unsure (1)..(452): unsure at all n locations
agcttatgattccatntcctgtgaantcttggattggatgcttaagtccattggcttcccagcccagttctgtacttggatcatggaatgtgtttcttccacttcctttagtgcggcaggcaaaggatccatttatggccacttcaaagggcagcggagtcttagacaaggggatcctctctccccttatctgtttgtgctctatttggagtacttttccagagatatgagcagcctcaaagatgatgccaattttaaatttcatcccaactgtgcaggtattcagctatctcatttgacttttgtagatgatattatgcttctatctagaggagatatcccttctgtgtcaactatggttgccaagcttcaacacttctgtaagagttcatgcgttttcatcagctttgataaatctgccatatactcagccggtattacgcctcatgagc

SEQ ID NO: 200115 - DNA, 426 bp, Glycine max
  unsure (1)..(426): unsure at all n locations
tgatgtgagaaagcgtggaagagtcagtcttcctacttttgtttgttgaccacagagtggtacctgaagatatgtcgcgggggtcaggagaccttggggacgtcatgtggggtgctattgcccaaaaccaagcttgaccaatcccgacccaacccgggcataatcagttagtgagaacctgtgacgtatctaaacaggcgagctcttggcagtcaaccaataaaagaacaaagtccacaaagcaaggaggcttgtgtggcgactgaccagctatgaatcttgagtggtatatggaatttggcctctgttaaaatggcctctggtaatcgattacaaaatgtgtgtaattgattacccagagtaacatggcactggtaatcgattaccagntgggtgtaatcgattacacacggagataggacactg

SEQ ID NO: 200116 - DNA, 453 bp, Glycine max
  unsure (1)..(453): unsure at all n locations
agcttctccaaatggcatagttatttccagttttctgaanatatctaagaatctcgccaggtggcattccttatcgttcttggaaagtaccaaagggtatgacacttcctttccctcatctgaagttgtttctttactcttttctcttgctttttaactcttactcttttcttcttctttatttttttcttctttttctttttgctcttctccctctatttctttttcattgtcttttatttcttcccttccaacaattattggtttttctctccactgactcctctaatctcttacctcattcttctttttatcaatagtgtccttcaaagtaacttgcttcttcaaagcaacaacatcctcatcctcaaccgtcacaagcttcctgcttcttgtcataacagctttgcactcttctctgggattcttcttggtatttgctccacagctact

SEQ ID NO: 200117 - DNA, 447 bp, Glycine max
  unsure (1)..(447): unsure at all n locations
ntntcaccattactatagctaaagaagcaagaagatttcgtctatgaaaggaacaacaagaagtctttgacaagattaaacaagtcttggtgtcgcaacgtgcccttttgcgggcgagcgaaagcgaggctcacgggtgcgctttccaaaggaggaaagatgcacggagtcgccaccaacgtttatttgtggaaaacgtcgagaaaaccgaaggaaaccggtcaaaatgaaaattctaagttcgggagttgtatttacgcttgaggaaggtattagcacctctcacgtttgtctcaaaggacaacagcctattttttagaattgtggaaaatgtattaccttaacttttattctttttattttttgaggacgacaaaagcggagcttttgctcctacgtacccttcatcaaagaggaaatcagacatacgtagttctttcttatgcg

SEQ ID NO: 200118 - DNA, 173 bp, Glycine max
tctcaatatctttaatgggaatgggtcattgattagaaaaatctgatagcgggtcaaggtcctttgatgtggtgccgatgacattaacatagatggtcaactttttcttgttatctttttgcaccataccatattgtcggagtcaatcatgcaggctctaacatagcattcat

SEQ ID NO: 200119 - DNA, 445 bp, Glycine max
cgacaccatggatactgaagcttcttgcgtagcctcatctaggtgctcagaacaatcccatacacttattcctctcttattactagactatagatggattctatggagacctgaagcgtgcaaacctacaatatggcgtgagtacgttctccctctgttgtgtgtaatgcagaaacaaaaatgaggtcttatttactcgccacctctggtgaatacacattctatacttacatgtgcggtagcatggctctatatctattggtatgagctatttacatgattgattacaccgtgcacagtggatacattaaggaacgttgtgcttagtattaaatgatgtgaggaatggaggttcacctttctacgctctctgtactcatcatatccttgcacggaagagaataaaaatagtatgcacctttcactaatatctatttgatgatca

SEQ ID NO: 200120 - DNA, 208 bp, Glycine max
  unsure (1)..(208): unsure at all n locations
ctgcagcaacaagctnacaaaacagataacttccacaatgtggatcatcgttctaaagagcacctatgagcatgcaaagagtacgtatcacgacacttggcgttatgataatgtccgacgctaaggcacaccatatttaaacatctatatatagcagctcttaggcacaattcggggtccgaaatcatttatacaacatcttatacac

SEQ ID NO: 200121 - DNA, 382 bp, Glycine max
  unsure (1)..(382): unsure at all n locations
ntaaagcatgctacctgtatatcatcgttgataacaagattatatgatctgcatctttccagcagatcaaatgcattatgattggtgaaatcctcacactgaaaaggaataacggaatttaggataacaataattccaagcatgccaaagccactgtatgagttgaatctgatatataacctgttcgagaaacttctccccataattctgcttaactgcgcgcatgaactcctctagaagctccgcatattcctgaaccacaacaaacaattatcacgttaacggaatagatacattacactcaaattattttcttaaaaaaaagtgcattaatttgcatgtctgtgagggccaaggatgatcatacctgcccagttgcccg

SEQ ID NO: 200122 - DNA, 446 bp, Glycine max
  unsure (1)..(446): unsure at all n locations
agctttagactaaatagaataactaanatgctgaatcttacaaattttagcttcatttaatcatcattaaaagttaatcagtggtgcaactagctaccccctgttaaaataattgaccatgtgtatatgttttatgtgtcctagtatagcaaacaacaggaatggtgaaaatggatataagagcattcctcttttgcataagagcattgagtgcagtctatgacaatgactttccctttgaagctataagaatttggagcttttcaagatcaaagttgggtagtgcattgagcgcagtctgtggcaatgaatttccctttcaagaatttaggtgcaaataatgataaacacataacctatgcaccctaccatttagttacaatgaatttccctttgaagaaattangtggcagaattcacagaacaagtttgggagacatagtaag

SEQ ID NO: 200123 - DNA, 437 bp, Glycine max
  unsure (1)..(437): unsure at all n locations
tgaacagaataccccagttggctttgtgttggcctttgactaaaatctcttctagtcatctaaggtccaacatgctatggattctgccaaggtctttcttcagctgagtttgacaatcctggaagagaatggacaaaggcaccaaaaggcgctaaacaaggtggtgtcattggaggctgagtttgccaaatggagggctactgctcgcatagtctagcaagtggagtgccctaaggtagctaatgccatcttcgtatttgttgaaattgtgaagtcgaaccaccaactatcttccaaggttggcagtgttttgaccaagttgttgtgctccangttggatgatgatgaaatgtttgaaacgtgcaagggcttgcagaaagagaaaaatgacttggcttgcacggtgaagagcattatgatggagaatgatgagcttt

SEQ ID NO: 200124 - DNA, 414 bp, Glycine max
agcttatgcattttaatgtttacatcgccatgaatagagctctaagtgttactaaccatatcattatattgaggatgagagatccacgttgcctgaaagtggaaagatttgacttttttacttcttgatttcaagaaactaagcttaatagggttatggtcagaattatgcattggcaaaacttttgaaggagcatatcgaaacattaaccgccaatcagaatcagctaagcacctatcaagttttttttcttctcaaatggccacctgattgaatattttttctccaagtaaagaagccaccaaatctatctagatccattagaccataagtagccatcatattagcaaaaaggcaagctctagatgaatatgaattaccttctgagacctcggaggggcaaagaatctcact

SEQ ID NO: 200125 - DNA, 408 bp, Glycine max
tagtgcacatctgttgcggcaatcattaggcttagtgggcatatgctagctaagccgattatgcagaagcaaaattttctacaacatccgctaagcgaccccatgtgtcgctaagcaatagtgtgtattttgtgaaggcaagctaagtggaccatgtcttgctaagccgccaatgcctttttcagttttatttttaagtttttgaatttgaataacttgtgtcctgattaactatttggtccctttatttgcagatggcctctaagaaacgctagagtatcggttcaagacccacaactcaatatgatacaaggagatttcactccttagatgcatggaaccggtacacggataatgtattatggagaaacatcttgccagagaggaaggtggagctctaccacactg

SEQ ID NO: 200126 - DNA, 440 bp, Glycine max
  unsure (1)..(440): unsure at all n locations
agctagatagaagctgggtggttgacctttcaagaagatgggcccaacatataaaccaacccgcttgctaatcatggaagggggcggntaatgccatcgaggtgagtangtcacacggggcccagcttttggaggacgtaaagatccccagaaggtttatctacaaagccttgcaaaaggcaggtatggttccctgcggcgggcacagagaagactcttgcttgatgcatccgggtgtactccatgacatggaaacatgttcggaagtaagggatcttttacaatggatgatagaccaaggtcggcttgaggtctatagttagagggaggaggaacaacatgtatacgtgcaatcagcggacgaagaaagacctaaaaagcctaaacccttggtaatacacttcaccaggaacacggctccccatagaccccaacacccc

SEQ ID NO: 200127 - DNA, 457 bp, Glycine max
tgtaggattatggggtacccgtcatgtgtgggactaggtggcgatcgggcgatggtgcaaatcaactctcccacatccacaaatcaaacatgaacccaccatccccagttgcccaccttcaactgagctcacgtacccccacgtagcccttatcctcgttcctctcagcaccgggtccccatcaacccctccaagcttccacaatatccaagcaattcaatattcaaacatcatgaactaccctaaaccaagaaaacagggcagaggcagaaaactctgcccaaaacacattccaataccacaactttccctactcaaataccccagtaacattctcttcgttccgattcgctaaccggtggatcgactcgcaaaattttactggaggtccctagtacataagtctacattttgaccattgggatctactagaaaatgtccagaacccaatatgtac

SEQ ID NO: 200128 - DNA, 476 bp, Glycine max
  unsure (1)..(476): unsure at all n locations
gtcacctgcggcatgcaagcttgaaagcatgtggcccaccatcttcttatttaagacaccggtaacatgtctactatcatcgttatcaactccctctccatcattgggggtgctacttgagctgccatatccttccacctttgggcatacctttcgaaagattcgtgctcccttttgcacaacttctatagctgcatcctattcggagccatatcagaattatactgatactgcctaatgaagacaaccattatgtctttccaagaatggactcgagacggttccagattagtgtactaggtgacagctgcccctgtaagactttcctggaagaaatgcatcaacaacttttcatcttttgtgtatgcccncattttcctgcagtacatcttcaagtagttcttgaagcaagtagtcccctagtacttattgaagtcaggcaccttgaacttcggagggatggtgatgttatgcac

SEQ ID NO: 200129 - DNA, 330 bp, Glycine max
gaacctaatagagacttgacatcttatggcctttgcctttcacgatattattgccttctttccaactcctgatattcactgagacagagggttccttgatttttaagacctggttccctcatgacctacaaactatgccattcatgcacattccatttgtctttcatggactatagttctatgggagttggccatactcagacgataattgagtcaaaacgcacctgcgcaaggaaaattttcattccactgctatttccacaaaaacttaagatttgctgcaatattttgcatctcaatgacatgttcatacttagtacaagaaccatc

SEQ ID NO: 200130 - DNA, 455 bp, Glycine max
agctagcctaacaacctcattgactcagatctttatagctgtacccagcacacttgtttgagcaccgtgagaagtaaattctcatgctgagaacagtcaaaacatttaagctggaacatctagaaaattataagcatttaagcatggccaggctatagattcccaatttagggatgtcacctaacatgagtgaactgaaattacagtagtgtgctgcttatagaattttgaagctgttaaagggggaagcatagcttggccagaatttttcctctaccttaattataggattgtatttatgtggtttctcacatccccatttcagattcttcttatgttcaacgacaacttttattctaaccggtgttatgaatataaagtatcttctaattctaccaatgattaatctctatcaaagaattgatccatcacttttaatagaatttcaaagacac

SEQ ID NO: 200131 - DNA, 458 bp, Glycine max
  unsure (1)..(458): unsure at all n locations
actatacacaactcaagctntataagtgcgagtctgggagacgaaggtcaagtgttcgcgatatgtgattatgatgttccaagtacttcggatttggtccgaccatgccctcctgatttccagctgggaaattggcgggtggaggaacgccccggcatttacgcaacaagcataatgtaaacctttacggctttaaaagctctatggttgggcctaggctttagagttttcattttgttaaggctttgtgtcttttgtctttgaatttataatacaaggatctttcttcatctgttcctggtctctacccattctcattcatttgcatgtttacttctttttctgaaacggcagatccaatgacgagtcccccgaaggtactaatacctgtgactcgtctatcaacttcgagcaagaaatgaaccaaacggaagatgaaggagatgaggaggtgggac

SEQ ID NO: 200132 - DNA, 454 bp, Glycine max
  unsure (1)..(454): unsure at all n locations
agcttatatggttattataatcgaaattgccgaatagcaaagtccaaattagttacgattagtgaataaaaagatgaatggcttgaatatgatgaaagggaaccaactatgtggactttctttgcagtggtgatggtggtggggccccatggggattatcttctttcactgatggcaaacatcattgcacaatctgacaaacaactggtgggaaaaccctgctttcatttgtacttgtactgtgcccgcttagcttgcagagtttttatttatacctcttcgcttcagtgatttggtgaataaaggaannataaatattcacttaattgatcggaggagacaaagtattgttaaaaggtgaaagggatatcatgtatatgatcccgaatttaaaagaaaattaaagaagtcattttttttgtatcctcaaacattaaaaatgtttcttttaatc

SEQ ID NO: 200133 - DNA, 422 bp, Glycine max
  unsure (1)..(422): unsure at all n locations
tatcagatntcgtttagaaatgcaagctccatatatatcatcatggcccctagctcttagcatccaggtctctgcatgcgccctttttcctatttagaggcttatctatctgaattatagacctgaaagagttttttggaaataatttgtttacaggcacaacctgttaatgttcctacaagttttaagcagagggcagtgcttgtggatgagatctggcatgctgctggtgataatgcttccgacattgattggtatgccaagcgcactgtccttggaggaatatactcaacaactgagatttatatgctgacagatagctctcctgcgttggttttcttgaatttcttcccctcccttttaaagacacaagcatttcatagaatntgcttgattctctttcatccattcaccatttctag

SEQ ID NO: 200134 - DNA, 480 bp, Glycine max
  unsure (1)..(480): unsure at all n locations
atcctcagagtcacctgccgcgtgcgagcttgttcttggnttagacatgattgatacaagatttgggacttgtaggattcgatttggtcacaattggatgaaagccagagtggttttcgaaatctgcactttatgcagaattctgctgttgaaatgtgtagcagaattttgtataagtgcagaaaaatgcttgtgtatggctggttgtgaaaagggtagtacatatggagttctgcgacatttctagcagatcccaacggtcaaaatgtagacttatgtactagagacttccagtaaaattttcgagtcgatccaacggttaacaaattggaacgtagganatgttactggtgtatttgtatgtgaaaagctgtgattttgagttgtgctttgggcagaagtttctgtctctgccctggtttgcttggttttgctagtccatgatgatcggatgtggaattacctgtatgttgtggaagc

SEQ ID NO: 200135 - DNA, 440 bp, Glycine max
  unsure (1)..(440): unsure at all n locations
tatgatangcttcgatgggcctttgtggagaaagtgatggttgatgtacgtttaccacctagtatggtatcaaatattatgcattgcattactcacgttcaagaaaatattatatggaatgggccacgatctccattctttgctactcatagaggactccaacaaggggataccttgtccctttatttgttcattatgagtatggataggctttctcatctaattattcaacaagaggatggtggttggatccctatgaaagtggggaggaatgggtccagaatatcccatttgatgttcacgaatgattcgctgttgttggtcaagccatacaaaatcagatgaacacgatcaataaggttttgaagactctatgtgatatgtttgggcacaatgttagccaccataagactatcatctttattttctcagcttttgat

SEQ ID NO: 200136 - DNA, 437 bp, Glycine max
  unsure (1)..(437): unsure at all n locations
agctntaataaagaaacaaaacctccaactgatcagagcatcatatggattttttgatgaacaacaatgtgtctattgaggaaggagagtatgctgatgaaattntctcataaccataaatgcgattttggatgttagcgtttcgtttctaaccaaccatttagaggaaacactgggtccaaaaaaatagaagaaaatcactcagagtgtatcaatctcacacaggtaagtgtttcatcctaattttgaaccatagatatgtcatgacttgattntgcaaatcatttcctatcaaatcaaagattacacacgtgatcatggatcaataggactttttcttgggaatagtgtctttggaggggaatttggctctgagtgtcttggccttctccttttctattttggtttagagcgaggcaaaaaagtcaccgacgcat

SEQ ID NO: 200137 - DNA, 446 bp, Glycine max
  unsure (1)..(446): unsure at all n locations
taaggatggaatacttacttgttggtgatgaataaaagcgcataactgtatcgaagaatgcgaaaagtagagatcctacggctgcaaactcgtaaattccatgggtatggcttttgaaaggggggaaaagaagtttttgaatgcaaaaacgtcccccctttcgtcacttttatatattggtgcaggggttgctcgcccaggcgagctaacctgcacttttttttttgagaggaacattaaccatgtcccctccttccttatgggttagtgttttgcctatttgagcctactcaagttagaattaggcgttaattactaaaaacaaacaatggtagtaaaatactgcgaatccaaaggatactgggctgccttgcgcggcgttctctgcttgtttagcgcacagaacgggcaacgatcggtcggttgtgaccccatccncacttgca

SEQ ID NO: 200138 - DNA, 164 bp, Glycine max
agctagatgactttgatgattattgtctctttattaactcctacaaaagaagcatttctttaaaagttaaattactcatttgatctctatagtttcaagattcttacctttttagtctctatagtttgaaagaggcttttttagtccctatagattacactcct

SEQ ID NO: 200139 - DNA, 429 bp, Glycine max
  unsure (1)..(429): unsure at all n locations
nttggtgatgttatntctgacttaaaaatatttagaggtgtttcttctcagcttgtaagataaggatgtttttttgaattatttaattagagtaataatttttttgttagaataaagtatcaatgtctagtttaagtttaatagagcaagcaaatagattttttttttatttttatcattcacaaaatatttaattgaagtaataattgttttttttagaaaaaaaatttgaacgtgaagtttaagcgtattaatttttgtaattaggttgtttactttgaagttattttaattatgtttaattattttcaagcctttgttgatggttttttaggccttacaaatatatacctgattttcttctagtttttttatagtagaatgacattttaatctgttagttaagtctaagttaaattagtagatgaa

SEQ ID NO: 200140 - DNA, 451 bp, Glycine max
  unsure (1)..(451): unsure at all n locations
tagcttaataaagtccttagtgatccatattttgttgtgctctgccctccgctctnccgtagaaattaccacaccataagacttctttgtattgtacacaacctgcaaatgtccttctctggataaaacacaataacaacctactctaattatgctatgagatggacggcttaaaacgagtcgatcttaatatcctagtatcattatatcaacaaaacaaatgaaactaattgacaaggtgtcctgttgataacgagacaccatcctattgagcttaaagtctatcctagactcctagataaatctgtgttaacatggcacttaacataagaaatcttgggcattgacttaatcatgctacacaacactcggttataagttattatgacacacatatattaacaccaacctgattgggatanctaccatatgagacacaacacaagtgtct

SEQ ID NO: 200141 - DNA, 417 bp, Glycine max
  unsure (1)..(417): unsure at all n locations
aagcttgaaccgggtcgggttaacaagaaaancatggnttttcttatatttatattcttacgnncaaggagagcattcacctatttcctgtctacttaaaggaccactttttctttgacctcccaacctttattgacatgccacaattaacagtgcccaaaggatttttttttttttgggatgcattagctttcagctcatatttccccctttcttttctacgatgataggtattacaaaagaatgtagctctgattctctatgtgtttgagactcatattcctggaacataatttacccaaaacactctcccaaatttggaacaaatttgtcttgatccataataatgctctcctataacctaaaggtgggtgcacaaaaatagcatctgcatattgctcatgggtcaatgacaca

SEQ ID NO: 200142 - DNA, 436 bp, Glycine max
  unsure (1)..(436): unsure at all n locations
nagctttcaaatgagtacaaagtaacaaaaaagtgatacaagtcatttatgacgttgatataactgcagcatccataagctttaaaaatcatactaagtaatgattaacctataatattgttggtccaagtggtattgatctcagattcattaaacaagatcttagatttaagtctcgtggatagaaaaaacatggttggaacctgtgaggtgagactccatcaaagatgagccagtcagattcccaatgaagattagtcattagcaaaaccggtgaatactttgcaccaataacatgctaagaaaaagaaaagtaagccattatcactaaagtcgcacagatgaatatttagtggtgttctggaactataatctggaaagatccccacaattcttaattgaatggatttgtccataattaagggatattagatca

SEQ ID NO: 200143 - DNA, 446 bp, Glycine max
  unsure (1)..(446): unsure at all n locations
taaggcatgtttctatgntcaaatcaaattagtgttntgaaagttgttttttatcaagtccatgcaaaaacttctaaattcatttggtatttgggaaagccattcattgtttttcattctcaatgtttccaaaaatcactttgttgtgttttgatccaattcaaaagcaagtttcaaaatcactggttgctgattctttccaaaacatgttatgtccaagaaaaattttctgtttaagtcccaaaaagagttatatatattctacaactacgctaacagaacaaaattatttagtggtgtgtactaccaaaaagagggtgtcagaccctaatttcatccggggaatgtttttatcgttcgacacaacccgatcaatcatatgcaagaaccttgctcgagtgaatgagtgtcttcttgaactcacgagaaattcacaactcactttt

SEQ ID NO: 200144 - DNA, 392 bp, Glycine max
tgagaagcttctttgagaagctttagtttaactacccacacccctctaataactaaactaacctccttgaaaataaaacatggataaaataacacaacaaataaaatcaaacatcaattataattgctaataatatttcagagtgttacaccgtaaaattgactctaaagagattgaaagttaataaacaaagccaaaataaaaccaactcataactaaacttctttccatcaaaaatcacttaagatcgtttcgaggtctaatgccttaacgaccgttttgtttgtaataaaaatgattctttcaaaagcataaaaccaactcaacacacaaactttctcactttaaagaactacatatagttgaatttctcatcgcacctgaagatgcat

SEQ ID NO: 200145 - DNA, 422 bp, Glycine max
gcctataaaactaagcttctcctatttgctataatagggggagaagtgaagattattaggttcagccccttaggcacttctctctctctcgaaattgctgaggaaaattatttccgtgaacaaaatccaagccgaggcgcttccgtaacatttccgtaacgtttccgtgagtaattacgcgaagattctcaaccgttcttcaagattcatcgttcgttcttcgttttcttcagtcttcaacgggtaagtacctcaaaccaagcttttcaattcattctatgtacccgtggtggtccacattttgtttcatgtatttttattcccgttttcattggctttttatacccccttttgacgtgcttaagccatgtatttaagtcatttctcgcttaatctaaaaataaaataacatttcaccgatc

SEQ ID NO: 200146 - DNA, 465 bp, Glycine max
  unsure (1)..(465): unsure at all n locations
agcttctggtgggacatctagactagcttcccaatctgacattcaccacagattctgccttcttctattttcagattgggaatgcctctaacagcacctttgtcaatgattttcttcatgcctcttaagtgcagatgtccaaatctttgatgccatattttgacttcatcttctttggaggatagacatgtggaggagtaactgtgttcttgaggtgtccatangtaacagttgtcctttgatctgctgcccttcattaaaacttcactcttctcatttgtcaccaagcattctgactttgtgaagtttacattgaatccttcatcacacaactgactgatgtctgatcaagttgcagtcagtcccttcaccagcagtactttgttcagactaagaagtccatcatggactagctntcccattccagtgatctttcctttagagccatctncaaatgtcacatag

SEQ ID NO: 200147 - DNA, 452 bp, Glycine max
  unsure (1)..(452): unsure at all n locations
agctttcatttgtgaaanagttattatctttgttttatgctctattcaacccttcattctagtgtgatttttggtatttcatcatctattttaaaatcgagacatttgatcattctattttaaaaattctgcaattttggtctccctatttcaaaatacaaacatttggtctccatatttaagaaaatctgcaattctggtccctatattttagaaaatcctcaattttggtttaatctttaattttgtctacatttttatttcttactttgtaattacttaaatcattttttgatggtatcttaaatgaatatgttaggtttaggattcaattagaccaaaagaaaagataaaatgtagaaaaaattgagtatttgaccaaaattgcgaaaataggaacagaatgagtatttctaaaatagaaagaccaaaaccacanaatttntaatata

SEQ ID NO: 200148 - DNA, 453 bp, Glycine max
  unsure (1)..(453): unsure at all n locations
tcaggttgctcattgactccagattgctgcaaagaaggacttttatcttatggtgatctgnanaagaacatagaccacagactcttgcaacaggtgcagatttctgattcatggcaagctgagttactatgtcgaccaaagcatcaagttnttcctcaagccttttattttgactaaatgaagatgaatctgtggccacctcatggactcctctaaggacaataacatcatttcttgcactgaattgctgggagtcggaagccatcttctcaatcaaattcctagcctcaacaggggtcatatcaccaagagctccaccattggtaccatcaatcatactcctctccatgttgctaaagccctcatagaaatatttaaaaaggagttgcccacacatatgatggtaagggcagcttgcacataattccttgaatcttttcagtactcatacaa

SEQ ID NO: 200149 - DNA, 476 bp, Glycine max
  unsure (1)..(476): unsure at all n locations
cacctgcggcatgcagcttgttaattatctgatgatatggntatatctattctatttctatggtgagagctcgataggatcacaagataagcaagcattaacaaaaacttgggtttatggctctggatttgaaaacctagtcatttttagcctttccaagcccatccaatgtaagcccaaaagtgattcttcagtcatgcaccccctctgcttttgtcgtanatattttggtgaagccaatgatgaatgtttaaaactttaaataaatataaaatggttattcaattgtttctaattaagtttctccacacttgttctgccaaactgcaatcacgcatggcacaaggagtagtttttttttcttttcacgacaacaatgtattctcacaactaaaaagaaaatcatgagaataaagcatctttccttgtttctatttacttatgtagttagttcataaaaagttaaattatgtatc

SEQ ID NO: 200150 - DNA, 352 bp, Glycine max
agctttatgttagcacataataagtatcaagtctcacaacattctacgtgacgtgtaagtgttgactattccaattcccaggaagtactgcatattcttaattttgggaggaaagcaactaagctctaagagttctcccttctaactcgggttgggctcctctccattgaccggaaaagaaattttcccttttaatcactatatcaaagttcctcaaatagattaaacacgtatgcctctctaacgattgttcatatatatatatatatatatatatatatatatatatatataaaagtgtcaacagaatgtgcatacaacagtattttcttcatcccattataatcaatta

SEQ ID NO: 200151 - DNA, 442 bp, Glycine max
accgctatgctttaatggaattgctagctgtgaactgcttttgaatttgtttctttgagaccgattgcttacaacaggtcacacaatcgatacttacggaaaagaatggtcatgccctctttcatggaatagtttatgactgtcacagaacgattcataggactagctccttgtgttttatcaaaagacaaggaaatagaattgcacactctttagcatctctatcattttgctattttgataaatgctggattcacgaggtcccctataaggtggatcaaatcatttcaagtaatgtaatttctgccttttctttttgtactgtccagggtccataaagtacacttggcaatctacatagcactccattaacacgtgagccctacatgtcatgcctaaccaagagcacggacgttcagaccttattagtctagctctcaat

SEQ ID NO: 200152 - DNA, 401 bp, Glycine max
  unsure (1)..(401): unsure at all n locations
gctgtgagacccaagccatgctccataggatcgcaagttttgtcacctaccatacgccggtgccttatcaatccacattacaaaatcttcccaaccaaaactctcttttcatcccttaaacacatgccaaagccaatcttgtgttgtaaattaaggaacacaacatttacattacattttagataagacgtgggaggaggttgccaagccactgaaatcacagtttttatgaaaaacattaatgagaaatcttgcaggaagtttcaatcacaccccacaactcaactaccatgattttaacttttaagaggctaaatatttttcttttctgtaagaattaaaggattgacaatatattttttaagactaattcacatatgaatacaatttctanaatactt

SEQ ID NO: 200153 - DNA, 430 bp, Glycine max
  unsure (1)..(430): unsure at all n locations
gactcaagcttactgattaaagganctcttctcagttgtaatttgtgagaggtggagaatttatagagacagagaacttagagaatgaaacagcttcttattcagtagaatgtgtatcccaatatgtagtcttgatagacttagtggagactattcaccaggattaactgatgccaattcctcaacactaatatctgtgaacactaactgcatctaaatgagatacatggacatactatttcctatgtacatttaatatcattatttccaacgctttccacattaaagaatcaaatgatcaaaatcttatggtggcatcagttttgctgttagtagcatgggaaaagttctatgatggtggagaatacaagtataaaacacctttagattttgagtttcttagataccttatcacgcactttttaagagc

SEQ ID NO: 200154 - DNA, 456 bp, Glycine max
agcttctccacttgaagagttttcttattcttctatgttctaacccttgccataggtcctccaagtccttctaaaggttccttgcccttattctttgtcttatcctcatcacgttgtcagcattgcaaacaaacgtttcagtgcacgtgtgcatgcatcacacatccgcatgcactcgtgctgtgaagccacacgtgcgaatgcgacgtacacccgcatgcgctcatgctgtgacagctcgagcaaagaaatgtcgagtcagtatggcagcacacgacacatgttgcggagcgacatatggaaacatagttgtggtgccctgttttctagtcatatgttttgtttgtggttcaagtaatggaagtttgaagttggagtgctttggaatgggatgaattattcttgatgaagagaagatgacggaaatcgaaggtgtgagtttgtttgaagtaacgt

SEQ ID NO: 200155 - DNA, 428 bp, Glycine max
  unsure (1)..(428): unsure at all n locations
ntacttaattaaaaattactcttctaaggcttttactaaattggtaagagaatgaggagcagaagaaaaacttaacagaaaagtaagaccgatattaaatgcgcagcggaaagtaaaagagtatggaagaagaaaacaaacacacaagagtttgtatactggttcggcaaaaacccgtgcctacattcagtccccaagcgacctgcggtccttgagatttctttcaactttgtaaaaatccttttacaagcaaagatccacaagggatgtaccctnccttgttctctttgaacctagtggatgtaccctccactagaactgatccacaagagatgtaccctctcttgttctcagtcaaacccaagtagatgtaccctctacttgtaccacaaaggatgtaccctccaatgtgttgagacaaagatctc

SEQ ID NO: 200156 - DNA, 430 bp, Glycine max
  unsure (1)..(430): unsure at all n locations
tgagctgcagctgagcaancaatcacttctattttcatctctagcatgcattnnctttctttacccactcctcacatttggttttctagggaaaaacaccataactaaacgcgccgcaaggtatccctatcgcaccagatccaaatctagaacgatgggtgatcaagaggagacgcatgaacagatgaaagccgacatgtcgtctctgaaagaacaaatggcctacatgatggaggccatgttaagtatgaagcagctcataaagaagaacgcggccaccgccgccgctgtcagttcggctgccgaagcacactcgactctcttggcaactacgcaccatccttcctcaaacatagtaggacggggaagggacacactgtggcacgatggcagccctcacctgngatacaaccgagcagcttacccttat

SEQ ID NO: 200157 - DNA, 464 bp, Glycine max
tacggaccttagatactcagcttacaagcaagcttccatccagtggtaatcatagcacaagtatcttaagtaggtgctccttaaaccttctattaatttcagctttaccttctcctccattgttttttcttcatttttatccatgtatctcctcacatgtcttgtgccaaatgtttttaacatgattatttaaagtttccgctgattaaacttgctatagaagctagatctgattttctgtggttcaaatttcttgttcttgttcttgaaccatgaattgtgttgagtttaggttcctttgagctttgtcttgttattttttgtggctgaaatctaaaccataaaattcttaaaaaaagcattaaattataagacaacctcaaaaatctagattgacttgttcacctattgtagttctgtcatagaagtcatgtctagtcttgaaacttgtcacataacatttc

SEQ ID NO: 200158 - DNA, 386 bp, Glycine max
aaaaatctggacatgataggagcatattggataaaataatatctacacaagataagatgataactagatgaacatatactcttgatcagacaaaaccctggataagataacgatgtggtagaataaaattgttcgctatcttcgaggccaaagccctactctggattcaagcccaaatgattattattctcttgaaattaaattaaaaacacatagatacgtcagtcagcccaaatgatataactgcataattaatttgacaattaaggcttatcaataattaaaagggtgagataaagggttaagaaatatgagaaaatgatgacacatcacttgcattgcatggatataagctcatagatcctctgaagaatccaagatcctcg

SEQ ID NO: 200159 - DNA, 421 bp, Glycine max
  unsure (1)..(421): unsure at all n locations
accataaaactcactgaagtaganagatgagggaggagaggagaaatttatttttatttgcgcctccaatgaagtctgaactttaaagtgtaattctcaaatgatcaaagttgaaaaaatgtacacacatgacctctatttataacctaagtgtcacacaaaattggaggaaaacttgaatttctattcaaatttcacttgtaattgaaattgaatttgtggagccaaataagattggcgtatttctccagagcaggttggtgtatttctctgccaattcaattagcaataaattcaattagtgtgttggataaatgacaattgaaactccaaagcagttagtgtatctctctgcagagttgctataaagaatgatcatatgaactctcgtaccggtacacattttcttcaagtatgggga

SEQ ID NO: 200160 - DNA, 450 bp, Glycine max
agcttcccagatccgatcatggaaagacttgcctactgccttcattaggcagtaccagtacaatacggatatggctcctgatcggaaccagcttcagagtatgactaagcgagagcatgagtccattaaagaatatgcctaaagatggagagatctcgcagcccaagtcgtaccgcccatgacggagagggagatgatcacacttatggtagatacgttacccacgttctactatgaaaagctgataggctacatgccagctaactttgcggatcttgtctttgccggagaaaggattgaatccgaactacgaaaaggcaagtacgaatatgcttccaatgtggcccccaacaacaacagaatagccccagttgtgggcgcgagggaaaaagaaagagatgcccacgcggtcaccactgctccgacgtggatgaaagcacctcacaatat

SEQ ID NO: 200161 - DNA, 407 bp, Glycine max
  unsure (1)..(407): unsure at all n locations
tgtagatgttgagcaatagtcatcaccgcgattgaaatgctcaatnattttcccaattcacaccattgtcacttttattcaacatatgatggttatgatctgttatatgttttagatcaataaggtggcttgacacaaaactgttaacaaaaaccccaccgctggtaatggtcaagatactagccaaaaagtgggcgatatgaaactctaacacctgtcacttcatctttttggcctccttatgactggagggtttcgcagacctattcttgtgatcacagttttgtcttttgcctttgcaactgtctttctcctttggctctttgggagaggggaactgcactantctataggtccctacgcgcaagatttggttaatagataccgctataatggtgttgctgaca

SEQ ID NO: 200162 - DNA, 426 bp, Glycine max
  unsure (1)..(426): unsure at all n locations
agcttaaacaaataatgtatgccttgagtatacttccaccttggcttcctactcctttatcactgccaaatctcttttgtctgacacaactaatcaaacaagatgcaccacctttccatgtccatgataggtaaaacatatttcctactagctataagaaagatgcaacttaccttttctttctaactaaaccctacacctatacgcaaatcactctaccagtctcaaaataaaagctcaaccttttacttctctttcctcacaataacacaacacaacactagaaagtagcagcagcctcaaagagccctacaccctcctcacttaagctctcatcttgatccctaaaatgaagatcaaacaacaatctctcttctgagcctcaattntactagatataacacttattaccttcttgcacaccac

SEQ ID NO: 200163 - DNA, 415 bp, Glycine max
  unsure (1)..(415): unsure at all n locations
cttctttggaccttgaacaagcaatctactcctctntcagaaccatgctatgtgctcgcgactggtccctttcttcccttcgcaacttgagttcactattgctaccccatagagctccgcgaaatttgttccggccatactcttccttgcgagccctcttggtctctcgttcaagggcccttgcggtaattgcattctcttcccgtaacccggcacactccttccgaacgtgtgtagcagccaacttgaacttctccttggcgagttttgcctttcctaactcgcttttgagagcttggacttcctcgtcctcttccggtgcttcaaaattctcttcgctgacgactnttaacttggcgagccaatctaaacctcgtatgcgaactttcagccattcgtggtacccaccaatgat

SEQ ID NO: 200164 - DNA, 448 bp, Glycine max
  unsure (1)..(448): unsure at all n locations
agctnttgaaattttctgaatgaagagagatatatattgggctgttttttatataaaaaaaaaaagagagagattttcttttctttctccttttcttttctaaaagcacttgtcacatgtcctcttttaagtggagcaaaagggcccacctttttcctttgatttaacttcatactcagccacaaaggagaaaaaatttgaccttttggatgctgaaatcctgcctcggtttgcatgccgcctctctggttccagttcctcgcgtttctctgcacccgtcagggcccgttttcaaaagtaggcaatatatatatcaaaacgctaagaatgagaccctgagcgtggtttagaggttggttttattaaattntaagttgcacgcaaaacgataatttttagactaattatntgcgaattactctataaccgttcggttatggggtactct

SEQ ID NO: 200165 - DNA, 394 bp, Glycine max
atgcaaaatgctgaaaaacgagaacctaaagctcgccactcgtgcattccgtgggtatagctattgaaagggggaatagaaacttttgaatgcgaaaacgctcaccctatcactattcttataattaggtgcacgggtggctcagtacatcttatcctagttataatagccagaattttatagccatatatcaacttatagaggaactcaaaggcacgaatgcttcactcaccatgattcattaaaacaactctaactcctaactagttatcaattatatagactcattcgtatatagcagaattatagcaactcaactttgtaccaagcagctgtcatttggctgagattctccacgactataactaaatgaatgagaaactgttcattctgg

SEQ ID NO: 200166 - DNA, 449 bp, Glycine max
agcttatgcattcaataccctgaagaggatgtcccatatgttcttaaaactggactgattcatttgcttccaaagtttcatggccttgcacgtgaagacccgcacaaacatttgaaagaatttcacattgtctgctccaccatgaaacccccagatgtccaagaggatcacatatttctgaaagcttttcctcattcattagagggagtggcaaaggactggctgtagtaccttgctccaaggtccatcacgagctgggatgaccttaagagagtattcttagaaaaaattttccctgcttgcaggaccacagccatcaggaaggatatctcacgtattatacaactcagtggagagagcctgtatgagtattgtgagagatttaagaaactatgtgccagttgcccccaccatcacatttcagaatagcttcttctccaatattttta

SEQ ID NO: 200167 - DNA, 439 bp, Glycine max
  unsure (1)..(439): unsure at all n locations
taacaaaaggcatgcgaagagggtggaattccttgagcaattcccttatgttatcaaacataaaaagggaaaaggtaatattgtagccgatgctctntctcggcgtcatgcattactttctatgcttgaaacaaaattgattggtattgaatgtttgaaaagcatgtatgaaaatgatgaaacctttggagaaatatttaaaaattgtgaagatttttcagaaaatggtttctttagacatgaaggctttcttttcaaagaaaataaattgtgtgtgcctaaatgttctactagaaatttgcttgtttgtgaagcacatgaaggaggtttaatggggcattttggggtccaaaagactctaaatacattacaagtaacattttattggccttatatgaaaaaggatgtgccagaaatttgggaacattggatttgatgt

SEQ ID NO: 200168 - DNA, 455 bp, Glycine max
ctttaagtataatttgtctggaatcaatatataaaactagacttaactgttttcaaataagttgttaactgttctcataagttatcttggagaacttattaaaataagctaaacacaatttatggacagatcttatgatattttcataagctctttggaatacttacccgagtatttatgtcataagaatataaggtaagtctaacatgtaaataagttctcctaatacatcccaaatcacgaattcaaacctcataaatcataattgtcactgtactgagtttactttggaagctacttggatgctaatacaatcaaccctttctgatgcaataagtatgtcttagatggttatttgagcaaggtgtgactttcataccaaagagctacaataaagagagattaaaggaaaatttagagatatttgattggtcactcaccaaagatgaccatga

SEQ ID NO: 200169 - DNA, 391 bp, Glycine max
  unsure (1)..(391): unsure at all n locations
tagactagaagaattgacatttcgttgtgataaaataaattaaacccatcagcttatgtctaagtgctctaacttaatttaatttttgacttacctgaataattaatgtaaattttattgcactcaactcttataactctcgcatccgtgaaaaaaattataacttgactcttgagattatgtctacttatgcatgatggataaaaaataaaataattaaaacttaaacttagttctatctgttattaattattttaaaacacactattaaaaaaaatgtattcaaccacataaaaagatgacggttccataaaattgtctttaaagtaatgcagtgacaantttataaataaagaaaacataaatcaagatgattttatgaaaaatcctg

SEQ ID NO: 200170 - DNA, 367 bp, Glycine max
tattccctagtggatggcgccgcctcttacctcttctcctttgtcttccgttgcatctccatgagggaaaataaccattaaaggacctcattgaagctcaaagatccagcccccatagaagctccacaagcaagcttccatcacggtacacacaacacaagagacactaagagaagctcaactaactatgaaaaagacaaagaagtcaagattacctcagaggaactacaaaagaaaggattgagagcttgttctccattgaatccttgaagtggactctgaagattccactccgattaagaaattcctccccatgtggtgatctgacggcaagcaatggcagctcgtggtggtcattggtggtcat

SEQ ID NO: 200171 - DNA, 430 bp, Glycine max
ttacagcagattttagtaatggcccactaacctagaattaatattacttattgccattaaacctaggaagttaaaaaaacctaatggttgaatgttactgtaaatgtggcaaccaaatgtcacccccaacagcccacaaggtagccaccatttggtctccaaaaggctgatgcctatgttgccaattgggccccttattacaacttgaactaaacctaactaaagtccttttagttgattaacccaaaacatatttttggtcagccaactttacaacgattgggccattatttagacaaactaaacactctaaaattgaacaaggtggtgtcatttaatcctcctccaatttggccatgatacaactacaaccttggacttttctcttgaaacttgggcttgtattcaataatatggacagcactttgtg

SEQ ID NO: 200172 - DNA, 437 bp, Glycine max
  unsure (1)..(437): unsure at all n locations
cgatatattttaattgttatccaaacaaaacggttagtctaatggatagaaacattcttgactctctgtntttaaacttccactctcatggccttgacatgaaagaatgatcaattccaacaaccttaatttataggatccagtgtaaggtcatgaacacttatgcgtctagggtcctgttaaaacctcaaagaggagagacaactttgttcatcactgatatgacaaaggctaatgtttccctcctaagaacaataaagtgggatgagataactcttctcgaaaaatgggttatggataaggccacttcatctgttcctcgacccgctccaaccattgaacaaattaaacaagataactcgggaaaagtagagataactttcaatcgaagaaattcattctcatcaagaatcgaagcctctatgtctgaatatgag

SEQ ID NO: 200173 - DNA, 442 bp, Glycine max
  unsure (1)..(442): unsure at all n locations
atactcaagcttagtgccctttaatttgaagcaatatttgacattcccattattgtttccgtgacatttcctttaccttgatacttnatggaaagcaagttctgaaggagaatactccttttccgcttatcactttttgcaaagcgcttttcaaatatcagcaaaggaagatctcttggtcactaagttatattcatctgaaaacaggtgccccctaaagacctttatgaatgccacacttaatgatcataagacttatgcgatttgagtgatcccgcttcttacgtagtttcctctgttcagaggagctcgaatccgtaggagaaggaggtttcccaatccttaatgcaaggtctagatccatgcagtcaagaacaattgcatgttctctctctagtcctttaaatttgatcattagaactgaaccgaattctatatcaat

SEQ ID NO: 200174 - DNA, 475 bp, Glycine max
tgcagcatgcaagcttgatcacactggtgccagcttcattctttgacagttttaagtgagtaggtgcaggtgttcttttatggctggcattctccatcccaaacttcttgacaatgttctttgcatacctgctttgagagaggaatatggagtctatcatctgctttacttggagtcccagaaaataagttatctctccaacaagactcatctcaaattcagatagcatctgttggacaaaatgtcgaagcatctcattccacatcccttcaaacacaatgtcatcaacatatatctgtgctatcatcaagttttcagcatcttgtttgacaaagagagactcgtcaattcctccctctctatacccttgctgagaaaagaactctgttagcctcacataccaagctcttggagcttgcttcaatccatagagagccttcctgaccctgtatacatgatctggatgagttggatc

SEQ ID NO: 200175 - DNA, 414 bp, Glycine max
  unsure (1)..(414): unsure at all n locations
ctcaagctttacttatgtggcagggcgggcttccttcactatcttgtttccaatgctatctttgaccactgttcttcctttccgcgatgcttcttttcatgtccgcctgagtgggcttatagcctaaaccatacttcccacggtgtccttgagcatttatcaggctagttatgccgccgctgtctntgtctaaacccatcccgggttcataaccgttccccaacataactcgggccatcattaccgctgcatcggacagacaaggctgcccaaagagggagtccacagaggaaatgctgaccacctcataagactagaaagcagtctctaacgattcttctgcggcttccacataaggcatggaggatgggtagcttaccaagatgtcttcctcgcctgatacgatgaccaagt

SEQ ID NO: 200176 - DNA, 379 bp, Glycine max
  unsure (1)..(379): unsure at all n locations
agccttacggagaagagaagaataagcccgttccgggagaagaagaagttgtttcgggagagaagaagctgtgttccgggagagaagaataatctgtgttccgggagagaagaagaatctgttcgaaaaaaagtcttccggaaatgatttgcgtttcttataatcttattttaaagggcgaaatggtactttcaataaattgctgggtgcaccancaatattgctgggtgcacctagcacccccctttatatttttatcaaacaaactgtgaatgaccgagagataaggcatgcacatttgaccttttccttttcagttctacatattagaaaaaaaacttttcttatttattattttaccaccgcgacaatgtaatat

SEQ ID NO: 200177 - DNA, 372 bp, Glycine max
  unsure (1)..(372): unsure at all n locations
taccaatctgttttaagnccaagtctatatataaaataaaatctggacaagataagataagatttgataaaataaaatctacataagattagactggatgaaataatatctagatgagataaaatctggataagataagatctgataaaataaaattgtctactctcttcaagtccaagcccaactccggattcaagcccaattgcttataattctcctgaaattaaattaaaaacacaaaattagtccagtaggcccaaatgataaaactgcataattaatttgacaattaaggctaatcagtaattaaaatggtgacaaaaagggttaagaaatacgagaaaataatgacacatcatatcccccacactt

SEQ ID NO: 200178 - DNA, 438 bp, Glycine max
  unsure (1)..(438): unsure at all n locations
gcttaataagggtcaaattttccgtttttaaattaaagtactcaattaaattggttattaatagaggaccaatgctcaataaataaatagcaccacaaaaaagtacggttcttttcttactttcagaagatttgaaaatcttattgaattataaaatattgaattaactcgcctagttttttgtttattcactcttttttttcccttttaatccttgatgtttgaaaacttcaaaattctttttgatcacaaacatattttaactctcataaaacaacaaaacaatgttntctaaaatgggactggtataagttattgataaatcactttctgagtgatatnttgtacaaacttttgagttattctatatgcattttcttgatacaattcacatttgaacattagttttgtattcaagaagtataaccactcaattga

SEQ ID NO: 200179 - DNA, 449 bp, Glycine max
tgtattggcagcggatctggccagtctgtctcgttttttatacgaattacaaaaattgattcgtccctggctcgtagaccccacgggtcatacgtgccgatccgcgagcctaattttaaaagaatttcaatgttatttaacatacaataccatgaaattaaggtgaatacaaatgtaaataaaatctcaataattagtcaattacatcaatacaataaatattgtcttaataaaagaaaatccaagcaataaatctaaaatatgaaatttaaacatctccaacaacaaatgattccatatttgataatttttaatgaattttgattctaataaaaatataatacaatgaaattaagttgaatacaaatgtgaataaaatatcaataattagtcaattaaatcaataaaataaatattgttttaacaaaatagaatctaagcaataaatt

SEQ ID NO: 200180 - DNA, 458 bp, Glycine max
agcttgtgaagaaaaatcattttgtaaagataaaagaaagtcgccacacacattagtatggaaagataaacatgttatttatggtttctgtgcaaatacaaagaaaaatgctattaccatcttgctcctcttagcctcttcatcactgtcattaccatcatcaccaacagctttcctggaaaagttcatagcattcttaaatgttaagtacatcaataacaatatgcatatcagaaaagtgaaacaacaaaacaaaataaagatattggacttcaaaccttctttttgcaatggcccgatcatcaagaccagcctcagcatggccatggccatggctgtagtcaagaaccctgctaacaacgtccctcagaaagtcaaagacattataggcttgtacacaatgtgttctgcaatttccattcaccacttgttaggcttcatagctcgcagtaattata

SEQ ID NO: 200181 - DNA, 441 bp, Glycine max
  unsure (1)..(441): unsure at all n locations
nggacatcaatggtggctgcgactctctaacgaccattcacttagatatcttcccaatactcaggcgactcgatatcaagaagtggcctaatctaaagaggatttcacaggggcaggctcataatcattttcagactctgtgtgtcggatcgtgcccccaattaaaatcattgccttgaagaatgcatgtcctccttccatctcttgatgatctgtggatagaggattgtccaaaagttgaaatgtttcccgaaggaggtttgccatcaaatttaaaaagtatgggtctctatggtagttacaaacttatgtccttattgaaaactgccttgggaggcaatcactctctagaaagattatctattggaggagtggatgttgagtgtcttcctgatgaaggtgtactgccacactctcttcttactctagagatcatgaact

SEQ ID NO: 200182 - DNA, 437 bp, Glycine max
  unsure (1)..(437): unsure at all n locations
agctatgtatttgcaattgaataatatagattctaatatgcaatgataaagctgaacactacaacaccaatggattaaaagaaaaagttccagataaaaatatagaagaaataagtgatcatcattgccattggagtaaagtagtgatctttctgctcttatgtcttggcaaaaaaatgcatctggatttttttgcgaggccttcaaatatctgattttacatttggttgtgcatgacttatattgattgaatatattaagtcttacaagaaggatctttctcaaatcattctcttgagatcctccattaaaattatttcactagatcatctcatcctaacctagagggtctttaactagctagatacatcatacatatatatgtatataagaaaatatcatggagcttcttntccatcacgacatttaatttatta

SEQ ID NO: 200183 - DNA, 432 bp, Glycine max
  unsure (1)..(432): unsure at all n locations
tctntgagaaaacttccttgagaagctagagcttagctactcacacccctctaataactaagctcacctccttggagaaacttcctgagaagattcataaagaagctagagcttagctacacacacctctctaatagctaagctcacctccttgagatgagaagctagagcttagttacacatcccctataatagctaagctcacccccatgacaaaatacatgaaaatacaaaaaaaagtccctactactcaaaatgcctcgaaatacaaggctaaaaccctatactactagaatggccaaaatacaaggcccaaaagaagaaaaaaaaacctattatgatatttacaaagaagagtggacccaaccttggcccataggctcagaaatctaccttgaggttcatgagaaccctatggccttctttagtagc

SEQ ID NO: 200184 - DNA, 460 bp, Glycine max
agcttcatgatgatgaatcaagttgattcatgtatgtttgatgataacaaagatgatgacaaaaagcccaagagaatgatttcaagaacaagattcacgaatcaagagaagtttgatttcaagattcaagaaaagatgaattcaagattcaagaaaagaaatcaagagggcttcacaagggaagtattgaaaagatttttcagaaaacaaccgtagcacaattttgtttttcaaaagagtttttctcaaaattttctaagttaccagagtttttactctctggtaatcgattaccagtagtggcaaaggttgatttcaaaagctttcaattgaattttcaacgttccaattgatttcaaaatggtgtaatcaattacaagatattggtaatcgattaccagtgtctatgaacgttgaaattcaaaatcaagtgtgaagagttacatcctttcataaaagc

SEQ ID NO: 200185 - DNA, 435 bp, Glycine max
  unsure (1)..(435): unsure at all n locations
agctngagtgctattggtggtagcanaatatatttgctcttgcctcctatttaacacaaattctagaaatttaaggggcaatttttttaggataaataaaataacatgaagaatccttttgtagtgttgcgtttcttaacttccttctatccttattagttattatagtcccttttgatttaatttaacttgattccggaaagattggcatgaatggtttctgtgaggcaaaatgctgttcctctcctgatagaagcaattgtgctgtgagttcatcactatgaggtagcacagtagcaccttaccaaaatatatatggaggttgaaatctacagaaaagatatggctcagattgcaataatctttcaagaaaaccgttttggtccaggcctatataaaacttaaataatgacatatcctacagtgggttatgga

SEQ ID NO: 200186 - DNA, 402 bp, Glycine max
  unsure (1)..(402): unsure at all n locations
agcttatggcatanggaaatgctatgagaatgtatgttaattgtttgatagtatggagcaacatggtgtagttgcagacagatgcagctatacttctctcatacaaattttgaccacttctgaccagccgcatatggccaaaccatatctgaaaaaaatgcaggaggcaggattagtaagtgattgcatcccatactgtgttgtgatttgcagcttcgcaaaattaggccaattggaaatggctgaagatatatactgggaaatgattaggcatggtgtgcagcctgatgttatgtttacagcatattaatcaatgttttctctgatgctggaaggggtaaagaagccatcagttatgctgacgaaatgaagaaagcttgcttgccagggaatacagttata

SEQ ID NO: 200187 - DNA, 282 bp, Glycine max
  unsure (1)..(282): unsure at all n locations
agcttanatgtgcctctggggagacttggattacttattctacccaggtaacctaatcggtctgggtacttatcccactgctgatgagaattccctccagatgcttgggattctgtgttaattctacaattctgatatatttttaatcattcccagtaaattttcttccagggatactgaaaataatctgtgggaaggaatgcattctcaaaagggagatggaagacattgatattccagtaattcatgaaccaaccatattttatgccactaatggctttt

SEQ ID NO: 200188 - DNA, 394 bp, Glycine max
tgtaagtatatacaatttgtttttttatttgaattacatgtatatatctaagaagagataatagtttattagaatcaatatggatgacataaattttctttaaaaattttaacacaattatatacaaaacttttgattcagttgcaataattttgtttaatctacatgagtggtgctcttatagtatctatgaataggaagaaatcgtttttggtataaattcaattggtgcaacgcgtattcggtgataagtacatttagggtctcatcttgagcaaatatgtcaaagatactgtttgttgacggggacaacggttgtctatatacaggactatatttagacggtgaagcaatgtttggtattatggtggcctaactatggcttttacttata

SEQ ID NO: 200189 - DNA, 295 bp, Glycine max
  unsure (1)..(295): unsure at all n locations
agcttagtgaagtggttgtgaggattgntttcatcttcacctctnttatgcacactttcaacataatctcggtttttttttctcaccattatgctttctttcttttcacaagaacttgattgagagacatctcacatgcttaatgaaacaaacaaaagcataaccctaatccataacaattcacaattaaatgagaagagnaataaatttatgaaaaaatgtgtaacttgtgatgcaaacaaaggaagaaaaagagatgaccaatgatgatcacaaagaatgacgaacgatgatc

SEQ ID NO: 200190 - DNA, 483 bp, Glycine max
  unsure (1)..(483): unsure at all n locations
ggatcttgagtcaccgcggcatcagctataagacaaaattgccttaattattttctaatatgcatgngaattaggacgcatcaactagaatcaagccatggctattgttcaagcaatcaatggggcaaaacacaccaaatgattataatgatggatggctcaaattctcacaaaggtaaaatcatcactttcaaattgagctttcaaaactatcatgacatgtatagaagaatcaaggatttcaagtcacaaaatgtcaagaacttttattttcaaaacaattacccatttcttgaacatatcctataattcaaagaaaaacatgcaaagtcgtacgtgcacacaaaattgacccaaaatattaaactgaatatccgacgaaactaacaacattaacaaattaacacaactaacaaattaacaaaaccaacataactagcaaaaccaaagaacactcccctccctccccccctatacttaaac

SEQ ID NO: 200191 - DNA, 452 bp, Glycine max
  unsure (1)..(452): unsure at all n locations
gagctttgtatttcttagaaatcgagttggtctggacatcctcagnagaaacgcatcagattccaaacagaattttggcagagcacggaatattgttctttgttaatggagaatcctattcacatccttacaatttaacaagcggagctttatcagcaacacacaccatttctagtccgcctgcactttatatcttgatcatctttgggagtataaaaatgtggtagtacttttcctaacagtatccaagacaatagcactatattcgaaaattaattaacctatgatagtatatcattcatgtcaaatatggacattattaagctaggcgtgaattgatcttttcgattctttctaaagacgttgtcatattgtgaaagtaattgttgtgcaaactaggagtaacaattacactttattatcattattggatttaacagtattttttccac

SEQ ID NO: 200192 - DNA, 330 bp, Glycine max
  unsure (1)..(330): unsure at all n locations
agctncttatttcagcagatgaagattaatttatgaccacatcatggactcctctaaggacaatagcatcatttcttgcactgaattgttgggagttggaagccatcttctcaatcaaattcctagcctcaataggagtcatatcaccaagagctccaccactggcaacatcaatcatactcctctccatgttgctaagtcccttataaaagtattgcagaaggagttgctcataaatttggtggtgaggacagcttgcacacaatttcctgaatttttcccagactcatacagctctctcactaagttgatgatgcctgaaaatttttt

SEQ ID NO: 200193 - DNA, 259 bp, Glycine max
tcgacccggatccttaagcgccgcggctgcgcttatgggagaatttgttttttctagtcgctttgatgaagacaaagatgatgacaaaaagcccaagagaatgatttcaagattgagtcatctagtttcaagaatcaagagaagtttgatttctagattcatgagaagatgaattcaggattcaagagaagaaatcgggaagacttcactagggaagttttgaaaagaattttcataaaacgaacctagcacagttttg

SEQ ID NO: 200194 - DNA, 394 bp, Glycine max
gactttatgatgctaagtgtttctcacattattgcttcaagaataattcaaagttaagcaaatatgattgattcaagatgaattcatgatcatgccaactaagattaagagaaagatcaggcttagtttatgtcgtaaaagaatctcacatcggttcaaaaataaatgtttttgcactggtaattgattgccacgaattgtaatcaattgtcagagacagattgcaaatgggcttttcaaaaaggatattgaaaatttttaaaatcttgtaatcgattaccaactgcttgtaattgattaccaataacaaatcttctaagaataaccttcataagtcatgacccttcaaaaacataattgtgtgatgcgataccacgatgctataatcaatact

SEQ ID NO: 200195 - DNA, 444 bp, Glycine max
  unsure (1)..(444): unsure at all n locations
agctttaaagacatgaagaactaaaaaatgtctctttattcaaattcattttggaaaaagctctttgtaaattattgtaaagtttagaatagctctcaaaatactttgaatatcttgagagaaaagactatgtgctaaggttgtatatttgtttgtaagacgatggaaagttagtcaatgtgcaaacaaccaaacaaatcttctaatttgtattanagtcagcagtggcttggtaagacaaagaatactggttgtaacaagcttggtgtaaatcttgagttgtagagctagtagtggtagtgattaatacttgtaacttgttgaagttagtggaatttggtgggttaccaagaattggacgtggtcttagtggttgagacgaaccagtataacttcatgtgtcttatcttacttgtttttctttttcgtgctttacactgactc

SEQ ID NO: 200196 - DNA, 424 bp, Glycine max
  unsure (1)..(424): unsure at all n locations
ttaatcaccgcggctgcagcttgctttaccataaagaatgatttttttcacatattnctattnatagcctagcacatgggaagcttccttgagaagcaaagaaggtagcttccttgagaagctaaaggaagaaagcttccttgagaagctagagggtgtggcgtccctaaataatgactggtttaatagtaataaattaaatagcagacaaccatgggaattatcttgttctattaattgtctctctctttttcacggcaattaaattcagaaggaaaattatcactatagagtcctgaatggccagttcacaactctattcggagtcatttctttttgatcactcataatctctatactatttggctctttcaaaaagaaaaaaaataccagccatcattttaggtcgtcacgtgaaaaataa

SEQ ID NO: 200197 - DNA, 421 bp, Glycine max
  unsure (1)..(421): unsure at all n locations
ttaagtcacctgcgggcatgcaagctattatgtattaatgattataacacatatatatttatatgaatcgttaatataaattaggaattaatagttcaaataataaaattaaattcaaggaaatcaatatattaagattcaacgataaatacttttaatgcatttttagtttaattatttattaactctttttaattgaaaataatatagtttgatttaatatatacatgtgtttgtgccatgtaaatattaatattgtgtgatgtttatatgattcatgaggtgtgataacatgttgctttgggataacattatgattgagattgagtgtatgtgataaattgagtatgtgttgaattgtaagatacatgtgtatagagattatgtatgcattgagtngagagctatggactgtataatc

SEQ ID NO: 200198 - DNA, 444 bp, Glycine max
  unsure (1)..(444): unsure at all n locations
agctntanaacacctaacttgaaagctcgtttaatttcattctgtgaagaatttcgtgcagtatggcgcaattatagtgaactgtagcttacataaaatttgctggacttggatgtaagtgctttctgccttagaatttgtacatattaatatgcttaacgatttggtgcttatttgaaaagcttgtaaaatgcatctgtccattgaagtgattgaaaaacaaatctatttcttataggtgttaggttgaatgtgtatcctcttaagttgcatattttctgtcatcacatgataaattaatcgtattctcaatcaatatgttcataaatctcattctcaatcaatatgtactatcggaactttctataacaaaatgatacatacatattggaagactgattggtttctctttttaaggttagcttgtttagatttgaacaatgc

SEQ ID NO: 200199 - DNA, 344 bp, Glycine max
cattttataaattcttgattaatataaacgacgaattacattttaactaattgagtaaaaaatatctttatttcaatatttaatctgatgaatcatttaaaaataattaatttgacaataccttgtttagactcaaaaagtagtttacacagtggtttatttggtcaaacaataaaaaactaatgtgcagtttcatacaacctaataaggatagtataaatatgcttaaaaataatatcccatgtttaaggaacggccctatataatttcctatatcgcctactcctttttaatatccctgatggagagcgctacacctcattctgttacgttgaaatttacat

SEQ ID NO: 200200 - DNA, 449 bp, Glycine max
  unsure (1)..(449): unsure at all n locations
agtcacctgcggcatgcaagcttgtaaccattggaattggagttttatttgatgaagatgtacttatcgcttttatcatctaacttgcttcttttcttatccggcatgtgcacatgagcaatgcttccaaaaactcttatatgggaaatgtcgggcttccttccactccatgcttcttgtgttgtttttccccatacacttcttgttggaggctagttggaaagataaactgcataagtcactgctattgcccaaaactcctttgggagtcttttactcttgagcatgctcctcaccatgtctagaattgttctattcttcctttccgccactccattttgttggagggatttcgacaccattaaaaggagtcaaaanattccatgatcttcacaatacttttggaattcatttgatgtgaatactccttcacgatcgaatctcatgga

SEQ ID NO: 200201 - DNA, 340 bp, Glycine max
agcatgtgaagacacatgaagagaatgttatttatataatgctactagaggaagaacggcggaagcaagaggcaaacaggttaaagagggagcaacagatctcggccaaagagagagcatggattgaagcatgagacgctgctttgatggaggctttgcataacttaactggaagagaaaaaatgaaggtcgaaactgatcctgagggtactatacatgtaatgactgcacctgaggttcaaaaccagaataacgaagaggagagtgaaatcttgaacaggcaaaacgttatcaaaggtgctgaaagctggaagaaactgaaatcacagacatgaacagc

SEQ ID NO: 200202 - DNA, 450 bp, Glycine max
agcttgacacacccgatctttcattgttttctactcaaaccctttcattcttcacgccccggtgacaaccttcacatcataaccttaacagtgctcactaaggatgatcatcttatcatttaacctctagttatattgaacacacaccagacagctgactccaagctagaagtccttgttcaatggcaaggattatcatcggatgatacttcatggaaagactggacccaacttcaaactgattaccaccttgaggacaaggtgcttttggaaggcatagggaatgatagcaacacagaaaaaccagaagcaacaaaagcacgaccacaaaggatgagcagggccccaacttaccttaaagatttcctataaccgtttctgctgagctggctatcaagggagcaactcttgatcttgtctgccattaggaatattttctctctttccgta

SEQ ID NO: 200203 - DNA, 346 bp, Glycine max
  unsure (1)..(346): unsure at all n locations
agcttggttttgcgaaatatcttcctacctgtacgtccccaagtcttctgacccncgcgacatatcttaaggtaccactctgtggtccacaaacaaaagtaggaagactgactcttccacgctttctcacatcaagcttagtggattatggggcacccgacatatgtggtactatgaggcgatcgggcgatggcgcaaatcaactcttccacttccacaaatcaaaaattaacgtaccatccccagttgcccaccttcaaattgagctcacgcactcccacgtagcccttatcctcgttcctctcaacaccgggtccccatcaacccctccatgcttccacaatat

SEQ ID NO: 200204 - DNA, 437 bp, Glycine max
agcttgtaagtatatattgttgttatttgcctttttcattaggctcttaatgtctttagaggttacttcctcgttgacatcttttgtcttgaatggaattgccatgacaggtctgttgttactgtctttgatattcggtagatgatattgtgttgcgggaggtaatttcgattggattaactcaccatcctttacttgccaatttgttatgacatttgttgatagatcacctatgatgtctcgtttccaagggtaatctatatcctttctgatggcataggcatgaaaccaattaaagaaaaggacattaattttgactctttcacaaattctcagaacttgtcttggatgtgttatctgttgtacccttgaatgttggaaaaccatctcctttgtgttaatttccacagaataaactttttcctagggttgcttat

SEQ ID NO: 200205 - DNA, 478 bp, Glycine max
  unsure (1)..(478): unsure at all n locations
ttaagtcacctgcggcatgcaagcttgcttctacaaaattgtngctaaagattgttagggcatctcangaagcttcattcaccaaccagttgtaggtcatagatcgaggcgtaggcaacatacggatggtcattgaagttgttttttttatttgccttatacatgtcatttgttattttttggataatatatttatttcgtacatttatgtatggacacgaacatttggtaggtttataattttggtggcttaatgacagacacgttttttattatgcgatacaaatttttgtcatccgtctatcattaactagccgttaatgttaatttgaggattaaattaatttgtccataaccaattacaaatgtatgttttttgttacattgaagcatcataaatcgttctcaaagttgacaacacaatgtgaattgcatgtgtatgtttaaanaaatgaatatttaacgtacgtactgacat

SEQ ID NO: 200206 - DNA, 480 bp, Glycine max
ttaagtcacctgcggcatgcaagctataagagaaggagtctcaagacactactttttatcttggaagaagatcggaaaggtgttctcttccgccttgaagttctcatgcaagaagaagaaaatgaaggttcaagttatgctttttggagagaaaatggtgagaaataatgcaaagctttgccaaatgctattgataagttcgcttgacaagcttgaatgaccatttgatggccatgttggacgccccaaagggcatcatatatgggtattttgccttttgaacttttaaacaaaaatggctaaagtagacttaagcaaaaatagtaaaaaaaaatttgctaaaactaataaatcttatcttaagcttttaaattagtgtgctaacttcctagattagagtgttaaccttccttgagatatgtgtacttagagggaatcttgccacgatccactcacatagagataaattatacgacgatt

SEQ ID NO: 200207 - DNA, 428 bp, Glycine max
  unsure (1)..(428): unsure at all n locations
agctgggcactggtcaactgagaggagaatatcttactaaacatccccacangacaaggtactactatatggctactcgactttttaccaaatttgagcttcaacataattttaaagaaattgacgagctagccaacttgctatcaaagcttgctagtacaaagaagaagaaacaacattgaacgatcatccaagaaataattttataaccaagcctatacaaggttgtggcgagtgtaactcttattgaaagcgaatggatgactaacaattaggactccctagagaaaggcccactcttggaaaatccaacaatcgtgtaaaggcttaagagaagggttaactattatgtaatagagggaggagacctgtacagaagagacttcatgaccccctaaaaagtgcttgactcggatcaattcatatat

SEQ ID NO: 200208 - DNA, 458 bp, Glycine max
gatcttaagtcacctgcggcatgcaagcttctaaaagggacttaattgtcttacattctttattgttgcctccccaaaaaatatggtgtcatctgcattctgtagtatgatgactattggtttgccccacaaggaagctactaaaaaggctcttatccagtgcttctctcatcaagccagttaaaccttcagcgactatattgaatagaagaggcgctagggggtcaccttgcctgagccctctttgtggtatgaattctattgtggggctgccattaaccaagacagagaccgaagctgatttgagacatccctctatccagcatatccacctagggcagaatcctagtctcttcatcatatatgataggaaagaccatgagacaaagtcgtaagctctttcatagtccactttgaacaccatacatgggctatggcgtctctttgcttcctccact

SEQ ID NO: 200209 - DNA, 455 bp, Glycine max
cttaagtcacctgcggctgcaactatgaacaaagattttcaaatgttgtcttttccattatccactactagctaatgttccattgattgttaggaatataaaaggcatctactactctgacatcagtggtggtatacgtaaaaataataataataataatcacagaaaccataagttgaaaatcgatggacgtaataataattaaaatataacataaagaacgcaaacaacatatgaattcattgaaataggggagaaaaaaggccacatataaataaaataataataataatattaataagaagaaacttcttagaacaattcaacaaaaaaaaaaaatcttcacaatcataggcattccttattcacacgcaacgcaatccagaatctaaatctggaaagtgacatccttccgatcgaaagcgcttgctttcattataaaaagtaataaaaaa

SEQ ID NO: 200210 - DNA, 447 bp, Glycine max
  unsure (1)..(447): unsure at all n locations
agctnttgatacaaagaagaagatgaatttcttatacattcaaggcttgtaagggattgtatgaaataagtgttcaagattgctgaaatgcaaaacaaagccttgcttttatagactcttcatgtctggtcaagaagaccatttagaagagttataacttttagaaaaacttaaaaccaatttgaaaatgtcaaaaaccttttgaggagttacatcttttgatttattcagaaacagtcactggtaatcgattaccaaataagtgtaatcgattacacaaagcttttgagtgaaaggatgtgactcttcacatataaatntgaatctcaatgttcaagggcactggtaatcgattaccaaaacattgttatcgattacagccttttgaaataattggaacgtggtaattcagtttgaaactttttaaactcatttgtactggaagcg

SEQ ID NO: 200211 - DNA, 439 bp, Glycine max
agcttatgccacttggggtgatggatatatttatgacccaactaggcatggatccttgcaaagtggcaacactactgtctcaccttatgttaatggtgcaagaggggtgactataaacttatgagtcaagaaattaggctgtgccttgctcacacatgcatgtgtataaatttatatgattaacaaatgtgatgaatccgtgagtggtataagtagatatttgattttgtcatgaaagagaatttccaaattttgagatctgatgttcctctggtcatctcgcattcgaagacctggtcatatatttctggcacagaatgtcttggcatgtgtataaaatctaaactcgtcaaagtttaaaggaacttatgattatgtttttcacttagaagaaatcaaatttcttttatgaaatgcttaatacgatttgttaaaattt

SEQ ID NO: 200212 - DNA, 417 bp, Glycine max
agcttccatcaagtggtatcagagcacattattctttagttgtgatccttaaacctccattaatttgcggctttatcttctcttccattggtgtttcttcatttttccccatgtatctccttacatgtcttgtgctaaatgttgttaacataattctttagagtttccaccgattaaacttgctataaaagctagatttgatttcctatggtccaaatttcttgttcttgttcttgaaccatgaattgtgttgagtttaggttcctttgagttttgtcatgctattttttgtggatgaaacctaaaccataaaattcttacaaaaatattaaagtatatgaaaacctcataaatctaaagtgacttgttcacctatcgtagttttgtcatacaagtcatgtctagtcatgaaactta

SEQ ID NO: 200213 - DNA, 350 bp, Glycine max
catgcaagcatgaggagaactagaacttgagcttgttatattgattaccaacgccaagttttgagttttagggtcacgcgagttattctttcttaatttttattcggaaatttcggaccattatattaacttaattcagtggttgatctagacatagacatagatagaaagataccggaatgttacacaccccattactcattttaggctccaaagcgtgtcacaaattctcaccaactcttatacctgggaaaccatgtgaaaaatttcgctgtctcgaaaaagaccccttataaaaacggtcctgatatgtgacatccctctgacaccaatggaagtcaacactagaa

SEQ ID NO: 200214 - DNA, 364 bp, Glycine max
  unsure (1)..(364): unsure at all n locations
agctntgagacgcatgtgtatttttggcatcttcaaaacattcagctggatcatttgtctacatctttttgtttgttttggggtgcaataattcacacatatattttctttctttcttttctctttttttttatcaatccctttttgtcttcgatttcacttgagagaaggatttgagattcatttactagcataagttgcaatgtatattatttcaaggaccaacaaagaataatcatttaggctcaaagtggtcaactaaggaaaaaaactaatcaaaataattcgcaggtctcaagaaagcctattagagtctcatcttttctgtttattcagaagttattcaaggataagcatgtcaaaa

SEQ ID NO: 200215 - DNA, 395 bp, Glycine max
agcttttaatataaaagttttctttaatgatgactaacatatctcagctgatatgatgctatcaatatttgcaggggatggatacttgctggcaggataaaaaaacaagatatgagcatgtgataatccactcttttggaattcaattgtgtaaatatctgcaattgtaatatggttagtttaagcacatctatagacacaataagcacttgactactaagtgcattaggaatgcacaacttacatgcaagtactttccctaaaacttttttatctttcaagtcagacattatgttgtctagctcgagtttaaaaattcttgtcacaatatatggtcgatcctatgcagttaaattaagagctgaaataaacctttgaatctgaaaccaatacgg

SEQ ID NO: 200216 - DNA, 454 bp, Glycine max
gatcttaagtcacctgcggcatgcaagcttataagaatggaccaagcaggattatttcgtatgttgaaggaacataaagatgactcaccaaccaagcttggtctagctgaattttttttgaaggcagcgcttgatgtacctttcgcatttaaaagaattgaagcaatgctttacatagccaattttgagtctgaagtggagtatcttaggacatcctttcaaactctagaggtaatcagtcatactcatactggtttatattcatttctcggggattattcatgctagtgtcaaggtgataaagagatgttctgaaggcttctagtataatcttgttgaaactttgaatgttataaacatgaatagctattttttaaaaaaaatatttggtaggaactagaaagttgtttttttcagttgtgaggaattattgaatgcttggagaaatatattg

SEQ ID NO: 200217 - DNA, 451 bp, Glycine max
  unsure (1)..(451): unsure at all n locations
agctngatagtatgagtagttggagtagatgttgtttcactgatgttagcatactgcaatgcctgactgtntattcatcatgagtacgttcattaactgcagctaagctaatgatgttatatttgttttttcatattaggaagttgtcttctctctgttctagcttatgctgactggcatgttttttcctaactttctcagataaagccctgcatttaatcttaaacatgagtcttgtgataatagttcacacattctgtgctataatttgtcgacatgttttccattgctgttaattattgggtgaataaaattcaatacttttgggactcttcaagcagagaaagtcaatgatctttcttttccttgaggtctttcattanactcgcaactaaaagaattaatcttttgtctgtgaactatgcatatatgaacatttctggtggaactt

SEQ ID NO: 200218 - DNA, 313 bp, Glycine max
aaatgacgggtaatgaactcatgaaacttgtctgcgttgaacacacaacagttggaaacagaccacagccaatccactttgaggagaacttgtttgaccatataagatgctgagaataccttttgaaaggcagctgggactgcacggcctttggctctagcaaaaccattgacgccattatcgttgccacaggctaccatggcaggatactctacaacttgacctccctagatcttgagattcaaacctaactgttaacatacacatatgacaagaggtggtgcatatcatgaagcacacctttacgaaatac

SEQ ID NO: 200219 - DNA, 426 bp, Glycine max
  unsure (1)..(426): unsure at all n locations
ttaagtcacctgcggcatgcaagcttcattctacacctgataaagaggatgttatatttgctcaaaaaagaaagcttcctgatcatgagagagctaacaaaaatattcatgcaggtggaccttcttctagtagttctgacttgcagcagcctcctatccctcttccatttccacttagagcaattccaaacaanaagatggaagaagtggataaggagatcttggaaaccttcatgaaagtagaggtgaacatacctctgtttatgcctacacaaattctaagatatccaagtttctcaggagctgtgcacccacaaatgaagctaaaggcatgaaggatagcatggcagaaatatgcacattgtagtaaattgtcctacatcctgaaaagtaggaccagtacttttatacctgcatatagaacac

SEQ ID NO: 200220 - DNA, 458 bp, Glycine max
ccgtgatccttaagtcaccgcggctgcagcttctatttaatttcaagggtctcgatatattacgggacttaattggacatccgagttaaaagttattgtggtttgcaattgctacgaggttctgttttcaattccgagcatctcgatatactacgggacacaatcaaacatccgagtgaaaagttattgtcgtttgaactagctcagagcttctgttttcaatttcaagcgtcttgatatactacgggactcaatcggatatcggagttaaaagttattgtggtttgcattttctacgagcttctgtttcaatttcgagcatctcgatatattacgggttttatttaaacattcgagtgaaaagttattgtcgttggtataagctcagagcatttgtattcaattttgagcggctcgatatattacgggacttaatcagacatccgacttaaaaagtt

SEQ ID NO: 200221 - DNA, 251 bp, Glycine max
ccaagaaccagccacgaccggaacgagcaagagggaacaggggaaacgcaagcaaaaaaacacgggaaaagcaaaccgcaccaagccagacagaaaggacaaaaaacggacgagagaaagggaggaacacggaaaacaaggccgcaaaaaaaggcgaagggacggaaaacaaaaaaaccaccgggaacaaaggcccggaagaaacaccgggggcgcaaaaaccaaacaagaagaaaccgaaggaccaaaaa

SEQ ID NO: 200222 - DNA, 431 bp, Glycine max
ctgcagctaacatacataccctcatattgtttcattaattcaaaatactttgtttcacgggttgccaaatgaagacccatatgcgcacctagccatatacattgaaatatgcaacactatttgattggctagtgtgcctaaggacgcagttagattgagcttgttctcgttctctttgtctggagaggctaaaaggtggcttcattcgttcaaaggtaatagtctcaagacttgggatgaagtacgtgagaaattcttgaagaagtacttcccacaagatagctgaagggaaagcttccatttcatccttccaccatattccagatgaatctttgagtgaggcattggaaagatttagaggcttactgagaaagacactcactcatgatatttcagaactgattcaactcaacatttttattgacggattg

SEQ ID NO: 200223 - DNA, 414 bp, Glycine max
ttaaaataacttaatgtcattaacctagggaattaaaaaaaacttaatggctgattctaactgaaattgtggcaaccaaaagtcacccccagcagccaacaagtcaaccaccatttggtctcccaaaaggctgaagcctaggttgccaattgggcccttattacatcttgaactaaacctactaaagtccttttagttgattaacccaaaacatatttttgttcacccaactttacaaggattgggccattatttataaaaactaaacactctaaaattgagacaaagtggtgcaatttagtcctcctccatttgggccatgatacaactcacaacctgggacttttctccttgaaacttgggcttgtattcaaatagtatggacaatacttgttgaagagcttccttggcttt

SEQ ID NO: 200224 - DNA, 318 bp, Glycine max
tactctaataccattcaacgaccacttgaaaatctgaacttcgccatgagctggaatgttccaacttataattttcatacataagaaaacacaattatacctgaatgccaatatcattttacagagttgcagttaaatattcgctttaaaatttatgttcagcacacaaaaaagcattgaaaaaagtttaaggaaaaagtagaattttacaagactccgggactgggagtaaaggcaacatttatattactgcaagttgtttttagtgtgctgttgctgaattccttgataacctatgtgagaagtttggatttgcat

SEQ ID NO: 200225 - DNA, 347 bp, Glycine max
agcttcaagaataatggcctcaacaatctttttattcctataaggaaattcaataaagtgtgcgagatattaaaatacattgtattgtgaatcgtataataaagaataatggcctcaacaaactgttaatgctgatggttttctgtttggttttccaacaacatttggatccatggtttctcaattaaagcatttttagaagacactatacgcctgttgtggcttacacaggcactatcaggaaaacctgtagggttcttctctatcactagttctcaatgaggtggacaagaagagaccccatgaggtatattatttattgcggaattcttcaatattcatgaata

SEQ ID NO: 200226 - DNA, 393 bp, Glycine max
  unsure (1)..(393): unsure at all n locations
ggatccttaagcaccgcggctgcactatttcttacatttatttcttctttgtttcagtggcatttcatctaagtcattttcatttatttattattatattaaactacctccttctttcttataagaaacaatttcactgtaaacttgttccttataaaagaatctgaaaaatattatttttttattttaaaaatatatgtcctactaagttggggttgaatccactactataataattttttcttcaaccatgtttattgactgaaaattgtaaaaatatttcttattncaaatttactacgattctgaggtttaataattttaactgccttaaaaattattctaactaagagatgtttaacagtttgagacccatagaactgatgctgatat

SEQ ID NO: 200227 - DNA, 486 bp, Glycine max
  unsure (1)..(486): unsure at all n locations
atccttgagtcacctgcggcatgcaagctntgaaccttggttcgccatattacaattttttaaccccttctactagacccaattcccattggacaaaacgactattaatgactctattttataattaaaaatgacatattttattttttcaaaattgaagcaaattcataatagcacaccaattcagaatatcttgaacaataaaaatgttatgacattttataattaacaaagcctggaaatgcagccactacaaataagttgcacaaataaattttgtgagaagagacaaaccgggaaggatgagcatatctcagccattgcaatcccaacaaaccaagtgaagaaagaaaccactatccacccccaaacaagagttgcaaggccggcatattgaagactagaaccatagagaggtgtaattcttgtgaaaagggtcattgtggaaaatgatattgccagagtcttaaacatagtctgcaccat

SEQ ID NO: 200228 - DNA, 372 bp, Glycine max
  unsure (1)..(372): unsure at all n locations
cttaagtcacctgcggcatgcaagtctttcgattcattctatgtacccgtagtgttctatattgtgtttcgngcatttatattctcgctatgtttactttttatacccccctcttgacgtgcttaagccattttacttaagtcatttctcgcttaacttaaaaataaaataaatgtccaccgaatgtttgaattgtattatccattaacttcggataaaattaaaaacaaccgttcggtcatgccgtggccacgttggaaatcaaaaagaggtaaaaaatggttatatataacaaaaatatctttttagtgagaaaaagcggaaaaccaagcggacgttttctcttgcggagattccttcttaatcgaatta

SEQ ID NO: 200229 - DNA, 446 bp, Glycine max
  unsure (1)..(446): unsure at all n locations
agcttgagcttagctacacatacctntttattatctattctcacctccttgagatgagaagctagagctttgctacacaccccctataattgctaagctcccacccatgacaaaaaacatgaaaatacaaaaaaagttcttactacaaagactactcaaaatgccccgaaatacaaggctaaaaccctatactactagaatggccaaaatacaaggcccagacgaaggaaatacctattctaatatttacaaagataagcgggctcatacttagcccatgggctcaaaatctaccctaaggctcatgagaaccctagggccttcccttggatctctagcccaatctacttggagtcttctacccaaagcccttgcagggtaggattgcatcacttcttgttgaccttgctcgaagaaacaattcttgtaactaacttccgatgttg

SEQ ID NO: 200230 - DNA, 290 bp, Glycine max
gactttggagctaatcttaatcacattcccctaaaatgggacaacacaaagagctattacatctaaccaataaccatgtgatgcatcctcggacataccacttagacttatgacatcactctcttaaaaatcaatgtgtctaaaggcgaccgcagctttgagttcattgatagtaatcatcaacccgcacaccttttcactaaacctctttttagagagagggattttacattacaaacgaactgggcttggttgccacatccaccatataaaaaacgcgttgttgcata

SEQ ID NO: 200231 - DNA, 439 bp, Glycine max
agcttccatgagaagcgagtatttgtttgctttctttgggaagaaggaagaaaccttccttgagaagctagaggggggctactcacacctcttcaatagctaagctcaccccatgccaaaatacatgaaaatacaaaaattaaagtccctactacaaagactactcaaaattccctgaaatacaaggctaaaagcttatactactagggtacccttaacttgtacccttaattggtagggttccctacaaacctaaaatggccaaaatacaaggcctaaaagtaggaaaacctattctaatatttacaaagaaaagtggacccaaccttggcccatgggctcataaatttatcctaaggttcatgagaaccctaggacctttcttagcagctctagcccaatcctcttggaatctttgctcatggctatggtgactgat

SEQ ID NO: 200232 - DNA, 326 bp, Glycine max
tctggctgcttctgccaaaatgtccacggtggacatgcttttggttatgcatgtgacgtctaacatgttaagtgagggaaagcctgttatttggcaactctgtcctttattaacagttggagaatgcattgaagacaaactttatgttttgtctgttaatgcaattgctgtattgcacacgttatactcttgcacacgtgtcactcgtggagtgggcacgcactaaatacctgtcgcgttggataagaagaagttttgtggtctccttttgccagcgaccaccgtcccttaaaattctatcttttttctctcgaaaaaaagttttc

SEQ ID NO: 200233 - DNA, 459 bp, Glycine max
  unsure (1)..(459): unsure at all n locations
agtcacctgcggcatgcaagctntgaggattatcaaacgacaataacttttttttcggatgtctgattgagncccgtaatatatcgagacgctctaaattgaatgttgaagctctgaccaaattcaaacgacgataactttttactcggatgtctgattgagtcccgtaatacatcgagaccctcgaaattgattgttgaagctctcagcaaattcaaacgacaatacacatttactcggatgtctgattgagtcccgtaatacatcgagacgctcaaaattgaatgttgaagctctcagcaaattcaaacgacaatagcttttttactcagatgtctgattgagcgccgtaatatatcgagacgctctaaattgaatgttgaagctctgaccaaattcaaccgacgataatattttactcggatgtcttattgagccccgaaatacatcgagacgctc

SEQ ID NO: 200234 - DNA, 471 bp, Glycine max
tccttaagtcaccgcggctgcagctttgggggatcccatggagctatttttcaacccttaaggaaagaatgacgaccgctccagtgctagttttgcctaacccgagaaaaccatttgaggtgtattgtgatgcatcaaagatgggtttatgaggagtgctgatgcaaaatggccaagtagtggcctatgcttttagatagcctaagacccatgagaggaattatcccacccatgatcaagagttggctgctgtagttttacccttaagaattggaggcattatctgtttggctctaagttcgaggtgtttagtgatcataagagccttaaatactggtttactcagaaggagctgaacatgagacaaaggagatggttagagtttataaggattatgattttgagcttagctactatcccagtaaagccaatgtattggctgatgccttgagtaggaaatctctacatatt

SEQ ID NO: 200235 - DNA, 192 bp, Glycine max
acaaaaaggaggaaacagcctggcccaaaaggtgaaaattagccccaacacgagcagtattaaacagggacaaagactgcccaaagcacggtgatgaaaaacagaagcaccaaaaggggaaggggtcaacaaaacaaatagggacccgccgctgaagaggaagaaccaaaacccggtgaacagagagcagga

SEQ ID NO: 200236 - DNA, 346 bp, Glycine max
acaattcatcccatgttacagtgtacaattgcaaataatgcacagattggcaaactctcattacaactgggagccaaggattgaacactcaggttcaagaagtacgagctcacatattgacagatatggcttgggttacaatgaaaacatacgttgatatggatacaggaccatttaatgcgaccaatatttataattccatattggaccgtggtatatggtaactaaaacagattgtgtgagaatagggatagggacctgagatttggcttgaatatatggataatattacactacttatttttaaactggtacaaaaggggttttttcaaaacaaatgcttgaa

SEQ ID NO: 200237 - DNA, 447 bp, Glycine max
agctataaaaataatatggacagaggggggtgttttattaatttgcatgggctacaacccgtctgagagatattgataacaccattctcttcatagttgacataaacactttttattgggtgcatggccacaagtaatttgcacgcggaacgcaatatttactataaaaaaggtatttattgaaggatgaaaaattgaccaatattaaaatctttttattaaaatagtcttttatccaatgaaatttaaattgttaatataacacatcatattaacattgaatgtattaaaaaatatatgtattatgaacttatattctcaatataacaaatcatattaattaaaagttaatgtactacaaacaatatgttatattaacaaaaaaggtgtgtaacatcatgcgtaatcctctttattattataagcttgtaccatttacacttataa

SEQ ID NO: 200238 - DNA, 413 bp, Glycine max
attgctgcactcactgcataaaatatgtaaataaccaatctatctttcttattcttaaatagataaatagaataggatagcccctctgaatcatcattaatttaagcgctggtataatattataggctgcttcagatgaaagtattcatgattgctataagtcgagaatatgtgaaggaagtatataaacaacacctacatatataggctttcgtttgaagtattgcgattgtcaccccctaaagacatatgcatcaatacatacattggaatatattccaaaatcatacttaattttcaatggaaatgtaaaattcacaaactgctcccacaattgtctatacattctgtggtcagtatccacacgcacacttataatattcgtaatacatgtgaaagaataacctaaaaaa

SEQ ID NO: 200239 - DNA, 423 bp, Glycine max
  unsure (1)..(423): unsure at all n locations
agcttacccncactattacccacaacctcttttcatacctatcaatgttaagaaaatgacatcggcagaaatgcagttgagaagagaaaggggcctatgctntacttgtgatgacaagttttcccctagccatcgttgtcctaataagcaatattttgttccacagtgggaagaagaggatgaacctgcattacaaccagatccaccagacgaggttgagacagctggtgaccccagtttgcaagatcatcatttgtcttataatgctttaaaaggctcatcacgtcttgggacaatgaagtttcaaggatcaataaatggattgggagtgtagattctactagatagtgggagttcagataactttctccaacctagactaactcaatgcctgaagttacctgtgtaaaccattcctaattt

SEQ ID NO: 200240 - DNA, 136 bp, Glycine max
tgtagctcggtctacacacacccctatgtaaagctatagctcaccccccttgacaaagaaacatgaataataacaaaaaaagtctcttattacatagactactcaaaatgccccgaaatacaaggttaatacccta

SEQ ID NO: 200241 - DNA, 418 bp, Glycine max
  unsure (1)..(418): unsure at all n locations
agctngtctcaattcagcttgtgctntctccttcactcttggatttctcatcatttctgccatagcccactctagtgttgatgctgaagtatcagttccagcagcaaatatgtcctggtgaaacaaataaaatatctttatataaagtttggtaaaatgaaaagagaaattgcatttatataactaaatcgggcaacttttttaataaaaaaggagatgagaagaaaaggaagacaaatgttagataaagtaattagtacaaatgagaggattaaagagattaatgttattaaaagagatgttagtgagaaaaaacgtacttcagaaaccggaaatataatagaagtttgaggcgtttacttaccaatatcaaagctttgatgttgttagtcgtcatttggatgtcgagagtggcatc

SEQ ID NO: 200242 - DNA, 414 bp, Glycine max
  unsure (1)..(414): unsure at all n locations
agctntcataggtgagatcaggtgcagccatttcccttatagtcctctcacgagggggaggtngtgccatgttctcagaatgtgcaaaatcagaatgctcagaatcagaatgctcaaaattataatgctcaagattaggatgttcaaaatcaccaataacagaatgcacagattcaccagttatacaatgctcagaatgatcaaaaggtataaaatgatgcctaactgaaattctgatactgaggacagatgtcgtacaggatgtcacgacatcgcgcttcagaacatgcagattgtatatgacagtatgaacagattaaacaagtaaataacacaagagaattgttaacccagttcggtgcaacgtcacctacatctgggggctaccaagccagggaggaaatccactaaaat

SEQ ID NO: 200243 - DNA, 375 bp, Glycine max
  unsure (1)..(375): unsure at all n locations
ngcttacccaaantaggtgttttgtgttgttatancctacccttcttctgctgcagataaatgttcttttgagaataaccaacaagagggaagatgggtatcatgatttggcatccctttttcatgtaagttgtgattgcaatttggtaaatgctttgatgctcttctattgcatctaccttttaatatggtatatgtattcttgagagtgtcttgcatcttttgagtcttcaggtgataagtctaggtgacataattaagttctttcttgcaccttctaaaaccaaggatagcctgtcaaccaatgtgtgtggcgtgccccttgatgatagaaatattggtctactggttatccatctctagcttttgctcttc

SEQ ID NO: 200244 - DNA, 251 bp, Glycine max
actatggtgtgggacgaatatatccacaagtctcgtaaggtattatagttgcccccataaaacaaagaaaaggatcaaattgcgaaagggagcgcctataatatatatatatgtatataacgcttattcgctgaaatttaatctaaccctctatatgtggtgtatctctggaacacccgtgatgaaaaaacttaagcataacaaataaatgcctttttaacaggaaacgttatgaatcagaaatccttttt

SEQ ID NO: 200245 - DNA, 432 bp, Glycine max
  unsure (1)..(432): unsure at all n locations
agctntacaaacccatgacgtaaaatcttgattatttcttgctccataacattcttgatgaacggctatttgacatctataaaatatataatgcattcttatattaattgcaacgaaattcaaaatgaagagtaagaaaacaacaaccaacaaaaacttgccggatagttcaatcttgcagaagaaaaaaaaaaggttttataagcaaatggtttcattgtcagcggtgatctgactgataagtgaggatggtaaggctgaaaaactgtttcggcaaagcagaatggagactgctgagcatggaattgaacaacataaaaaagggtgcatataattgtcaaatgtgttagacaaaatgctggagtntcttcttgcttatatcatttcaagatgacattaattagatcgtttgttgatggccaaacagtcatt

SEQ ID NO: 200246 - DNA, 417 bp, Glycine max
ctgcaacttgcaaagctgccgtggagctgatcatttctgccctaactcctttagacttggggtccctaggctcatgaccttgacttgatataacctccttttaagtgaaggcatttgactggatcccatgtattactaaagtgaacaaaaatcagtgcgaattaaaactccgacatctatcatgggtggaatggatgaatgcatgaagaaatgcatataacacagatgcgatttatgaataccggagcccgagaaattgtctccttcttagatacaacgtcttggggtagcaaagtgcccgatgtatgtattaaataaggtggtacggaccctacgttggtttgacaaagagaggggaccaaaatataatccgtgcatgatgcatatgcgaaaggcgcaacacggtagtgtacaata

SEQ ID NO: 200247 - DNA, 367 bp, Glycine max
  unsure (1)..(367): unsure at all n locations
gtcacctgcggcatgcaagcttccacaatatccaagcaattcaatatcttattatcatgaactatcctaaactaagaaaacagggcagaggcaaaaaactctgcccaaaacacattccaataccacaactttccctactcaaataccccagtaacattctcttcgttccgattcgttaaccgttggatcgactcgaaagntttactggaggtccctagtaaataagtctacatttttaccgttgggatctgctagaaaatgtccagaacccaatatttactaccctttccacaaccagcaatacacaaacattntttgcacaagagccaaattctgctgcacaaaatttgacagtcttttgctacac

SEQ ID NO: 200248 - DNA, 436 bp, Glycine max
agcttgacatttgaagtgtgatgaagggctttctattactttttaggtcatttgcttgcacacaatgttttttgcaaatgatctaaacaaagacacttcagcttttaaaagtatagctataaaaaatgtgtatcttgtaagatgattctctcgtcaaatgagacacacttaaagaataagtatgtctcaatcgagacactttttcatacagattcatgcctcatatattcctcaaaaatcaaactcttaaaatcttaggggggattaattcagattttgagataaagatcccttcaaggaaacggtcatcattggtgtacaagccgatgacaccaatggagaagtttctaaagccgctttctggttcgatagaagtgaaaggcaaccacaagagagtttgttggtggataacgtaaacaacttcatacctgaaaat

SEQ ID NO: 200249 - DNA, 432 bp, Glycine max
  unsure (1)..(432): unsure at all n locations
gggatccttgagtcacctgcggcatcaagcttgggaataggtattgagcttatttatattgntgactaaacgattangtccacagaaaaggagactgatatgaatgcataatgcttctaagatatggttttgtattaagtgattccttgccagacttgatgtgaacattggttctgagtggaaagaaatgagaaaaacaaaagagaagaatagggtaatgtatgtagtatattgatattgaaaacactaacctttcaggacatatttttggcttcaatacatatctgttaggacaatttttaatacattagtaaacccgcaattacaaaacactagttagtctacccaaataagaaaagtactaaaagttttataaaacaaaacaaaagtgatgcaatccaaccccccaagggaattggatagaagactcca

SEQ ID NO: 200250 - DNA, 450 bp, Glycine max
  unsure (1)..(450): unsure at all n locations
agctngcatatggagaggtgccatcatttcttctaattccttgatgctggnggaatctaggcctttaaccttgacttggtaaaacctcttgccggtttgattagtccccatgcttactaaagtgagacaaaaagctggtgcaaatcaaaactccgatatctcatgggtgggatggatgaatgcatgaaggaatgcatatgacacagctgtatnttaagaatgcgggtgcccgggacattgtctcctttttagacacaacgtctaggggtagcaaagtgccccaatgtatgtatttaaaacggtgacccggaccctccattgattttgtctatataggggatcaagacagaacccctatgcaatgcatatgcaaaaggcgccatagcatgaaaatattcactgaacattagcaagagggtattatatacttatgcctggcagtgtgaaaat

SEQ ID NO: 200251 - DNA, 421 bp, Glycine max
  unsure (1)..(421): unsure at all n locations
ngacttgctggtgtgggtgtgggtctctatttatgaagatgaagggtggtggagacagagagggagaagaaaagaagaaatgggtaaatcgaaaagaaaaaagagaaaaaatctagtgtggacaattctacggaaattccacatatctcaagatctaacggtaaaatttacacacgcaccataaagtccattcagaaactggtgttcgcaccgtgcatacccatttaaggtatcccacgcaagaagccgtccaagtctctgtttggttcatggatacgaaaatagaaataactagtgtgttttttgtggcggtatgcatggttatattatgaatatttgatttaaatgaacctttcatgttntccttttacggtaaacttctcatgtntaaatacattaattttaaatcaaacttatattc

SEQ ID NO: 200252 - DNA, 390 bp, Glycine max
  unsure (1)..(390): unsure at all n locations
agctngatgatcatttctaaatctttttaataattgtacaacaattcaatataaaatttaacatgacgtttgtatttttttaaactaacatatataactctcctcatttttacctatatatattaacattcatacttgcaatatataaaatttaacatgacgtatgcattttttttaaaagctaacatatatagctttcctcatttttacctctatatattaacattcatacttgcaatatttttaccctcttcccgttagaatacacacttattaaggattcctaatgcctgttcagagaattcaagaaactctacacaatgtgacctgacatgatcaagatggatcacgcatatttgttgggagcattttctaaccaagtttataacg

SEQ ID NO: 200253 - DNA, 256 bp, Glycine max
attttagggttttgtaaaatgaaaatttggtattttggtcttaccatggattgatgcttgagttgttaaacaatgggacagattaattcaaaatagtccaacactagtgtgttcgttttctacttatcctactcctaatgccttttttgggtgaagcataacctgaaacttcgtgcctctttctaggcttgctgttcccactaatgtaacatgtcttcatagttgctgttccttttttggatgagtatttgatatt

SEQ ID NO: 200254 - DNA, 451 bp, Glycine max
  unsure (1)..(451): unsure at all n locations
agctngtaacaaatataccttatatatataatatgggtcacaccaaacatggatgaaatgattatcatcctagagatctgggtagaatattacattacaaagaagagagaattcatcaactcatggttcattgagataggagaaatcaccattggtgttaaattattatgtatgctagtcatctcatttgtgctattgtacaggttgttgagtttttttgagagttttcgactgtggagagacttaaagagagctgagcttgatgaggaagccatcttgtggagctttggatgagattttgagtgattgtgagatttctagaggtggaggagacatccccactacttgtaattcatcagtctttcactttctcttcttattgttgtaaaagaagcttccctgctatggagagctaaatcctcagctggttcttcttatggggtactcgatg

SEQ ID NO: 200255 - DNA, 369 bp, Glycine max
  unsure (1)..(369): unsure at all n locations
agcttacagaagatgtacacgttataagttttactgcacttatntaataaacgaattatccattgttctatctccctatgttttattagtatatactaataatttcacaattagggtgaattgattactttttgtctatttaaaatttatcaactaagtattgttttgtatttcattatttatgccaaaatctattttatctatttttgtataaaacttaagagtagcaccttaaatgttttttctagtggttttaaactaaaattagagtttcacttaataactcgcacaataaagacaaaataaaaatttgacactttaccacagtaaaactcttattgtaattaaaaaaatagttatataaatact

SEQ ID NO: 200256 - DNA, 475 bp, Glycine max
  unsure (1)..(475): unsure at all n locations
ttaagtcacctgcggcatgcaagcttcatctgatgtgttagtaggtaatttctatattgcatattaatcattatagaataaaatatggtgtatgcttttgcgggacaattttagatttattatcttctttttctaagtagatgtgattaactacactaaacactggcattggtgacaaatatattgttcaaccttcgtaccagtttttcgcgaacaacgattttagccatggagatgaagttatattttactggaggtattattattattattattattattattattattattattattattattattatttagtttgtttcatgtttttccttcattactgatatttcctgtcttttttttcctttctgactttcccactcgcaaggtaatccacgaaaaaatattcagccgccaagnttctttctttatgntttgtntatgcatgcttataatattatgatattattatttg

SEQ ID NO: 200257 - DNA, 459 bp, Glycine max
ttaagtcacctgcggcatgcaagctatgatcttccaccgccgccgccaccattttcttatactctatatttaatattattagtactttgattatcagccttgtagtttggctatattactatggtatttgaacaatttactatttccttatttgcatggtatgtttgaacaagtatgttatttgactatgtggatttcatagttaatctatttatgattgttgcttcatggttcttacttcatgatttgattgatggtttttcatgaatgatgtatgaatgtttatttatatttgcatacttaaattttgatacgcactttgactttttgttgaagccaaagggggagagaaatgggatttaatggattaaatcaagaactcacatgagtatattatttaatcttaagataagcataaatacaaaaacaaacggggagaatttatgagagtgattgact

SEQ ID NO: 200258 - DNA, 430 bp, Glycine max
  unsure (1)..(430): unsure at all n locations
cacctgagctgcaacttttctgcacccactggaatttcgtactnttatattcagcatgtaacatcattatatatcttgtttcaccataatttgctttctgcaatgtatcaagttttagctgaatagtgattttcttttgtaaaagtaattttgaaacctatcatgttttaaggtcaactacaacacccaaagggacatactatgttattacatccttccgataacaatgtaacatgttctcgtaggactcattacctctacacgtgtatgttttaacacttggtatattttatattttatggagtattacaataatgttgatgcctatgtagtgactttgaccatatttaactgtactaatcaatatttgctggtcatattgtttctcaaaaggagcttctgctggttaacacatgatatctgtttgcgt

SEQ ID NO: 200259 - DNA, 372 bp, Glycine max
gcaagcttctcaaggaagctacctagactataattatttttatgtgtaacactcgtcgtaactttgatgaatgagagtcttgtgagacacaactcaaagttcaacttctctccctctttatataccctcaatatcatgctcccccctctctctttctctccctctttcttttgctccattgaaacatccttccaagcttcttatccaaggctcatcttggtggagaagctcctttctccatggctaatcccctagtggatggcgcactttctcacctattctcctttgtcatccgctgatctccgtggtggaaatcacccttaaaggaccccattggagctcaaagatcccaccctcatataaagccccaca

SEQ ID NO: 200260 - DNA, 463 bp, Glycine max
  unsure (1)..(463): unsure at all n locations
gaccggatccttaagtcacctgcggcatcaagcttaaagaaataggtctttggttgtttatgataanangcatgggctcaacctgtatgagagatattgataacgccattctcttcatagttgatataaacactttattttgggtgcatggccacaagtaatttgcacgcggaacgcaatatttactaaaaataaattatttattgaaggataaaaaattgacaaatattaaaatctttttattagaatagttctttatccaatgaaatttaaattgttaatataacacatcatattaacatttaatgattaaaaaatattttattatgaacttatattctcaatataacaaatcatattaattaaaatgtaatgtactaaacacaatattttatttaacaaaaaacgtggttaaatcatgcatcatcctcttaatattaataacttgtaacattacactaat

SEQ ID NO: 200261 - DNA, 435 bp, Glycine max
  unsure (1)..(435): unsure at all n locations
agcttntaaagaatcaagaaattgagggtcattcttatgatgtgttggatcgagtggcctcagaataattaagaaggggggggggatagaattaattattcctaaaaccttaccaattaaaaattactcttttaaggcttttacttatgttgttaagagaatatggagtataagagaaacttaacagaaagtaaaagcggaaattaaatgcacagtggaaagtaaaagagtagggaagaaggaaacaaacacacaaggatttttatactagttcagcacaaacccgtgcctaccttcagtccccaagcgacctgcggtccttgagatttctttcaaccttgtaaaaatccttttacaagcaaagatccacaagggatgtaccctcccaggttctctttgaacctagtggatgtaccctccactagaactgatcca

SEQ ID NO: 200262 - DNA, 358 bp, Glycine max
agcttcctatatactgtaagaatgtgtttgttttgagtatttgcaaccaaaatctggccttcatgatatctgaatatgactctaggtcttgtgctgacaatgatcataaaaacaaataaggagatgaagtttagtaattatttactctagcaatctttgtatggaaagcaattagaatgctctgttaggtgttcctacaaaaaaagcacaattctctaaggattagttgtattctaagccaaatgtatatgaaatgaaagatgttttaaatggggaagggaaaacttgattcttagaccaaaccttgctatttttaaacggagaaggaaatgatgtttcttcatctgacacaaaacat

SEQ ID NO: 200263 - DNA, 382 bp, Glycine max
  unsure (1)..(382): unsure at all n locations
ggatccttaagtcacctgcggcatgcangcttgctctgagatgccccatttggtctatttcaagtgtacctgcgacccacccatggtgcttccacaacctccaattcatctatccaatcattgaattctttgatgctattaaaccctgactctctttggcatgtaccaaatctttccgctggatccctgatgttattaaagtcacctcaaatgcaccatatatctccattctgtgttaatttcaactgtgtgatctgctcccacagcgcccttttattttggatatcgcaaggtgaatatattgtgactatgttgattggcaatgcttctttgatccattccccacttaacaaaatgaaaccatggctgatgatactattct

SEQ ID NO: 200264 - DNA, 395 bp, Glycine max
  unsure (1)..(395): unsure at all n locations
ngcttgtacaaaaaggttattattaccaattatgtaacgaaaccaatatcatatgaaaaacacaattttatggccctttaagatcaattccattacctatattgaaatacaagaccaagggttatggaaagagagaatcacacacaaaatttattttggtttagtccccaagagaacctacattcttcttgttctaagcacccctttaaaatttccactaatagagaatcaagtacaaatactatgcatattctattccttaattctactattcccttaaactttacaagagaaagaacaagagttgaaaccctatcaactcacacaaatcattggtgaccctaaccaagattagaaacaagggaagaaatcataattggattgaatacaccttt

SEQ ID NO: 200265 - DNA, 366 bp, Glycine max
  unsure (1)..(366): unsure at all n locations
agcttatgcacggaaaatgttattatgaaatttatatgcccgaagaaacaccatttcctagttaaccatgcattaggtaccatgttcaattattttgttntgttgttgtgtgttttttttttttttaaaaatgggtatatgatcccaacatggttggctcatggtgcctaacacatgcaactaagaaggtagtgtgaagtttcacgcttccccttttttgtttttgttatgtagaggaaaacgcaaggatgagcaaacatgaaaacaaatggtatgcaattttgcatatcaaaaagtttgttgaacgcatatgcatgatgatgccatgactcatgcacaatgtgaggctggaatatgataacggac

SEQ ID NO: 200266 - DNA, 216 bp, Glycine max
  unsure (1)..(216): unsure at all n locations
caacattccactctttaagtgcttggccagccttatataacatcgacactatggactgcnggaacaccattgtctggaacacacataatcttctcttctccaagaatgaatacacgttgtagttcacaggaacactcaaaacgggaacgctcttctagtgttatgcataggtatcttacaacaagacctgacacccttaatcttttatcttcacat

SEQ ID NO: 200267 - DNA, 287 bp, Glycine max
  unsure (1)..(287): unsure at all n locations
tgacatggttgcggtggttgaacggagcgctagaggttattgttttgtggntgacgtctcggagacgcatgtggtcaatgatagagtcgactattccggagagatcggagtatttgactgacagtaaggctagactgttggtgagtcgngtgattgcgacctctagtctatccgatgtcgtcttactggaggcgcgttcatcctctgcaatggcttagggcaggtcggaccagtgtttggtgtctcgatatagtggagagagagagtgtgaagaaaaaggggtccct

SEQ ID NO: 200268 - DNA, 325 bp, Glycine max
  unsure (1)..(325): unsure at all n locations
ttaagtcacctgcggcatgcaagcttccctttctttagccaatgctggacttgcttggtattgatttccttgngcaattgatgctcagaaacagcaatatccaccactccttcagttggtctgcccaggtacttggtgattacagtaggagagaatctaatacattttcctctgacaaacactctctgatactcatcactctttctgtttgttatgtcagagggaatggtgacaatgaattctctgactagaccttcatagcaatcttcccaactggtgacagttttcagcagtccaacagccttgatgaagccatgatctcctt

SEQ ID NO: 200269 - DNA, 474 bp, Glycine max
  unsure (1)..(474): unsure at all n locations
tattccaaggatagtttattatcatgcacagcctgcaatagttgtctcacaataggccaatcatataaatgaaacattttcttgagcaagtagtctggcctgaagctcaacttccattggtgagacccaacaaggctactgcacttgagcccacacctgtgcaggttaattcagtgccaactaacccacaatctctagtggtgaatccaccttcttcacctgagcttgaagcagtttctccatctcctcctctgattgtcatttctgacgcatcatcagatgaagcagttgctcctcctaattcaccaactgcagaaacaactgacccctctgtttccccaattagaggaatttatgatctttntgatttgtcatctggagaagctgttgctctcaccgattccctagtttaaacactttttgacattgttaattctggatgccctttttgcttttgggtattattataattat

SEQ ID NO: 200270 - DNA, 330 bp, Glycine max
  unsure (1)..(330): unsure at all n locations
tcactgtcaagaacatgacagggctctaacgtgacagttgcttgtttgttttcccatggatctggcaatataatgaaatctgttaacatgctagcgcataccaaatatcactgtcatggggaccataaacgacatgctggccacaaggatgtcctaaactgtaaaaagtacctgatgaccgctcgtagaaactcacaatatgttctgcgcgatagcctcatgattgaanacatccaacatccattcaatgaataccgactcaagtcttttctctgttcttgctggacgtcatcatccataatgaactgagacaatcgtagctgcatgtgc

SEQ ID NO: 200271 - DNA, 418 bp, Glycine max
  unsure (1)..(418): unsure at all n locations
agctgtgcgganttggtcttcgccagtgaagtgttctattgtttccgaaaagaggcaaatttgatcatcctactaggacgactgagaaaactggggcaaatgaagagggtgagaaagagggagaaacccatgtngtgactgccattcctatacggccaagtttcccaccaaacccaacaatatcattactcagtcaataacaaacctcctccttacccaccacccagttatccacaaaggccatccctaaatcaaccacaaagtctgtctaccgcacttccaatgacgaagaccacttttagcacaaacaaaataaacaccaccaaataggaatttngcaggcgatagcctgtaggtgtcaccccaaattcctgtgtcatatgctaaacttgatcccatatctacttgggaattcaat

SEQ ID NO: 200272 - DNA, 436 bp, Glycine max
tatcccaatctgtctttttgctcttgaagatggataagtatgtttttcacctcttgcaactgccaaatgcatggtgtgaaataatccatgttacatgaaagccgtgataaaaaggattcaaggacagtaatatgaatccatatgcctacaggctacagtcaaccaccctatcagaaagcataactcatttcaaatcaccaacccaatatcaacactgtactcctatcagcatgcaaaacactgcctaatcaaataacctaggatgtcaagtaattattaaaatgttgacaccactccttgccatagaaagttctacaatactatagctaggggttcataaaacatatacagaactagaataccttgaggagcatccaaccaaatgccatatgtgagtaggtgtaacgtggttttggttagtgcttagctctactga

SEQ ID NO: 200273 - DNA, 486 bp, Glycine max
  unsure (1)..(486): unsure at all n locations
agcttgaacaattattattatccaaagaatgcctttgntttataattacaaacttctattccatcaagtgaagtagaggaaaaaacacatgaagagaatggtaaatgcaaaaatgacaaaatggctggcaacacaggtaaggaagtggacaatgctcaagcaacaaagtccatgtcataccatgcaagagttcctaagcctcaagaggaggacctcaatttaccaatatcaagatatagtgctactaaaataaatgattctctgtatgaatctctttcacctaacaaggaaactatgtccttcactggttgccgaatcagtcacaccccttcacgctccttagcttctgacatacatgtggaggtttctgaagtttgttcaccaacactgacagttgatgagaaccatgagaacactacacatggggaatccatgatatatgatgtagacattgacaaaatgttactttggcaggaagatatgtgg

SEQ ID NO: 200274 - DNA, 444 bp, Glycine max
tgttgtaaaacgactttaattaattaattatttttatttattgaaatactaactaaaaaaagaaacttataaaatttcgtataagtaatgtacaaatccaaaaataattgataagcaaaatcatattgaattcaagtcgttaaaacacaaagtatatcagaagaaaataaaaagagcataatattaaaaaatgtatggattagagatgatttacactaatatagccaaacaaaaatatttaaattgtgtgaaaatgtctttaaaaatgtgaaaacgaatatagcctcaaaaagagttgtgcttgatcctcaagagaaaacaacgctagagacttagccgtccattaatcagtagaaaaaaaactgtagaatgaagtcgaaacgatattgcagaaaacgaatttattctacgagaacagtgtgatgaacagtatataaactgaat

SEQ ID NO: 200275 - DNA, 424 bp, Glycine max
  unsure (1)..(424): unsure at all n locations
agcttctaaactttgtacaagaatgaagttctgtactctttgntggaccttgcggcctcaataatcttaagagggataagcttagaatgcacaagaagcaacaataggttcccagctacaaggtcatgacgaaagataacaattggtacctcaaagccttacactggggcaatgaggggcatcgtgcatgagccttaagtgaacataggggcagatcaaaagttcacacccatcgatgttnttaaacaaaataaaaaagggggagacatgcccttgaatttcaatagattgattaaacatcaaacggctccattcccgtcactcaaaaacggtcaagtgactaaatcaaacagaacatacactctgagggagttcccggagagatgttcaaaagataggatgagggtgatgaattatcacctct

SEQ ID NO: 200276 - DNA, 433 bp, Glycine max
  unsure (1)..(433): unsure at all n locations
ntaacctcatcgtctctcacagtctttagatttgggagctaatccaatccttgtgtccggactctcagccacttatgatagccgccgatgctcccattactgcttcccctaagctctttgtcctttcttcacgccgcatcccatgccttgggaactccttggagtaccctcgcgttgtggtcactaaaaccccgtgcgatgaaaggcgtgatgctttcgtctaatggcgctcctctcatggggtagccaagagttggtgcacaacaaacaattcttgcgccgctcttttcacatccccggtcgaacgtgtcatacatggccaaaatggcgacgaccgggctttccttgccatgatgaaaggcgaggaaagcgtcaatcgctgctaggtccactaacccttccatattcngagagaggacaactncaaagatca

SEQ ID NO: 200277 - DNA, 440 bp, Glycine max
  unsure (1)..(440): unsure at all n locations
agcttccatgatcatggtgagagaaatatttaattttctttttcataagacaatataatgaaaaaataatatattttctgagcacaaccgttaatttagttgataaaatcctatggcatcaaatggtacagatgacctcacgaaatacatcatgtatgaaaataaatctcaatcgatgtgtgaatattatttcacattaagttgctattgcgtatgctgaaaacattttaactggcataaatgattgccagtgggcgaccatagtgaacttattttantatatgaactaatcatatacacagtatcattctatgctgctatagtgggagctatantttaaaaatccaaggcacaccaatatctggctttggatctacctattagcatttaatgattcaacgcttggccttggggcaatagtataatatataagtccataa

SEQ ID NO: 200278 - DNA, 373 bp, Glycine max
  unsure (1)..(373): unsure at all n locations
tntggttgtctttgtggggaacacatgaatcaatatggttgttttatgttgccataaatccatcaggaagagtgttgtgcatgtggaaaaaagaatgttttgaagtagttgaatcctctattggccagcgatatgtggggctctaagggggcgtggaaagaaagtcaaacaccttgtcttatgtttaacaattatgctccttgtgcattggctgaaaaaataagtttttggagcgagatgctacagttaaaaaattatattggggaatgagtttgatgtttgtgggggatattaatatggcaagaaaagtggatgaaagaagatgagcatccaataaagagatgggagaagtggaaataatgaatcaactttt

SEQ ID NO: 200279 - DNA, 415 bp, Glycine max
  unsure (1)..(415): unsure at all n locations
agcttcaaaggaagctggacaaacacgccagtctgtcgttcagcttctgaacttccccaacattagtgaggctatgcatttctagtatcgttgtgcacttgtcagggttagcttctattatgtggtgggtaatcatgaagcccagaaactttccaccaccaaccccaaaggtgcattttctagggttgaggcacatgtcatacttgtgaatctctctgaacacctcttccaagtctgccacgtgttgggctatgttgagagacttgatgatcatgtcatcaatgtagacctcgacattntttactatnntgttgttgaagacccagtctatgagcctttggtatgtggccactgcctttttcaacctgaagggcatgactttgtagcaaaaattggcgtctttattgatggaagc

SEQ ID NO: 200280 - DNA, 435 bp, Glycine max
  unsure (1)..(435): unsure at all n locations
tgtccttggtttagacatgattggacatgatttgngacttgtatgattcaatttgggcaaaattagatgagggaaagagtggttttcgaaatctgcactttatgcagagttttgctgttggaatgtgcagcagaattttgtataagtgcagaaaaatgcttgtgtatggctggttgtgaaaagggtagtacatatggggttctggacattttctagcagatcccaacggtcaaaatgtagacttatgtactagagacttccagtaaaattttcgagtcgatccaacggttaacgaactggaacaaagagaatcttattgaggtaattgaatgtgaaaagctgtgatgttggtttgtgttttgggcagagttttctgcctttgccctattttcttggctgtgttagtttgtgatgattgaatgttgattacttgga

SEQ ID NO: 200281 - DNA, 441 bp, Glycine max
agcttctctatatgtgatccgcttgaatcggacctctgttttaaaagttatgaccatttgaatttctcgagagcttccgttactcaatttcgagcatctgtatatgtgatgcgcctgcatcggacctccgagtcaaaatttatgatcattttaatttctcgagagcttccgttgttcaatttcgagcatctctatatgtgatgcacctgcatcagacctccgagttaaaagttatgaccatttgaatttctcgagagcttccgttgctcaatttcgaggatctgtatatgtgatgcgcctgcatcggacctccgagtcaaatattatgaccattttaatttctcgagagcttccgttgttcattttcgagcatctctatatgtgatgcacctgcatcagatctccgagttaaaagttatgaccatttgaatttcacgagag

SEQ ID NO: 200282 - DNA, 483 bp, Glycine max
  unsure (1)..(483): unsure at all n locations
gaccttgaaactacccttcttataagctgaaccattttatcaataaacacaagttgagttttattcagaaaattagagtttatctcttttatcttagtgagagtgattctcctaaattcttgagtgattcaagaacaccctggctgtatcaaaggactttcacaacctttgtgtgttgccctcgctggaaagagtgattctttccttcctttcatcttcacccttgttctttcaaaccacaattccagaaaatccacctctgcccagaattatctcgtggccataactcccgttttacgcactcaaattaagtgattcttgagcctaaattgaatttcaaaacgagaactttcacctcgttttggaatcacctcatttggagccctgtagcttcagttattgccatttctatatttctgtccagccaccacttaacctacattntaccatcccattcatccattntatgccaagaaccacctg

SEQ ID NO: 200283 - DNA, 354 bp, Glycine max
  unsure (1)..(354): unsure at all n locations
ntatgtgcatattatatgacccttgttataaggtgggttgttttgatggacacaactcctttagcacaaggggatacatagatgatacaccaaaatgagtctggcgtacgtccagtactagctaatgaaatagactatataatatcagatgatgactacatgactatggatattatgatcaactggtccttactttcagcttagaagtttttaattcactgcgtttatatgattacgactgcatcttggctcccttctgtgccgaatgctaataagtgattagattcagggaagatttatgctttttgaacaaacaaatgcctctccatagctccagccactatatgcttctct

SEQ ID NO: 200284 - DNA, 340 bp, Glycine max
gttgaccacaaagagcgacccggagatatgttgcgggggtcacgaaaccctgtggacatcaagtggggtgctatcgcccacaaccaaactagaccaatcccgacccaacccgggcataatcggtaagtgagaacctgtgatagacccaaacaggcgagctcctggcagtcaacacataaaaggaacaaagaccaccaagcaaggaggctagtggcggctggccagctgtgagactcgattgaaatgtgagacactggctctgggaatcgataccaaaggtgggtaatcgacacaacgccaaaaatgaaacaggaggcaagatggctcaataaccattaca

SEQ ID NO: 200285 - DNA, 371 bp, Glycine max
  unsure (1)..(371): unsure at all n locations
tgcggcatgcaagcttgnaggttacagatgcatggaagtgaagtttgtttataaacacacaacggaacaagtaaaacttaagaataagaacatggctttcatgtcaaattaattattaataattaatgaccctaaaacgcatgtgaaacttctctgaatccaagtaaaatgtgttggacccacatggcgtgctcatgaatagcaactgtgaattccatagtgtcctaaagaacattgtcaattctgcacttctttcccccaggtggcgatcttacggaaattcatactatagtaattttttagaaccaccgtatgtatgtgtttattggatatgagctaataatatgcctgctgcattataaattatgtct

SEQ ID NO: 200286 - DNA, 421 bp, Glycine max
  unsure (1)..(421): unsure at all n locations
tgcagtatgtaaagtatgaataattattagatcttatcttactttntaagtttcaattgggttcttttacataaccttaaaatcaatgtgattgaggtttgtgtcatgacttatagggttataagactatatcttaaactctctagttgttatgaaaaaaaaaatttagaaagggtagaaaataaattcttttggggtaaagtcagtaatgcatttcagattcaactctttcttgtacattcaatatgtatgaatctaaagggtatcttctattgataaactcagtaatgcgtttcaaattgaagtctcctaagttgtcgtattctatctgtgtcaattgaaggacatcactttagactattgtattgcttaagcgctaataccgttctgagatcacttttgtttactctgtgaaagcact

SEQ ID NO: 200287 - DNA, 421 bp, Glycine max
aattcacttcatgtatcttatactgtcgagaagcataggccactacctgtcccctgtgcataagcactccacccaaactcatcttggacgcatcacaggacaccacataaggttcactcgggttaggtaacactaatattggagcagtgggcaacctttccttaagggtacggaaactactctcacactgggcatcccacacaataacttgacccttacgagtaagcttagtcaaaggtaaggctatcttagacaaaccttctatgaatctacgatagtatcctgctaagccaagaatgctcctaatcttaaacactgacttaggactctcccaactcatcaccggctctacctttggaggataactactatcctaccttaatataccggcgctagaagccacctctctaagcaaaataca

SEQ ID NO: 200288 - DNA, 436 bp, Glycine max
  unsure (1)..(436): unsure at all n locations
tgtacgcacatcgttcgcgtgtatgatatccactccatattgtntgaagtacaggagagcttcaaccctataacgcaacgtggcggacaaaagtgggcagtaaacttgaatgatcgtcattgtcaatgcggaaagtattctgcgcttcactatccatgttcacacattattgcagcttgtggttacgtgagcatgaactactaccaatatatagatgttgtttatacaaacgagcacatcttaaaagcttactccgcacaatggtggcctcttgggaatgaagcgactattccttcttctgatgacgcatggacacttattcctgacccaactacaatctgngcgaaatgtcggtctaaatcaacaaggataacatatgagatggattgtttctaaccatctgagcaccgaaccaaatgtagtatattgggagccc

SEQ ID NO: 200289 - DNA, 378 bp, Glycine max
agcttcaggctgctcaattgctccaggttgctgtatggttatggcaaagtctgtatggtggtcagcagaggagcacaaaccacaaacccttgcgacaggtacaaatatttgattcaaggccagctgggttaccaagttaaccaatgcatccagtttgccttcaagcttcttatattcagatgatgaagatgggtttgtagctacctcatgcactcctctaatgactatggcatcatttctggcgctaaactgctgggagttggaggccatcttctcaattaaatgtctgtcttcaacaggaggcatgtctccaagggctccaccactggcaggatctatcatacttctctccatattactgagtccttcataaaaata

SEQ ID NO: 200290 - DNA, 311 bp, Glycine max
  unsure (1)..(311): unsure at all n locations
cgagatgaggaagtgttgaagggtgaaacttcctgcttttattgttgaccacagagnggtacctggagatatgtcgcggtggtcaggagaccttgtggacgtcaggtggggtgctattgcccaaaaccaagcttgaccaatcccgacccaacccgggcataatcggttagtgagaacctgtgatgtacctaagcaggcgagctcctggcagtcaacagataaaaggaacaaagaccacaaagcaaggaggcttgtggtggctggccagctgtgaaacttgatcgatatgtgagatatggtctctggtaatc

SEQ ID NO: 200291 - DNA, 400 bp, Glycine max
  unsure (1)..(400): unsure at all n locations
gcttntgagtcttctttaataaattttcttggtatagaccccaactagcgggtctatgttaacttcttatgtgtgcttggattgtcttgtggaaatttctggtagaacattcttgattgatctgatttgtttgcctttgagccacattgatgttattcttggtatggactatttatcttccaaccatgtcttgttaaactattttgataaaagggtggcgtttgatgattttggagtgagtaaggatatgatgtttatctctgccaactaagttgtgacatctttaaaagaaaatgctcaagngtacatgatcttgtctagcttggatataaagacaaaggttctcatgtgtgacctcactattgtttgagagttttccgaagtgcttcctatggatata

SEQ ID NO: 200292 - DNA, 384 bp, Glycine max
  unsure (1)..(384): unsure at all n locations
tcaacatcagaccacttccagggtgctggaacttcttttcatggacttgatggggcccatgcaagttgaaagccttggaggaaagaggtatgcctatgttgttgtggatgatttctccagatttacctgggtcaactttatcagagagaaatcagacacctttgaagtattcaaagagttgagtctaagacttcaaagagaaaaagactgtgtcatcaagagaattatgagtgaccatggcagagagtttgaaaacagcaagtttactgaattctgcacatctgaaggcatcactcatgagttctctgcagccattacaccacaacaaaatggcatatttgaaaggaaaaacaggactttgcaggaagctgctanggcatgctt

SEQ ID NO: 200293 - DNA, 326 bp, Glycine max
gggatctcaatagcgaacactcaatccaaattcttgtatcagaatagtaaatccgcatttttctgtatgggaaactgcatgatggctgctattcatagaaataactgtggcagctgtgtattacgactacatctaataatagtagggtgtggaaataagcaagcgtgttgttatttgcacgttgtgagcagagaattctcgaagaaactttgtgtccttggaaactgcaagatggctgctatccacattgtattaactagataacaagtgttttatatcatataccacacccttggatgcgtcagcctgatttttatctgaaaatg

SEQ ID NO: 200294 - DNA, 437 bp, Glycine max
  unsure (1)..(437): unsure at all n locations
acaactgactgtcctagtgcgaagcgaacgtggataatttgtgtccactnaaacgagcttagcgacatcgtatccctaatcaggataaacactctaatcatataggaagagaaattgtttgataactgatcggacaaatagtactctgattatggtttccccaactagtgaaagatagaaatagtccatttcatatatattacatgatagatagagtatatgagagaaaagaatcaaagatgagtggcatgcgaagaatgatgtatttgctttcattgaccgtgaagagagagtaaggcgaaaagagataagttaacatctgggctatgtacttgacatgaaaaatatttgtaccttgcatgctatgtttgtctgtgtaccacagctctaacagattgaagtaaaggaacaaccgaacaaccattgctgataaaaat

SEQ ID NO: 200295 - DNA, 375 bp, Glycine max
  unsure (1)..(375): unsure at all n locations
agcttatggtaagatctgngacctaaccatggttatttctttcttaggccattgcctccctcgcccaatattatgaccagcctttgaggtgcttcacctttggggacttccagataacacccacggtggaagagattgaagagatcctatgatgccctctgtgaggaaggagaccatatcttatctcacgattctatcccttcttagctagaatttctaaaatcgtcaaaatctccactcatgaattggaccgcggtaagcacgatcaaagtgttgtgtgtggcgtaccaaggaaatgtttggaagcaaagacgatagttntggctagtccaaacgaatgggccccgttcatggacatccttgcactcttgatct

SEQ ID NO: 200296 - DNA, 417 bp, Glycine max
  unsure (1)..(417): unsure at all n locations
tgggaatagagagaatcaaagtgatcccctttcaatagtgttgtattgttagtgcctcagctctcttttcttgggtttggagtgtctacgcctaatcttccacgtggccactttggtccaatcaatgaaagtgttctccgtaagattgtctaatgatgcttatggttgctatcaaaaaattaaaattaatttaattcataatattatttagtaatcaatttaaaactattttatcataaaaaaattttgttagattaacttttgtatatgtatcatatattcttgagtctttaaaaaacaactatgttaaatattactagataaactttgtgattataatgatgttgaatagaataactttacgtgaatgatacttatacttattttacaaanaacttgacattaatctactctatg

SEQ ID NO: 200297 - DNA, 440 bp, Glycine max
  unsure (1)..(440): unsure at all n locations
gtcacctgaggcatgcaagcttcttcagtccaaatatccnctattactanattatgtatccaaactttattaactcgatttaagtctgatatccagttgatgatggcctaacaattgatctaagataggctctaatatcattttaagatattgagcctaacttaaccacacaaaaccagataggggactgagggtagggaaagtacacagagagatagagactcaaaacagtaagaaagttgtccagtcttgcaacanatcagaaattaaaactcactgaagctaacatgaatagaataactgtgagaatcanaggtgaaaaaattatccatacctggtgaaggggaaaaagatagccttgaataagctggcattctactccataaatatataccagaggacacaatannatatggattgctttatatccttattcttac

SEQ ID NO: 200298 - DNA, 454 bp, Glycine max
  unsure (1)..(454): unsure at all n locations
tgccatccacctcaatgttgctgctatcttcgtgtggtaactgtttatggacagattacccactaggaaaaatctgcaatgtaggaacatcttgttgaaagagcaacactagttttgttcattctgctcaagggaagaggaggattcacatgtctgtttgcttatcaaatttggcaaaactgttacaaatgcattgggattcaaattgctcaacatagggattccaaagaacatttctttatgcataactgtttttggctcgggaggaatagttattgagtggagagcagtttggtgtgcagtggcttggtccatttggtgtcacataaataaaattgtctttgaaggagaacaaatggattttgatgcaatggtggaattaatatggtttcgagcatggatttcagcgaaagtanagaactttttccttactcttttatgattggtacgtgaa

SEQ ID NO: 200299 - DNA, 487 bp, Glycine max
  unsure (1)..(487): unsure at all n locations
agctntcaagttaaaagctnttattatttcattctcttctttgtgtctccaaaccaattttctctaaagtaatacaaagtaatgaaattatacacaattagaaaaatacaaattttataatttcagtttaaataaaaaatagcattattatccatttcaacctttgaactaattcattaatagaagaataatttaccttaaaacgctagaaaaaaagttcttgatgatcttttggaatcgctccccatgtaggccaaggctgaccaaattgttgcctaatggacaaagtgacagtccttgccgcaaccttagatggatgaaacctaaatataaaagataattaatcaaaatagtaaaatatcatgtgatgcatcatatataatgataattatataaattgtggaatacttaacgctccattaatagcataatcataggacaatcattaaggagagggtcttccatcngccaaattatagcatcttca

SEQ ID NO: 200300 - DNA, 449 bp, Glycine max
  unsure (1)..(449): unsure at all n locations
tatcaacatcaaacttggagaaagagttcttggggtctatacatgataagcaatcaagtataatgttacttccttcactaaagcggtgatccatctccacacatattttatcaatagcaacataaaaaatctttgcacggtaatgatgaagattagtgatagtcctcccttctgctcttgaacgaccccgaaccggtatttcatcatccatatttggtaccggaatacttttagctacacaaaatccttggacatcggcaaaaaaattattccagccactctctctcattgtgcccaaccgagctttgacaacatcaactaattccatggcattcacaatattaagatcttttctttgcaatacatttgaaagctcgtttgtgataccaaacaactctaacattaacctcagaataaaagcaaatttaaagctctccatttnttctatc

SEQ ID NO: 200301 - DNA, 327 bp, Glycine max
ttctttgaccttgttccctttccttgtttgaagctcactacaagccttaagtgaaaaaccatgatattaccatatccttaaagaactttggagctttggaatgttttgggaaaaagtggggggggtttttggtttattggaccactaggtttgttggctatgcttcatgatgtattttgggccatacttgatggacattggatattggttaaatgctggacatgctgaatgaaatgttggttctcaaaggctaaagagtctaacagaaaaaatcgtaaaaaaagattcgtaaaaaaacgaaaagaaaagcaataaaggtgagtgaat

SEQ ID NO: 200302 - DNA, 261 bp, Glycine max
acactagggcccggagaacgcgagatgagctgacagataacaacaggactatacgacagagccctagagcggaaaaaccacaagggcccgcaaggaagaatggagcaggaacaagctctgaagggctcaaaggggcagcagaatcgagctcaaacctataagggccgagaaggacgagtcaacgatggaaacgaagcgcctgaagaaaagttgaagctcgcacaggggaagagaacttaacaagcaacaacccgaaggaag

SEQ ID NO: 200303 - DNA, 402 bp, Glycine max
tccaagaatcaagatcaagattcaagactcaagttatgatttattcaagatatgtatgataaagttttttcaaaaactgagtaccacatggatttttctcaaaacttgtctaccaaagatgttttactctctggtaatcgattaccagattgttgtaatcgattaccagtagcaaaatgtttttgaaacaagttttaattgaatgtacaatgttccaattgatttcaaaaagatgtaatcgattacaatgttttggtaatcgattactagtgtgctcgaacgttgaaattcaaattaaaatgtgaagagtctcattctttcacaaaaaactttgtgttatcgattacactgatttgataatctataccagtgatagtttttgacacacaatagatgtactct

SEQ ID NO: 200304 - DNA, 239 bp, Glycine max
  unsure (1)..(239): unsure at all n locations
ctgctatcaactgtgagcctctcgatatatgacgggactcaatcgagtatccaacagaaangctattgtcgttagaatttgctcagagctcctattctcaatttcgagcggttcgatatattacgagactgcattggacatccgaggtaaaagttattgcctgtgacattgctaagtgctttcatgtgcaatatcgagcgtctcgatattataaaggactcaatgcgggatttgagaaa

SEQ ID NO: 200305 - DNA, 411 bp, Glycine max
  unsure (1)..(411): unsure at all n locations
ntgataccatcttagaatctgtgtttaggacctaatttttctttctttccaacacacccactcaagcccatgactacaggcctgaaggggcctatagcatggcaatgcatgtggtacaacaacggatctacaatagactctaataccattttaggatttgtggttaagacctaactcaaccccacaaaactggctagtaaggtgaggactatactgcacaagccttataagctctacttaggccatatctctgtcaattttctacccaagataatgataatatacacaaatatgtttagtccattgttgaattatacataatatgcatagctgattgactatcatatcttaatctgactggcgagcagttggctaatgcacattcacaccatcttgaatgcatatatatat

SEQ ID NO: 200306 - DNA, 368 bp, Glycine max
  unsure (1)..(368): unsure at all n locations
agctttccgaatctccagcatcatctttttcattattntgttggcagagnacttcttgaccttcttgtggcatctctacttccactgacaaatcatatttgagagaatggcacaactccagcgagtttggcctttgaaaatggaggcaaggacactgtttgtagaggcacacacttctcgagtcgcggtacggtttgtgttgcggcgtactgcgtggaggagcttggaggagtagaggcgttgtttggtttgggaagtccaggagggagtgagagaaaatgagttctcttggtggaggtgaaaggttttggatatgttcttgaaacagagaagattgatctgtcaaaattagtacctccacgagtgat

SEQ ID NO: 200307 - DNA, 404 bp, Glycine max
ttgagccacaatcctgactcaccataaacctttttctcttgtgagaatgtcaatccttaccctcggaagaatcaaaggaaagaaggaagatttccaatcaaagagaaaggaaaaaaggatagaaggaagatttccaatcatagagaaaggaaaaaaggaaagaaggatgatttccaatcaaagagaaagcaaataatgaaaagaaggaaaattcccaatcaaagagtgggagaaagcaaaaagaaaagaaagatcattcccaatcaaagaatgggagaaagtttaaaatgaagaagaagaaggatagaaagctcctgatcagggatcgaaagataacagaagaaatgtgctgataggtctttggaccggacaatatctgaacaatacagaattgtcactaaatg

SEQ ID NO: 200308 - DNA, 479 bp, Glycine max
agcttcatacaattaatatagaacttatatccttttgtttatcctatcagaggggtgcggtcctgtgtcctctatcatgaggttgttcatagtcatccacctattcatctgctcccccgaacacaaagttcaagatcatcacaggatccaaacacaaacaacacgcagggagtgagttatcacattcctaactaatgaagagaaacaagataacatgtaggtataaatatcatataaaaaaatacaacttacttaagcatcactcacggttattcaccactgtgtcgcataatattacctcgcaacaccacacatttcatttattttcacaacattcacgtacttcaggatcaaaacacaatatcatcaagtcaatcaatatcgatcaatacacaagcgttatgcaacatatacactaagactcaatctatatgcaatgtggaccatgtagtggaaaatacgtcggcgctaagagacat

SEQ ID NO: 200309 - DNA, 330 bp, Glycine max
tctagccaaatggacttaccttgaattaattcctttgatagtctttttgagccttggttccctttccttgttttgaagctcactacaagccttaagtgaaaaaccatgatattaccatatccttaaggaattttggagctttggaattggtttgggaataaaaggtgggggtatttgtttcattggacaacttgtttcgtggctatgcttcatgaagaatatgggccatacttggaggacattgttatatgggtaaatgatggacaagctgaatgaaatgttgtttcttaaatgctaaagagtcttacatgaaaaacgcgaataaaaatt

SEQ ID NO: 200310 - DNA, 326 bp, Glycine max
caaaagaagagggggaagaagaagaaggttttgttggcgttatgaaataacacgacgccgcccgccaagaggaagcgtccactaaagctatggatgacaccactgtacgtagggtcatcaacgatcataccaacaccagtgtcaaggatggaactcctaaggcatccaaggcaaccatagccgatgaagcttaacataaagttataaagcctacgtccaagcagtcaactacttcaaatgaggctacttctaaagatgagggaggaacccacatcctcatcatctactcaactagcctaggacccgctcctgttgaactatgcaca

SEQ ID NO: 200311 - DNA, 344 bp, Glycine max
  unsure (1)..(344): unsure at all n locations
ttaagtcacctgcngcatgcaagctaagaacccaacatgagtctcatgccttgtacacgcaagggctaagaaccaaaatctggtttaaattagaaacaacatgacaataggattgcttgtgagagatttgctccaatttgggctgccccatgtttgatatagaggtagtgaggaaaacaccttgcaatagtgtgtatacatacgtaaatataaggagcatgaaattcctatcaaagtgtgaatgattgccttcctaaatgaatgtatgacagtgtggaatgtctttttgaatgcaaaatgcgcaggatgtaattaagcttccaatatgcatatacataaatatg

SEQ ID NO: 200312 - DNA, 450 bp, Glycine max
  unsure (1)..(450): unsure at all n locations
tgtttaccacagntctaggagttcaatattcacttagtttcaaaattgcagccagcaattcattcaccaaaactcaaattcacaatagacacaatcataaggaaacctataagttcaagaaatggatcacaatcaaagactctctaagaattttgcatgaacatgttaagaactaattaacatgaaagatttgactcaaatcaaataataggataaaagaatttcatacactcatgaacaaatgagttagacaaagaaacatgaaaaataaaattcagcacaacatatgaaatcttatgtgacaagtttcatgactagacatgacttctatgacaaaactacaataggtgaacaagtcactctatatttgtgaggtattcttctactctaatgatttgtgaagacatttatgggttatgtttcaggccacaaaataacaagacagaactc

SEQ ID NO: 200313 - DNA, 428 bp, Glycine max
  unsure (1)..(428): unsure at all n locations
agctngatcgtccaatgactaaataagataaagtctttaaaatatgttttcaggcaaatacttggtatgaaaataatgacaaaaggtgctaatagaatgcttaacaaaccatcaaagaatgatgtagaaacacttggtttatactggttcactcaacctgagctacgtttggttctcccttacagaacaataaaggaaatcaaaacttgattacaaaacaagtattttgacctgtcactcctagctatacaagtattcttaataccacttctggaactatcttaaactccccctgaaactaagaaacccaagtattatttaacacaaagccactcctagctttcacaaatagtagtttgaatgaatacaagtattcaataacactcaatgagtgagtaaataaaaaagctcaaatacaagataacttt

SEQ ID NO: 200314 - DNA, 461 bp, Glycine max
  unsure (1)..(461): unsure at all n locations
cttgatgcaacatttggagaggttaatgaaacaatgagatgatgcactccatgagaggttggatcaaatggagaacagagatcataatgaagaagaaaggaggagaagagggaatgatggtgttcctagacaaaaccgaattgatggtattaaactcaacattcctccctttaaaggaaagaatgatccggaggcctacttggagtgggagatgaaaatagagcatgttttcctatgcaacaactatgaggaggaccaaaaggtgaagcttgccaccacggagttttctgactatgttcttgtgtggtggaacaagctacaaaaagagagagcaagaaatgaagagccaattgttgatacgtgggtggagatgaaaaggatcatgangaagcggtatgtgtcgactagttactcaagggatttgaaantcaagctccaaaaactaacccaaggcaacaggg

SEQ ID NO: 200315 - DNA, 117 bp, Glycine max
  unsure (1)..(117): unsure at all n locations
agctcgcttgtggngcttatattgaagcaggatttgtattctcaatgaagaacttgaacaggcatttagcaccatgtgtatgcattggaatactagggagaataggtgagaagagga

SEQ ID NO: 200316 - DNA, 469 bp, Glycine max
  unsure (1)..(469): unsure at all n locations
tataagaacaaaattgccttaatcatttccaaatatgcatgtgaattatgacgcatcaacaagaatcaagccaaggctattgtgcaagcaatcaatggggcaaaacacaccaaatgattataatgatggatggctcaaattctcacaaaggtaaaatcatcactttcaaattgagctttcaaaactatcatgacatgtagagaagaatcaaggatttcaagtcacaaaatgtcaagaacttttattttcaaaacaattacccatttcttgaacatatcctataattcaaagaaaaacatgcaaagtcgtacgtgcacacaaaattgacccanaatattaaactgaanatccgacgaaactaacaacattaacaaattaacacaactaacaaattaacaaaaccaacaaaactagcaaaaccaaagaacactccccccncncccncccatacttaaacaacacattgtcc

SEQ ID NO: 200317 - DNA, 108 bp, Glycine max
ctgcagctgggcccctactagcaaggttttcatgtgttgttcatctctacgctgcggctgcaaatttgagaatctctcccataccctaatatgaaccaagtagtaaaa

SEQ ID NO: 200318 - DNA, 438 bp, Glycine max
  unsure (1)..(438): unsure at all n locations
ctttgtgtttacgaagctgtactcgtggattttgtgagataaaattctcagctctaatgtgttcttccaccttctctacataaataaacacacgtcttctaccattgtagttcaagagggaaaaagagaagaacaaaagaagaagaagaaaaagtgagaagtgagagaaaggggtcagcgcacaaatgaaaaaaaaaacaaaataaaggcagaacacccaaaaaaatttaagcttttgtgtttacgaacctgtactcttggatttttgagataaaaatcgcagctttaatgtgttcttccaccttctatgcataaataaacacactacttctaccattgtagttcaagagggaagaagaagaagaagaagaagatgaagtgagaagtgagataaaggggtcaaggcacaaatggaaataanaaccatacgcgtttgac

SEQ ID NO: 200319 - DNA, 393 bp, Glycine max
aaaactcgcttatgaaggctaaaaataccagccatatttttttctgtccaagggacaccattatgtgcacctcttacactctccgatgattcaaattcctatgtcaccggcactacaagcatctcctcacaaaatctgagtcaactgtcctgaggaatggcaaatagtaaccgacactcagaactctaatggccaaggttctttcaccggtaagcaaatctcaaacacattcttgtagttctccaaaaacatacttcgtctggtattggtcaagacacttgacgagaagcgaggggaaacctttcttatatagcacgtctgccactaaggcgaacctggccggctgtgccttatacttctcggccttgattctgtgactggagatactatgtt

SEQ ID NO: 200320 - DNA, 484 bp, Glycine max
agcttagcccgaattagatctagatgaagttatcttatctcattcttggccagcttagcagaccaaatcatcctcagatgcaagggttgggcgctaatcgcttgacactcgcggcttatcgcatgaacagaaatgcacttggcgcgaggcttgcatttagtgaaatgactatttttcataaaaaaaaagttttctaagttatttttcagtcttttttccaagagattgaaacccttatgttaaacattcaaagataggctgatatactcctatctacggattatatagcaagctccaaatgattaaatgcatgaaaaacaaagataacagaaattaaaattgtgttgcctccctggaagcacttctttaacgtcattagcttgacgcatagctccataccttcatggtggcatgaaagtcacaaagaacacatcttccttgaagattctccttctagctagaaatgccataaacttcatataat

SEQ ID NO: 200321 - DNA, 390 bp, Glycine max
tcctcgaatgttgatacttgagagctgaattcaactttcctcttgtatctcgaagtgttcttcaactattccttttgagtctagaagtgtgcttcaactttcctcttgaatcttgaagtgttcttgattctatcttgaatatcttgaactcattccttagatgacctttgagctttttgtcatcacctttgtcatcatctttgttatcatcaaaacatctttgaatcaatcttgattcatcatgaagctatgcttctacattctttgtataaacaatcgacactagctctgttggttctttgtggatagttgaacttcatctatactgtggtctaataatctgaatcaacagttgggcagggggaattcttccttacacagatgtgctct

SEQ ID NO: 200322 - DNA, 385 bp, Glycine max
agcttctcgatatattatgagcctgaattgttcttccgtgtgacaagatatgaccatttgaatttctcgagagcattcgttgttcaatttcgagcgtctcgatatattatgcgtctgaatcggacatccgtgtgataagttatgaccatttgaatttctcaagagcttccgctgttcaatatcaggattctcgatatattatgcgtctgaatcggactttcgtgtgaaaagttatgaccacttgatattctcgagagcattcgttgttcaatttcgagcttctcgatttactatccgccggaatcggagttccttgtgaaaagctatgacaatttgaatctctcgagagcttgcgttgggtaattcctggcttctcgatatacta

SEQ ID NO: 200323 - DNA, 416 bp, Glycine max
tgacaatgaacaacgaaagctctcgagatattcttatggtcttaacttgacacacggaagtccgattcacgcgcataatatatgcgagaagctcgaaagtgaacaacggaagctcttgagaaattcaaatggccataacttggtacaccagatagtccgatctctcgccgcataagtataccagagatgcctcaaacctgccaacagaagctctcgagaaattcacatggtcatctcttcgcccactgaaaggcggatcaagcgcataatataccgagacgcttaaaattgaacaacggaagctctcgggaattcagctggtcatagcgtctcacacggaggaccagactacgcgtataatatacgcagacacgtaaaagatcaacacgcaagctctcgagaaatcatatggtcat

SEQ ID NO: 200324 - DNA, 432 bp, Glycine max
gaaaaagggttcagcccctgaggcacttctctctctttcgaatttgcttggaaaaattgtttccgtgaagaaaatccaagccgaggcgtttccgaaacgtttccgtgaggaatttcgcgaaggttttgaccgttcttcaatgttcttcattcgttcttcatcgttcttcgatcttcaacaggtaagtacctcgaaccaagcttttcgattcattctatgtacccgtggtgggccacattgtgtttcgtgtatttttattctcgcttcatttactttttatacccccttttgacgtgcttaagccattttatttaagtcatttatcgcttaaccttacaataaaataatattccaccgatcatttgaatatattatccggtaactctgttaaatgattccgccgttcggcggccgtaccacttggaatcaaaa

SEQ ID NO: 200325 - DNA, 461 bp, Glycine max
tatctccttcttcactacatcaagaatcaccgggttgtttcttctctggggttgacttactggtttagctccatcctctaaatttattcgatgcatacatgtggatgggctaataccaggaatgtccgccagggtccagcctatagccttcttatgcttcttgagaactgacaacaacttctcctcttgctcatcagcaagggaggcagatataatcactggaaaactcttgctatcatccaagtaagcgtattttaaatttgatggcagaggcttcaattctggtgtggtcggctggacagtggtcgaaggagatggcttctcagcctttacctcatacagaaagtcagacgtatgtgtacttcctgaaacatagttagtcctatctgactctataaaatcaatcttcagaggtagaacaccaccaccagacatgcactcaatatcactcttagattcac

SEQ ID NO: 200326 - DNA, 391 bp, Glycine max
acctaagaaactcaagctttggcagaccaaacgccatgctgggactctattgttgatccatgctgactatatatcaagcactcaaaattgaacaatacaagctcatgacaaatttaaatggctataacgtttcacctggacgtccgattcacgcgcataatttatcgagccctcgaaatggaacactaaagctcttggctaattcaaacagccataacctttgactctaatgtatgatggatgccatttatatacttggacgctcaaattgaaaaacagaaactctcgacaaaatcgaatggctataacttctaactcggatgtctaactcacgcgcataagatattcggaccatcgaataggaagatggatgctcttggcaaattcatac

SEQ ID NO: 200327 - DNA, 453 bp, Glycine max
  unsure (1)..(453): unsure at all n locations
agctgggcctcaaacttggtgatgataggctgcttaacacttccagctttagggcttgaccccactggaattccaagataagaaaaaggaataaccagctggctgcagttaagaaaatgagctgcatctctacaccaaccctctgatttgcccaaacagccaaactgacttttagcataattgatcttgaggcctgaaaccatctcaaaacatctcagaatagactttaagactctaacattggccgaatttgcagttccgaaaaacaaagtatcatctgcatatagcagaatattgacatccattactaggattgttgntgtttaaaaaagaatttaggtttgtattgtagtctttggatattggaaatgcaattatggccatgctagggttagtcttctgtatgaatctaaatggtgngtctntatggtactattntatatcttatgtgac

SEQ ID NO: 200328 - DNA, 220 bp, Glycine max
tcaaactcctatgttgctggcactagaagcatttcctcacaaaatttgagtaatcggttctgaagaatggccaatagaagacgacactcagaacattaatggccatggttctttctccggaatgcaaatctcaaacacattcatgtagtcctcaaaaaacatagttgcctggtattggtcaatacacttgaggagaggtgaggggaaaccctccttatat

SEQ ID NO: 200329 - DNA, 415 bp, Glycine max
  unsure (1)..(415): unsure at all n locations
ggcatctatttcatggataagtntctttttattcctgtgaatatttctttcctggaaatataacatgaaaatgttaatcttgagtattatttaaaaatgtgtttgattaactattaaaactggttggaaatatttttttatattcttaggaataattaaaaaagctgtttggttaagatattttttttccagagaatatatattatacttactaaaatatctttatcatattaaaaatgtttttctaccgagtataatcaatatgcaaaaatctcacaatttctatgtaattntttttttatgaaataggaggtatgaacatcaacatagttaaccaatgatctctactaggntgacacgagaaacactatntatcctatgcactatcaccttctattattaaaagaagaaaaat

SEQ ID NO: 200330 - DNA, 346 bp, Glycine max
  unsure (1)..(346): unsure at all n locations
tctagccanatggacttaccttgaattaattcctttgatattccttttgagccttgtttccctttccttgttttgaagctcactacaagccttaagtgaaaaaccatgatattaccatatccttaaggaattttggagctttggaattgttttgggaataagtgtgggggggtttttgtttcattggacaactcgttttgttggctatgcttcatgatgtattttgggccatacttgatgtacattggatattgggtaaatgatggacatgctgaatgaaatgatgtttctcaaaggctaaaaacaagaatgtgcaaaataaacaaaattctaaataaaaaacaag

SEQ ID NO: 200331 - DNA, 380 bp, Glycine max
tgaaggtgaactagatgtcttgggtaacctggttaccttatctagccatgaataaaaaaatctgcacctgtcgccagactttgtggattattgtcctctgccgaccaccacacagacctttgcccttttgtgcaacaatctgaagcaattgaatagcctaaagcttatgctgcaaacatctacaatagacctcctcaacctcaacagcagaatcagccacaacagaataattatgacctctccagcaacaggtacaatgccggatggtggaatcatcccaaccttagatggtggagtccttcacaacagcaacagcaacaacaacagacttattttcaaaatgttgttgacctaagtacaccatacgttcctcaccaatc

SEQ ID NO: 200332 - DNA, 466 bp, Glycine max
  unsure (1)..(466): unsure at all n locations
agcttaacgctagaatnttgataatggcattggtggatatgaccatgatggggngaagtttaattaaggaaactatctttaggcttctaattaaagtaattatctttagggatctaatcaaaatatttatctatagtgcacctaattaaagtaattatctttagagatcatattagaatatctatctacattgtgcctaattaaagtaattatctttatatatcatattagaatatatatctaaagtgtgcctatntaagtaattatctctaggaatctgtaaataagaattcagagtctgtactataagaaaagggggaaatacattataatatttacgaacaacaagagctnttgagaggagaacagcaccgggaacaattcaggtataaatctataagggggtttgatctcttttttttttttaatttctaatgcaatatcgtatgttgttaagtattctatg

SEQ ID NO: 200333 - DNA, 491 bp, Glycine max
tgtttcggaccttgaaactaagcttaacaccaaagccctgagccaaaccttcagccaaacatgtatgtttcaaactcgcacacaatcctaactcccaaaatgcatgaacatcaaccatgaaggcacacaactcatgtgatcaccctcaacacccacacattcctagacaagaccatccacgacatcaatgacccacaaattgctaatctctaaccctttgtggtaaagtgaggcataacgtgtgtaagaagaagacatagatcatttttgtgatgaggttgaggcaaggctgattaatttggcctttctaaattagcaaaatgacacacagttttgtgttacatcaatttttatttaaaaccttagataaattataattgtaattgctaatttcattttacattgataattaattaccagagaacacttcttatctaaaagtttgacttagtcttggagcatatgtgacaccagacatatatagttgacgt

SEQ ID NO: 200334 - DNA, 430 bp, Glycine max
  unsure (1)..(430): unsure at all n locations
ggctctagaatacattgatgtttgtatttatgggatgtggtttgttgtcatttctgttttaagagtagtgtcccactggtaaaactaactttccaaatgtttgccttcgcaggaaatggccccgaggaagcttgcctcaaagaggtccaggaaggacaaggcagccgaaggaactagttccgctccggagtatgatagtcaccgctttaggagtgctgtacaccagcagcgcttcgaggccatcaagggatggtcgtttctccgggagcgacgcgtccagctcatggacgacgagtatactgatttccaggaggaaatatggcgccggcggtgggcatcactggttactcccatggccaagtttgatccagaaatagtccttgagttttatgccaatgctnggccaacagaggagggcgtgcgtgacatg

SEQ ID NO: 200335 - DNA, 480 bp, Glycine max
  unsure (1)..(480): unsure at all n locations
atccttaagcacctgagctgcagctgctggaaacttttggagaggatttttgctttatggtgattttccaccatggagatgcagcagaagataaaggagaagaggtgagaggaggcgccatcgactagggaataagccatggaagaaggagcttttgacaatatctaagtcagagttgaagatcaattttgtcctaaaaaagcattggaaacagccataacacttgcacacaaaataacaaatgcaaatagatgttggttacaaaataacaaatccaaatagatgttggttagaaaatcaatgatagaggtgttagagataaggggagcaacatgaagacttagccttgaagcttgaagaagcttgaataagtnttgtcttttacaggtccaactctcttgagtgacattngtattgattgttggattgngcattgcatcttaatctctatttnttcatatatgcatcatgcatcatcat

SEQ ID NO: 200336 - DNA, 468 bp, Glycine max
  unsure (1)..(468): unsure at all n locations
tcctttacacaaagagaagagaanaatgaaggattgattaaatacaagtagtggggatgtctcctccacctatagaacctcgcaatcactcacagactcatctcatgctctcaggatggcttcctcttcaagctcaattctctgccagtcttcgcacagcagaagctctcaaaaatctctggaacttggacctttctctctctagaaatctctaaacatgcagaagctttgagaaatgcccaaactctccctccatttctaatttcaggcttaaataggtggtctcgttggtgctcttgcgcttagcgcgactctggctcacttagcgcacataagtgaattttagcttagcgcgtgtcttctcgcttagcagatggatgcaagcggtgcacttagcgggatgagctctcgcttagcgcgcatgtaaaactcatccttcttccagattcttcctcgcgctcagtcgca

SEQ ID NO: 200337 - DNA, 419 bp, Glycine max
  unsure (1)..(419): unsure at all n locations
agctntctcataagtcctaaacgacatttcatgtatgtttaactcactttaacctccatttaccacaaaattcagacttaaccttccaactctcaaagcctcactctntttccactcataacatcacattctcactttccaaccctaggttaactctacatttcatctctaacagttttccatgagcaatttttcagcatacaacatcacaaacatcatcacaaaaccctaaaacagaatgggtatgtttaactcatccaaacatggcaatttcaacaagttntcagcaaatgtcttcacaaataatcatcacacaccagaaacctagcaagactacccatcatatctccccaaaccccatacccacgaaaatcaaaggagaaagaagtccacctaaacctgaattttcgaagcccact

SEQ ID NO: 200338 - DNA, 473 bp, Glycine max
  unsure (1)..(473): unsure at all n locations
ctcagctnntgaagctggaatcatttatcctatctctgatagctcttgggtgagtcctgtccaggtagtcccgaagaagactggcctcacagtgatcagaaatgagaaggaggagctgattcctactcgggtgcagaacagttggagagtctgcattgactataggaggctgaaccaggttaccaaaaaggaccattttcccctgccattcattgaccagatgcttgaacacctggcaggtaaatcccactactgtttccttgatggtttttctggttatatgcaaattactattgctcctgaggatcaggaaaagaccatattcacctgccccttcggtacttttgcttataggaggatgcctttcggcctgtgcaatgcccctggtaccttccagcggtgcatgattagtattttcagtgatttttagaaaattgatagaggtgttatggatgatttcactgataaggatc

SEQ ID NO: 200339 - DNA, 487 bp, Glycine max
  unsure (1)..(487): unsure at all n locations
caagcttgcggatttggtcttcgccagtgaaatatcgttgtgggtccgaaaagaggcaaatttgatcatcctactatgacgactgagaaaactgnggcaaatgaagagggtgagaaagagggagaaacccatgctgtgactgccattcctatacggccaagtttcccaccaaacccaacaatgtcattactcagtcaataacaaacctcctccttacccaccacccagttatccacaaaggccatccctaaatcaaccacaaagcttgtctaccgcacttccaatgacgaagaccacctttagcacaaaccanaaaaacaccaacaaaaaggaatnttgcagcaaaaagcctgtagggttcaccccaaattccgttgtcatatgctaaacttgatcccatatccactcaataattcaatggtagccataaccccaaccaaggttcctcaacctccatttttctgaggatacgactcgaacgcaacgt

SEQ ID NO: 200340 - DNA, 478 bp, Glycine max
  unsure (1)..(478): unsure at all n locations
nntagaaagggcacacttatgggaaccttgggtttttctttttcttttttctcctgacgactcttaataacttaaacttctatttaatgtattaattaagctctaactttcaagttgatcctagagtaattacttcattcattaactctcttaattagacttaactaaaaataattaaagtgagtgagaaattaattcttctttttccttattaattaaactagttgtctctcgcatctagacacattaattagttaaaatctcccatattatcctaaaaagtccctatttacaaaattgtcattaataagagattcccttactttgactntttagactatagttgaattttgttgattgatggtttgaccaagggttntctacatctaaaccacttttttcctagactcggcacttaaaatctaggtcacttgactatccaaagatggtcctatcttttatatcaattatntcacta

SEQ ID NO: 200341 - DNA, 380 bp, Glycine max
  unsure (1)..(380): unsure at all n locations
agctntaggctgttcaattacttcagattgttgtatagaatggcaaaggtctatgtggtggtcggcagaggagcagaaaccacagagtctggtgacaggtgcatattttttattcatgatcagttgggttaccaggttaaccaaggcatctagtttaccttcaagcttcttagtctcagttgatgaagatgaattcgtggatacttcatgcactcctctaatgacaatagcatcatttctggcactaaattgctaggagttggaagccatcgtctcaattaaatttctggcttcaggaggggtcatgtcttcaagggctccaccactggcagcatctatcatacttctctccatgttactgagtncttcataaaaatatg

SEQ ID NO: 200342 - DNA, 383 bp, Glycine max
tgtacaaagcttgattgaacagtgcatttatattatcctttggttgatacttgattatagaattcaatgtttgtgattggattgaattgatcaattgtatgctgtgagtgaattgaaatgcacaaatcatatgccttgaatgaacatgtagtcattagaagagaaagaacatggaattatgatcatgactgaagatgttagttggtttgtcacgttgattgtgaaggaacgcattagccgcaacccagtgaaagtgtgatctttaattatgagagaacgactaacattgagtaatgatgtttgcatgaatctctgagtatggaatgaatacgtgaaattaaagatgatgaaggccatcgttggattgaagataccacttatct

SEQ ID NO: 200343 - DNA, 259 bp, Glycine max
gacctgtggatgctatctgtctcgtgacgaaacattgttattttttttgagctatccacaggcgtcaacgattctcaaaatgaagggtctgtgtatggaagcggcaatgatgtggacaacaacctctgcggcggaggttgtgtcgaatatggaccccctgtccttgaagttgtaacggagggtgctgaacttgacgaggttgccgatgtgggccacgcccactgaaccgaaccggtatccggcagcgaagggttgcaca

SEQ ID NO: 200344 - DNA, 449 bp, Glycine max
cataaaatcatgattcgagaatatagagatttgtttttattcgggtaagatattattatataggttactatgcttcctatgggaagactttaaaaggatgcgcgcgttctttgtctcttacacaccaagagtaatttattctttatttccatattgcttatacctttattataagatcataaaaacaaaatgtttgactaaagtttaatatatgataataacttaagtaaaaatataatgtgtattctttttggatgttacgaacattcgaactcaatctcttatgaaattgtcttacaccagatattatatgagccaccgataccggctaaatataatgaatagttagtacttggaacgaatataaccacttgaatatattatatttaacagcaatttatcacgtaatcatttataacctatagtttggacttgacttcctaatgact

SEQ ID NO: 200345 - DNA, 376 bp, Glycine max
agctttaacaccattgacacgctctattttgttctctatttggtcaattccaattgaataaaaaatcatcatacacaaattaaactgaggttgcctcttatggtaaaatattgtgtgactactgactatgtccatcaatttcaatgttgtaagcaccgcagttgtagaactaatgggggatctaaggttaatcttgccttttggttcccatgctgcattatacattatctatataataaggtgtaaatcttgtctattctatttcttacgtgaaaggagaaaacattagtagtagccgtggcagaagagaatatagaaatcacaagggacaagtgagagatcttcccagcatcacacgcccgagtatataatgaca

SEQ ID NO: 200346 - DNA, 380 bp, Glycine max
  unsure (1)..(380): unsure at all n locations
ctggaaacagacatcctcactactgaagactttggttttttatctgacaacgcctaactcattaatactgctctcacagtgatctgatgtgagatcgaggagctgactcctactctgcagcacaacagntggagagcctgcgttggctataagaggaggatccatgtttcctttttagacgatatattcatgccctgcatggctgagatgctagacccgacgctctgtagccaccactactgataccgtgatggtatttttggagtaagcaaaatacctttgctctgaagatcatgataagaccgtattaccccgtcccaaatgaacttaagcttataagaggatgcctacccgtgtgtgcaaggtcactggtacattgc

SEQ ID NO: 200347 - DNA, 356 bp, Glycine max
  unsure (1)..(356): unsure at all n locations
catgcaagcttgttcttggattttttgaagntctttagcagtcttataacaatatacttngccttcatttcattttctttgggcttggcgaccacgatcaacaaagtattttctgatgtaatcctagcccctaagggcattggataaaagactcaaagaagattgggccaaggatgcaagagaaggccctagggttctcatgagccttagggtagatttcgggcccatgggctaagtatgaacccacttatctttgtacatattagaataagggttcattaantttgggccttgtatttaggactccataatgtaggtagggtaccctagaaatataggatttttcagcccttgta

SEQ ID NO: 200348 - DNA, 464 bp, Glycine max
ctgagcaaattcaaatgataataactttatactcggatgtcctattgagtcccgtaatatatcgagacgctcgaaattgaaaacataagctcagtgcaaattctgacaacaataactttttactcggatgtctgattgagtcccataatatttcgagacgatcgaaattgaaaatagaagctttgagcaaattctaatgaaaattaatttctactcagatgtcagattgagtcccgtaatatatcgagacgctcgtaattgaaaacgaaagctggttgcaaatgcaaaccataataactttttactcggatgtacgattgagttccgtatttatcgagacactcgaaattgagaacagaagctcatagcaaagtcaaacgacaatcatttcttactcggatggcccattggtcccgctatattgccagacacttgaaattgaacaagatgctctacaaactcaa

SEQ ID NO: 200349 - DNA, 417 bp, Glycine max
  unsure (1)..(417): unsure at all n locations
agctnggtaaattaaatcctttctttgtaatattattgtctccaccaaaaaagtcttctaagggagctttgagctgcggaagactttatagagattagggtcaaactgtgattggtaaaaaagctgggccaaaccacaccttggcctaaaagccaggattagattgcctaggaccaaagactggccaggccaaagagattctttgggactagcaggctgaatctccaggattaccaaggagccaatgatgattagtgggatcgccacagggcaaaaacacatctaacatagactactaagactagtctccttcctgctttctcttcttcaaaattagcatcaaatgtcatagaagagaatntgataaccacagtagagcccctgttgttgatataaaccaatgccagctaaaataaa

SEQ ID NO: 200350 - DNA, 446 bp, Glycine max
  unsure (1)..(446): unsure at all n locations
nggactcacggagaacaatggcaaagctcagagatacggtgatgtttatgatgaaaggagtagcaagttgttatctgataataagaaagcttcgccggagataatggatacgaattagaagaagaaaggtttcagaagcgaagaataagaagggtttcggaagcaaagaagctgaaggggttctgtctggggtttctggcgctatctatgggatttcacttttaaaaggggaaaaacaatataataagaatcaatggtcaaaaatcaatcacatcagatttcccttccgattccccagcatgacacgtgtcccactttgcctagaaaagtggaattaatgatgggtagtgggagatcgaggcgacggatacacagtgaacgtgcgatcatgacgcctgttcatgaaaactggttaagaagagaaaaatgtaacttctcatcttctt

SEQ ID NO: 200351 - DNA, 451 bp, Glycine max
  unsure (1)..(451): unsure at all n locations
agctngagattcgctgtctcagtctctcagactgtgtattatgtacacatgcagttaagcgtatgctcttttatatctatntcttgctttctcccccctcttgattattggtggggtcgaattaaaatttaatattcttaagtgcactttgtatgtccaaaacgtttatttattgtagaaattaatataatcactttattttaaaaaagagttaattacttcttgtgaatattccatcaatcatattgttgatgtaggctgaacatacccttcttgttcctttgatattctttgcggcatgcagctttatgttctactatcatcattatattggtaaaagaatatcattctggataaagtcaatttgnttgtttttgctgataatggaggataaccgcatggctaactcttttctattcctcacattattcatgctcccaatgaggaagag

SEQ ID NO: 200352 - DNA, 461 bp, Glycine max
tgtagatatatcatggaccaatcaaattatatgctttctatattatatatgatatgaaggattcttcttaagtaaatattaacaaaaaataattctcttgtaaaatttagtggaaattttcctaccaaatcaccagttcttgatggcaagaattgggaaagaggatacacccaaatgaaggtgttatttgtttttcaagatgagtttgatgtagtgacaagcaggtatcaaccatcgagtgaaggttctaatgaagtccaaaggacaacttacaaaaagaattaggctttagtaacagttcgctttacctttcatggctgatgccattgtcaatccttttaagttctattgcacaaacatgtccatattgataagggaattctaaaaaattaaaacaaataaaatgtttcattcattcagtttttacttttcaaaatggagagcaccagattacatgcata

SEQ ID NO: 200353 - DNA, 482 bp, Glycine max
  unsure (1)..(482): unsure at all n locations
tggatggatgcgttcacggaggacgagataaagggaggttattaaagaggggggagcacgaaattgaacgaatgaatgagggagagaagtggaacttagaagtatgttctacaagactcttattcatcaaagttacaacaagtgttacgcatgcttctatttatatgactacagtagccttgcctatgagtaatgctngtgcttcgagaaaatactgtcctgtgagtaagctatctcttgagcaaagactatcctctgaggaagcgtacgagtcttagtctactactacaccaccgtcgtgtataacgtanagtctcgacctgacttagaggaagtacttgctttagagaaagatgtcgcttcatagaagtctacgagacttatgatacgtcataccgtctataatagctaagctcaccttcttgagatgacaagctagagcttagctactcaccccctataatagctaagctcaccccctt

SEQ ID NO: 200354 - DNA, 429 bp, Glycine max
  unsure (1)..(429): unsure at all n locations
agcttatgaataagctcttactntntgttcatcttcttatttataaccgcancatatataatatgaagatcagttctaggggtactgttatatatacaacccaacacagtactttgcaaagctatggtgacctaatactagcaatacatcaagaattaggtgaccattggtttgaccgcaagctatgcacccaaacacagaaaggctatattctaatcgcccctgaacacataaccctttcctaatattgctagaccataagtggaatggattatgaaatccttattccaatattcttaaaccatgtgcagcagaggaataaagcgtcctccatcaatctttacgcattaaagctgcatttgagacaatgactctgtgtctatggtgccacatacaccatgtcaaggatatccaccaagtctgtcagtg

SEQ ID NO: 200355 - DNA, 365 bp, Glycine max
ctacgacgccagctccatgcaatgggtgtgactgatgttctcttttgtggaccctgatagtaccattgctgcagctctaatggatatgtatcagagtatgggagatgctcttgcccagcaatacggtggctctgctgctcacaatactgaatgacattttgcgggattctaaatttatgaaatctgccgacaaatatctaactgcttatttgcatcttcttctgcagctgttgagatatatgtaacatatattttggagaatgacatgtgtttccagataggcctgtaaagtggatagcaactacacatttaagagagtttttaaactccataatacgatactatatcagtgcttacccagattg

SEQ ID NO: 200356 - DNA, 409 bp, Glycine max
  unsure (1)..(409): unsure at all n locations
agcttccnacttaaaaatattataatttatgtcctctaaaaatatngcgttcaagtaccggctctcgagaacatagtatttttgttccacaagttgtaaagaaatttatgtcattccccatattataatgcccatcatcattaaatagcttggagcacatgttcaatcatgcagtgatatttacggtaaccaatacaacaatgattatggatataagtcaataactgctaatctccactaactgcattatcttttcttaccattgatttaaaattaaatacatttcatattatctttaaatggggtataaatatagataacctctgcacatttgttctctgttaggacttttggcatgcgtaccaattgtcattgtatgttcatatttataaaagagctcatctccaca

SEQ ID NO: 200357 - DNA, 459 bp, Glycine max
ctttgatagaatggtttagagatatctcctatgtcttatggttattatgggatctcatgaaaaatggattgggctttgtctttagactcctcattattttgttatgatcaatggtgactttgttgggcaaattattccaggaagaggtcttatatagggtgacctactatcaccctaccttttttattttgtgtatcaaagggctctcatctcttataaaaaaacataagaggaaaggtgatatttatggtgtaaaggtgtgtagaggatctcttatcctcacacaccttttatttgatgacaattgctctttattttgcaaggctaataacaatgaatcatatattttaaagcacatcctagacacatacgataaagcatctggtcaacttatcagctaccagagatcacaggtctatatttagctttacacttctaccatcaccaggaccagcatct

SEQ ID NO: 200358 - DNA, 388 bp, Glycine max
actaagaaactcagctacttactcccttaacattacaggagaaaggagtcttctttatcacatgaaccatcgctttgactacattcaatccccctcatagagattacctggcccaatacaactccttcttgcaccataaaatggcatctatcctagttaaacaccaagttagtcactttacaccgatgcaacactcactctagattatctagacagcaatcaaaagatgagccgaagaagaagaagtcatccataaacacctcgatacattactcctccatgcgaacaaagacagccattctacatctctaaaaagttgcaggagcattgcaaagaccaaacggcattcgcctatacgagaacacaccaaaagggcgggcgaatgcta

SEQ ID NO: 200359 - DNA, 471 bp, Glycine max
  unsure (1)..(471): unsure at all n locations
accttaagtcacctgcggctgcagcttaacatgttttagaaaaaggagatggtattaaaacnccgagaaatcgcaaattctaagaatttcaaatacttcaattaaaatgcttttattttcaaaattttgtgtttgaataaaaaatattaaaattgtgaacgtaaaagaaaatgcatgcaaagagaaaataagatatggttggtgtgcttccaaagagaaaaatattgatgctgtatgagagtcgcaaaggaacctgggcacaacaacgtacaccaccacacccgaccacaacattcattcaatgacgcaaggcatggcccatgccctccgcgccggagagcatctccgttgcgtgatgggtagcaatggctactcccctgactggcaagtacagtcctatgtgttcccctatgcacacacctaattgatgtttcacgagctcaaacagtatttcttgaacagaacgatcat

SEQ ID NO: 200360 - DNA, 467 bp, Glycine max
  unsure (1)..(467): unsure at all n locations
ggaccttgaatctagctatacattttatctcaattcaatttacttttttgatttaattnctaggaggttatgttttttttatccttaaatttttttattaattctccatattatcctttttcttaaccaaggcagaatttgattattttttggtttctcgtcttatattatttatttaaaccattaaactacttacataatttattatatgatcttaacactaagcttcgaaatattttaaccactacactaatcagcataataaaaatatgacatctactttagagtatgttaatttatttcattttagacttggtatggaatattttaagataaaatataagattgatagtaaaatatataataaaaatatgtataataattaaaactaaaaaaatataattagaataactaatccatanataaaaaattacaacaaaattcacattagatcacaagtagataat

SEQ ID NO: 200361 - DNA, 399 bp, Glycine max
  unsure (1)..(399): unsure at all n locations
agcttgtcggcgatctccatgatctttgttgtgtcattggcaactgtgtaatgagntgacaacatttcgagatgaacccctttggagaaacggtccaccactacgaggataaccgagtgccctctgaagtttggtagacccataatgaagtcgagaaaaaggtcttcccagggtcacgccggaatgggcaaaggacagaggaggcctgattgacgccggtgatcatatttagtttgttaacaaggaacgcagttagcaacatacttgcggacatcttgttgcatgatggaacaggtgaagttgtcgggaactctagctaaagtctttgtcatccccatgtgccctccttgtggtgtagaatgaaattcacaaggattgttgggattgacggtgcatttc

SEQ ID NO: 200362 - DNA, 392 bp, Glycine max
  unsure (1)..(392): unsure at all n locations
tnctcatctaattgtcgttcaattagaaggtttactcattctcttgatagtatgatatccttgttggatactcgaatgctaatagtaggatccttgctaataggagatccatttctgggtattgactattcattacggataactaaattaatatcctgaaaaggaatattgttgaaaggtcaattgctgaggcagatatcgaaattgaaccatgacatcgactacttacacgaactcatctgactcaacaattgtttcaaaagctcaaatttgggaagggtaagtaaaggacacccatctatgctaataatctacatgccctagaactatttcacatgaccaaacacattgagattagtttccgttgcattagagagaaaaatcttatccaa

SEQ ID NO: 200363 - DNA, 484 bp, Glycine max
  unsure (1)..(484): unsure at all n locations
agctngngattctttagtcttaattgccaatgattatttatttatcaatgatatagttaaaggttcacattntgcatctgggcattacttgtgaaaattatttataggtttaattactcatttgattttatagttccatcatttataccttttagtccctatagttttaaagtgatttttttagtctttatgatttacattttaattgtcttttaatccttgtagtttgaaagtaattntttaagtcattataatttgtattttaatttctttttaatccttatagttggaaaatgatctttttaatccatatacccttatatttaatttccttttagtccttatcattaaaatatgagtaatattatcaattataattaactacaaaaataataataagtaattcgtaactaatttattgcangataatttgtaataattttttaataattataactaatttggagctaatattatatatcta

SEQ ID NO: 200364 - DNA, 419 bp, Glycine max
tgagagtgcatgttcttccacaacaatgcgcacaagagtttgctttttatttttaaatttcaagaacatgatgcatcttcaaccaaatccacttatcaatcttatcctaaaaatggtacgacataatccgggatttggattgaaaccctgcgtttttatataactctgaatgtttgtgcatatcaactggtgtttgatcacttatttctgctatcagtgtatatatttcctaccataaaactatatcagtagtctcaatggtaatataaatgaaatggagtgctgcaagtagataaaatggagtcattcaaagcatggaagaacaaaacgttcgaagaagagagacaccttggaagttgaattaattggaagaaataagaagttgagagttaagttgctcttactatatatattaattt

SEQ ID NO: 200365 - DNA, 454 bp, Glycine max
  unsure (1)..(454): unsure at all n locations
gtcacctgaggcatgcagctatgctgcnatattacaatagacctcctttactttaacagcaaaatcaaccacagcagagcaattatgacctttccagcaacagatacaaccctggatggaggaatcaccctaacctcagatggtccagccctcagcaacaacaacagcagcctgctccttccttccaaaatgctgctggcccaagcagaccatacattcctccaccaatccaacaacagcaacaaccccagaaacaaccaacagttgaggcccctccacaaccttccctcgaagaactngtgaggcanatgactatgcagaaacatgcagttcagcaagagaccagagcctccattcagagcttaaccaatcagatgggacaattagctacccaattgaatcaacaacagtcccataattctgacaagctgccttctcaagctgtccaaaatcc

SEQ ID NO: 200366 - DNA, 391 bp, Glycine max
tggttcgagatacttacccgttgaagatcgaagaacgatgaatatctaatgaagaacgtcgaagaacggtcaaaacctttgcgaaattcctcacggaaaacgttacggaaacgtttcggaagcgtctcggcttagattttcttcacggaaacaatttttccaagcaaattcgaaagagagagaagtgcctaaggggctgaacccttttcttcttcacttcctcccctatttatagcaaaataggggagatggttgccgcccagctcgcccaggcgagccaggttgcttcctccagaagcaacagccttctggaggaatcttctggatggccaagtgggcctgctgctatttgcaccccatttggactaagtacacccccctcttctttttt

SEQ ID NO: 200367 - DNA, 401 bp, Glycine max
aacattgatagaatccgcgtaaaaaagtgcatcgaatagaaaatcacagcctagctttgatagactcttcatgtctggtcaagaagaccattcataagagctataacgtttcataaaaacttacaaccacattgaataagacaactaccttctgaacagttacatcttttgatttattgataaacagtcactggtaatcgattaccaattcagtgtaatcgattacacactgcttttatgtgaaaggatgcgactcttctcatttgagatcgagtttcaatgtacaaaggaactggtactcgattaccgaaacattgtactcgattacaactttccgaaactaattggaacgtcgaaattcagtttgagaacttttaaaacaatgttgtactggaatcgat

SEQ ID NO: 200368 - DNA, 452 bp, Glycine max
  unsure (1)..(452): unsure at all n locations
agctngacaatacattngttgaggccatcttttctttatcatctttgncaatgtttgaattggtgtaatagaacctaggatttagataataacccgtcatatgcaaagggtggtaaagttggcaatcccatctgtgatgaatgatggcaaagatattcttatacttctctttattatcattgaaagctctttgaattgtctccttggccctatccattgcctcataaatgaaactcattgaagttttttttttttcgtatccaccaacctcaatacacttacaagaggccccatagtcttcaaagtgaaggcaacatcaaactggaacgatgccatgagaacaacantttgtgctttctttcccttaggttccttagctgcctttgacttcatccattcttctgaagtaaacatccttcttatatcgaccctttgcttatgatctttgcaaa

SEQ ID NO: 200369 - DNA, 421 bp, Glycine max
gctcttgtgtgcctttgcattgttattatacttagatagattgtcattaacaataataagattgtgcaccaagagggtgccatagatgatgagaatgaaaacgttaccacaattactaatactattaccaccaccactactactacccctacagaatggtcagagccaagttttgtggggtggatttcagtgaagagggtcttaatggggtcaatgctgtggagcaaggcaagcaaattggaggagaacattgcatggcacagagagaggggatcccctctgcttggcttacaaaggcagggtcttgatagtgggtggcaaagccataactcggaatcaccggtgtggcaaagaccaatactgatgggggagaagtgtgagttgccaaggtttaatggcctcattctctatgatgagaaag

SEQ ID NO: 200370 - DNA, 444 bp, Glycine max
  unsure (1)..(444): unsure at all n locations
tattattagagttcaattgcgaggtatgggacttgagttcttccaggntcttatcatttgcatagacaagcctgcatgtccatgtattaggttaaggttctagtgttaagctgccttactgtaggcacccttaatttgtagacttatgcaccttaattgtgataggtgttagggggtggatataatcccacattgactatggataaggctcaagtgatgcatatatagcttgggcaatcctcaccttacaagctaattttttggagttgagttacgctctaagctcaaattctaatattgtatcagagcttatcttatatccatttcttgtgggccacctacatgggcacgccctatactagtaaccttatggtgagggcgtgtattaagctgccttaatatgtgacaaccttggcccacttaatttgggactcatgcccttca

SEQ ID NO: 200371 - DNA, 483 bp, Glycine max
ttccggatccttaagtcaccgcggctgcagctttggcaaggaagaagaagaagaatttcttttgatgttcaaaagcatgtgaaaaagctattgaagtgcaagacaatgtgttgcttttatagactcttcatgtctgagcaagaaaaacattggaagagttataaccttgaaaaaatcttgagaaaaccattagaagagttacatctcttgattcttattcaaaacttgtcactggtaatcgattaccaaaaccatgtaatcgattacacaaagcattttatgacaagatgtgactcttcacaattgattttgaattcaacgttcagaacactggaatcgataccaatatattgaattgatacaccatttaagaaacaattgaacgttgcaattcattaaagctttgaatcaactcgcactgtatcattacaaaactgtatcattacaagagtaactctgtactagaaatttggaaactcttta

SEQ ID NO: 200372 - DNA, 459 bp, Glycine max
  unsure (1)..(459): unsure at all n locations
tctggtgggacatcttgacttgctttccaatctgacattctccacagattctgccttcttctattttcagattgggaatgcctctaacagcacctttgtcaatgattttcttcatgcctcttaagtgcagatgtccaaatctttgatgccatattttgacttcatcttctttggaggataatcatgtggaggagtaactggtttcttgaggtgtccataggtaacagttgtcctttgatctgctgcccttcattagaacttcactcttctcatttgtcaccaagcattctgactttgtgaagtttacatagaatccttcatcacacaactgactgatgctgatcaagtttgcagtcagtcccttcaccagcagtactttgttcagactaggaagtccatcatggactagctntcccattccagtgatctttccttttgagccatctccaaatgtcacat

SEQ ID NO: 200373 - DNA, 476 bp, Glycine max
  unsure (1)..(476): unsure at all n locations
agctttgattaatttcatcggctcatattttttggactcaatcgaacatcagagtaaaaatttattgtcgttagaatttgcttagagcttctattttcaataagagcgtctcgctatattacgggtctccatcggacatccgtgtaaaaaattattgtcgcttgaatttgcaacgagcttacattttcaatttcgagcgtctcgatatattacgggactcaatcggacatccgagtaaaaaattattgtcgtctgaatttgctacgagcttccgttttncaattggagcgtctcaatatattacgggactctattggacattcgagtaaaaagttattgtcgtttgaatatgctcagagcttcaattctcaatttcgagcatctcgatatattacggaactcaatcggacatccgtgtaaaaaaatattggtcgttgagattggtacaagattccgttttcaatttggagggtctc

SEQ ID NO: 200374 - DNA, 461 bp, Glycine max
  unsure (1)..(461): unsure at all n locations
tcaccttctggtcctcctcatagttgtggcatgagatttcttgctctattttcatctcccactccaagtaggcctccggatcattctttcctttaaatggaggaatgttgagtttaataccatcaattcggttttgtctaggaacaccatcattccctcttctcctcctttcttcttcattatgatctctattctccatttgatccaacctctcatggagcgcatcatctcgttgtttcattaacctctccatatgttgcatcaaagcttgcatttggaattgcgaaagccccactccatcattaagattagtacctgacatctcaaacaaacaaatcaaacgtaacaagacaattatagttgctgtttgaatacctcacccactcaagtgtatcacacaattatggcttntctctaatgaaacactcttgccttntaccactctaattcccctcgagttc

SEQ ID NO: 200375 - DNA, 468 bp, Glycine max
  unsure (1)..(468): unsure at all n locations
agctntaacctcattgtctctcacagtctttattatttggagccaatccaatccttgtgtctggactctcagccacttatgatagctctttgtcctaagctctttgtcctttcttcacgccgcatcccatgccttgcgaactacttggagtaccctcgcattgtggtcactgaaaccctgtgcgatgaaaggcatgatgctntcgtctgatgacactcctctcatggggtagccaagctgtcttatggcgaggacgggattataattaatacaaccccttgttcccatcaagggaacatttggacatccttcgcatgaagatagaatcctgatacttccttccttctagcgagggaaccaattaacagacgcccctccatgctagccaagagttggtcccatntcgcctttcctttntcgacgcacaagcggtgaccttgtagcggatagacgagcctaccttcttgg

SEQ ID NO: 200376 - DNA, 440 bp, Glycine max
  unsure (1)..(440): unsure at all n locations
cgnnctgttgtgatagagtgcgactcttcccatttgtattattattcaacgttcaagcacactagtaatcgagtaccaaaacattgtaatcgattacaacattctgaaatcaattggaacgttgtaaattcatttgaaagcttattgaaaaccaatttgctactggtaatcgattacaataattctggtcatcgataaccagagagtaaaaactctttggtaaaagggtttgagaataaatcatgtgctactcactttttgaaaaaactttctcatacttatcttgattgaggctcctcttgattcttgaaacttgagcttgatacttggaacttgaatcttgaaaatcgaatcttgattcttgaaatcgaatgctcttgaaccttgaaaagctcttgattcaatcctgaacatcctgaactcattctttgaatcttgag

SEQ ID NO: 200377 - DNA, 276 bp, Glycine max
aatatatctatacgctcgaaatagattaccgcagctctgagcaaattcaaacgacaataactttttgctcggatgtatgattgagatctgctatatatcgagacgctcgaaattgaataccgaagctctgaacaaattcaaacgacagttactttttactatgatgtctgacagaatcccgtaatatattggaacgctcgaaattgaatgttgaagctctgatcatattcaaactacaataactttttacttcgatgtctgagtgagtccctaatt

SEQ ID NO: 200378 - DNA, 420 bp, Glycine max
  unsure (1)..(420): unsure at all n locations
tctagtcgtccatagacctcctctgtggtacggtctatcttacgttgcatctgtgcattcatcgcatccactaacagacattgagcgccgtccaactgatggtactcgtcaccaccaccacctgctccagccataattcaacaggaaaaaaaatgtgcaataaaaattattaaggttttaggacctcacaacactctactcacgtctcttagatggtagtacactcgtgtttaatgctctcaataggcttttgtgtaatgtattccctcttgccttttaccactcgtgtttcctcttaagttcctggatggaccaaattagacacacaaggtaatataaaataaaaggaaagacaatataatgatcacaaacagattttgattgggataacaaccttgactngaattggataataatata

SEQ ID NO: 200379 - DNA, 369 bp, Glycine max
  unsure (1)..(369): unsure at all n locations
agcttgcctcanagagatctatgtttgattaatttgctgaaggaaccagttccgctcccgaatatgacagccaccgttttaggagtgctgagcaccaacagcgcttctaggccatcaagggatggtcatttccccgggagcgacgtgtccagctcagggacgacgagtataccgacttccaagaggagatagttcaccggcggtgggcatcactggttacccccatggccaagttcgacccagacatagtccttaaattttatgctaatgcttggcctacagaggagggcgtgcgagatatgcgatcctgggtgaggggtcagtggatcccgttcgatgcggatgctctcagccagttcttgggatacc

SEQ ID NO: 200380 - DNA, 438 bp, Glycine max
cttgcgagaatcctcacggataacgttacggaaacgtttctgaagcgcctcggcttagattttcttcacggaaacaaattttccaagcatactccatagagggagaaatgcctacagggctgggatcctttacttcttcattttctcccctatttatagcagaatatgggagatgcttgccgcccagctcgcccaggcgagctcagctcgcccaggcgagcatggttgcttcctccataagcaaccgacttctggaggaaacttctggagggcccaagtgggcctgggtgctattggcacccgcatctttactatagacaccccctctgctgatttgtatggtgattcttgtttcttgaagttacagaaacttacaaacttgcaagcgatacatgcttctttacgtatggacggaaccttgagatacaaatcatccct

SEQ ID NO: 200381 - DNA, 422 bp, Glycine max
  unsure (1)..(422): unsure at all n locations
acacgcatgtggaaaacatcacanagagcgtggatgggataggggaggtggtggatgtgacaaagacgtatatgatctccaaaggctggataggacatgagttntaatcaaaacaccatggcctcctacaatcaaccacactgtaaccgcctccattaatggggtcgattatgtggataagattggagaagagttgtgttacaattaccgtacatgcaattgaaacagagggggctatgtagaatcttctgaagaaatatcttcaaaagggagcatggtccggatggatctcttgtcggaagaagagcagattgatcgcgtcttcctataatcaacacctcatcagatgcagagggagacgaacacgacagaaaatttgggttgcacaattgcccgctgtgtatacacacactctgtacaac

SEQ ID NO: 200382 - DNA, 468 bp, Glycine max
  unsure (1)..(468): unsure at all n locations
ngccagaagttcttagttggggatgctggttctgacattgactaatatgatgaggaggcagacgatgatgagctgctatataatgattctaaagaatctgaggagtataagttctttgaaaaagtgtttgcagaagatggtgaccttaggagatattatgagaactatcataaggaaggagatttttattgtttggtttgcgggggtattgggaacaaggtatggaagaggtttaaggattgtattgtactaattcaacactccactgccatactaaggacaataaggaagcgagctcacagggcctatgcacaagtcatctgcgaagctgtaggttgggatatcgatcaaatgccagctattgtggtagaggatttggattcctcattggctggttcaaggaaagctcttgtgagaaatcctaactgatatatttagattctctatttcatgtctacagaaacattg

SEQ ID NO: 200383 - DNA, 476 bp, Glycine max
  unsure (1)..(476): unsure at all n locations
agctngtattcttaggatcttcttcattaatggattcctttgcttcttggatgaagaatggaagtggaatggagaaggaagagagagaggagacgccacttcaaggagaagatgagtctagaagaagctcaccaccataggaggccatggataagagcttggaggaagaaggatatgaatgaagggagagggagagaagagcacgaaattttgtgctctaagagagctttgaaatctaaagtttaattttcaaatgatccaaagtgaaaaaatgcacacacatgacctctatttatagcctaagtgtcacacaaaattggaggggaaattgaatttcaattcacatttcactttgaattgaaaatgaatttgtggacccaaactttggagacaaaatttcactaatttatgatagnngaatttagttatggttcagcccactaatccaagatcaattccaagattcttcactaagt

SEQ ID NO: 200384 - DNA, 426 bp, Glycine max
  unsure (1)..(426): unsure at all n locations
gtgacactataaaactcagcttagaattaanaactaaccggttgaagatcgaagaacgacgattatctaacgaagaacggcgaagaatcgatcacagaaacgtctcggaagcatcacgacagcacctcgacttggattttctccttctttcttcttctcctcactaatttcaagtgaaaacttagtgcaaaaaatgttgaaccccttaaactcagccccctctcccttatttatagcaaaaaaaatagggttgcttagtgatgaagttttcctgagtgcatcccccaattgattagttcacccccttctagagtgttctagatgaattttcctgagcacaccccccaatttgatgagttcacccccctccaggttgcttagagatggaagttcctgagcacacccccccacattgatgagtgcacc

SEQ ID NO: 200385 - DNA, 491 bp, Glycine max
  unsure (1)..(491): unsure at all n locations
gctccttcaactgcacaagagatcttatttatttttattatgtatcctngnggacaccttcacccaactgaagtacactgacacaaaacttagtcttctctctacttggacaaagtatgtgcaggctcgggggcaagataatattttcttcccatcagaaccttggatgcaacctgtgatcgcatacccatgtcagctagatcttgacgggtattcaatccatccttcgtcttgccttgaatgttgaggagtgttccacacacactgtcacaaacattnttctccacatgcataacatcaatacaatgtctaacgacacgaccacaccagtgcggaggatcaaagaaaatggacctcttctatcatatgcaactctgactttgatccttcttttgggtcttcccacatacattattcaggtgtngaacccgctcatatacctgctcaccagtcaacagtatgagcccaatatcatgctcttgacttccatt

SEQ ID NO: 200386 - DNA, 325 bp, Glycine max
cgtgcagagactgttggatatctattagcttatgggcataatcgattacacatggcattttttgaagcctccttttcatagcctctatctaattagagcgggccactggtagacgattacatcctttggaaactcggtacctgatagttaagttcatgaataagaccctctaactctcaaaagttggcctaaccttacgcttcttgaataggaaataccttcctagctcatataccctctttaagaatctattgactgtctcgaacgtgcctactgaacatcttgtatagccttgtactgaaataagcactgatactcctgcgat

SEQ ID NO: 200387 - DNA, 394 bp, Glycine max
  unsure (1)..(394): unsure at all n locations
ccagatacanaaattggaagcttgttttatgcgaaaaatatcctaatcagtttgtgtattactattcaatcccttttctagcgaccaactggtacacttcactattgttgttgatattattagcgttcttattattgttagtcttattattaagactatcaaagtgtttgtaccctactgcacggaattggtaaaagtaatgtgatgggaccctatagccaactaccaataaagaactaagcttacataaactctacacccatctacgttttactaagagtaaaaagaagaaaactaggttagtagtaaaaaaatttcacggacgagactatatgatacaaagaaagaacacgagaatgagaaaggaccataaggtagtggagacctaacctcg

SEQ ID NO: 200388 - DNA, 471 bp, Glycine max
  unsure (1)..(471): unsure at all n locations
agcttgccttgccccatgatatatttgagggtcttatgatcactatgaatgacaaattccttgggataaaggtagtgttgccatgttttcaaagcccgtactaaggcatacaactcctaatcataagttgaatagttaagggtaggaccacttagcttttcactaaaataagcaattggatggccttcttgcatcaacacagccccaatcccaacattngaagcatcacactcaatttcaaaagatttttgaaagtttggcaacgcgagtatgggggcattagttagcttttgcttaagaacattgaaagcttcttcttgtttctctccccatttgaaaccaacattnttcttgagcacttcattgagaggtgctgccaatgtgctaaaatccttcacaaatcgtctataaaaacttgctaagccatgtgtcgcaacctacccttcggggggagggcgatgcgtgactcgc

SEQ ID NO: 200389 - DNA, 307 bp, Glycine max
actcagcgctggagtcattgcgagcgcgcgaattttatgtttttgtatcggacagttgcgcgaaaagttcttatcattctaatttctgcgcagcaactggtgtttaatatcgagaggcgcgatagattctatctccaaaaccgtcatctgtgtgcatagatgtgaccatgaccattttgtcaccagcctttgcgttctctttgttggagtccgaacatttctatacccgactcggaccaccgtggtgaaaggtatcgacattctagttatcacagacgacactagctcaactggcaccatgtggaca

SEQ ID NO: 200390 - DNA, 434 bp, Glycine max
  unsure (1)..(434): unsure at all n locations
agcttgttcttgactcatcttctccttgtattgttgtctccaatcatctatcctccttctccattccgcttccattgatcttcaagaagcaaaggactccattgatgaanaagatccaaggcctacaagctccacatggagctacatcaattaggatcttcatcaagctttctccttctaaatatatttggcctactacgagcccttttgtattttggtgggtgaatctcatcaaatctataactggccacatattcataccattaattgatgtcaccttacgtccataacaaacaccatatgtatcccttgaatattaattattcacataatcgacaacctttaaaaaatgtaattgtattgcaaccactacatgttgtgcaggtatgccaaccaatctccaaaagttacatgaacaactctggttgtttata

SEQ ID NO: 200391 - DNA, 445 bp, Glycine max
  unsure (1)..(445): unsure at all n locations
tgcanattcgtgttccagccagacttattacatgttccttaccaacaaggcaggatgactcttaaaagttaaaacagaactatacacacgtattggcctagtttcgaatcaaacttctctagcacaatagaaaaaagttaagatgcataaattaattttaatttacaagtttgatttattttaacttctagttttcttctttttttctggtaagtgtttattgagaactttatagtaactggactgtagtcatagatatgcagagagaccctatccggataatactcatttcaacaacattcaaattttgacatcatgaaatcaaagcgtaatgaatactcactaagtgtaaagaagaaaatgcttctccatcctcgtagcaatggtttgagagcaccaaagcgcacaaggcaaaacttaacctgacaacaaaccagtgattctt

SEQ ID NO: 200392 - DNA, 363 bp, Glycine max
gctgtactcatctgcagctacctattgatattgtgctttgcgactacggatataagtctgtctagagtcacgaaattattattcccatagtcatgtatagactgtatggtgtgcccgataaaagcttttacttgataatgttgatacattgatctgattttgacttctctatcaaattcttgatccgctaagttgaaagaatgatatatgtggaactatgatgtgtaaaggccaccaatatgtttaacgatcgaattagctacctccatgatcacacaaacgagctgtacaggtgaacctcaattagagctctgagtacttgcaagacaattaaatgaaatgtgtcataaagaacatgatcca

SEQ ID NO: 200393 - DNA, 434 bp, Glycine max
tcataatccttgcacagacaaaagcagttccttgagtttggttattccacttgaaaccattgttcattttgataagtcaagtgctctaagcatatcatagcccatagcgttaaacttaaatccatgcacgaaaccatagattattaaaatcacatccatcgctcaccaaaccaaaacatcacaatgcctcatcttttgcataaacaacaaaagaacaaactaaccccctgctagttttaaaaccaaaactgcacagcacgcacaccataatctacattctacgacatcacaaccaagtgaagcagcagcgaaacatgcgaaatcttcacctaatctaaaggtcacacaagaccagctcatctatgcagcaacctgcatataactgacaacagccaatcagagaagacaggcacagatcaactgatcatgctcac

SEQ ID NO: 200394 - DNA, 292 bp, Glycine max
tatggaggacctaagtaattaatgtatgcattagttctcttgctaggggtatatcatgctttcatttgttattctactgacacgttatattgagactatgatttttctacgactcgaaggtagtgctggattaaaccaatgaagtcaagtctcccagacagtattatgcagtccgtaccaccatatgacacaaaattaagcattgtcaaattctttgttagaatatccataagggctgaacatatattaatcctgctgtgtcccataatgcgtatcgcataggaaaataagt

SEQ ID NO: 200395 - DNA, 475 bp, Glycine max
  unsure (1)..(475): unsure at all n locations
agcttgcttctacacgcccaaggagacatcgttttctacccccggtccccgtcaaggggctggcatccaacacactgcctcagcccaacctcacgggagaacttcagaacctcccagcacagccaatgttcttgtccgcagaaggaccacccccggtagcggaagaaaaaaggaaactcaatctcatcgaagagagattgagagctattgaaggttntggtgactatccgttcgcagacttggcggatctttgcttagtaccggacatcgtcatccncccaaaattcaaggtatctgatttcgacaggtacaaagggacgacttgtctctaaaatcatctcanaatgtactatcacaagatgggggcacattctatgaatgaaaagttgtgatgcctttctccaagaagcttggctggagcccngtcatttggacactaatctggaagcttccacatccgactcggaggatctga

SEQ ID NO: 200396 - DNA, 373 bp, Glycine max
tctctcctatgttccttccatagggggagaggtgaatggtataatgttcacccctcctggctagtcgagatcacttgaaattagtgaacaaaatagcttccgtgaagaaataccaacccgatgcgctttcgaaacgattctgtgggtgatttcgtgaagattttcgatcgttattcgacgttattcgatcgcttttcattggacttcactctctcagccggttacgttccgaaatggaacttttcaattcattctatgtaccctgactggtccttattagatccgcgtactaatatttacgtttcatttactttccggtcccacctgtgacgggctttagtcgttcacttaagtcattctctcccctaataaa

SEQ ID NO: 200397 - DNA, 475 bp, Glycine max
  unsure (1)..(475): unsure at all n locations
agcttgattagcatcacaaattatccatcttgtttgtctgggtntttcacatttaattcaattatattaacaactttgttagacacttaactcaattctaatcttttgtcgtggtcatttagttatttaagcctctatagacatgtgtaattctagattaggacatttagatggatattaccttgtacaattgttgatcaaacatacagggaattaaagagaattaaagtctaatggaatgtttaaagatatatgtaagaaaaagtaatcttgagttggagtgtcttgattgttatgctgatagaatgatgaacaacaaaatttaatgagggaggttaacatgcacaaataaacaagatatgataagaacagctganataatcagtatagttgatagtatgaaattatttaatatggtttcatgagctaggaaattcagttaagatctaagctgtgatattgcccgtttaggaag

SEQ ID NO: 200398 - DNA, 339 bp, Glycine max
tccttaagaagattcttataagagctagagcttatttctcatacctctctaatagctaagctcacccccatgagaaaatacatgataatacaaaaaaaaattcctactacaaagactactcaaaatgcctcgaaatacaaggctaaaaccctatgctactagaatggccaaaatacaaggcccaaatgaaggaaaaacctattctaatatttacaaagataagcgagctcatacttatcccatgggctcaaaatctaccctaaggctcatgagaacgctatggtcttccttggatctctgcacaatctacttggagtctctatccaatgcccttgtgag

SEQ ID NO: 200399 - DNA, 459 bp, Glycine max
tccttgccttttcttgtaagcatgactgctgacgaattgtctcaccatggatctggcaagaagaagaaatattttaagcatgcaatcagcagaaaagaaaatcacattcatttgaattcaataaacagtcaaattggccaacaaagaagtccctaaccttcaaaaatagcctgatgacagcttgtagaaactcaaaattatttctgcaggaaagctcatgaataaaataatccagaagccattcaatggataccaactcaggtctcttctctgcttcttgctgatcatcatcatcatcaatgatctgaaacattcgaagctccatatccagagttgacggagataatcctttaatataatcagtaaatgctgcatctgcaataggaaatgttaaatactagagatgtacagagaaaaataaattataaaatttgcacaatcaacatacaagatgcacat

SEQ ID NO: 200400 - DNA, 471 bp, Glycine max
agcttaaacacaactatgcaactatatatatttttttcataagacataataaaggtgaaacgcgctttcttagttgatacccaacatcataataacataagctgtatgcaatttcaaagctctttattctcttagaaaaaaaggccatacactcttaatttctccctttctttcaaatctcatgattaagagaacacattctctaatcaagaatacaaaatcatatgattgaattgaatacttaatttctaatgatgtgtctctgttcacaaataaaaccatatggttgaacttagttacgtaataatcatatcatgaaatagcataacaaggtcagccatcataaagtgaactaatcatctctacaccctaagtagaaatcataacaatcatgtctaatagagctgcgtaatatttagctcacctctctgccatctattggattcagtacgtgatctagatacttgccta

SEQ ID NO: 200401 - DNA, 403 bp, Glycine max
cgtagagttgagtctcgtatagggttaatttattacatatatctcacaatacattacactgttatttgagacaatgactaatttagtcaagagtctctgctttaatcgattaccaagtggattaatcgattattatttctctctcattaagttgtttagatgttaacaagaacacattactacaaaagtcatttactacgacgtaccaacaaggacggtccacagaaaaatggcagtataatctttagattgtaagttcaaggacggttattttaaaaacccgcctttgaatagttatgttagtttctctctcttatcttatcttctcgggtacactactgacccttcattttcccctaacctttcattttcctctctcattgttggcctggatctccctttc

SEQ ID NO: 200402 - DNA, 421 bp, Glycine max
atattcttttaggaaggccatggcaatttgatatgaagatcatttacaatggcctaactaatgagattaccctcacccatctaggcactaaattttgtagaagcaagcttcatgattgaatcaagattgattcaaggtgttttgatgataacaaagatgatgacaaaaagcccaagagaatgatttcaagattgagtcaagaacaattcaagaatcaagagaaatttgatttcaggattcaagaataaagtttcaagattcaagactcaagattcaagaatcaagagaagactcaataaagataagtactaaaaagtttttcaaaacattgagtagcacatgaagttttcacaaaagcttttaccaaagagtttttactctctggtaatcgattaccaatttactataatcgattaccagt

SEQ ID NO: 200403 - DNA, 374 bp, Glycine max
  unsure (1)..(374): unsure at all n locations
agttatgagaggggtgtgtgtagctaagctctatcttctcaaggaagntttctcacaaaagcttctcaaggaagttttctcaagaaagcttctcaaggaaggtacctagtctataaatagaagcatgtgtaacacttgttgtaactttgatgaatgagagtcttatgagacacacttcaaagttccacttctctccctcttttattccttcaatttcgtgctccccccttctctctttcttttcctccattaaagcatcctcttcaagcttcttatccaaggcaattcttggtggtgaagctccttcttccttggcttattccctagtggatgggtgcctccctctcctattctcctttgccttccgctgcatc

SEQ ID NO: 200404 - DNA, 374 bp, Glycine max
caaaggcactggtaatagataaccggtacattgtcatgcattacaccatttagaattaattggaacgttgtaaattcaatttgaaaactgtttcaggacagatgtgctactggtaatcgatcacaacaatccggtaatcgaataccagagagtaaatactctttggaaaaggttttgtcaaacactcatgtgctattcaaaggtttgaaaaactctttaatacttatcttgattgagtcttgtcttcattcttgaatcttgatcttcattcttgacatcttgaaccttgaatcttgattcttgactttagactttcttcttgagtcttgaattcttcttgaatcttatcttgaactcttgaattgggcttgatt

SEQ ID NO: 200405 - DNA, 359 bp, Glycine max
gacatcttgccagacagagtcacgttaacgataactcacatgtgctatttcttccatgctatatgtagcaaagtcattgatccagtcatgtttgatgagttggaaaatgaggctgcaattatactgtgccagttggagatgtatattccccttgctttctttgacatcatgattcacttgaatgtgcatatggtcagagaaatcaaatgttgcggtcctgtttatctacggaggatgtacccgattaagcgatacatgacgatcttaaaagggtatacaaagaatctatatcgttcacaagcatctattgttgagaggtacattgcataagaagccattgaaatttgttcaaaatactt

SEQ ID NO: 200406 - DNA, 414 bp, Glycine max
agcaagtcgcaaactcttctcaaagtattaatgttgtttctccttcaaaaccccttgaactacttcacattgatttatttggtccctctagaactatgagttttggtggtaattactatgccttagttcacgcctatttatagcaaaacatggcatttatgacaaaggtagctcacccaggcgagctattgcttcactctgaagtaaccttgcttgcctaggcgagctggttacttcaccatgaagttatttggtggcccaggcgagacataggctagcctgcgcgagccaaggttcaaaaaaagccttaaaatgacccttttgccctcccctttgggtatttttgcatccttgattaaaaagttgaaaaacctttcgtattgcgcggcacctggtgtcaagcaacttaattca

SEQ ID NO: 200407 - DNA, 414 bp, Glycine max
catgcttatggctaggaatcgcagaattggttctatgattataaaagcatgattatatggacttttttgtaaggatttgggctgccccatgattggcactttgcacctaagtaacgtgggagatgctattcaatggtgtgtagatatatgtgaatatatggcataaaaatatgttgcaaagtgtgtgaatatatggcataagaataccttgcaaagtgaatgaatagtaaataatgcatttcaaaatatgtatatttgtggataagtagcataagaagccttttaaaaaaaaatgtacccgtgccaaagatggcacgagaatgcttccccaatgaatatatgatgtggaattgcccctcaagaataggtagatgacatgaaatgtccttttttaatgcacatgtgtgcgtgatg

SEQ ID NO: 200408 - DNA, 356 bp, Glycine max
  unsure (1)..(356): unsure at all n locations
tgcacaacagtttcacatcacaagcgtgcataaccccacatcccttgtgcccacctcaactgactcacgtctccacgagccattcctgtttttcacacggtcccataatcctccaagcttcccaaccattcaagnaacttaaacattcaaacaacacaaaccatcacagccaaagaaatacaggggcaaaggcagaaaactctgcccataacaccaaccaaaaatcacagcttttctcacttaaagaccccagtaacaatttcttcgttccagttcgctaaccggtggaatgacttcaaaattttactggaagtctctaatacatatgcctaacatttggaccgtgggatctacta

SEQ ID NO: 200409 - DNA, 416 bp, Glycine max
  unsure (1)..(416): unsure at all n locations
catgatggtacatgatgtgngacatgtangattcatattgggcaaaatttgatgagggaaaaagtggttttcgaaatctgcactttatgcagaattttgctgttgaaatgtgcagcagaattttgtataagtgcataaaaatgcttgtgtatagctggttgtgaaaagggtagtacatatggggttctggatattttctagcagatcccaacggtcaaaatgtagacttatgtactacagacttcccgtaaaatttttgagtcgatccaacggttaacgaattggaatgaaggaaatattacaggggtatttgtatgtgaaaagctgtgattttgagttgtgttttgggcagagtttctgcctttgccctgatatgcttggtttcgtagtccatgatgattggatgtggaattacc

SEQ ID NO: 200410 - DNA, 452 bp, Glycine max
  unsure (1)..(452): unsure at all n locations
agcacctgcggcatgcaagcttcttatgcaggcacattctgggtggtgaagctctttcttctctggtttattccctagtggatgacgcctcctttcaccccttctcctttgtcttccgctgcatctccatggtggaaaataaccattgaaggacctcattgaagctcaaagatccagcctccatagaagctccacaagcaagcttccatcaagtggtatcagagcatcttcatctaggtgatgttnctttgcttcctctatctttttggtcggagaattctctttaataccttgttcttcatcttattctccatgtatatcctacattgtcttggggtttggttttgtttagagtacattgacaaaaaataaaccgattaaatcttagatctacacttgttcttgcatttctatggttcaaattttgtagatctactcttgaatcttgtttt

SEQ ID NO: 200411 - DNA, 379 bp, Glycine max
tggtcttcgtcattggaagtgcggtagacaggctttgtggtagatttagggatggcctttgtggataactgggcagtgggtaaggaggaggtttgttattggctgagtaatgacattgttgggttggtgggaaactttgccgtataggaatggcagtcacagcatgggtttctcccttttctcaccctcttcatttgccccagttttcttagtcgtcctagtatgatgatcaaatttgccttttttcggacccacatcgatcctttcactagcgaagaccaaattcgcacagcttttgagggtgcgtagcccaccatctttgcatagtagagtaccgataatgtgtctaccatcacgattatcgcctcccttcttgcac

SEQ ID NO: 200412 - DNA, 394 bp, Glycine max
gcgagacagagaccttcattttagctatcatcgccaagtgccaaaaagagttaggtctagccaccgcccacgagcatataatcgcggatgagcatgcctaagtatacgcggaaaaagaggctagaggaagggtgatctactctttacaccaaaaggcaaccgcgtggatggatcggcttgctcttaccttgaacgggagtcaagaacttccccgattgttatccaaggccaaggcaatggcagacacctactccgcccccgaagagaattatgggcttctcggctattgacagcatatgataaactttatggcccacataattacaaatccttaggaaacttgaatggtctctcaaaccttgactagatatgacttcctttttgaaataaaatg

SEQ ID NO: 200413 - DNA, 333 bp, Glycine max
gagtatgtgatcatccccacttttaacatttcttatttaattccttttgcaagtggagctgatattgaggaagaggaacaaacaaatttgaggtcaaattgccttcaaggggaaggggatgatgcaatcctccctatgaaaggactagtcactaaagccatgatcgataggcttcaaaaagattgggctttagctgctgaaaaagccaacaggttcttatgaacctaacggtttatttctaagcccattggccaaggttgggtccaattatctttgcacatattagactaagatgtcattatatttgggtcttgtatttacggcctcataatg

SEQ ID NO: 200414 - DNA, 429 bp, Glycine max
  unsure (1)..(429): unsure at all n locations
agcttcanaccacagcaacacagaatctaggtgtccaaaacccctcaattcaatggcttttctaggcttgaaaggtggaatttagaatgaggtaaatttggagcaaactctcacctcacaaaagtctataacatcaatctaaacttgctcaaactggatttacacctaaatttccaccgaatcaaaatttgactcctcaacacccaattttgccctagaaatggctcttggttcactttggtcatttgtttttctctctagctcagcctaacctttctcacatgtcctaaatgacatttcaagctattattaactcactttaccctccatttaccacagaattcagacttagccttccaactctcaaagtctcactctttttccactcataacatcacattctcactttctaaccttgggttagttcta

SEQ ID NO: 200415 - DNA, 412 bp, Glycine max
  unsure (1)..(412): unsure at all n locations
gctttatgtgnaggatgtgactcttcacatttgaatttgaatttcaacgttcaaaggcactggtaatcgattaccaaaacattgtaatcgattacatctttttgaaattaattggaatgttgtaaattcaatttgaaaactttttcaaaacaattttgctactggtaatcgattacaacaatctggtaatcgattactagagagtaaaaattctttggtaaacattgatgagaatcatgaaactggccaaatacaggctaaaggcccaagtggagaaggacgaaggcccaagtggagaaggacaaagcccccgagtggagaagggtgaaggtccaagtggagaaggatgaaggcccggaggcagagacactatcaagactatcaattgttgctgaaggcccaaactaatttg

SEQ ID NO: 200416 - DNA, 428 bp, Glycine max
  unsure (1)..(428): unsure at all n locations
agcttggagaggatgcttcaatggagganaagatagaatgagagaaagagagagggggggggggggcacgaatatgaaggaagaaaaagagagagaagttgaactttgagttatgtctcacaagactctcattcatcaaagttacaacaagtgttacacatgcttctatttatagactaggtagcttccttaagaagctttcttaagaaaacatccatgagaagcttctttgagaaaacttacttgagaagctagagcttagctacacacacccctctcataactaatctcaactccttgagaagattctttaagaagattcctaaagaagctaaagcttagctacacatacctctctaatagctaagctcacctccttgagatgagaagctagagcttaactacacatcccctataatagctaagct

SEQ ID NO: 200417 - DNA, 362 bp, Glycine max
tcgcttgaccgcctcaaggtacttaacacccatcgttaggtaacccgtatagttcggcgacattctggaagtcaaaaagaagcattcttgcgcaatccgtaaagttccgcaacattccggaagtcaaaatgagccttgttgcgtaatccgtaaagtttcgcaacattccggaaggaaaatgggtgtcgttacgtaatccataaaaagttatgtaacgtttcggaaaggaatcagcaaaaaaacacaaaatggggtgtattcagtaaaagggggtgcaaatagtaactatgccaacttgggccttccacggggttccaccagaaggctgggcttcttcgggaagcaaacctactcgcctgggc

SEQ ID NO: 200418 - DNA, 384 bp, Glycine max
ttacgagcctggatgcatctctccaatcaacagcaattccccaaagctccatgtcagcaacaacattcacctaacagatatgttagtagtatcagataatccaagcatgtaacctgtaaagatcccacatcagcataggtataaaggcaaaagatcccttactgtgggctgcctttcccttgaaactactatacaggttgattagcccaatgtattctcggttctaatataatcatttatatagttgtatacataatatcttaagtaaacaagaatgtaacttggtctagctaataataatcttactcctctttccttgttgctttttataaaatgagacattttaattcttcttgcttcatattatcagcacaagatttaaat

SEQ ID NO: 200419 - DNA, 306 bp, Glycine max
ctgtagtgagggtcggctacaaaaattcattggttattctaggattagaagtgttatgttctaagagagcacaaatcctagacttatcccaatggtcttgtattataccagtagctagctcactatcttttcctttcaagctgcttttgaccttattgaaacaactcaaaatactccgtttttgttagcatacaacctatctgttgagtgtgctgatgcttaacctttgtttttgattcttacaacgattgaccccaatttagaagaaatgagtcagaaccatatgctctcctacaatcaacacat

SEQ ID NO: 200420 - DNA, 437 bp, Glycine max
agcttaataaatctatatatggtttagaacatgtcttttgtcagtggtaccttaagtttcatgggataatttcttcatttggttttgatgtaaaccccatggatcaatgcatataccacaaggtcagtgggagtaaaatatgttttcttgttttatatgtagatgatattttacttgcagccaacaatcggggtttgctacatgaggtgaaacaatttctctcaaagaattttgacatgaaggatatgggtgatgcatcttatgtcatcggcattaagattcatagagatagatctcgaggtattttgggtctatcacaggaaacctatattaacaaaattctagaaagattttggatgaaagattgttcaccaagtgttgctcccattgtgaagggtgataggtttaatttgaaccaatgtccaaagaatgacttt

SEQ ID NO: 200421 - DNA, 414 bp, Glycine max
gcgtcgatgccgagtgtatactgtttttcttccatgtttcatttgtacgtagcttgtgtcttcttcacatatagggcatgcatgatggcccttaacactgtatccattcaaattctcgtatgctggaaagtcattaatggtacaaaatagcattgcacccaacttgaatgtttcatttcaatacccatcaaacacagcaatcccctcgtcccgaaaactatgtctagtcgccaatcaagggactgagataaacatcaatgtcatttcctggttgtcttgagcccaatatcatcatagacagtatcatgtatttttgcctcatgcacaactaaggagacaagttgtaaattgctagcaaaataagcaacaaattgtgttaagtgcttaaatttccatacgtattcattccatcac

SEQ ID NO: 200422 - DNA, 338 bp, Glycine max
atgaattcgtcttaggaggtgaaagctaagacattccttgcatgacactttacaaaacatgggaaatttattagcaaatatacgataggtactcagaatagtacaccacaaaaccaaaactaatggtggatatcttttgcatatgttacggcattttctggagccatacatcaatatatcttctttgcatttaagaaaagaaaacaaaattaatggtcctcaacacaccacagtacgcttccataaaaaacataaacagatttagttgcatctcactcgaagtgtggtacctcatggctaggaccctaacacttttgatggggaaaggatgttacaaa

SEQ ID NO: 200423 - DNA, 301 bp, Glycine max
atcttcgaccataacttatgtatcacatacttacaagctattgtggatctttgaactgataggaagaaatgtgatggtatagaaatcctatctatggttatcgtatactccatagcatgcaatcttgcgtgcattgcatctgttaactttacacaggcctgttatggagcaacagcgtcttaggctctgaagattgtgcctactgcaccaacgacagctcacaccagtggctattggaccatgctcaccatatatacaagattctacaactaagaaaatattttgacaagccattttagat

SEQ ID NO: 200424 - DNA, 426 bp, Glycine max
  unsure (1)..(426): unsure at all n locations
gtgcaagcttgtgtaatcgattacacttatttgtttatcgattaccagngactgtttctgataaatcaaaagatgtaactcttcaaaaaggttttgactttttcaaattggttttaagtttttctaaaagttataactcttctaaatggtcttcttggccagacatgaaaagtctataaaagcaaggctttgatttgcttttcaatacagacttttacacttttacacttattcaatcaatcccttacaagccttgaatctctttgaacttcttcttctccaaggactaaccgcctgaattctttttgtgtctctcttctcccttttccaaaagaacgaaggactaaccgcctgaattcttttgtgtctcccttctcccttgtcaaagaattcaaaacgacacagtctgagaattcttttgattct

SEQ ID NO: 200425 - DNA, 416 bp, Glycine max
  unsure (1)..(416): unsure at all n locations
tccatcaagtggtaatcagagcacaagagcttcaagtaggtgctccttatacctccattaattntttactttaccttctcttccattgttgtttcttcattttttctctatgtatctcctcacatgtctcgtgctaaatttttttaacatgattctttagagtttccaccgattaaacttgctatagaagctagatttgattttctatggttcaaatttcttgttcttgttcttgaaccatgaattgtgttgagtttaggttcctttgagttttgtcttgttattttttgtggctgaaaactaaatcataaaattcttacaaaaatattaaagtagaagaaaacctcaaaaatctagagtgatttgttcacctattgtagttttgtcatagaagtcatgtctagtcatgaaacttg

SEQ ID NO: 200426 - DNA, 391 bp, Glycine max
  unsure (1)..(391): unsure at all n locations
gcttaaatagggggctatgnncatgctcatgctcttagcataaatctgaaccgcttagcgcgcattagtgaattttggcttagcgcggcttttctcgctcaccggatggactgaagcggtgcgcttagcgggatgaccattcgctcaatgaatatgcctagctcatcctccttccagattcttcctcatgctcagccgagaagtgttgcgcttagcggatgtctccctaagccagaagattggcttagcgagagggtgaaaatcaacacttcaaaacttgcctaattaacctgaaattgagagaaaaattattattaaacacacaaaaatggaagtactaagtatttattacctacctttaacaaaaagtaattacaacactacaaaatac

SEQ ID NO: 200427 - DNA, 424 bp, Glycine max
actgatgcatggttacttggtaacccagctggccttgtaatcagaaattgacctgtcgcaagggtttgtggtttgtgctcctctaccgaccaccatacagacctttgcccttccatgcagcaacctggagcaattgagcagcctaaagcttatgctgcaaatatttacaatagacctcctcaaactcagcagcaaaatcaaccacaacagagcaattatgtcctctccagcaacagatacaaccctggatggaggaatcaccctaacctcagatggtccagccctaagcaacaacaacagcagcctgctccttccttccaaaatgctgttggcccaagcagaccatacattcctccaccaatccaacaacagcaacaaccccagaaacagccaacagttgaggccccttcacaacctttccttg

SEQ ID NO: 200428 - DNA, 399 bp, Glycine max
  unsure (1)..(399): unsure at all n locations
gcttgctagagctntcctctcaagatgcattactggctttataaagttgctatctaagcagcttgagacattgacagaaacgtttagtaagttgcctaatcaactgcaggttaatcaaccttcacattcagctgttttgcaggttggaggttgcagcatatgcggaggagctcatgagtccgaatgctgtattcctttaaatgacacagcccaagaggtgaattacatgggaaatcagcccagaccaggatttcatgcaggtggatttgcaggttttcagcaaagttcaaattaaaactagaatcaagggcaatggaggtctcatcctggaaatcagttcaacaaggaccaaggtggaccatccaataggcctcagaccaagggcctagcctttatgat

SEQ ID NO: 200429 - DNA, 388 bp, Glycine max
ccctatatctagaaaaatacagtggtggcagaaaactctacacaaaactcattcaaattccacagttgttcctactcacatacctcagtaacagtctctttgtttcgaatcgtcaaccattggatcgccttgaaaatttaactgagagttcctaatatagaaatctaagttttgaccgttgggatctgctagaaaatatatagaacaccagatgtactacctttcccgtgactagtgttgcacaaccatttttctgcataattggtaaaatctgttgcacaacttgacagcttttgctgcataatttggcagatttcgaattctagcttgcttgtatccaatttcactcaaattggattctacaagtcctaaaccatgtctaaatcat

SEQ ID NO: 200430 - DNA, 410 bp, Glycine max
  unsure (1)..(410): unsure at all n locations
cgaggctgcagcttggaaaactatcacaattcggttcattcccaattatctcttggagganaagggatacaccaaagaagtatggctctacaatccagattttttcagtttgatagcactatctatgaccgtattattttcattttaagttaagtacattccttctagattgtaaaaattgacttattttaagttaagctcatcctttttgggctcatccaggtggaagttgatgaagatacagctgaagacaaaaaggatgatcaagatgataagactgaggtgacaatctgattgttctgcatatatactgaatcaagtattctgttgaatgtgaatgtgtgattgtgtagcttctgcaaatatactcattgactcatgactgagtctttgacacattgttatgacag

SEQ ID NO: 200431 - DNA, 390 bp, Glycine max
  unsure (1)..(390): unsure at all n locations
cacatggtttattcctttgngaaaatttaatggagataccatagcatgatcaataagtttctcagtcacttttttattttcattcctgaccacattgtcgaaagcaactttcttcaaattgacaacagatgataacagtttgtgattaccactgcttcctacgggtgcaccggagtgtactaaaatgccattttggtcccacccaactctaaatgatctatcctataacagaccaacttcaactattttgtgatcatattttccagattctggagattcatgtttgagatctatcctaaaaccttgtgaatttatcagtctttgaggtatgcccttatgttgctgaaccattaaatttctccacgataaattgaattaaaattccatgtt

SEQ ID NO: 200432 - DNA, 441 bp, Glycine max
  unsure (1)..(441): unsure at all n locations
gctctgtgatatggtcttcaccgaagaaaggatctgagcgggtctaaaaagttgtaaatctgatcatcatgctntgataaatgcaaaaaaaaaaaaaaaaactagggcaaatgaagagggtgagaatgagggagaagcccatgctgtgactgccatttctatacagccaagtttcccaccaacccaacaatgtcattactcagccaataaacaaaccttctccttacccaccgcccagttatcgacaaaggccatccctaaatcaaccacaaagtctgtctaccacactttcaatgacgaacatcacctttagcacaatccaaaaacaccaaccaagaaatgaattttgcagtgagaaagcctatagaattcaccccaattccagtgtcctatgctgacttgctcccatatctacttgataattcaatggtagccataacc

SEQ ID NO: 200433 - DNA, 183 bp, Glycine max
taatgcgaaaacacacaaacccagcaactccatatcaaaatggttaaggtacccccacatggccagaaaagaacctacaaacattcctcccacagccgggaactcttcacagaccggaaggggacaaaccctgccctggcgatcaaacacaaccgggtattccaccaaatgccccttcatctc

SEQ ID NO: 200434 - DNA, 412 bp, Glycine max
tgcgccacaggcttccagagggtgttggagaaggttgtgttccatagggaggggatcctctcttattgtactttccggcgaagagtgatgattgctatatttttagatttttgtcaacagatgaaattccttctgtgattgtttaattagtaattggtaataagtggacatgtctatctcttttgctgcatttgggaccactattgcaatataatttgtcttttgagcaatatgtttttcagtaacattaatattctcgaatcacttacttataattcaataagtttatttcttttcttcacaacctttcaaactcctttcttcttttctttactgtcagggtataatcatttctttctgtgaaaaataatgttactcgtgagaaatatggcggacctaaaggtaaaaatca

SEQ ID NO: 200435 - DNA, 380 bp, Glycine max
cttaaaagggggccttggtggtgcttgcgtgcttagcgcaactccggcttgcttagcacgcataagtgaagtttggcttggcgctcgtcttctcacttagcggatgcatgcaagtagtgcgcttagtgggacgagccctcacttagtgcgggtggccaacgcatccttctttcaaattcttccatacgctcagccacaagagtggtgtgctcagcggatgacttgctaagccgacagattggcttagtgagcaaatcaaaatcagcacttcacaaactagcctaattaacttgaaattgaaaggaaatgattattaaatatacaaaatgaatagcgcatctaaatgggcttagcggcgatgtctcgcgcttaaccagtga

SEQ ID NO: 200436 - DNA, 381 bp, Glycine max
  unsure (1)..(381): unsure at all n locations
tctacattatgtatgcagattatgttgtcataatctcgtgtgtcattttgatggtccttttctccattcaacatcatgggacacatagagttgccttcatgtatgccccactacttgcaacatggcttttgtgcattagtggtattggtgtatacaacagattctactggaaccgacacatataccgtgcactttctccactctacatgttgaagttcctcagagccactggcattgaaggatggatgccattaggtggagtagtgctttcaatcacaggtacctatcatatagtttttgttntttattgtataagaacctataatatagttaattttattaacaactagagtagtggaattaattttcgtgtggtacttt

SEQ ID NO: 200437 - DNA, 436 bp, Glycine max
tccttaagcaccgaggctgcagcttccacatataagctgtacaccatatatctataatagataactcaagctttgatagataagtaccataatgtttacatcgttcaagctttcaaatttaaagtaccaaagtacacaacataaactagtacctactgaatataaattagtcatatccaacaacacattctaataacaaaataaaacaagaaatgggtcttcacttttcttcatttttatactggatctttatcagcagctttccttctagtgaaccttggtgttggcatgaaaagtaagggtgttgttggtgggccatccacaacaagtaagtctattgttgaagtgtctaatatgttgttttgtttgggtgcgtctctatttatcattcttcttccacttgaactccctgcccatgaatatgctatactccctc

SEQ ID NO: 200438 - DNA, 422 bp, Glycine max
gggatctagaccttgtcattggccccttcaactcatggaagatgtctagttccttgtgctctttggatagccctctataaatgttgtcctttgagttgtccttacaaggaagttgtccctacaatggtagtcacaacgttaccattgtaataactacaatgaaaaatttgtcgaaattcatgataattttgttttttgaactagagactgaacatggtggaaagttagaatagcaaagtgtgttttgtgaaacttttgttgttatacacacgctttatagttgatgtattaattgaaaccaactaccctttcaaccaatgtaataatttcaatcatgtttaatttttaatcaatgtaataaataaattccacccaattcataataggttgttcataaattcattcattgtattgactacaat

SEQ ID NO: 200439 - DNA, 446 bp, Glycine max
  unsure (1)..(446): unsure at all n locations
agtcacctgcggcatgcaagctttagngaagggaactaactgtattgctaccttatttataatggntatgcttgaaatgtttggttaatgaaaattggagtgctgttaatgcttttaggtatcaattntatttattaacttatttccatgacacttctatgcaggagggtttttggtatcatcatgcagaaccaaaatatttaatgcttgtatattggattcctgaaagtccaagcactattcctgcaaatgccacacacagggtgggcgttggttcatttgtcatgaatgaaaaacaagaggttttcccccaccatcaatcacaatatagtgcaacttcatagttcacaatcaggcttatacttaattggaaggaatctcttattgtttgagggctatatctttgacaaatactgttatgcctgcctgtcctgtatattgataaa

SEQ ID NO: 200440 - DNA, 330 bp, Glycine max
agtctctcgctctaggtttacccactttatgcgtcataaacatgctaaaaaatgtatattttcaagtttgtatacatgaccgcggcatgaaacacatgaataattctctcttattatgataataccataatgaatgtgtctaccattgcattcgtacctctacttatttaagtaccatggatattgatcgtcagccttcctttttggggttgatggtgatacatgtcgacaatgtgtaaaactcttgtttcacacaaagccctatgtatggctaactccgctggtatacttatctgattaacaattataggtgtcttttctattatacaa

SEQ ID NO: 200441 - DNA, 430 bp, Glycine max
agcctatccgcaacagcctcatggggaatatagttgctgataggttacaaaacaaaaccacaggccccaaagaatgcaatgaacggaagaacaatatagtaaaagagagcctgcttcgacaacacattaaccaactttgtgtacaataacatgaacccaatggccattggaaggttcacccaggttttaaaatacggtatgacctcagcactgcttcctctgccctcacaaccaacacatcttttgtgcccttaacatggcgctattgaagaggatgcaaaagaacatctatcccagaggcaccatttcattcaatgtggcaacttacacaccctaaagcttcggcatctcacttctcgactcccaaaggaggctgctataccaccattaacctcacacctgcacaagaaaaagtttctgtctttccccc

SEQ ID NO: 200442 - DNA, 309 bp, Glycine max
tacatactcatgctgtgacatctgagagtagatgatgacattcgattaatcacataggagattccacttcatcctataagacataaggcaccgcaatccataacatatacagtgcacactaaattgggggactatccgatatagccacacgtgctatcacaaacacgattaccaaacacggaaattgggtctcaggaaggtcatataaagaacaaagttgtgtgagatcgccacaactgataactaagtggtccatacttatttgggtatccgaacgtgagggcttgtggactggactaacgctggcac

SEQ ID NO: 200443 - DNA, 440 bp, Glycine max
  unsure (1)..(440): unsure at all n locations
tcaagctgggtggtgtgctaagtgcacttcttcatcaactattaaatgtntncttccttggggatgaacccaaactctacaaaacacaactaaaactaatgaatttactaaaatgaacttcactgaactaaaaaaatctaaaaagatattaatttctaacttattgagaacaactaaccaataaatgaaaaaaattaagataattgttgtgcaaattctatgaaaagactaagcatgcacaacaattatcatgtacctactatgtgccatctaccctcactcatccttcatgatgagaagcatgaacgatggttttgttggtacttgttaatagacattagagagtgtatttccactgagtataaggtcatgccccagctcatgacacaacaatctcgcaacctcgtatgcccgttctttcctcgaaatgcatgttgatc

SEQ ID NO: 200444 - DNA, 132 bp, Glycine max
ccttggattcaaaatgttttgaccaaggtggaatgttcttgtggacaatggatatacagggacaaaacgtggtatttaacccagacttatgctttctatggccgctaacctttataatctgtggatacattt

SEQ ID NO: 200445 - DNA, 440 bp, Glycine max
ttaagtcacctgaggcatgcaagcttccatcagctcgcgcctgtcatttcatgaggcttctataagaccaatgtggagacacttcagaaggtccgcatggcatgggaggtgttgcaaaagaaggacaaggaactcaggggcagtaacaatgggcccatctgtggctatcgtaagtggttaaaagcccacgtgcaaggtttggattggctcctaagtgtgagaaccgctaaaagagaggaagttgacgcaccaaaggaagatgaagaggtgcaggcccttagggcaagcttgagcaagcccaaccattcaaagaaaggttcaaatcacctgctcttaagattcgaaaggagaatgccgaactaagatatataaatacagttaccattgctgttgctaaggagaacctgatgcccccatttgaccttaaccaaatgaattat

SEQ ID NO: 200446 - DNA, 426 bp, Glycine max
  unsure (1)..(426): unsure at all n locations
agatactaagcttgcttgtggaaaagaaacacaccactcaagctnggttcattcgttttatatagtcaaatntaaagcttgtgtatgacttgcttaaatatatgaagcttgagttcaacttgtttagtatgtatatagcttgattattttcattccctttatcaaatctctcaaagtattttttaagtttaataatttggtatttttacactagaataacgtcaaaatagaattacaattttaaaagtaaaagaagtaattaagcctataccttttgtatgcaacattttcatttcttttaaatgaaattttactatctatatgaagggaaagtagcactaggccttttgtctcaactctcaagtctaaagttgtgccaattaatccctaaactttaactaatgtcccatatattctttcatcaat

SEQ ID NO: 200447 - DNA, 425 bp, Glycine max
  unsure (1)..(425): unsure at all n locations
gcagcttcaccttctggtcctcctcataggtgntgcatgagaaaacatgctctatcttcatctcccactccaagtaggcctccggatcattctttcctttaaatggaggaatgttgagtttaataccatcaattcggttttgtctaggaacaccatcattccctcttctcctcctttcttcttcattatgaactctattctccatttgatccaacctctcatggagcgcatcatctcgttgtttcattaacctctccatatgttgcatcaaagcttgtgatgagaatcatgaaactggccaaacactggctaaaggcccaagtggataacgacaaaaccccctgatggacaatgatgaatgccctagtggagaacgatgaatgcccagatgcatacaccctatcaagactatttattggcgctga

SEQ ID NO: 200448 - DNA, 417 bp, Glycine max
  unsure (1)..(417): unsure at all n locations
tctacttatgtggcagggcgggcttccttcaccttcttgtctccaacgcgaactntgaccattgttcttccttcccgcgatgcttcttttcatgtctgcctgagtgggcttatagcctaaaccatacttcccacgattaccttgggtatttatcagtctagttatgccgccgttgttttttcctaaacccatcccgggctcataaccgttccccaacataactcgggccatcattaccgctgcatcggacagactgggctgcccaaagagggagtccacggaggaaatgttgaccacctcaaaagactggaaagcagtttctaacgattcttctgcggcttccacataaggcatggaggatgggcagcttaccaagatatcttcctcgcctgacacgatgaccaagtgcccctctac

SEQ ID NO: 200449 - DNA, 400 bp, Glycine max
  unsure (1)..(400): unsure at all n locations
tataaatacctcgttntctctctctgtgcgcagaccctcattcctccccttctccttaacagngcccaacctccctaaaacttcaaatcctcataactttcttgtttcttaaccaaattacttcaaacaaagcccaatcttcttctttttcaattctctacaaagcccaccgattaaaattagctgaaacaaccttcaatggaagaatcttcgaacaaaacaaaagggatccttctccaccaccaccactgcaagccaccaccgccatagaaccttcggtgacccaccagcaccaattcctccttctctttcatctccccagtcatccactntgttttccttcgatgctcaacatcagaggtattattctcaattctgcaatggtgttattcttcaccct

SEQ ID NO: 200450 - DNA, 357 bp, Glycine max
gcatagagaaattttggtttatagcttcctccctattacatgacacactagcagcaaataaccaaagtttgatgtgacaaaatgagaaattgataagaaatatactccctgtatgttctataccacccagcaataagtgacacaagttccccttaattacaaggtgccatactccctgtatgttctatacaaaacgagaaataagtgacataagttccccttaattataacgtgccataaaccaagaccaagatcttatattaattagctaatataactattttttattttctgtgatttggttattggcagctgtatgttggtaagctagtcactgactttaaataccttgtacca

SEQ ID NO: 200451 - DNA, 384 bp, Glycine max
  unsure (1)..(384): unsure at all n locations
tacccaaaagaaaacaggaagactaaattctcaagtccctctaaatctaatggaaaaaaatganttttttttatactttcctccctaaaaggcagtgaataatagtcatattagtcctttcaagaagtaataggtacaaattaatataaccaatataactaattttttataaggtaaatagttaccgaaaattgagtttctccagactaattagtccttctatttttatttttatttttaaaaaactcgtccttgaattatgtctaagtcaattttgacaagatattttttaaacaaagggactaatttaaggtcagttaaaaagtagaatgaaccaatgtcaaatttttagtgagcacccaattcagtcccaaaaaagacccc

SEQ ID NO: 200452 - DNA, 425 bp, Glycine max
  unsure (1)..(425): unsure at all n locations
tagatctccgctggccataacaagcttagaacaatatacttggccttcgntaattttctttgggcttggcgactacgatcaacaaagtactttcgacacctactatatgttgacttgaccaacgatgttattggaatactgcgacaatctttcaacaccttattcacacattctgataggttggttgtcatgtgaccatatcttcgtccagatgtatcataagccatgctccatttttcctttgaaatgtgatcaatccatgttgctatggctggactaaattgacgaaatttttctaagctttgatcaaacacatgcttgcaaggagtgtacgctgcatcaaatttgttaccatcaaaagttgtaggtagatatgaaactcaaattagcttaatgtataaaataaaccttacccaatttcttga

SEQ ID NO: 200453 - DNA, 402 bp, Glycine max
  unsure (1)..(402): unsure at all n locations
gctaagtgctcatatgggacaccttatgtttgtcatactttntgataggaattatcagcatgaaaatacaaaaaanaaaaaggtatgttttattgcattactttccttaattttttaaaataaagattaaggggttctcacagaccctgagagaataaaggtcatttctaagtagcccattcccctaagtataaagaaaatttggggctttcacgacttaacaaacttttacaaaagatntgcctcatacttttctatacttgtagcaccacttcattgagttggtgaggaaccatgtttcctcatgggaagatgcccaagaaaggcgttttcaaaccttaccctactctcacatactaaacaccacttatatatatgttttttatttttttacaaatgttt

SEQ ID NO: 200454 - DNA, 382 bp, Glycine max
  unsure (1)..(382): unsure at all n locations
gactcagcttanatagcttactaaagtttagactaatttagcctaagctttgtcctcagatccctcttgttggactagacttagaccaaacaacactattataacaacatatttaaaaccaaaacttaatctgcagatcccttatttcagactaagtttcaatcttgcttcattcaaggtctaaggcaacaatacatttcccaatgaataaagtcccgaactatgcactcaaaggggtgatcagaccgagagcatacagaatttaagcactgagagaagcattgaacactagaaacacaatgaattatatgtaaaagtaatttcgtcagctggtctttaaaagatcccaacaagggtgtttaaccagccattacagaaaaac

SEQ ID NO: 200455 - DNA, 402 bp, Glycine max
  unsure (1)..(402): unsure at all n locations
agttaaggagaactgtgaaatgttcggtttanggtataagcctacacgtgctgatgtgaggacaagtgccctataaaggaagggcaggagcatgggcccttcccgaagaccgcaaacgaaagggagtcctttatgtcacatcagcgaaagctttgttagcacaggctagatgtgtgaagggcgagtcaccatgatccacaatgaagtccctcaagatcaatcgaactgggtatggtcgcgccttcctgagttcgagttagggaactggaaaaattgttgagcaacccagagtttttgtggcaaacataatgtaatttgttagccctaaccctatagctaggcctaggctttagggtttcctccctgttgggcattgtctcttgatatcaaatatatataaat

SEQ ID NO: 200456 - DNA, 423 bp, Glycine max
  unsure (1)..(423): unsure at all n locations
gtggtatcagagcacaagagcttcaagtggtgctccttatacctccattgattntcagttttaccttctcttccattgttgtttcttcatttttctccatgtatatcctcacatgtcttgtgctaaatgttgttaacatgattcgttagagtttccaccgattaaacttgctatagaagctagatttgattttctatggttcaaatttcttgttcttgttcttgaaccatgaattgtgttgagtttaagttcctttgagtttctgtcttgttattttttggggcttaaacctaaaccatanaattcttacaaaaatattaaagtagaagaaaaccttaaaaatctagagtgacttgttcacctattgtagttttgtcatagaagtcatgtctannnacgacacttgtcacataagatttctta

SEQ ID NO: 200457 - DNA, 431 bp, Glycine max
  unsure (1)..(431): unsure at all n locations
cgtgcgagctcgacgttgaacttgatccatccgctgccccagctttcttattctggctacttctagactnttgactttgacatgatagaaccttttcttaaaagaccgcatgttcacaagaatagaaattttgatggccaatacttcaacaccctatcatagaggagatgtgatgaatgaatcaggacatggttatgctatacttgacaaacgtatttatcaaactaacgcaagacgcctgaaagaccaccctttcttattaacaatgcattaggtaccatgttcatgcaactctcaatcatcgtcgggagaaagaaatatataaacgaatgcggtgcagactttcacgcttcattgtgactttgatggcaaagaaaagaacgcaaggcatgagcaactatgtggcataacatgagactaatgacaacaaa

SEQ ID NO: 200458 - DNA, 411 bp, Glycine max
  unsure (1)..(411): unsure at all n locations
tctctcgcgtgtatgatatccactcgacaaggttngaagtagaggagaccttcaatcttattacgcaacatggcggacaaatatgggcagataacttgaatggccattattgtcaatgcggaaggtattctacgcttcactatccatgttcacacattattgcagcttgtggttacgtgagcatgaactactaccaatatatagatgttgtttacacaaatgagcacatcttaaaagcatactctgcacagtggtggcctcttgggaatgaagcggcaattcctccttctgatgatgcatggacacttatccttgacgcaactataattcgtgcgaaaggtcggccaaaatcaacaatgataaggaatgagatggattggctggaaccatctgaccaccaacaaaaatgta

SEQ ID NO: 200459 - DNA, 444 bp, Glycine max
  unsure (1)..(444): unsure at all n locations
gtcacctgcggcatgcaagcttggctcggctaatactaagtagttctgtgatgtttgttgccttctataatctgaccattttgtgcttaactagtcacaacaaatcgtgctagttgacgtcaatgtttggtgaataatataaaagtggcgtaagcattcacaacatttgaagagaaagctgaaaacagaaaaaggctatcatggcaccttgnattagttatttcgtatataataaatgccacgatgttatgcatacacaacgctgtgattatagatgggcaatgtaaaacctcttgagccttgcaatgtagtatttttacaggaggatttgattctcatggaagaaaagatctgactctggactccatgagaatgtcaacgtggcttcactgcttcattgacacaaaaatttcaacttttaagactttgttaatactgttaaac

SEQ ID NO: 200460 - DNA, 409 bp, Glycine max
  unsure (1)..(409): unsure at all n locations
ctcagctgctcacttgagagtgnatatatccactaatgagtcggggtngttctggactgggtcatgattantaaaatgatactcagcccattaagacagcttcggtgctacactacaatgggaaaatgaaaccttggcttgatctgggaattccacagtataaaagctattggaagaagtttctgaacaaagaggatcagctcttaagtgattgcaatgtaaattcataataagttgttgttcctgtggtgcatgtttgggaaattgtagggttgatctcttaaacaagaggatgcctgtgctttgggtgctcaattttctgatctagttttcgaaggggttttgtggaaagaagcaatggtggaccggtggtgatgagcttaacacaccaattaaaaaattaatcact

SEQ ID NO: 200461 - DNA, 440 bp, Glycine max
agcacgcggctgcagctctactatgtggagggcgggcttccttcactttcttgtctccaacgcgagctttgaccactgttcttccttcccgcgatgcttcttttcatgtccgcctgagtgggcttatagcctaaaccatacttcccacgatttccttgggtatttatcaggctagttatgccgccgttgtttttgcctaaacccatctcgggttcataaccgttccccaacataactcgggccatcattaccgctgcatcggacagacaaggctgcccaaagagggagtccacggaggaaatgctgaccacctcaaacgactggaaagcagtttctaacgattcttctgcggcttccacataaggcatggaggatgggcagcttaccaagatatcttcctcgcctgacacgatgaccaagtgccccttcactatgaattt

SEQ ID NO: 200462 - DNA, 400 bp, Glycine max
tgaaccactatcctataattaagataacttattgtctttaacctagggaattaaaaaaaacttaatggttgagtgtaactgaaattgtggcaaccaaaagtcacccccaacagccaacaagtcagccaccatttggtctcccaaaaggctgatgcctaggttgccaattgggcccttattacaacttgaactaaacctaactaaagcccttttagttgattaacccaaaacatatttttggtcagccaactctacaaggattgggccattatttagacaaactaaacactctaaaattgaaacaaagtggtgtcatttagtcctcctccatttgggccatgatacaactcacaaccttggacttttctccttgaaacttgggcttgtattcaaatagtat

SEQ ID NO: 200463 - DNA, 381 bp, Glycine max
agctcagtcttcaatatcgagcgtctcgacatattatgtggactcaatcagatatccgagtaaaaaagtgattgtcgtttgaatttgctcataccttcaacattcaattttgagcgttttgatatattacgatactcaatcggacatccgagtaaaaagttattgtcgtttgaatttgctcagagcttcggcattcaagttcgagcctctcgatttactacgggactcaatcatacattcgagtaaaaagtatttgtcgtttgaatttgcttaaagcttcgataatcaatttccgagcgtcttgatatattaccggacttagtcagacattcgattaaaagttattgtcttttaatatgctcacacctccgtcttcaattt

SEQ ID NO: 200464 - DNA, 269 bp, Glycine max
actcggatgtctgattgtttccgaatatatcgagacgctcgaaatggaacaccgaatctctgagaaaattcaaacgacaataactctttactcggatgtcagattgagtccagaaatttgtcaagatgctcgaaattgaagaccaaagctctgagcgaattctaacgacaataactttttacccggaagagtgactgaatccccgtactatatcgtagactctctggaatcgattatcgaaactctgagcacattcatacgactattac

SEQ ID NO: 200465 - DNA, 277 bp, Glycine max
agcttctgttataattacgtgcgtgctcgatatattactgtactcaatcggacatccgagtaaaaagttattgtcgtttgaatttgctcagagcatctgttctcaattacgagcgacttgaaatattacgggactcaatcggacatccgagtaaaaagttattgatcgttgactttgactagtgcttctgatttcaatttcgagcgtcgcgatatactactggacccaatccgacacccgggtaaaattattgtgttagaatttgctcaggcttatg

SEQ ID NO: 200466 - DNA, 395 bp, Glycine max
  unsure (1)..(395): unsure at all n locations
ctgagcanattcagacgacaagtaactttgactcggatgtccgattgtgtcccgtaacatatcgtgacgctcgtgatggacaacagaagctctgagccaattcaaacgacaataacttttgactcggatgtccgattgtgtcccataatatatcgagacgctcgtgattgaaaacagaagctctgagaaaattcaaacgacaataacttttaactcgggtgtccgatagagtcccgtaatatatcgagacgctcgtaattgacaattgaagctcttagaaaaatcaaacgacactaactgttaacttcgaagttcggttgagtcccgtaatattatcagacgctttgaattgaaaacagatgctctgattaaaacaaacgacaataacttttgac

SEQ ID NO: 200467 - DNA, 297 bp, Glycine max
aaaaccgtaccgaaacctttccggagcgcctcggcttggattttcttcacggaaacaattttcctaaaccaattccaaagagagaaaaggtcctcaggggctggacccttttcttcactttttcccctatttataacaaaataagggagaagcttggcggccagctcgcccatgcgaagcaaggtgctttcttttgaagcgacaaccttctggaggaatcttctggagggcccaagtgggcctggtagctatttacacccccctttatactaaatgcacccccttttctattttttt

SEQ ID NO: 200468 - DNA, 421 bp, Glycine max
tctcagcttgtcaccccatgtcgaatctgcgtacaatagagctgttcatagcacctcttatagttctccttttgaagatgcttatggttataacccactaactcctcttgatcttttgcctatgcctaatgtttctgtttttaagcataaagaaggtcaagcaaaggcggactatgtgaagaagcttcatgagagagtcaaagatcaaattgagaggaaaaataacagctatgctaaacaagccaacaaagggagaaagaaggttgtcttcgaacccggagattgggtttgggtgcacatgagaaaagaaaggtttccggaacaaaggaaatcaaagcttcaaccaaggggagatggaccatttcaagttcttgaaagaatcaatgacaatgcttacaaagttgagctgcccggtgagtat

SEQ ID NO: 200469 - DNA, 393 bp, Glycine max
agcttgagcaaatgatacgacaatatctttttactcttatgtccgattgtgtcccgtaatatatcgagacgctcgtaattgaaaacagaagctctgtgcaaattcaaatgacaataacttttgactcggattcccattgtggtccgtaatatatcgagacgctcgtaattgaaaagggaagctcttagaaaaattcaacgaccataacttttaactcggatgtcggagagagccccggaaaatatcgagacgcttgaaattgaaaacagaagctttgagcaaattcaaacgaccataacttttgactcggatgtccgattgcgccccgtactatatcgagatgcttgaaattgaaaactgaagctctgagaaaaatcaaacgacaataacttt

SEQ ID NO: 200470 - DNA, 373 bp, Glycine max
tactaagcttctctgttattacgagcgtctcgatatattacggtactctatcggttatccgagtaaaaagatattgacgtttgaaattgttcagagtttctgtttacaatttcgagcgtctcgatatactacgggacacaattagacatctgagtcaaaagtaattgtcatttgaatttcctcagagctttcattttcaattatgagcgtctcggtatactacgggagacaatcggacacccgagttaaaagttattgtcgttggatttttctcaaagcttcagttttcaatttcaagcgcttcgatatactacggaacacaatcggacatccgagtcaaaacttattgtctttagaattcgctaagaccttg

SEQ ID NO: 200471 - DNA, 194 bp, Glycine max
cgggcaaaaggaccccaaacgggaaaggaccgcaaaaaaagacgcacacccatccaaccggcgcgcaggaattacaagaagcaaccccccagaacacgacaaggagcacaaagggtaaacaacggaaaaaaacaaaccaccacggcccgcagacaaagccagccaacgacagacagaaatcccggaaacccgaa

SEQ ID NO: 200472 - DNA, 419 bp, Glycine max
  unsure (1)..(419): unsure at all n locations
tcatggatgaatcaagatgattcanagagntttgatgataacaaaggtgatgaanaaaagctcanaggtcaagaacacttcatgataacaaagatgatgatctcaagaatcaaagaatgagttcaagattgaatcaagaacacttcaagattcaagaggaaatttgatttcaaaaatcaagaatcaagtttcaagattcaagcttccaagaatcaagatcaagattgaagaatcaagaaaagacttaatcaagataagtattaaaaagttttttcaaaaactgagtagcacgtgaatttttctcaaaaccttttaccaaagagtttttactctctggtaattgattaccagattattgtaatcgattactaatagcacaatggttttcaaaatgcttttaactaaatttacaacattca

SEQ ID NO: 200473 - DNA, 379 bp, Glycine max
  unsure (1)..(379): unsure at all n locations
tgagacctaggtgaaaccaaatgagtggtttgagttaatgagaaaatttgggacacaaatttttctaattgttgggattgaattgagattccactttctttttggtcttatattctccaggtttttaaatcccaagaaaaaccaattttgtttgtttgcccaattgcgttgcaagccaataaatcccttagtgattcttccttgcatgtgtgttgattgtgaaattttgagaaatgaaaagtaaaatcaacatttgtggtttcaatgtgttgcttgatagctacacttacccatgttgtgtgattgagtgatacactntgtgaggaccaatgaacatcagtggttttttgctttctttgtcatccatattaatctcttg

SEQ ID NO: 200474 - DNA, 188 bp, Glycine max
cttttggccaaaaaataacaccaggtttttggccaaggaacttttcttgaataaaaaattattgaacaaaaactcttagaagaatgctttgaatgaatgaaagaaatttgaaagttctctctttaaaatttatgccatggtcacatatttatagccatttgatggctcttgaaaaaacaagttaaaag

SEQ ID NO: 200475 - DNA, 426 bp, Glycine max
ctgcgcacgagctcagatgtcgtgagtatttatagtatatgacgcattgtaatcgattacaggtattggtaatcgattacaggcccaataagccttctggtaatcgattacaggatgttgtaatcgattacaggctgcctgttcatgtgtaatcgattacactggatggtaatcgattaccagagcctatcctaggctagtttctaagagaatatctatatttatgctcaaatacatcctatatgtctaatattcactactaatacactaaattcaatcattcaattactatatacacaagaaatcataaattctatcataaaaacaagaattcaaacaagatcaaccaaaataatctacaatcaaaaggtaaaaagtaaatcaaccaatcaatcaaccaatcaatcaaccaattaattcctattt

SEQ ID NO: 200476 - DNA, 403 bp, Glycine max
catgagaaaacatgctctattttcatctcccactccatagtatgcctccggatcattctttcctttaaatggaggaatgttgagtttaataccatcaattcggttttgtctaggaacaccatcattccctcttctcctcctttcttcttcattatgatctctattctccatttgatccaacctctcatggagcgcatcatctcgttgtttcattaacctctccatatgttgcatcaaagcttgcatttggaattgcgaaagccccactccatcattaggattagtacctgacatctcaaacaaacaaatcaaacgtaacaagacaattatagttgctggttgaatacctcacccactcaagtgtatcacacaattattgcttttctctaatgaaacactcttg

SEQ ID NO: 200477 - DNA, 416 bp, Glycine max
  unsure (1)..(416): unsure at all n locations
tgttccgtatgggaggcgcttgtcnttctgctttctaacaaaggctctgataggaggagatcaaaataccagctggttgacaccgttcgcactaataagggttctgatgacaagtgctttggctgcgttgtccaagaggaagattccagtggcaagattggtgttactttgtcaagagatttgatggcagttgctggtcatgctttgaaaaccaacatcaccacattggggcctcttgtccttccaatgtctgaacagctcctgttcttcgccacattggttgggaagaagcttttcaagatgaagatcaagccttatattccagacttcaagcttgcttttgagcacttttgcatccatgccggaggccgagccgtgttggatgaactggagaataacttgcagctgtccacttg

SEQ ID NO: 200478 - DNA, 281 bp, Glycine max
  unsure (1)..(281): unsure at all n locations
agttgagcacgtgaagaagattcgtcttcaattctcttagaggngactctgagtgttngattatggaggagtccgagtcaatttatgattatttttctcgagtatcgggcgtaggcaatcaacttaaaagaaatggtgaagatgttgatgaagtgaaggttatggaaaaaatacttctaactttaaatccaaggtttgacttcattgttaccaacattgaacaaaacaaggatttaaagaccatgtctattgagcaactcttgggttccttctcagccccc

SEQ ID NO: 200479 - DNA, 407 bp, Glycine max
ctcaatacgaccatttctcttaatatatctttgcaacggttatttacttttttgctcaatacgagagcactcaggtacaaactagggccctctttaatgggccaaacaagggtggcaaaattttaaaaattccaatagctcgctaagatactctaactgatccaacacctcttttgcataagaaacacatctacagcatactagaatataaggttcccatcaaaagtatatagcatacatataagaataaagagattgaatagtcactaagtgtgtatattagaggaatcaccaagtgttaacgatcatgcttattgtcacacacaaagaaagaaaaaattttgtcacacctgttacacattgattaaacccctcattcatatacaacctgcaagtttaaggttttg

SEQ ID NO: 200480 - DNA, 435 bp, Glycine max
ctcgtaagaactaaaaaaatcaagaacaagcttgttacacatcgttcgcgtgtatgatatccactcgacaagggttgaagtataggagaccttcaatcctataacgcaacgtggcagacaaaagtgggcagttaacttgaatggccattattgccaatgcggaaagtattttgcgcttcactatccatgttcacacattattgcaacttgtggttacatgagcatgaactaataccaatatatagatgttgtttacacaaatgagcacatcttaaaagcttactccgcacaatggtggcctcttgggaatgaagcggcaattcctccttctgatgacgcatggacacttatccctaacccaactagaattcatgcgaaaggtcggccaaaatcaacaaggataaggaatgagatggattggctcaaaccatctga

SEQ ID NO: 200481 - DNA, 393 bp, Glycine max
cccattgtccaccagaacccgcagaaaccgggaaactggaatcgccgaggtgaaccgcaacctgctccagcggtacgccaagcatttccgctgccgtctgggccagaatggtgtagctgccggtgccaatgtcggtcatgtccgtttctacggtaacggtgccgttttgttcgaggtgaacccgagcacccgatttttccagcagattattgcgaaagcccgccgcaacaccgtggccgactagccactccccgtcgcgcacctgtccgggtgtggcgttgcgctgcttccagccaaatttatccgctccggtgcgcaagcactcgataagctgacggcgagagaagcagcgcgtcgggtcggcggggtcaacctgagtgtcattcaggatgc

SEQ ID NO: 200482 - DNA, 406 bp, Glycine max
atacaaaagttagtcatataaagcgacaaacaaactcccgcaaatttacagttttgcttgtccttaaacaaagaaagaacaattcacttgtcctctagtgacaaagacagtggccaaacaaagaaagaacaattcacttgtccatcataaacaaccaacataagttccaacctttgcatttcatctcatatcatatagtaatgaacacgcaaaaatgaatccgaaggactttctaggcttgtaatggggttaggctgccaacaattcatggtttttctaggattcaaaagcttaggttctaggagagcattcatccatataataaccttccttttttttccattccttccctatacttccctttttcttaggcacttagccttcatacctgaatttatagcataca

SEQ ID NO: 200483 - DNA, 430 bp, Glycine max
  unsure (1)..(430): unsure at all n locations
agctatcaaattccncagaagatatgtcacatagccatatttcaaatgaaccagaaactntgcccgtggctaaaagcatcttggaagggtattgaacatgtgtggttactgaaagtacagaaactgggacagcattgacagttataacctattttggaatgaaagttgcataaaggaattattcacaataaagagtgagaaatgaaaagtgatgctgaaaatacacatagcaagtacctccttcaataatgagaaggaagtttgatccacttttgatgatttcagcaatttgtcattgtcagccaaccaaatcttcacactgcaaagaacatacatgatacattcagctaaactaagatattaggcacaaaatgtaatacaccacaaaaagtcaatccaattatgagtatgagggaaatgcactgtcatt

SEQ ID NO: 200484 - DNA, 445 bp, Glycine max
  unsure (1)..(445): unsure at all n locations
agtcacctgcggcatgcaagctngacaatacagaatgttatggttgaaatcttatttacaaacattggaagtttagctactagataattacttgacctacatgagtcattcttactctaatcattctacgaagaagcttatctcagataaaccttcaacctctttgtatgttctttcagcaacaactggtatatgaagataattaataattactgcctgtttgtgaggtttgctcataatgtgccttaccttaccatgatgtatttatgttactcttgcatgtaccccactacactcagactaatacacccttagcttagggtacaataaagtgaagaataaaatttcacatagtctacacttaaggtgtagtacttttcaaaaaaataatcaatcaacaaagacctcataagcattcacaccacaaacagggaacatcacaacc

SEQ ID NO: 200485 - DNA, 421 bp, Glycine max
gcttatgatggtgctgagcaagtcatcaagaatgtaagacttgtcccagatttgaagagaaatttgatttctctgagtgagtttgacaaacaaggctatttattcaaaggggagaatggagttctaaaggttctaaagggctccatgatattcatgaaagggatgcaaaagaatggcatgtattctttgattggagaagtggtaatgggatcagctgccacagtttctgtcaaaaggttgtcaaagaatgaactatgtcacacaaggttgggacatgtgagtgagaggggattgactgaactgggaaaatagaacctgctctgtggagatatgatggataaactcgacttcttgttacactatgtttatggcacaacttgcagggtcaatttggtaccttaaattctataacccaagtact

SEQ ID NO: 200486 - DNA, 318 bp, Glycine max
cttccatacgttcttttcacattatcttatgtgcaaccacctttatgggacaagtatatacaccaatcttcgtttaaaagaaccaactcaaaaagaactttatttgacgatattatctataggagaaatcttccgtacagctccttatatcttgatattttcccattagcatatgccttgcttttcttttacacgttacatgctttgttaaatgtagagacaacagataacttttctaagatgattacctttccaaggatggacctatagctagaaacgactcatcgcctcgttaaaaaaacaaatggctatttcatc

SEQ ID NO: 200487 - DNA, 451 bp, Glycine max
agtcacctgcggcatgcaagcttctgcctcccttgattctggacatcccggagaatgttgtgttcttgctttaacaaatgctcccttgtcatctcatacaaattcctactcaaatattctatttaaaattctcctcaaatttatttgttgtcattttttttaatgagttgtgcttattttgccccaacctttttggttatttatggctatgcgtgacatatatttattctttgaattgagttattcatatgcgagaagcaaagacatgtaaagttacaattgtgtccccgttgtacgtacttaagcattggtcattgtgcctatgctataacttataacaaaaaaaaaaaaaaaaaagaatgatagattgatgattagtatctctcatcttacatggccatgtgtataacattgttatagagaaaaaaaagctagttgtgggatccatact

SEQ ID NO: 200488 - DNA, 419 bp, Glycine max
  unsure (1)..(419): unsure at all n locations
gcttgtgctggtgctgctgcatcanntttaatgctgctaggattactattgttttattatgtgttgtccgagaataatttaataatgtatgagcattgctactttgtggtgattaacttccatgctttaatgcttgacacgtgctggagactaattgatttgtgtaaaatttctccagataaaaaacggcgatgtacgggtattagcaaacacatcattccttctggtgaaaaagagctggtcatctgaaatccggttacatgcctttaaaatgctgcaggttcaagttcacgtgcttttcaatgattagtctgtttagtcgtttatccctgtgccttatgtgaaaccatatctgtatacagcatttggtgcgcttacgttgggaggaattaagacctgcagagcacaagaactttgca

SEQ ID NO: 200489 - DNA, 411 bp, Glycine max
aatctaagctcgccatttagagcatacttgctgactttgctacgttcactatatattaagcatgtataattaagtatctccttgaaaagtattgaagatttggtccaaaataataagaacgcatgttttggcgtatgcatgatattcttaatggtacaaggtttgtaaaagtggcacttatgtggtcaaaataaacttgtagaagaagaaagttacgaccagtgatgattggcatctttaatcaagtgtgcacaataggtttatttcaattagtgctgctttttgtgtatcaattatgcacttaattggctttaagattctccgtccaaggaaatattgtgggcgcgtcattgtgcaagtgaatgagacagaaaatgattggagagcaagaatgaataacacatgcaataa

SEQ ID NO: 200490 - DNA, 430 bp, Glycine max
  unsure (1)..(430): unsure at all n locations
agctntggcaaatatattccaagagatcttattaaagttgtctgaaataattgaagagatggattgagcnttgatgttgggagtacattataacatgttggatcaagtggcctcggaataattaagaagggggggttgaattaattattactgaaactttactaattaaaaatctacccttcttaggcttttactatgttgttaagaaagtaaagaacggaaatataaacttaaccaaaagtaaaagcggtaattaaagtgcacaacggaaattaaaagagtagggaagaagaagacaaacacacaagagttttatactggttcggcaacaacccgtgcctacatccagtccccaagcgacctgcggtccttgagatttcttttcaaccttgtaaaaatccttttacaagcaaagatctacaagggatgt

SEQ ID NO: 200491 - DNA, 383 bp, Glycine max
aatcactgtaggttgggggggatctcataatctggtataccatcaacaagctcatccttaagcttgatcaaaataaatggatgagcgcattttgttatttgctaacggagcaactcctgcttcaattgttggctctgcgagggaccttctcagttcggagaaacatgacgcgatatatgcttcttttccttgtcgacgaactcatcttgcgggggagcatgacgagcaccgatctttacatttccatcagataatgcagccatgctttgaggttgcagatgggaactactctcgggcactagcccatcttctaattaaggcgctttcaatggaaacgtacctaagctagggccactgctagcaaagggcacgaagattgaccc

SEQ ID NO: 200492 - DNA, 419 bp, Glycine max
aggtgctcaatggggacagaaagaggtttttatgagagaggggggagcacgaaattgaaggaagaaaaagggagagaagttgaactttgagttgtgtctcttaagactctcattcatcaaagttacaacaagtgttacacatgcttctatttatagactaggtagcttccttgagaagctttcttaagaaaacttccttgagaaacttctttgagaaaactttcttaagaagctagagcttagctacacacacccatctaaactaagctcacctccttgagaagcttccttaagaagattcctaaagaagctagagcttagctacacacacatctctaatagctaagctcacctccttgagatgagaagctagagcttagctacacacccccaataatagctaagctcaaccccataac

SEQ ID NO: 200493 - DNA, 407 bp, Glycine max
gccctcaaggcagagctcgaaagagcccggctagtcacagtattgttcatgtccatggccatcaaagtctgaagagagtatgatgaactaaggggcgtcaatatggccaccgatgaagccttggaatgagaaaccaacaatgcccgaaaggaacaacacgaccaaaacaagttttgaggggctttatacggcagcaatagtgagctcaaactccgaagaggtgaaaggaatcatcacgggtcagaggcatgatctggaaggacgagctaaaggcttgccttatgtcgaaaagaaatttgttccaacagttaaagtaagactgaagggaatatgtgggccatcatcgatgagtgcaaagagaagctaaatctatcggcgactcacgagcaaaggctagaagatgagta

SEQ ID NO: 200494 - DNA, 434 bp, Glycine max
  unsure (1)..(434): unsure at all n locations
gctnttcgantcattctatgtacccgtagtggtccacattgtgtttcgtgcatatttattctcgnnttgtttactttttataccccctgttgacgtgcttaagccattttacttaagtcatttctcgcttaacttaaaaataaaataaatttccaccgaacgtttgaattgtattatccattaacttcggttaaaataaattccgaccgttcggtcgtgccgtaaccacgttggaaatcaaaaagaggtaaaaaataatataataatcaaaaagacatcttttagtaaaataaagcggaaaatcaatcggacgttttctctttgggatttctcattcttaatcgaattgattaataactaaagtgaaactaaaggctaaaatcaattcgcctagtcaagctcgtccataaaaataggcttttgaagtttgtcat

SEQ ID NO: 200495 - DNA, 385 bp, Glycine max
tagaagctctatccaattaaactttattgggggaggtgagcatttacttactataccccattgccacatcatatagtcacactttatgcatgtccttcatgctttacatgcctcatgacacctaagcacacttagtggagaatcttggaattgatcttggataagagggctgaatcataactaaaattcactaatcataattagtgaaattttggctccaaagtttggctccacaaattcaatttcaaattcaagtgaaatttgaattgaaattcaaattttcctctaattttggtgacacttaggctataaataaaggtcatgagagtgcattcttgtaacttggatcatttgaatattaaacttcccaattcagagctctttt

SEQ ID NO: 200496 - DNA, 427 bp, Glycine max
  unsure (1)..(427): unsure at all n locations
gtgagaaagtgtggaagagtcaattntcccacttttatctgttgaccacagagtggtacctggagatatgtcgcgggggtcaggagaccttggggacgtcaggtggggtgctattgcccaaaaccaagcttgatcaatcccgacccaacccgggcatagttagtcagtgagaacctgtgacgtacctaaacaggcgagcttctggccgtgaaccaataaaagaacaaagaccacaaagcaaggaggcttgtgtggtggctggccagctatggatcttgagtgatatctggaatatggcctctggtaatcgattaccaagggtgcataatcgattacaaggcttaaaaatggagacaggaagttaagatggcctctggtaatcgattaccaaggggtgtaatcgattacaaggcttataaatggagtc

SEQ ID NO: 200497 - DNA, 435 bp, Glycine max
  unsure (1)..(435): unsure at all n locations
ctctctctctggatgaatacatnntatggatgtttatcccattttatatatattgacatgattagtattttgtcaaaattatattaatatgctaaaataattgagataagtaatgagctaccatgtatgtattcataactaattnttgttacttagaattaagttttgattctctgataatagatttagattataattatattttgttttttaaaaccttgtatttggctatgtttttatgacatttgaacacttagtatttcttttaatacttgcttagtatgactgaacatgatgattatattgacttgctcttggttgtttatgattgtgtgttttaaacttaattactttaataatatatgactagtgggatgtacttacattcgatgctgcgctttatatctttttttatatattcatatatgtcttatt

SEQ ID NO: 200498 - DNA, 333 bp, Glycine max
  unsure (1)..(333): unsure at all n locations
cctcctctcacctcttctgctttgtcgtccgctgcatctccatggtggaaaatcaccattaaaggacctcattgaagctcaaagatccaccctccatagaatccccacaagcaagattccatcaaggagcacgaaaatntngtgcgcctgaaagaggcatacaactttgaagtgtaattctcaaatgatcaaagttgaataaatgcacacacatggcttctatatatagcctaagtgtcacaaaaaattggagggaaatttcaatttctattcaaaattcacttgaatatgaaaatgaattccgggagccaaattctggagccaaactttgga

SEQ ID NO: 200499 - DNA, 395 bp, Glycine max
atttttgttctcctatgttaaaataattacatttagtcctcctatttttgaaaatttgtaattttaatcatcttattttaaaatataaacatttagtcccatatttttgtaagatatgctattttagtctttccatctaaatgaaagcattgattgttaaggtattaacgttaactatgacatagaacaaacaaataatctcaagtcatgccactaaatttgggtcacattagattaagtttttatcaattaatactttatgaatttgatggaaaaattaaaattgtagattgtataaaatcgagaaattaaatgtctttattttaaaatagggaattaaaatgttatttaatgaaatggaaggctgtaagattattggctgacccacttagtaa

SEQ ID NO: 200500 - DNA, 421 bp, Glycine max
  unsure (1)..(421): unsure at all n locations
agcttcttggntctgggaagagtcatgtngcaacactatttatggngaaccttgggtctgtanttttgtgctcttccctatggagctatgtcctntttctgccctcaatggaggagctttgatgagttcaatccctatatttattcttttctcgcgctccataaaattgacagatatgtggctcctgaatatgcaaatactggtcttctaaatgaaaaaagtgatgtttatagctatggtgttgtgctattggaagcaattactggaagagatccagttgactatggacgtccagcacaggaagtgagtaaacttacttatatgttggaagaaaatccattttgaagtatgtgttcttgttaacaatttattaaatgaaccgattaatcatacagcattagcttttgagttcgacttattc

SEQ ID NO: 200501 - DNA, 420 bp, Glycine max
tagcccacagttggcaagtgtatcagctgcttccggtgtagatgccttagcatacacacgaacaacatcttcagtgccagatggtcgcacaaagcaccgaccttgggggtacttagctgtaaatgcagaagaggagtaccaagctgcaatattagtaaactgaaattctgcatttcaatctttcacactaaaaggcattcatggatggatgaaactgacaaatatctcgcactcagtgcaattttgccaagccacttggacttgataacagtaatagtataatcccataaacagcaagacaccaacttttcaggaatataacattcaatgtttgtattatttaggcctccttgcctccctccctctgcccattcttgggggtttcacaaataaaagcaagccagcaattgataaacccaa

SEQ ID NO: 200502 - DNA, 374 bp, Glycine max
cgagcgcctcggtatattacgagactctatcggatatcggtgtttaaagttatgggggggggcatttggtacgagcttctgttttcaattactggcgtctcgatatattatgggactcaatcgaacttctgagtaaaaatttattgtattctgaatttccaacgagctttcgttttccattacgagcgtctcgatatattatgcgaatgaatcggacatcccagtaaaaatttattgtctcttgaatatgctacgagcttccgttttcagttacgagcgactcgatttactatgggacacatcggacatctgattacaaatttattgccgtttgaaattgttcacagctttcgtttctaatacaagcgtttcga

SEQ ID NO: 200503 - DNA, 417 bp, Glycine max
  unsure (1)..(417): unsure at all n locations
agctnaccatggttgattgaagaatgcagaaggattnnctttctgaacattatggctggcatctccagcaacaagttttaaatctttgctctgagaagcaatcaaagtatcaataaactccgctggagactgactaaagctaagaaagaaagctcgtcttctatgatgctcctggatcttctttaaggaggtgcgaatcgcctcgtcataagcttcaatctctttttgactctcaaagcctgccaagaatgtatacatatccttttccaatggaaaaggcacatcaacctgtatatcataacatgcagatacagctggagaatgttcataaagcttgatgtaatgctccatatgtataggctgcggtagtgacaaaagctgagctaacttctgaaaaaaccatggtgaaatccatct

SEQ ID NO: 200504 - DNA, 383 bp, Glycine max
tgagttgtctaattgtgtctggagaatatactttatactatataaaattggttaaacaataacattcgcttcaagtttcgttaagtaatggggatttcctcgaaacaattcttgtaagtaacatacataagaggtgacctaactgcacatgaaatatagtttcgaaatttagataaatcatataatgagatacgaagtactttcttgctgttctctgttggatactctatttcggaagcaccgtgacttgatactgcatgagtgtttataccaatactttgctataagaaaattctatttatatgcctatttgtgagcgacattactccttataacttactttcgggggtgggtaaacacatttatggacatggattgacttg

SEQ ID NO: 200505 - DNA, 387 bp, Glycine max
gcttataaatatcgatacgctcgagattaaacgtcggtaactctctagaaattcaaatagtcataacttttcacacggatgtcggattcgggcgcataatatgtcgagaggctccaaattgaacaacggaagctcttgagaaattcaactggtataacttttcacacggatgtccgatttaggcaaatcacatatcgagacgctcaaatttggaacacggaagctcttgagaaattgaaatgggcataacatttaactcgaatgtccaatttaagcgcatcacatatagtgacactccaaattgaacaacggaaactctcgtgaaattcaaatggtcataactattcacactgaggtccgattcaagcttataaaatattgatacac

SEQ ID NO: 200506 - DNA, 427 bp, Glycine max
agcttctgttgctcaatttcgagcgtgtcgacatattatgcgcccgactcgtttcattttgtgaaaagtgataaccaattgaatttctcgagagtttccgatgtttaatttcgagcgtcttgatatattattgtcataccctaatttcgtccggggacctttgctcgatgacgtgcgaccattctttggtcctcgtgaggtgcttggcacccatcattaggcaatttgtgaaattccaggacatgccaaaaaaccaaaaaaatattgatgcacaatccgtaagtttccgtgacacaccggaaatcaaatggaagcatcgttgcataattaagtgaggttccgtaacattccgtaagtcaaaaaggggatgattatgtaatccgcaaggctccgtaacattacggaaagaaaacaagtatcgttacga

SEQ ID NO: 200507 - DNA, 417 bp, Glycine max
  unsure (1)..(417): unsure at all n locations
agcttctacatcggttgaaaaccggtatctacgacgggccccacaccgtctntgttccagatgtcgttgtatgtcgacaacaacaacatcggtcatcataggacccgtctttgtaatgcaagaatacaacgtcagtggctataaaagaatagacgttataaaaaaggattcaacgacgcacatattagacaacccgagaatgttttggtccatttcaacgtcgggttcgcaagacccgtcgttgttttgtttcctgtcaacatcggtggcgggctcaccaccgtcgttgtttcggtccatttcaacgtcgggttcgcaagacccgtcgttgttttgtttcctgtcaacatcggtggcgggctcaccaccgacgttgtttggtagtatgtcaacgtcggtggtgtgtacaccgtcatt

SEQ ID NO: 200508 - DNA, 415 bp, Glycine max
  unsure (1)..(415): unsure at all n locations
ctaagcttgatccatcaggtctccagccctttagttaaatcttggntgcaaatcatngtgctggtaagtggtaacagttgacatgccgtagtatacaattatccagaaacgattcttctagcttttgaaactgtgtcataaagtttcttgtttgaatcaaatacgatattaggatcttacaattctcatgcaccctcttatttagttgtgcaatagccaattaataattaatagacatctatttcacaatttctatatagtaaaggtggaaaaaatagcaattgatagatgagattaatttttatatatattatcattataaaaaacttttatattattaaccaatcaaaattttttacagatatttttttttgaaagacaaatgttagttgttgttttttgttaataaaatgga

SEQ ID NO: 200509 - DNA, 389 bp, Glycine max
  unsure (1)..(389): unsure at all n locations
atatataaatgcaaattgggaaacttgctttcctcagcaaaaatagaagcttatatcattttttttaaaaaaaaaacagaaaggtaagcacatattgaataggcaaaaaaaataaaaaagtggctaaagggaataataaatttgaaaataataatgctctatgaaaatncagttgtgaaaagtggtcttcagatattgatcatgcatctaatgcatatcaaatatcatattactatcttatacccagaaaataacttcatgaagcctagtctgttgtttcggtgattttttatattgaattgaaaaatagacttcctgactaataagtttacactcttcgatcaaacagtttgttactttgtaatttcccatttaaatctcagaaaata

SEQ ID NO: 200510 - DNA, 407 bp, Glycine max
acctcacaaaatatatgtatgtgtttaggtagtgaatataccttagatatgcatgtatatagcaaaaatacctcacacaatatatgtatgtatgtttaggtagcaagataccttggatatgcatgtatatagcaaaaatacctcacaaaaatatacacatgtttaggtagcaaaatacctcatgaaaaaaaaaaccaaataaaaaaaacaaaaaccaacaataacaaaaaatatatctttcagctgaaaagccaacatgcttttgagaagagataacttccagcttttctttagaaaaaaattcactaatcataaccagtttttgaaagaaaatgtgtgtaatacacctgaaaggtgaatgctgtgaaaattttcccgaacacccaaaatggactcggatgaacgca

SEQ ID NO: 200511 - DNA, 380 bp, Glycine max
  unsure (1)..(380): unsure at all n locations
tgtacaaggacctgcaaagaagtgttagtgggaccagaatatgcattattattgtgtggtctccagccataagcctgatttgaacctgagccacctatgtagccttggtagttcccttggaagttttgttgaggtctggcttgattttgtaaataatgggctttctcttcttgttgacaatcaccaggtgttgaacagtggccattctggtggttatcgccacaaaagtcacatctcataacttgttgaacttgatgagcttggtgtgttttttgtgatccaccttgttgatattgttgaggaagttggcttatctgcttaataaaggcctttatttgctgagtcatgagtttngtttaagccaaaattgcattctgacc

SEQ ID NO: 200512 - DNA, 438 bp, Glycine max
  unsure (1)..(438): unsure at all n locations
gctttctaagctntggctacaaccttttctccccctttggcaacatcataaagccaaagaactcggaaatcaacacagttataacaatggagtagcaagatataagtatcagagtattaaatccaataagccaaactcataatcaaggaaataatcaaaccagaattcaaataacataaaatgtcaacaaccacaaaatatccaagactgaaacacaagaaaaataagcaaagtacttagcataataatgtaaattctaagaaactaaaagccaaaatacacggcttataaaagataaataagcagaatctaaaatctaagaagacgaaggaggtggtggaagatcaaaactctgacgaatgtatccgacatcctcttcaagctgtgtaagacgaatgtccataccggcaaagcgtgaatctaacgagtcaaagcggg

SEQ ID NO: 200513 - DNA, 415 bp, Glycine max
taccgggaatgcctctagttcagcacccgtgctgcctaaggcacccacccagagggaagctccccaagttccaactccgaacacgactcgcccggccggtaattccaacgcgacaaggaacatcccttcgaggccatttcaagaattcaccccactcctaatgacgtacgaagacctcttgccatccctcatcgccaatcatttggtcgtgataactcccagaagggtcctccaaccccctttcccaaagtggtatgaccctaacgcaacttgcaagtaccatgggggtgtcccggggcattccgttgaaaaatgcttggcccttaaatacaaggtccaacatttaatggatgctggatggctgaccttccaagaggatcggcccaatgtgagaaccaacccgctcgccaatcat

SEQ ID NO: 200514 - DNA, 424 bp, Glycine max
  unsure (1)..(424): unsure at all n locations
cgcgggtctgggagacgaaggtcaagtggtcgcgatatatgaatatgatgntccgagttcatnggatttggtacgaccatgccctcctgatttccagctgggaaattggcgagtggaggaatgccccgacatttacgcagcgagcataatgtaaacctttacggttttaaaagctctatagttgggcctaggctttaaagtttttcttttggttaaggctttgcggactttgttttttctaatttataatacaaggatctttcttcatctgttcctacgtctctacccattctcatccatttgcatgtttacttctttatttctgaaacggcagatccgatgacgagtcccctgaaggtactaatacatgggacccgcctatcaacttcgagcaagaaacgaatgaaacggaagatgaagggaa

SEQ ID NO: 200515 - DNA, 423 bp, Glycine max
  unsure (1)..(423): unsure at all n locations
gacaatactgagactagctaactggatacattgaatctctgccactcgngcgtgccccaatcaagttttgcccncaagagataaagaanatatattaaaattcatataatatactgtaaatttgttataatttttccttctaactgtaccataactaaataaaaatgttttatagattccagctaatcctactgatctattgcattgatgtgagtaaagtttaagataaaaataaaaatgtgttgtcttcgttaatggttgttgtcacttatgatcttcgcatcaaacaaaaagttatcattgcaacaaaaaacaattggtacacgcataaaacaaaaacaaaacactatcagtcgctcttatcctctaacctatatacctaaccaatccatccaccaattaaagataattatccactagcat

SEQ ID NO: 200516 - DNA, 216 bp, Glycine max
  unsure (1)..(216): unsure at all n locations
actgaaagctatgctcatcaatgatggtgcaatcgatattaactagagcgcggagattcagactatgaatactcgggaatgatcttcggaactntaacagcatcctactgctcctgggctagagtatactcacgtataatgaatggaacgcgctggaaacccaattcatttatgaatttataagactttgctgagaagaatcactaaataaaaaat

SEQ ID NO: 200517 - DNA, 437 bp, Glycine max
  unsure (1)..(437): unsure at all n locations
agcttaactatgaagaagttacacgcttaaccaccacatatcatatacctacatntttaaccaccataagatagaaacaaacacacttaattatcataagagagaggctaacacgcttaaccattataaggcagaaacaaacacacttaaccaccataagataaatacaaacatgtttaaccaccagaagacagaagtaataaaaccatggacttaaggtcctggcatgcatatttagtgagtgagttgtggattgaatatagatcacctttaaaattgattttggatggagggctgggtgtgatccccattgcataaccaaggcttcaagtatatcaattgattggttgttaagctactaactctataataccatattgaaaactaggattttatttaatttaactgtcgtgtacaatatatatatatatatatat

SEQ ID NO: 200518 - DNA, 359 bp, Glycine max
atccagtaagagccagaacaactataaacactaagctgaacttcaaagaaagcaacatcaacttaagcaggcttcgcggtgtgccaaccatgaagggatcagaagcaaaaccattctcagctttgacattgccatatattgactcagaattatttcccataacaaccctcagaggaaaccttcaatcaaaagggctgggatctgcagaacccctcttatccaagacttccttttctatattatcttttagattgggagtcccacaaggtatagccgttcttagggaccctatacccacctaacacaccgtcttggcgaggtctagacattctctgaccacccacaacaggagcacaaac

SEQ ID NO: 200519 - DNA, 456 bp, Glycine max
  unsure (1)..(456): unsure at all n locations
tcacagtcacgcgtgcagagctttttgagaaaacttccttgagaacctagagcttatctctcacacccatctagaaactaagctcacctccttgagaagcttccttgagaagctagagcttatctacacacacccatctactcaaaatgcatgaaaatacaaaaaagtcccttgaaatacaaaaaagtccctactacaaagactactcaaaatgccttgaaatacaaggctaanaccctatactactagaatggtcaaaatacaaggcccaaaagaaggaaaaacctattctaatatttacaaagaagagtggatccaaccttgacccatgggctcaaaaatctaccctaaggttcatgagaaccctagggccttctttagtagctctagcccaagcctcttggagtcttctaaccaatacccttggggggtaggatggcatcacgatcattgtgc

SEQ ID NO: 200520 - DNA, 405 bp, Glycine max
  unsure (1)..(405): unsure at all n locations
ctgcatggaagggcaaaggtctgtatggtggtcagcagatgatcacaaaccacaaacccttgcgacaggtacagatttctgattcaaggccagctggattaccaagttgaccaacgcatccagttttccttcaagcttcttagtttcagatgatgcagatgggtttgtagctacctcatgcactcctctaatgactatggcatcatttctggcgctaaactactgggagttggaggccatcttctcaattaaatttctggcttcagcaagagtcatgtctccaagggctccaccactggcagcatctatcatacttctttccatattactgagtccttcataaaaatattggagaagaagctgttctganatctgatggtgggggcaactggcacatagtttctt

SEQ ID NO: 200521 - DNA, 430 bp, Glycine max
  unsure (1)..(430): unsure at all n locations
agctnctaaagaatatgatcttgagaacanaattatacttatccaacgagcatgctcaacatctcaaccagcatagccaacatatccctttcacattactgataaaaaaaaaatccctttcatatttgcataacaaggcaagtaagttcagtgatatttaaagattaagaaaccttggatactcaatcagttttgtggatgcaagggccttcgacaatagcatcaaattgcttcaccctttgtcctccggccgctttcttccgcttctgtcattctcagtgtcactttgatccgaacttgctgattctgcatctgaatctgatgaatcagaactacctgactcatctttctgttgttgcatgataagacacggcatattcnttatatactaacgtaggttctcagtaagaccaccaagaccaatgaatgt

SEQ ID NO: 200522 - DNA, 396 bp, Glycine max
ccttgctgtcgtgcgatcgtcgtcaggtttaatttacaggtttttttttgccgctgtcacatggtgcgagataattgagaatcttagtgcacttgcctttgaaacctgagtataaaatccgccagtgattgatccaaaacttagatctatgtaagcgagtggtttccttcacgaaaattggtccaatgattgcgtaaataggtcatgacagaggctcattcccataaacatgagatcgtttcatggcaaccaaattggctctctacctttaagtatgttaattgacaaatgtagtgaattcaaagaatgggactcttaccgataattttggaaatttcattaaatccatagtagatatgtccaatcttcattatctgggagaaattatacttgact

SEQ ID NO: 200523 - DNA, 450 bp, Glycine max
  unsure (1)..(450): unsure at all n locations
tctaagtcacctgcggcatgcaagcttcccgattgcttaagatattgtcaactggatcatttttcgaggttcctggaatatgttggggaatgttaaagggatttttcccgtaagtgatttcataaggagaagcacctgaagctaagtgtctagatgtattgtaggaccattcagcccagataagaaatttactccaagaagatggtttgttgtgaacaaaagcacanagatattgctcaatgactcgattaagcacttcagtctaaccgttggattacgggtggtgatgcaatcctcccaatgaggggacctatcaccaaagccatggctaggagactccaagaagattggaccanagatgcaggagaaggctctagggttctcatgagccttagggtagaatttggtcccataggctaagtatgagcccacttatttttgtacatatta

SEQ ID NO: 200524 - DNA, 356 bp, Glycine max
aaccattagcctaggtgacatctggtaaataaccagattgagatagtttggtgtggccatgactatagttctaatagcagccatgatattaaaagtccctttttgtcaacctaaattcagtttagttaaaaaaaattcagttcccttctccctaatttttatctcctgtttcccacttttttctccaatctctcttcattatctgattttatttcaatgattcaactctctccataacttttcctgacatgttggaattttctttaacctagttagattgaagacgaggaatatcaataatgaggcatatatatttgcctaaatatagttcattctatacttcaaattaaaatttg

SEQ ID NO: 200525 - DNA, 420 bp, Glycine max
  unsure (1)..(420): unsure at all n locations
tggtcgctcagatcttgactagatataaatntctgaataaaatgagttgatcctatatttcttctccaaagttagtgcgaatcaaatcactcccgcattttatctctagcacgcatgcatatcatgcatcgcataagcatctcttcatggcatcataatgaacatatcgctcctgcatttgtccgttatcatattccaacatcacattttgcatgactcattgcatcatcatgcatatgcattcaacatactttttgttctacaaactgcataccttttgttttcatgttcgctcatgcgtgatccttgaattttcctctacaaaacaaaaacaaaaagggaagcatgaaaattcatggtacattcttggttgcatatattcggtaccatgagccaaccatgttgggatcataaacccgt

SEQ ID NO: 200526 - DNA, 455 bp, Glycine max
  unsure (1)..(455): unsure at all n locations
ctctaagtcacctgcggcatgaagcntgcgggatatatcttgcacatcattttctttagttgagaacccccggagcgagtagggttgttcaaaagcttcatctacagcataaaagtcacctggaattttattagcaagttcatccatttctagtctgtatcttgttgttcagcaactagcagccagtcctgaaataagatagaaatgagatatcttatggaagaaacaaaacaaatatactgtatgtattaatacaaagataaaaaagagtgtacaattcactagttaattaagtgaatgcctaacaaaatgaacgctgctgaaggaaaacaacaatagttactagttaggaattggtaattagcaggcctattgttcatacaacttatataaggttgaggaaaaggaaatcgataaaggaatagtgaggaatttgcatgttctcttttcttggc

SEQ ID NO: 200527 - DNA, 404 bp, Glycine max
ggagagaataagaagaagggagatacccatgctggggttgtcgtttctacatggccaaatttcccattagcccaacaatatcaatactcggccaatatcagtccttctcattacccacctccctaccagccaagaatgcccaatcattcacaaagaccatccctaaatcggccaccaaatccacccgatgctcatccaagaccaaacaccacccttatgaccaatcaaaacaccaaccagtgaaggaattttccagaaaagaagcttgaataattcagcccaattccaatgccatatgctgacttactaccctatgtgctcgataaagcaaaggcagttataattccaacaaagatttatcgctctttatttacccgaggagccagaccccatgggaaatgtgc

SEQ ID NO: 200528 - DNA, 352 bp, Glycine max
aatactcttagcacagagcttcatacaatttggcacccaaacttttatggtcacgctcgatcccatatttttcaaaaactatttaatggtcgaatatatattattaaaatcaagttatatatcacttatttggagatagataaatttttcaaggcttaattttatctctttgcggcactcattacttatttcatttaatttcttcctcctaataataaaatctttaatttgatcgcttaattcacttggcattgtttattaatagtgggatgagattgaatcaaaccaaggaacaaattatatggtttattaaaatttaaaaaataaacagtgagaaccaatttattgaggg

SEQ ID NO: 200529 - DNA, 413 bp, Glycine max
  unsure (1)..(413): unsure at all n locations
tgaggcatctacctcttgaagaggcagaggtaagggcatatggattagtggtagaggtagaggacggngagatcaaacactattagaaaatacactttcaacatcggttatttggggccttctacatcggttgtaaaaccgatgttgaaagcatcgatgttgaatgtattgttgttaacatcggttttaaaaactgatgttaacataaaaatattaacatcaggtttataaataaccgatgttataaagaaagaagtacaacaaaataagtgtatgcgtgagggacgttggcatcagttttctgtaaaaaccgatgtgaatatgttatattaacatcagtttttagaggaaaccgatgtgaacgttcatcattcatgcacctattttgctatagtaatttatgtataacattg

SEQ ID NO: 200530 - DNA, 425 bp, Glycine max
  unsure (1)..(425): unsure at all n locations
agcttccctatctggctcccacaatgcagtcctgtcccttgcttgcttaccganagcatcctgacattcaaaacatgacccactcttagcacttatccaataatatgtcacgtgggacttaattttattgtgtataacttttagaaaaaatagtatatgaaataacaaatgtataatgctttagtactctcaatcaattataaattattatatatgcaaatttataaatttaactattttgaaagttatatgtaactactggttaagtaagtaatatctaatttttaatacaagtgagaggaagatggacatactatgatgtaattgcgttgaatgagacgatcaataaggtgaaaaagaatgtctttggagtactcaaggggaccttggattcccataatgtgatctccatacctatacatttc

SEQ ID NO: 200531 - DNA, 405 bp, Glycine max
  unsure (1)..(405): unsure at all n locations
gctgccaggctgaaacacttcctccacttcgcatccttagaatgtatagttctctagnnntcttcagcaacccatttcttctcttacagaaagtcactcgtcggttcgtcgaattttcgattcttcgaatgggaatctttcctctccccatctacttactagggtttccttcaccaaattttcttctcttcttttggaataacaattaatcaacgatatctgagatatcgaatactaattaatggccagattcacctttcactggaaagaaattaatttgaattaaattaattgaaaaatgtgggggaaattgcgcatatatataaacggaaagaanatcaaagataaatagtacgtacatactaaagaataacaaaagccgttacttactagaaaattatgctc

SEQ ID NO: 200532 - DNA, 426 bp, Glycine max
  unsure (1)..(426): unsure at all n locations
agctntaatagaagtgggtcactctatattgaggtggttgtaatgtaacaccccaaaacatatgatactagtaacaatactacgatgtttcattattagtgcataatatgatgtgatttatacttgctctatatttatgagttttactctaaattatgatttaaggagtgagctagagataatttaagagagaaaagacattaggtctaataggagacccacaaccctcttagaagcactaaaaacccttccccatccctcacacttagcacataaaacacacttagaaagtgagaatagaaaaaggagacaagaagaaaaaatgagaaagaaaaaagaagacaaatgaccattttgaatcttttaaataagacgagatataaatgatacagattcaggtcaaacacctagtgaaggaggagatgg

SEQ ID NO: 200533 - DNA, 408 bp, Glycine max
gatcctaaagaagctagagtttagctacacatacctctctaataactaagctcacctccttgagaagctttcttaagaaaattcctaaagaagctagagcttagctacacatacctctctaatggctaagctcacctccttgagatgagaagctagaacttagctatacaccccctataatagctaagctcacccccatgacaaaaaacatgaaaatacaaaaaaaaagtccttactacaaagactactcaaaatgtcccgaaatacaaggctaaaaccctatactactagaatggccaaaatacaaggcctaaacaaaagaaaaacctattctaatatttacaaagataagcgggctcatacttagcccatgggctcgaaatctaccctaaggctcatgagaaccct

SEQ ID NO: 200534 - DNA, 349 bp, Glycine max
ctggaacagcctaacaaaattggataaactacttgcctaaatcactacaggaactaagcacgagaagtatcttatacttttgactcatcattattaatagaaagagtattgacaacataacatcgtaccacattggaccctagctagaatgatcgtattgctattgggcagtcttgctcaaatataagcttatattaccgttctaaaattccaaaactgattgtacgggagaagcgtttactatatagtatatgcgacctgaaaccatagcgttattgccgagctcgacagaaatcacttacagaggcagaagaaaataatgaccaatgccaaacataccccatatgat

SEQ ID NO: 200535 - DNA, 377 bp, Glycine max
  unsure (1)..(377): unsure at all n locations
catttatcttcaccagntcacctactattttattataaaactcactgtcaatggtatgaatcaaacattntttactgtcaacttataccaactagataggattaaaaccaagcaaaccgatttcaagaattaaaaaaatggtttgaattttctacattntgttacaacattaccataactatttgggggaatggcgtgagagctctaagtgttctactatgtattaaagaaaagaagcttaccataagacagaaccatgaccgtgtcactgtctattacagttgaaactctgtgagccacatttataactgagcattcagagaattcatgcttaatgacactttgaaaaatggcatctgttgccgaatcaatggaag

SEQ ID NO: 200536 - DNA, 370 bp, Glycine max
gagccttgacgcactcatagggcgattacgtgcatcttttgaggaaaatggagggaagcctgaggcagaactttttggagcacgacttgtgagtctctacctttgtgaggttcgtgatctgcaatccaaagccgaggaattaactatgagaagaagaaaaggaaggaagcgtccatcacctcaccaacaacccatgccaatttctaccccatcccaacgtttaattcaatattttttttcacctaccattaatcttgttcacacacgtgtccctctatcagttgaccaccccaccccactttttttctctctacctctcttctggtcccaccaatatagctgccacccactaacccacgtccaatccaat

SEQ ID NO: 200537 - DNA, 409 bp, Glycine max
attctccatttgcgagctgacaaagcttattgtagttatccatatctgccaacatggaaaaaaatacatcagagtccacagcttcataaacttaagaatgtcattaataacaatgacaagagataaaaactattccatctgtttcatagccatatatatgtcaaaatcaatttgaggaatgggatgggaaaacaataccgatggcatcaccaaaattggtccatatctcagcaccaattgacttatcactgttaacaagaccataaacttcaacaaaagttgtaagaggagcagcaggtgggggtgatccttttacaactagttgtttctcatctgttgattttccaatgacaactccaccatcagatcgcacaacctgcaccacgatccttacccttctttcaacata

SEQ ID NO: 200538 - DNA, 371 bp, Glycine max
acaagaaatgaattaaaagtctcggatttggaaacttacctgctgaagaacgaagaacggatgaagaacagtgaagaacggaagaaaaccttcacggatttgcttacgaaaacatctcggaagcgttacggaagcacctcggcttggattttcttcacggaaacaatttttttcacccaaaacagttgaaatgcatagccagggggatcatggacccttagaacaggccccttttttcctttttatagagaaaaagtgggaggaggttgccgcccagcccgcccaggtgagaggcaatctagcttcgaaaaacagtttggaaggcccaattcaaaatattaaaattgctatttgcacccacccattgtgat

SEQ ID NO: 200539 - DNA, 386 bp, Glycine max
aacataactcatcaacaattacatgttagtcaacatgggactactagctacaaaggtagtactctatccattacttgtagtgtaagcaagatcagtcaagaagagtggatccttgactcaggtgccacagaccatgttacagcctttcctcataaagttggtaatcaattatatgaggaggcagcctactggtaatcgattacatgaatattgtaatcgattacatgccatctgttctagagtaatcgattacaatattcatgtcatctagtgtaatcgattacaatattcatgtaatcgattaccagaacaaaaaatagccttttcctaaaagaaatcatatttctaaggctaaaaacttatactatcttacgaggtgattatac

SEQ ID NO: 200540 - DNA, 411 bp, Glycine max
agcttgtcggccgtgattgacgaagggcacagaagacgactttttactctgcgtgctatcacgctatatgtgttacagacaacaaaaactttatacggataaccactcgggtatttccgccagtctgcgtgactcaaaagtaagtatgacagatcttgtgagcgcggaagataacgtaaatctccacgtgtcaacgggcttgtccgtcctctatgacgaagggcgcagaatacgacgttagtcactgcgtgctatcaggcttttcgtcttatagacaccaaacagtttatacggataaccactcgggtatttccggccgtgagcgtgccttaaaagtcattatgacaaatcttgtgagcccggaatatgacataaatctccaggcgtccacggtcttgtctgccgcgattg

SEQ ID NO: 200541 - DNA, 417 bp, Glycine max
gacttacgtcgtcctctgtgcccttcgtcaatcgttgccgaccagcttgtttacacgcggtgatttacgtcatcttccgcgctcacaagatctgtcatactgacttttgagtcacgctgacgggcggaaatacccgagtggttatccgtataaaatttttgctgtctgtaagacgaaaagcctgataacacgcagagactaacgtcgtcttctgcgccccttcgtcaatcgcggctgacaagcccgttgacatgcggagatttacgtcatcttccgcgctcacaagatctgtcatattgacttttgagtcacgctgactggcggaaatacccgagtggttatccgtataaactttatgctctctgtaagacgaagagcttgatagcacgcaaagactaacgtcgtcttctgcgccct

SEQ ID NO: 200542 - DNA, 441 bp, Glycine max
aacgcagctgcagctgagcaaggcaacacaataactgtagctcgtttatttattgagtcctggaatatatcaagacgctcaaaattgaatatagaagctcttagcaaattaaaacgacaataactttctactcggatgtccgattgggttacataatataccgagtcgctcgaaactgtatacataagctgagagcaaattcaaacgacaatgacttttaactcggatattccattgagtcccgtaatatattgagacgttcgaaattgaatacagaagttgtgagaaaattctaacgacaataactttttactcggatgttcgattgagtcccgtaatatatcgagacgctcaaaatttaaaacggaagctcgtaccaaattcgaacgacaataactttggacttggattttcattgaatcccttaaatatcgagacgct

SEQ ID NO: 200543 - DNA, 394 bp, Glycine max
  unsure (1)..(394): unsure at all n locations
caacataggagacataatgtactagtcagtaagtggtttcttcattagtggcatctcatttatcaaggaacacagagtctctttgtgttttcccttaaaaactctcactgtcagtgcccttaactgctttagccttccaacctctccaatgaccactccatcatcatctataatcactggaggtatctcttgtagggatgtcatgccttcaataatctttcattgaattgaagntatatagtcactcacaagatgacgtagcttagtaagcttactaatctcctctggcatctcagacacacctgtctctcttatatccaaggtctccaaattctggagcttgccgatggattttaggacactttctatccctgcataccggaagcttaaatac

SEQ ID NO: 200544 - DNA, 421 bp, Glycine max
  unsure (1)..(421): unsure at all n locations
tagacgactcaaccagaaaaaaatagctagcttagacgtatttaaattttagtgaanatgtctttaattnttttaaaaactntcgattaaacttgattttgatccctatatttttaaattgatgaatttagttcttcaagtttataaaatatatgactttaaccatttttttctgactaaaagtttaggtgaattcaattttgagaaaattgaattcatccacattcttattaaccgagtttatttcttatcaactagactaatggactaactcttcttgatatgtgaatttaatcattcttttaactttgttgtgttaaaaaaaaatcatcactaaataataagtttaaatgagaagagaaagtaaattcatatatatattttcaaaagttaaaaactaaatttatcaatttaaaagtgc

SEQ ID NO: 200545 - DNA, 442 bp, Glycine max
  unsure (1)..(442): unsure at all n locations
agcacctgcggctgcagcttattctacacctgaaaagaggatgagctagctgcacaaaagagaaagcttcctgatcatgagggagctaacacaaattttcatgcaggtggaccttctttgagtagttctgacttgtagcagtctcctatccctcttccatttccacctagagcaattccaaacaaaaagatggaagaagtggaaaaggagatcttggagaccttcaggaaagtagaggtgaacatacctctgctagatgccatcaagcagattccaagatatgccaagtttctaaaggagctgtgcacccacaaaaggaagctcaaaggcaatgaaaggattagcatgggcagaaatgtgtcagcattgataggtaaatctattcctcacattcctgagaaatgtaaggacccangtactntatgtatacccttgaatattg

SEQ ID NO: 200546 - DNA, 405 bp, Glycine max
acccggcgttgagaggaacgaggataagggctacgtgggagtacgtgagctcagttgaggtgggcaacaggggatggtgggttatacatgatttgtggatgtggagaattgttttgcaccatcgcccgactgccacctagtaccacatgtgatggataccccataatcctacaagcttgaaatgaggacgtgtggaagggtgagactttctactttaattcgttgaccacagagtggtacctggagatatgtcgcgggggtcaggagaccttggggacatcaggtgaggtgctatttcccaaaaccaagcttgaccaatcccgacccaacccgggcatagtcagtcagtgagaacctgtgatgtacctaaacaggcgagctcctggcagtcaaccgataaaagaa

SEQ ID NO: 200547 - DNA, 444 bp, Glycine max
  unsure (1)..(444): unsure at all n locations
ttaagcacctgcggctgcagctanggttcctttaatttatttatttcggtgttttcataaggatcggcaataccctaatttggggtttgggcagagtctctattgacgttgctgatcagggttaaattattggtctttgatcctagtcttcaatgggttttgatctggatgttgttgatcttcctcgatcaacatagttntgttgccgttcatcacttgctntacgattggttatttgggaatggaaaatttgggagccaaaaggttttgggttttggatgaagaattaagtctatggctgggatttaatcattgagttaatgactgaaagcatgagccatggagaattttattgataggatacagtacctgatctgggatgtcattacaatgccatgctctgtttttagaatatcatggatacaaagtttgcacgaaggactg

SEQ ID NO: 200548 - DNA, 423 bp, Glycine max
  unsure (1)..(423): unsure at all n locations
cctagagagggaatccacggagganatgcttaccacctcgaaagactggatagcggtttctaacgactcatctgcagcctccacataaggcatagaggatgggcagcttaccaagatgtcttcctcgcctgatacgatgaccagatgcccttccactacgaatttcaacttttggtggagtgtagagggaacaactcccaccgagtggatccacgggcgccccaacaggcagctgtaaggggggttaatatccattatttggaaggtaacttgacaggtgtgagggcctatctgtacagggaggtcaatctctcccctaacctctcggcgggtgccgtcaaaggcacgaaccaccatggaacttggctttaagtgggaagcattgaatggtaatttctccaaagtgctcttgggcctcacgtt

SEQ ID NO: 200549 - DNA, 448 bp, Glycine max
  unsure (1)..(448): unsure at all n locations
cagagtcacctgcggcatgcaagcttgttgtgagatcgctggtttggtggtcacctcccttatttgtgaggaggagaattgntgggtttttttggactcccttcctatgtggaataaaggcccaaatgagaagactcattttgtctcacttatttaagtgaaaagaggttagattagagacgggagagactcatttgagagagaaaaacagttaaaaaacattgagagaaaggagaggaaaaatcattgtgattttcacacacctactagagagcgtttttcagattataactgtggattcgtttgtcgttggatcagactgatttttggaaagcaggttttacacaagtgatactttcagattttccggttggattgttaaaactatatctggagagggagataagtatttctcattttttattctgcattttggggtttcatcttc

SEQ ID NO: 200550 - DNA, 394 bp, Glycine max
ctaagcttagaacttagggatgtcctcaatgaaacaacagacagaaatttaattctaccttacaagagcttgacacattccgctcttcatccacttatttctttgacctcaaatcctactcgaacttcaaaaagtggaattgcatggtaaagttccttgtcacgcgtcaatatagatcgttggcacccatgatgatgagataactcctacagtggattctacaactgcttcattgttctagtgacagaagatccttcaattctaaagctttttgagtcctcggatagaagtaggtataataatacaatgtagagacacgatagttgtcaaactgcacaaccctaaagatagtgaacatgagataacacttggatgaatgcgaatgaataaaaat

SEQ ID NO: 200551 - DNA, 431 bp, Glycine max
  unsure (1)..(431): unsure at all n locations
agctntgaggggattgacctgaaatgttgtttagcgagatatcaagggattctaacaatttcatttttcccatgtcatttggtatctctccagacagatgatttctagacaagttcaaaaaccgcaaagcaaatagcttggaaatttcagatggaattgctccagacagcttattacttgaaagatcaatcattctcaccaatatcagattgtctctgtactctaactcatcttttttgggaactaagacaagagtttccttgtagtggttataactgaagtcagagccatatgaataacttgaagggtttgcaaagaagtcatcttcaccagccattgttttcatgtcatccaaacaatttggaatggatcctgacaggctgttattgccaagatccagcactataagggaagaaagttgacacatcttt

SEQ ID NO: 200552 - DNA, 427 bp, Glycine max
tactcagcttcctaggctcattggagagtctgagatacttggaccttagcttaagtgttttcatgggattaatccctcatcaactaggaaacctctcaaacctgcagcaccttaatcttggatacaattatgctcttcagatagataaccttaattggatatcaaggctatcttccttagagtaccttgatttgagtggttcagaccttcataaacaaggtaactggcttcaagtactgagtgcacttccatctctttcagaactacacttggagagctgtcaaattgataacttaggaccaccaaaaggaaaaaccaacttcacacatctccaagtccttgatctttcaattaacaatctcaatcagcaaatcccttcatggctatttaatctcagcacaactcttgtccaacttgatttacacag

SEQ ID NO: 200553 - DNA, 425 bp, Glycine max
  unsure (1)..(425): unsure at all n locations
agcttaggttaaattagtctaaacttatgagggatcaatgtttagtattttaggctacaacatagagcacaaaagcatgattgattagagaaatatcttcatatgcataagcttttttgttagaaagacccgacgctttttacctattgctgtaaacttttacctgcatttactattttaaccatataagtagtttatttttgtttttaaccatcatttatcaatgttgctccaaaaatgccttacttctgaataaaactctgtctaataagcaagttccctgagttcgatactcagatcactctgttttaattntaaatacttgacgacccgttgtgctttccggctaatcggatttcccttgaacatanttgtataaaggaaaattggaccagatagtaactacaggggaaatccaacaacat

SEQ ID NO: 200554 - DNA, 417 bp, Glycine max
tctatggaggctagatctttgaccttcaatgaggtccttcaatggtgattttccaccatggagatgcagcggaagataaaggagaagaggtgagaggaagcaccatccacaagggaataagccatggaagaaggagcttcgccaccaacaatgtgccttggataagaagcttggagaggatgcttcaatggaggaaaagaaagagagataaaaagagagaggggggagcatgaaattgaaggaggaaaagggggagaaaagttgaactttgagttgtgtctcacaagactctcattcatcaaagttacaacaagtgttacacatgcttctatttatagactaggtatcttccttgagaagctagagcttagctacacacacccttctaataactaagctcacctccttgaaaagctt

SEQ ID NO: 200555 - DNA, 424 bp, Glycine max
agctttgactgctaggggagagattttattgtctctttccttcatcttactcacataaatatattttattggttgtggactatgtaacaaagtgggtggaagtagtaacagttcaacatgctgatgcaaaaaccattatttgcttcctaaaaaagaatatcttctcaaggtttggcacacccagagtactaatcagtgacagaggatctcatttttgtaatgctcaactcataaaagtcctccacactacagtgtcaaacacaaggtagcctcaccttaccacccttagaccaatgggtaagctaaagtttctaacagggaagttaagacaattttagaaaaaatagttgcttaatcaaggaaggattggtcccaaaagctagatgaagctttgtgggcatacaaaacaacatacaaagcccgc

SEQ ID NO: 200556 - DNA, 418 bp, Glycine max
  unsure (1)..(418): unsure at all n locations
ngccgctggagctgacccatcaactgccctaactgtcttagactggcgatccctangctcttgaccttgacttgatggaacctctttataagtgaaggcatttgacttgatcccattttttactaaagtgaacaaaatcggtatgaatcaaaactccgacatctatcatgggtggaatggatgaatgcatgaagaaatgcatatgacacagatgcaatttacaaatacgggagcatgggaaattgtctccttcttagatacaacgtcttggggtagcaaagtgcccgacgtatgtattcaagaaggtggcacagaccctcccttggtttgccaaagagaggggatcaaaacagaacccgtgcatgatgcatatgcgataggcacaacacgtggatgtacatagtacgacaatatccac

SEQ ID NO: 200557 - DNA, 431 bp, Glycine max
  unsure (1)..(431): unsure at all n locations
actgcngcctgcacgctcgaagggagacagtggggaagagtcagtcttcctacttttattcgctggcaacagagtggtacctggagatatgtcgtangggtcacgagaccttggggacgtcaggtggggtgctattgcccaataccaagcttgaccaatcccgacccaacccgggcatagtcagtcagtgagaacctgtgatgtacctaaacaggcgagctcctggcagtcaaccgattaaagaacaaagaccacaaagcaaggaggcttgtgtggtggctggccagctatgaattttgagtgatatatggaatatggcctctggtaatcgattaccaagggtgtgtaatcgattacaaggcttaaaaatgaagacaagaaagtacgatggtctctggtaatcgattaccaagggtgtgtaatcgattact

SEQ ID NO: 200558 - DNA, 432 bp, Glycine max
gctgcccccgctcgccaggcgagcagggtgcttcctccagaagcaacaaccttctggaggaatcttctggagggcccaagtgggcttggttgctatttacacccccctttttactaaatgcaccccccttctctattttttttgtaattctttttccgtaacgttacgaaactttacgaattttgtaacaatacttattctccttccgcaaggttacgaatccttacggattatgtatttactcttttttggctttcaaagaagttacggaaactcacggattgcgcaaaaacacctcttttcgatttccgccacattatggaatttcacggattacgcaagcctgcttccttttggatttctgagacgtctcgggacttcatttattgcatgtcatcaagtaataatccccggacgaaattagggtgtgac

SEQ ID NO: 200559 - DNA, 382 bp, Glycine max
  unsure (1)..(382): unsure at all n locations
ctacttcacatgtgattgatggcgcctatgcaggttgaaagccttggaggaaagaggtatgcctatgttgttgtggatgatttctccaaatttacctgggtcaactttatcagagagaaatcagaaacctttgaagtattcaaggagttgagtctaagacttcaaagagaaaaggactgtgtcatcaagagaatcaggagtgaccatggcagagagtttgaaaacagcaggttcactgaattctgcacatctgaaggcatcactcatgagttctctgcagccattacaccacaacagaatggcatagttgaaaggaaaaacaggactntgcaagaggcttgctaggtcatgcttcatgcccaagaacttccctataatctct

SEQ ID NO: 200560 - DNA, 399 bp, Glycine max
ccactcgggtatttccgcccgtcagcgtgactcataagtcagtatgacagatcttgtgagcatggaagatgacgtaaatcaccgcgtgtaaacgggcttgtcggccgcgattgacgaagggcgccgaagacgacgttagtctctgcgtgctaccaggcttttcgtcttacaaacaacaaaaagtttatacggataaccactcgggtatttccgcccgtcagcgtgactcaaaactcagtatgacagatcttgttagcgcggaagatgacataaatctttgcgtgtcaacgggcttgtcggccgcgattgacgaaggccgcataaaacgaagttagtctctgcgtgttatcaagcttttcgtcttaagaaagcaaaaagtttatactgataacccctcgg

SEQ ID NO: 200561 - DNA, 359 bp, Glycine max
ggattgcactctgtgggattcgatgcattggaagtgtgaagaaacacatacaaactgttcggtggataagccattattttaggaggcgatttaggacacattctacctgttgctccaaagggatcaaaaccagatattcttactgcaactatgaactcatcagagtcatggaatcattgcaaagcgtcgacattcaccaaaaacatgagattgaccactgcctagacaaatcacatagcgtaatgacaccaagaatctggcaatcggattctttaatagagaatggggacctggactcagatgacaaaggagaaggtcacattgtatttccaactaatctttcggtctagacaatgata

SEQ ID NO: 200562 - DNA, 373 bp, Glycine max
  unsure (1)..(373): unsure at all n locations
ggataatcaatctgataatacggatgatgctaactattagtgctcctgcacaagtcaaaacatactcactgattcacaatccaactttttttctacaacggtaccagctgtcttttctcccttgcgttaaaatgaatgtgactatgggagaccataaaatattccttttttttatcccccatccataaataaataaaacccagactcaaccttcaacaaataaaacaccccataatcgttaagacataatttgcgtatagcattccaaggacattgacacacaacaactttggggtcataanttatattataaacccaaaaacttatctttatactagtgaataagcactcgctatttgaatcatttgaataa

SEQ ID NO: 200563 - DNA, 446 bp, Glycine max
  unsure (1)..(446): unsure at all n locations
tgaggctgcagcttgaagnatagatatgaacctacgcgctaacattcanattctntatgtaaaaagctctatgtatantttgtaaagttcaaaaagctctcaaaacatcttgcgtacccttagagaaaagactaagtgcttagattctatatcctattgtaagacgattaagatttagttagtgagccaagcaaacaacaaatattttgatttggttagagccaataatggcttggtaggacaaagaatatggaggcattaaatcttggtgaaaatcttggtttgtatgagctaaaagtggtagtggctaatgcttgtaactttgtgaagctagtggaacttggtgatttgccaagaactggacatagtctaggtagaagagacgaaccggtataaaatatcaagtgtttgatccttattgcattctatatttaattgacctaggg

SEQ ID NO: 200564 - DNA, 413 bp, Glycine max
  unsure (1)..(413): unsure at all n locations
actgagatgtaccatccacctaattgtatagtggtgcttttggtacctcttgcctcatggcattaaaatcttcttctaggccaggggcatttcttgtgctccttgttcatgatgcttgatccatggaacagaagtattcagagcccaatataagtctacttttggaaaaatgagtgggtttaaactgaaggtttttcctgaatttgttggcatgctgtttgaaataaagatatctgtaaagcaatagtatggatttgtaaattcatgtggaaaaaggatttgatcatgtnttggcagccctcatgtcttgtcaagcttctcaggttataatcctttcgttgtctcgatttaatcttgagaccttcattttaatttttctttcttatcttctactttaggtttaaaataagttc

SEQ ID NO: 200565 - DNA, 401 bp, Glycine max
  unsure (1)..(401): unsure at all n locations
aagaagaagaagtttatttttntctaagntttctcaaaaggtgttctaaagaattgttaaaaagttattgaaatgcaagtcaaggtcttgcttttatagactcttcatgtctggtcaagaaaaccattggaagagttataaccttgagaaaaacctaaaaaccattggaagagttacatctcttgatttttattcaaaacttgtcactgacaatcgattaccaaaaccatgtaatcgattacacagagcattttatgaaaagatgtgactcttcacaattgaatttgaatttcaacgttcagatacactggtaaccgattaccaatacattgtaatcgattgcaccatttaaaaaacaattggaacgttgcaaattcagtaaaagcttttgaaatcaaact

SEQ ID NO: 200566 - DNA, 352 bp, Glycine max
  unsure (1)..(352): unsure at all n locations
ggggacccgaagtgtgtagcattgattggagagtgagagggagaataccccctcccacatacactttctacatntgatatttggggcctactacatcggttgaaaaccgaagttgaaagcattgatgttgaaagtactgttgttaacatcggctttaaaaactgaagtgaacataaaaatattaccacactttttattaataaccgaagttataaggaaagaaggataacaatataactgtctgcgtgagggacgttggcataaattactgtataaaccgatgtgaataagccatattaacatctggttgtataggaaaccgacgtgaacgattattagttatgcagtctat

SEQ ID NO: 200567 - DNA, 410 bp, Glycine max
atccttatggcctgcctgcggacttcaccctccgtgccaccccggaagagttaagccaagcccctacttttgaggggcaactcccaccttatgaagactatcccgggcaagacgatggggaaggagatacctatcttggccccctgctccacctcaaagatccgtccccgcatgaactaccccagccgaacatagtccgccatatcccggcctcacccacacccgtaaaagaatctgttcccttcgcggaagataagggaaagattgaggcgcttgaagagaggttgagagcagtcgagggcctcggcaattacccattctcggatttagcggatttatgtcttgtgcccaacttcgtcatccctcccaaattcagagtaccggactctgataagtacaaaggtacgaca

SEQ ID NO: 200568 - DNA, 423 bp, Glycine max
  unsure (1)..(423): unsure at all n locations
tctagccaaatggacttaccttgacttaattccttttgatagccctttgagccttgnttccctttccttgttttgaagctcactacaagccttaagtgaaaaaccatgatatcaccatatccttaaggaattttggagctttggaattgttttgggaataagtgtgggggtttttgtttcattggataacatgttttgttggccatgcttcatgatatattntgagccatacttgatatacattgcatattggntaaatgttggacatgctgaatatgatgctgtttctcaaaaggctacaaagcaaaaaaaaaatcaaaaaaggaaaaggaaaacagtaaagttgagtgaatgaataagaaaagaatgatgagactcttggttctactctttatggttaaattttatctttacttcttttta

SEQ ID NO: 200569 - DNA, 383 bp, Glycine max
ctgcagcttcccgctaaggatcttttctggctacacctcatactcgccaaacgaggtcaccgggttgaacctttttgtgtatctcctgactgctcgaagtttggcatcttcttctctaatcttcacaattactcaaacttctatggtggtctcaagttccaccctcatattttcttcatttttttgtttctagaacaaaagtctgcttgtcgacggttccccaacttcaacggtgatcatggcatttatgccatatgtgagttggtaaggagtttcgttggttgctatccggggtgtaaagtggtacgtccagagtatgctatacagttcttctttccataggtccttaaacttggcgagtctaacacgcacggtcttgggga

SEQ ID NO: 200570 - DNA, 354 bp, Glycine max
tttagcttataataatccatggtagctagaggcctgaacttgcctacaaaagaatatatattaatacagctgactggactagggtgttctctattctcatatctcgttatgctcttcccatcccaaaatgcgcttgcatttttcaaatttcgaaaatactctttaaccaaaatgtattccgtcgagcaaaatatacaattaaattatgttttcatcatatattttttcaaacacacaatagaaccatgaatgatgggggcacaggtaatgccaaccacaacaaggtgctgggtgaaatcctctctactccttcaccatcatggggtagcggcggcagatcatctggaaggggaa

SEQ ID NO: 200571 - DNA, 449 bp, Glycine max
  unsure (1)..(449): unsure at all n locations
agtcacctgcggcatgcaagcttgtgtatccaccaccggttgatacgccactgtatatttgttcgcgcttgatggcggtcatgatttctctgccggggcgcatacgtacgctcatcaggtaatagcagagcaggccaacgacagttccactcatgccgcccagtaaaaatgcgtaccacacatcgttccatgtccagtcatctgcataaagccgaacggtcagaggaatgcccgcaattntagtttcacggactggcatgtcggttaattcgttaacgttcatcaaacgtgaagaaaaggtagatagcgcagtattgccaataatgagggcgacgccatcgtaatcttcctgccgtgaactataaaagagtgaaggcgtcaggttgagattcagagcggcaaagacgccgctatttttcagcaaagggttgcgataccagatgacgatt

SEQ ID NO: 200572 - DNA, 419 bp, Glycine max
  unsure (1)..(419): unsure at all n locations
cagcttctccggatgaattgaanacctggttcgttatgtcgacgtanaatcgttaattatggatcagtatgctgactggaaaggcgtacgttatcgtctgggcggcagcactaaaaaaggtatcgattgttctggtttcgtacagcgtacattccgtgagcaatttggcttagaacttccgcgttcgacttacgaacagcaggaaatgggtaaatctgtttcccgcagtaatttgcgtacgggtgatttagttctgttccgtgccggttcaacgggacgccatgtcggtatttatatcggcaacaatcagtttgtccatgcttccaccagcagtggtgttattatttccagcatgaatgaaccgtactggaagaagcgttacaacgaagcacgccgggttctcagccgcagctaataaa

SEQ ID NO: 200573 - DNA, 430 bp, Glycine max
agcttctaaacgaatctcatctagctcacttagttgcattttcctttcctgtcctgcctgatcaatagagaagttgcaagtctttacagcccagtaggctttgtgctctatctctacaggaagataacatgccttgccaaagacatctcgataaggagacattcatatgggtgctttgtaggcagtcctatgcgcccaaatctaacctggtgctccaatcctttctgttaggctgcacaatcttctccaagatcctttttatctccctgtttgaaatctcagcctgcccattagtttgggggtagtatggtgtggaaattttgtgcacggccccatactttttaagcaaggcatacatggatctgttacaaaaatcgatgccttgatcactaacgatggctctagggactctaaacctgcaaaacaaatt

SEQ ID NO: 200574 - DNA, 421 bp, Glycine max
  unsure (1)..(421): unsure at all n locations
tctcttggaccttaggcanatcttcaactcatccttcaagatcaaactgtctactcgtgattggtccctttcctctctccggagcttaagctcactgttactgccccatagagcccctcgaaaattgtttcggccgtgttcttccctacgagcctttttggtctcttgttccaaggccttggtggtagctatatttacatctctcagttcggcattctcctttcggatcttgaaagctgctgatttgaacctttctttgactgtttgggcttgctcaagttctgccctaagggcttgcacctctttgtcttcctccggtgcctcaacttcctcccctttagtggttctcaaactcgggagccaatccaaaccttgcatgtgggctttcaaccacttaccaaagccgtcgatgggcccattg

SEQ ID NO: 200575 - DNA, 447 bp, Glycine max
  unsure (1)..(447): unsure at all n locations
tccttaagtcacctgcggcatgcaagcttacctctatcaatttctctctgacaatgtctaacgtatcaaatcagntattacattgatttttaactttgccttaatgtttaatggatttttttcatctattaactaatagttggaaaataatgattaaaaatatgattcttaaattgttaattatgataaaaataaatcatttttgataaatgattggtatatttttttaatttataagtattttaaaataaattaaaagagtcaaataaccatggtatatgaggagaagagaatatattattaaccttaatcaccacaaatacgaggcctgttgtttctgtttttgctgtgtcagaaagtggagtgaaagtcccgaggttgcactctccactacgcgtggaagtggcacgtgaaccacattatcatctttttctactattattactc

SEQ ID NO: 200576 - DNA, 405 bp, Glycine max
  unsure (1)..(405): unsure at all n locations
agtattccatctatggttgtagtaccgattacatccttatacatggggaaaggtaactgttattgatgtcaaacacaacctcttggcataagcggttgaaaaggtctgcaacttcagcatcactaccaagccaatgctcaattatgccacgataatgaaggtaccccacatcctctggggagttaatcaagttgtccatgaagataacatangatgtaatgtcattgctgcaatcaagatgacactgctcaaaggcaatcangttgaagaacaaagacttggtaccgtcgtggatcaagagccgtggtattcgcagtttgccatccttaaatttgatgtcccagaagcgatcggtctttctcttcttgaacttgattccagcctctttaagctctgtgacgcaat

SEQ ID NO: 200577 - DNA, 430 bp, Glycine max
  unsure (1)..(430): unsure at all n locations
agctngcgcttgcattaaaatataaatatttcttctgctatatatacaagcgtgccgatttgaagagaatcatacacaaaataagttttatctaacaaacatgttaacaaagatgatctaatcaatattgcaagagaaatggagtctactgtctagttttgataaattggcaattgctcacatactattagcccaactctagtgtcagtattctatcagatgaatctctccctaagatgaaagagaaataggccgaaaatccaccaaatgtgatccaatgataatacatactctaatattaatttcacaatacaacgaactaatgtcataaactgtcacgagatgtatttatacagtatattcaaacctcagctcgtaagttctcacccctgcgcattgccattcaaacttggcgaatctagcacacaca

SEQ ID NO: 200578 - DNA, 399 bp, Glycine max
  unsure (1)..(399): unsure at all n locations
gctgatgctatgtctcgcattcatgaaccagcaactgaggctatntggatcctcaatttccctcattctcagttccttaatgaccttgaaagggaattgtccaatatggtggaatttgtcactttgctcaaggctgtccgagataaaccacatgatcaccttgattttagaatccaggatgagctactcctttacaagggcccacattgggtgaataaaagcaattcctttattctgcttctgttggaagagtaccataaatcccctctaggtgaccacatgggcctggctaagaccttgagtcatcttcaacataatttcttctggaatggtatgaagcaagatggccgagaatacatactgcgatgttctaactaccagcataccaagtatgttact

SEQ ID NO: 200579 - DNA, 442 bp, Glycine max
  unsure (1)..(442): unsure at all n locations
ccgagcagcacttataaaaaaatgctaanatcccaatatcatgttaatnaagaagcatcaactagaatgaagcctaggctattgggcaagcaatcaatggggcaaaacacaccaaatgattatgatgatggatggctcaaattctcacaaaggtaaactcatcactttcaaattgagctttcaaaactatcatgacatgtagaggagaataagggatttcaagtcacaaaatgacaagaatttttgtntcaaaacaattacccatttcttgaacatatcctataattcaaagaaaaacatgcaaagtcgtacatgcacacaaaaatgacccataatattaaactagagatccgacgaaactaacaacattaacaaatgaacacaactaacaaattaccaaaccaacaaactagcaaaccaaagaaccttccccctcccccaa

SEQ ID NO: 200580 - DNA, 384 bp, Glycine max
gagcccgggtagtcaaagagacctcttctttatatccctcaaagtctgaagagagtatgatgaactaagggacgtcaatatggccaccgatgaagccttggaatgagaaaccaagaaggcccgaaaggaagaacacgaccaaaacaagttttgaggggctttataaggcagcaatagtgagctcaagctccgaagaggtgaaaggaatcatcacgggtcaaaagcatgatctggaaggacgagctaaaggcttgccttaagtcgaaaagaaattctgcctaacagttaaagtgagactgaagggaatatgtgggccatcatcgatgagtgcaaagagaagctaaatctagtggcgactcacgagcaaaggcttgaggatgagta

SEQ ID NO: 200581 - DNA, 344 bp, Glycine max
  unsure (1)..(344): unsure at all n locations
aaactcagcttgaatgaggaagtgtggaaaggngagacttcctactcttattcgnngtccttagagnnggacctggagatatgtcgcggggtcaggagaccttggggatgtcaagtggggtgctattgcccaaaaccaagcttgaccaatcccgacccaacccgggcatagtcagtcagtgagaacctgtgatgtacctaaacaggcgagctcctggcagtcaactgataaatgaacaaagaccacaaagcaaggaggcttgtgtggtggctggccagctgtgaatcttgagtgatatatgggatatggccactggtaatcgattaccaagggtgggtaatcga

SEQ ID NO: 200582 - DNA, 424 bp, Glycine max
  unsure (1)..(424): unsure at all n locations
gcatgcaagcttgtgatcaccgcctacacagaactaacccctctttcttttgtgggnggaattgtcccacattactggatggaaccttaacacagggaccacaccatatgagatcacatttggacgcaagcccttcaattttacagagtatctgtatggaacttctaaccatgacggtgaaggtgagatactaacttactgggaagaagtgggaacagcattcgcaaatagttaattaaagcccaagctatcatgaagcgccatgttgatgccaacatagagagataaatcgccggactggcgattgggctcgccttgaactgcattcataccggcagagatacgccaatggagcacaagtatctcccgacgatgtggctaaacgctactacaggccctatcaaatcattgaccgtatcgacac

SEQ ID NO: 200583 - DNA, 273 bp, Glycine max
  unsure (1)..(273): unsure at all n locations
cttgagttattgccgtacaatggtgtatatagccatcttttggagctctaaattgtaagaatagtctcatatttatggggcacttttggggctttttatgcttgatttgttataattgaggggctgtaagggatggccttaagcctatgtggtattcttaaacaatggggcatgccacatatgccccattctcttgcgatttatgcccanacacgcgtccaccaagtgctcggtgaaatgccccaatgacatatggatatagttttgtaagat

SEQ ID NO: 200584 - DNA, 298 bp, Glycine max
  unsure (1)..(298): unsure at all n locations
accatacaaganngggggggggcganctattcttgaacagatccttcacctcataaccatgtattcggtaatagcgaaaagcatttttttttctttatctaatacaacgtttccttttaatcttagcgtacggtgattcttgaggtatgggattgttttttctgcgataacctttcgacggtgtggttgctagattgacactatgaactatatcaattttaagttaaacctataatctaggaaagcattcttgttctgtgtgctgcagagatctcttgactcttctaacaatagaatt

SEQ ID NO: 200585 - DNA, 460 bp, Glycine max
  unsure (1)..(460): unsure at all n locations
catgaagcttgagcagattttcnctccattctttttcctagcttctttntcacaatcagaatttacatttatataattttttataataaagaaagaaatagaaaaaagagagattaaatagtataaatattgtaatggaaaaaataaatataataataatatttattgaaaatattgtagaaaattgctttataagaatataacatttttaataacaacaaaataataaaaacaagcgttattgacctaatggtaatcaaccagacatatatatggctagctttggggtcagtcattaccgaaactgaaatggtactaataatgtataatgtatatacttagtgcaaagcagctacaagacccgtgcatagagcatcttactttgaaccccgaaattagttgactgtanggtcaaagttaatntgaaaggacacaaaggagcaagttaaaggaaaataat

SEQ ID NO: 200586 - DNA, 377 bp, Glycine max
  unsure (1)..(377): unsure at all n locations
tgggtgattttaaaaaactgaagtatgaatccagaagagggtaattactgactacaaaaattagaaaacaagctaagagtaatgagaccactaaaatgaaaactgaaaagcaaagcatggcagggatatctgcttaattttgaatagagataaagtgatttttcctaagaaagataatcacagagtgaaaaatgtcaacctcacgtagaagccaaaaagatgatgcttggtttatgtcttgtgcaagaacaccatcggatatcaattcattctccatggagccaagtagaaatgcttcaagctnttgcctggaggtatcaaaataaaatgtgacatcatatgtgaagggacttattacatgctcagaaatgataact

SEQ ID NO: 200587 - DNA, 472 bp, Glycine max
  unsure (1)..(472): unsure at all n locations
gtcacctgacgcgtgcagcttnttgagaaacttcttcgaactttattttttacacacaccccttttataactaagctcacctgcttgagaagcttccttaagaagattcctaaagaagctagagcttagagacacatacctctctaatagctaagttcacctctttgagatgagaagctagagcttagctacacaccccctataatagctaagctcacccctaagacaaaatacatgaaaataaaaaaaaaacctactataaagactactcagaatgcctcgaaatacaagactaaaaccctatactactagaatggccaaaatacaaggcccaaacgaaggagaaacctattctaatatttacaaagataagcgggctcatacttagcccatgggctcaaaatctaccctaagctcatgaaaccctagggcttcccttggtctctggcccatctacttggagcttctatca

SEQ ID NO: 200588 - DNA, 457 bp, Glycine max
  unsure (1)..(457): unsure at all n locations
agcttgctctaaatntacattgattttgtatttatgggaggaggttatatgccatttttgctttaagagtaatgtcccgctaaaactaactttccaaatgtttgccttcgcaggaatggccccgaggaagcttgcctcaaagaggtccaagaaggacaaggcggccgaaggaactagttccgccccggagtacgacagtcaccgctttaggagcgttgtacaccagcagcgcttcgaagccatcaagggatggtcgtttctccgggagcgacgcgtccagctcagggacgacgagtatactgattntcaggaggaaatagggcgccggcggtgggcaccactggttactcctatggccaagttngatccagaaatagtcctttgaatttatgccaatgctnggccaacagaggagggcgtgcgtgacatgagatcctgngttaggggtcagtggatc

SEQ ID NO: 200589 - DNA, 473 bp, Glycine max
  unsure (1)..(473): unsure at all n locations
gttttaaaattgtctctatctatagggcttnggtttgttgttatctatttatgggatcctatatctgatttttttcactacacctttttagaacctggtaaaaactctgttaagtacttcacttggcataagacaatgtcatctcgatcctagcttggtactgtatactatgtatttcttagtaacctttagatatttctttatgttggctatgctatgttttgatattaggatgttgcagaagtcttggtttggatattagactaagctctcaagttattntgttaacaatttattttaagcaataaggtgcatgccatggtagaataaaggatatcaaccaaaccttgtccattaaggaagaaatttcatttgtctgatgagtaattggtaaaagactgagtatgatggccttactttntttacagtactgtcacccattgattatctgagcttgtgattgtaactatttt

SEQ ID NO: 200590 - DNA, 335 bp, Glycine max
  unsure (1)..(335): unsure at all n locations
ttagatttggggcctctcatgggttgtatttacatgnnnntcctctttggggggaagtggtataggctcgaanaattgagtgacgaaagcaatctacgcatgatctttagaatatgcaaggcagcttttgggaaacgggatttaaagtatccaccctcaccgaatttttattactggaaggatcataagcataataagaaccatgatttatataaacatggtaaaggattaaggttatcgccacgagttccgcggtttttcaggtggttggacaaagcggctatagttaaagcagaagaagaaatgagtcccgagacgcaagaaaagaatgggaa

SEQ ID NO: 200591 - DNA, 392 bp, Glycine max
  unsure (1)..(392): unsure at all n locations
gtgcattctctcggaagngcatcatttgtttnggcttcttttttatgaacttcatcgcttccatctccttttcctttaaaatctngaccatgaatatgcatttgntctcaagattctgcaatatcatctaaaatatcctttcttggaggaatagcattagactcatcagaggaaacaagaatagattcttctatgatcatagttcttttggtatatactctatatgctttactttgcaatgaatatccaagaaagatgccttcatcagattttgcatcagagtttcctaagctatcttttccattgttttgtacaaagcatttgcaaccacatacatgaatgtgtgaaatgttgtgttatctcgcattaaacaactcatatggagttttctt

SEQ ID NO: 200592 - DNA, 325 bp, Glycine max
  unsure (1)..(325): unsure at all n locations
gggcttttaatgcagggaatgttggtgaacacataactattgaagagacatgctattagtatcgggagaataatggagctcttaacttggtaatgattttgccgctcgggagttgtaagtggaaactgagtatgctggctttcaataactatttatgatatctgatgaacaagaactaatgtttgcttcgtttgccctatcatctttgcatggatgttactgagctgttatacaacacacatacaatgaatttaatgtttataaaagntgttggcacatggggcccttatttaatgtcttgctgaactttgatacttaatgcatg

SEQ ID NO: 200593 - DNA, 341 bp, Glycine max
  unsure (1)..(341): unsure at all n locations
gcttggcactatcaacactataanggaaatcccaaaataaattcttggggcagaggaatcaaagtcttgttctgccaccgcttctccttcattctcctccactttctcttcttcaactaaaccagcaccatcatcatccacaacaacaacagcctcttcttgtgcaacagcagcagaaattctaggtccccacaacttgtgcgaattaatggacaaaggttccaccaagtgtgacccaaacatgccacggtttgagggccactgtgttatgagagggtctattatggagcagttcttggaggaacgaagacatttgacactgttaatagaagaagaaaaca

SEQ ID NO: 200594 - DNA, 403 bp, Glycine max
  unsure (1)..(403): unsure at all n locations
tatcaacatcaaacttggagaaagagttctggggggcaagacatgagaagcattctagtataagggtacttccttcactatagcggtgatctatctccacacatattttatcaatagcaacataaaaaatctttgcacggtaatgatgaagattagtgatagtcctcccttctgctcttgaacgaccccgaaccggtatttcgtcatccatatttggtaccggaatactnttagctacacaaaatccttggacatcggcaaaaaaattattccagccactctctctcattgtgcccaaccgagctttgacaacatcaactaattccatggcattcacaatattaagatcttttctttgcaatacatttgaagagctcgttgtgataccaaacaactcttaaca

SEQ ID NO: 200595 - DNA, 352 bp, Glycine max
atcaatcagaaatctgcacctgtggcaagagtctatggtctatgttcttctacagatctctgttcttctttgcagcaatctggagtcaatgagcaacttgatgcttatgttgtaaacatttataatagatctcctcaacaacaaaaccaacaacaacagaataattatgatctttcaagcaacagatacaatccaggttggaggaatcatccaaatttgagatgggcaagtcctccacaacaacattagcctgtccctcctttccagaatgcttgttggccaaggaagccatatgttcctcctccaatacagcagcaacaacaacaacagtcattacaaagacaaccaagta

SEQ ID NO: 200596 - DNA, 192 bp, Glycine max
  unsure (1)..(192): unsure at all n locations
ttcaactgcatctccatagtgaaaaaacaccattgaaggaccttattgaagctcaaagatcccgccttcataaaagctccataagcaagcttccatcaccagctcacctgggtgagctcattgcttcaacactaaatttcagctcgcctgcaacatncataaagtgaccctntggctaaaaatatgcatcat

SEQ ID NO: 200597 - DNA, 452 bp, Glycine max
  unsure (1)..(452): unsure at all n locations
ctgcagcttttaatgcatgttaaacaaattctttttcttttgttgtgattatttggtacacttgctggtttgttcaaggtaacctcaatcctgtacttgcgttggtcgtgtatctagtggtaagatgatcacggctcaatttccgtgaattcccaatttttggttcttatgcctacattctcccggtaagtctattntattttattttattttgaattgtaacaataataaaaatgaaatttctgttaatcttttatggcatattcattcatgcactcttaccctgttactaaaacggatcagcgtttaatcgggtgagcgatggctaggtttgtgatatggatacaatgctacactagctttaaatattaatttatccattaattgatctgagtgacaagttttggggttaactggataataagttntaattaacacatactanataatca

SEQ ID NO: 200598 - DNA, 312 bp, Glycine max
  unsure (1)..(312): unsure at all n locations
gtactatgcagagaatatccaagaaaaataccttcatctgacttatcttctaattttcctaagntatcgtttccattattcaatacaaaacatttacaaccaaagatatgaagatgtgagatgtttggctttctgccattgaacaattcatatggagttttctttaaaatggggcttattaaagccctatttaaaatgtagcatgcagtgttaacggcttcagcccaaaagtattttggaagaggagtatcatttaataaagttctagcaatctctttcaaagatctatttttcctttcaacaacaccattt

SEQ ID NO: 200599 - DNA, 476 bp, Glycine max
agcttaccgtcataggaagtcatggataagacctctgctttatcggagaaaataagtggagggagagggagagagagggggcactaaatgtatgcctcaaatgaggtctgaactttgaagtctaatttttcaaatgataaaagttgaaaaaatgcgcacacaaggtctctatttatagcctaagtgtcacacaaaattggagggaaatttgaatttctattcaaatttcacttgaatttgaatttgaatttgtggagccaaatttggagtcaaaattgcactaattgtgaatttcaactatggttcagcttactaatccaagatcaagtccaagattctccactaagtgtgcttaggtgtcatgaggcatgtaatgcatgaaaggtatgcattaagtgtgactatacgatgtggcaatgggttgtaacaagcaaattctcaccttccccttaggcttggacaaaaattaattggat

SEQ ID NO: 200600 - DNA, 316 bp, Glycine max
  unsure (1)..(316): unsure at all n locations
aacataggatcacccagtgaggtaaaagcgtcnagctaatgatgttaaaagaatcaacttcctctggaggcaaacacacgcttctaatatttcgtatctttcggttttcatgcaattaatcatttggaactagttgtctgatctgtacataggagtatatcaacctatctttgaatgtttaacataagggtttcaatttcttggataaaggactgaaaacaaatatataaaacacttttctgaaaaatagtctctttgctaagcggaatcctcccactaagcgcatcattgtatatgcactaagacgtaaatctta

SEQ ID NO: 200601 - DNA, 389 bp, Glycine max
gtcacctgcggctgaagctttttgaaagctgagctagctaccaaccactctcataactaagctcaccttcttgagaaactttcttaaaaagattcctaaagaagctagagcttagctacacatacctctctaatagctaagctcacctccttgagatgagaagctagagcttagctatacacaccctataatagctaagctcacccccatgacaaaaaacatgaaaatacaaaaaaaatgtccttactacaaaatgcctcgaaatacaaggctaaaaccctatactactagaatgaccaaaatacaaggcccagacgaaggaaaaacctattctaatatttacaaagacaagtgggctcatacttagtccatgggctcgaaatctaccc

SEQ ID NO: 200602 - DNA, 375 bp, Glycine max
  unsure (1)..(375): unsure at all n locations
cctgatattgagagaaaatgannnataaacacacattttgtttatctaagnanncagtacccatacttaacagaaaacacttatatcgctacaaaataaccataaattgggagagtttgatacaatttatacaagttttatacacaaaagttagtcggtttcaccgactaacaactcccccaaatttacagttgtgcttgtcctcaagcaaaaagagaacaactcacttgtcctcaagtgacaatgacatgcagtgactatgtacaaaggtgtatgcaaccaaagttactgattgcatgattaggggatggagtaaaatgccctcatcacttggctttcacaaggtatgcagttatccaaagagaagaataatac

SEQ ID NO: 200603 - DNA, 382 bp, Glycine max
  unsure (1)..(382): unsure at all n locations
tcttagaagctttgagatgacttctgggctgaggatcaactttgctaagagtcagtttggtgctgttggccaatctgaggtgtggtgcagctctgctgctacttatctcaattgtgcattactgcaacttcctttctgctatttaggaattccagtgggtgctaatcctagaaggaggagggtctgggatcctatcataaggaagtttgaggctaagttgaacaaatggaaccagagatatatctctatggctggtaggatcacactcatcaatgctgtcctaacagcactacctttatttntcctgtcctttntcanggttccttcagctatcattcacaggatttctgccattcaaagaccattccttttgtggggggaa

SEQ ID NO: 200604 - DNA, 249 bp, Glycine max
  unsure (1)..(249): unsure at all n locations
attcttctatgcaactttgatgcaccctcctaaaggcttgcaaggattctcaatacttggctggntgatcttgcaataagcgcaataagatcgagtattagtcaattctattaatctgcaccaaaactgaaggctatatacttagtgtgcatcattatcttaattgaatggtttaatagaacaaggtacatgtagaaacttctttctgtttgttaaagaataaattcccaaagctcatattgataaata

SEQ ID NO: 200605 - DNA, 191 bp, Glycine max
aagcctggtatctaacgcattgttcaaactctcctataaactagaggtgaatctaggatctgtatcagacactatgggagacgacacatcatgtaatatgacaatcttcactaatgtataaagaggacaacttctctaaagaaaacctaatattgacggggaaaaatcggaaaaataatgaatctgtcaac

SEQ ID NO: 200606 - DNA, 305 bp, Glycine max
  unsure (1)..(305): unsure at all n locations
actatatgtataatntggtatgttttatcaccttatatgcttacgttttcaacatatatgatgaggttaaacctattgtggcggcggaactcttcctggtttgaactaggtgtgtgatatgtaacacacgacgttaaaagggcgtgcttctcttntgcagcaatataatcacacacttgaggccctactccaggaggaaatggcaaggcatgcccctctgtatggtgctggtctggaggctttatcattgaaagagttggaaacactatcaccaattcatgaagatgggcataggcagatccatg

SEQ ID NO: 200607 - DNA, 377 bp, Glycine max
tgcgtctaatctaaaatggctgaacagacatgtgcctgttttgcttctctctcgcgagaaaagctacctgtgtagagttctatgtgtatacattctgtactttaaatagcatcaaaatataaaatagttcgtactaaaagaacagaagttgattaatgagaaatctctaactcctaatacttttataaaatcactctttaattattttttagaaaatttaaacaaactgaatcaatatggcgaaatatcacaaaatttgattaatgctaatccctaactcttaactaggagggctttacttaacagcccaggccaaatgttgagtgaaaatgagatattattggtgactaacaacagaaaaagtcttcttttctttt

SEQ ID NO: 200608 - DNA, 460 bp, Glycine max
agctattgaaattaaagtttggaccggcactccattatttaacactgggatgcaattactagagagtaaaaactctggtaacttagaaaattttgagaaaaacttttcttgtaaaacaaaattgcgctatggttggtttttgaaaaattcttttcaatactttccttgtgaaaacatcttctctataaacttgagtcttcttgatgtcatttcttgaatcttgaaattaatcttgatttaatcttgatcttgaaattgatgactcaatcttgtaatcattctcttgggctttttgtcatcatcaaaactacttgaatcaacttgatttatcatcatgaagcttgctttacactagaaacgtctaagaatctgcacgagtatcaaagcaacatctaatgaagctcatgtcgttttcaaggcgtgtgatacgtgagtccattgcatcgaagtgatcactgat

SEQ ID NO: 200609 - DNA, 415 bp, Glycine max
  unsure (1)..(415): unsure at all n locations
tcacagagtgagatcattctttatgacatacgtgggaacactttttataggnacgcnccngcagcngggaggacgacctcaagctcgcatgcccacagtttttacgccatacccaatgaccttcgttgatagacatcaagtacgatgcattttgatctgatagctcacctagtctaatattataaagattacctcttctattggcgaaaaaagtaagaacacatcactgttttggatgatacactcatccttgctataagaaacatcatattcactgtcagataattgagttatgcgtcacatattgtggtttaacccttcacaaataatacattatcnataacagaatatggagggatcctatctacacactcatgtattagccatctttattggcttcaaaggtcagtttccc

SEQ ID NO: 200610 - DNA, 443 bp, Glycine max
  unsure (1)..(443): unsure at all n locations
agcttattacaacaagtattctttgcctacccagccactattgattctaatacaaatcaaaggattagttgtttagcttgcacactgactaacacgcaatcgtcttatagacgaatatacaagctcaatacttggtcttttctcttaagttggcttgagagctttacaagaatttatagaaatatatagagagagatttatatagaaagaattgaatataagcacatcggttggtacattatgtcttcaaagcttctagtatttatagaccttcttcaagaagtgcttggtgtctctaaaccaatggatttcttcactttaacttgtatttgaagaatgtgtccgttggagcatttaatacttgcattaaattcacgcacgttttcatactggaaaaccactctttntagctatcatgtngaacacttcagcaagaaaccact

SEQ ID NO: 200611 - DNA, 379 bp, Glycine max
  unsure (1)..(379): unsure at all n locations
ntcctctntatttcgttcattntcgatttcttttcttccgtttttaacgcgcttttaccgnttatttaagtcgttttctcacctaataaatgataaaatgaatttcaaccgatcatttgtgttgtaatctcatttaatcacttttaaaatgaaatctaaccgatcgttcacgctataacctcggttaaacaaaaaaagtaaaataataataaaataatcaaaatatcttgaaaaataataataaaataaacaaaatatctttgaataaaataaaacaaaaaaaatcaatcggacgttntttctttggaagtttccttgaatgaattgattaataaccaaagtgaaactaagactaaaatagactcacaaatcaagtttt

SEQ ID NO: 200612 - DNA, 350 bp, Glycine max
  unsure (1)..(350): unsure at all n locations
agctntgaatgcactattcacggagttgacaagaacatcttcagactgatcaacacttgcacagtggccaaagatgcatgggagatcctgaaaatcactcatgaaggaacctccaaagtgaagatttccagattgcaactcttggctacaaaattcgaaaatctgaagatgaaggaggaagagtgtattcatgacttccacatgaacattcttgaaattgccaatgcctgcactgccttgggagagaggataacagatganaagctggtgagaaagatcctcagatccttgcctaagagatttgacatgaaagtcactggcatagaggaggcccaagacatttgcacatg

SEQ ID NO: 200613 - DNA, 485 bp, Glycine max
  unsure (1)..(485): unsure at all n locations
actaagctggagaggtgcttaatggaggaaaagaagaggtggagtaatatagagggggagcacgaaattgaaggaataaaagaggtatagaagtggaactttgaagtatgtctcacaagactctcattcatcaaagttacaacaagtgttacacatgcttctatttatagactaggtagcttccttgagaagctttcttgagaaaacttccttgagaagcttctttgagaaaacttccttgagaagctagagcttagctacacacacccctctcataactaagctcacctccttgagaagcttccttaagaagattcctaaagaagctagagcttagctacacatacctctctaatagctaagctcacctncttgagatgagaagctagagcttagctacacacccnctataatagctaagctcacccncatgacananaacatgannaataataaaaanaaagtccttattacaaagacaactc

SEQ ID NO: 200614 - DNA, 480 bp, Glycine max
  unsure (1)..(480): unsure at all n locations
gatcttaagtcacctgggctgcagcttaagctcaaggaagcttgaagaagttttggcttttacatgcttaactcccttgagtggcatttgtattggttgttatcttgattggtgcatcttagtacatttgatatctttttggattgtgcatcatcataatgcatgtgaagaaaattttctaagttagaaaaatttcttcagaggcaaaaactctatgttttaataaattacaacctcgttttaatcaattacagttacaacaagttgtctgaagcttgtagagttaagtctcatatcggtttaatcgattattgatatctcataatcaattacacttgtgtttgaggcaatgactaatntagtcaggagtctctgctttaatcgattaccaagtggattaatcgattacttttctcttgttcaagtgtgtagaggtgaacaagaacactntatatcattacttangtcatctaatcgata

SEQ ID NO: 200615 - DNA, 412 bp, Glycine max
  unsure (1)..(412): unsure at all n locations
cagctataagctactataataaaaagctctcacttgtcattttacatactaatgaataacattaagcctttaaccaagttgtagcatgagtgaatactacaacatcctttggtaaggaatcttaaatcttacatgaatcacttataaataaacaaagacactctaagcttttcttttttgggaatngattacaattttgctttgtagttatatgaatttcaaaacacactccatatatagaaaaatcaactggaattgtaatggcaataataatgtattttaatcatcacttattattaatttgtatgtaaaaaaatatacaccttcagacaatattttcttaaacacgtctcgagtttaagttatataaagaagaaaaatgtgnatgagtgagagaagtatactaaaaatg

SEQ ID NO: 200616 - DNA, 393 bp, Glycine max
  unsure (1)..(393): unsure at all n locations
ctcaagaaatcaaatgggcattacgtttctcacggatgtccgattcgggcgcataagatgtcgagaggctcgaatttgaacaacggaagctcttgagaaattcaaatggtcataacgtttcacacggatgtccgattcaggcttataatatatcgatacgctagaaattaaacgtcggaaactctcgggaaattcaaatggtcataacgtttcacacggatgtccgattctggcacataatatgtcgagaggctcgaaatngaacaacggaagctcttgagaaatttaaatggtcataacttataactcggatgtctaattcaggcgcatcacatatagaggcacttcgaaatgaaccaaggaagctctcgagaaatcaaatggttataactt

SEQ ID NO: 200617 - DNA, 393 bp, Glycine max
  unsure (1)..(393): unsure at all n locations
actaagctttggacacatgtgatcttttgggatnaattaaaaataggtttgtttttttgtctacacgcaccgcccgaaccgaaccttggtgtgaaaagttatgaanatttgaatttatngagagcttccgttggtaatttcgtgcgtccttatatgtgatgctcctcaatcggacatctgtgtgaaaagttatgaccatttgaattcttcagagcttccgttgtcaatttcgagcgtctcacatattatgcgcccgaatcggacatccgtgtgaaaaatattgaccaattgaatttctccgaagcttccgatgtttatattcgagcatctagatatattataagccttaaatcgacatctgtgtgacaatttatgaccatttgaatttctcga

SEQ ID NO: 200618 - DNA, 426 bp, Glycine max
  unsure (1)..(426): unsure at all n locations
cacctgccgctgcagcttagctcgctggcagccttagttcctgtgcgatcttttaccgccctaagggggctattttcctataaataggcatgatgtgggggtgttttaaggggttataaggttcaacactgagaggaattaatagaattgagagaaaggaagaagaaagaaaggaataataagaagaaagaagagaaaacgaagctgaggcgctcgaatcatgaccttgatcaatccctacgcctattctagttntgtgttctttgcgcgaccgtcagttagttctgcttttaagaattgaatatgatctatgtaaccttaggggtcccctctattatgtgcatattcatcttttccatttatcatcggagatctcatttttacttgcaacagttaatcctaactgatcactattatctgaaaatt

SEQ ID NO: 200619 - DNA, 329 bp, Glycine max
  unsure (1)..(329): unsure at all n locations
tctatccctcacagatgaaaatattaagactagtcctcataagtataaaaaagaaggcaaattccgtacattcttaactttcgctcgttaacattaaagaattcctctacttggcatacagagatgtaaatgtcatgaaataatttctcacatggcattcattagttgttattgaggcaatgacttataaggacatgaatgttagtataatttggctctgttactacttcaatcanatccaaacaccaggtcatttatcgtttgtcacttcttcttttttcaccttcccctttccgcttttgagacttncaacaaccttcatagccacc

SEQ ID NO: 200620 - DNA, 492 bp, Glycine max
  unsure (1)..(492): unsure at all n locations
aagtcacctgaggcatgcaagctntaaataggctctgtaattgcgacgttcacttagtgccacccttgcgcttagctcgagtaagtggatttgagcttagtgccagtcctgcgttgagcctggatgaagacaattgctgcgcttagcgcactgatctcgcacttagcgcatggccttgatattgatgctctaccaaattcttctgtcgcgctaagcgcgctgaagctgcgcttatcggtggatgcgcacttagcccactaatgagctaagctcaaatgtcacttttagcacttcatgacttagcctctttntcacctaaaattgcacatatttcatcattaaattcaatggaaatattctagagacaactttaaccataaaacaagatttatntacaaaattactacanaataaccataaatnggnggaactatancagttntngaaaatngtttctatacaatagttagtcgtataagacgaataatattg

SEQ ID NO: 200621 - DNA, 428 bp, Glycine max
  unsure (1)..(428): unsure at all n locations
tnctacttcttgtcaaaacaactttacactcttctttgggattnttctttgtatttgctccaaagctgttggatgacttctcaacaactgcttggcctgttgacccacctagatctcaaggtttttcagggttgactcagtactcttatggttggacatggtcacttgcataaactaagctactgtctcctccagtttggtggtcctttgaaaaatatttggcccttgttgaggtggcctgttggaaggtccaccctggtccttattgaattgattgccaaggtgtttctgttaagatctcaagttgcttataaagcaacttattttgcgccaacaaagcatcttgtgatgataacttcaacaagcttttcttggtgggttgatgcactctatctcgcagaatggcgtgatcacttgcagacatattc

SEQ ID NO: 200622 - DNA, 451 bp, Glycine max
  unsure (1)..(451): unsure at all n locations
agcttatcacagactcatctatgaaggagactttacttttcatgaccaattactttatttcaagggtcgtctattcaatacctgatcatagcttcaagtctagaaacattaacaagggtttatgtgaaatctatgtcttcttgtgggttaaagccttgagctactaacatagctttgttccttactaccttatcttgttcatccaatttatttctaaatgcccatcttgttcccaagatgcttttgttctcaggcttgggaacaagcatcttgacatcatttccagtgaactagtggagttcttcttccattgcaataatccaattattatatgtgattatttcatttatcatcttaggttctatttcaaacatganagcataagacataagatctntaaaatgatgatctggttntgactccttcagtctgatcttcaataatctgatct

SEQ ID NO: 200623 - DNA, 254 bp, Glycine max
  unsure (1)..(254): unsure at all n locations
tgagatgaggaagtgtagaagggtgaacttcctgctnttattcgttgtccacagagtggtacctggagatatgtcgcgggggtcatgagaccttggggacgtcaggtggggtgctattgcccaaaaccaagcttgaccaatcccgacccaacccgggcataatcggtcagtgagaacctgtgatgtacctaaacaagcgagctcctggcagtcaacagataaaaggaacacagaccacaaagcaaggaggcttg

SEQ ID NO: 200624 - DNA, 365 bp, Glycine max
  unsure (1)..(365): unsure at all n locations
cgagctctcgatatgttacgggactcaatcagacattcgagtaaaaacttattgtcgtttgaattggctcaaagattccacattcaatttcgagcatctcgatatgttacgggactcaatcagagatccgagtaaaaagttgttgtctgtttaattgtctcagagtttcaacattcaatttcgagcgtctcgatatgttacgggactcaaacagacatctcgagtaaaaattattgtcgnttgaattggctcagagcatcaacattcaaattcgagcgtctcgatatatgacgggactgaatcagacatccgagtaanaagttattgtccgttgaattaactcagagcttcaacattcaatttcg

SEQ ID NO: 200625 - DNA, 353 bp, Glycine max
  unsure (1)..(353): unsure at all n locations
cgaatatatcgagacgctcgaaattgaatgttgaagctctgagccaatacaaacgatactgactttttactcggatgtctgattgagtcccgtaagatatcgagacgctctgaaatgaatcttgaacttctgagctaattcaaacgacaataacttttttctcggatgtctgactgagtcccgtaacatattgagacgctcgaaattgaatgttgaacctctgagctaattaaaacgacattaactntttactcagatgtctgattgagtcccgtaacttatcgagacgctcgaaattgaacgttgaagctccgagccaatacanatgaccataactctttactcggatgtct

SEQ ID NO: 200626 - DNA, 470 bp, Glycine max
  unsure (1)..(470): unsure at all n locations
agcttncatgcattccatgactccaccatcttattcttatattcaaaagttcctagagcataaaaaatgtggaagaaaaacactgaatatattagacactgaactttgatggaaacccattttaacttaatatttgaacgcagcaaaaaaatagcttacctttgtgattgtggaattgtgtagcaccttatgatcaattgcaaaccataaattattcatcgtagcccagaaagagtcagcattggtagacatgccaataatctccctatctgatgtctgagcagtaacaataggagagcttttatttggaaaactggaacagtttgttgaagaacactccttagacgttgagtcagaagcttctaatactgctgcagtttcctcatccacactgtcaactctatttggaaacaatacttctaatatgaactntctttgngcatatggtaaatccacaaacacagcatctg

SEQ ID NO: 200627 - DNA, 437 bp, Glycine max
  unsure (1)..(437): unsure at all n locations
attacggaactataaaactcagcttgtcactaatttagaactggaatgcaatcttttcagcattatatttggggatatgtgacaccttataacgggaactattttccccaatgagtgaatgtaatggttatcctttctttccaatcattaagtacacaagaaaattttctgatttcatgcatacttgtggttgggtgagcattcagttcttgttagtgtattgatcctttacaagggtgtcaggtgggaaacccaatagctgtgtttccaattgaggcaaaagcttgtatttgatttccagtatgaaagagatctacaattatattaattgcatgttaaattgcctagagatagtcatcaattggactggaatgtatattcttngatgtngncactntggntntctcctggtgngaattanggaacatatctacttt

SEQ ID NO: 200628 - DNA, 483 bp, Glycine max
  unsure (1)..(483): unsure at all n locations
agtcacctgaggcatgaagcttgatgattacattntnccctttctcaagcaaattcttcttgacatcatcaaaatcttcatgatttacattctccccctttttgatgatgacaatcacctgtaggttaggagcaacaacaacaaaaaaatctatttgtatatagtttactcccccttggttttgcaatgtttgcttatatgagacagttgaaaatttcatatttttcatatataaaaagttgtttcataaagaatagataatttttcttactattttatcttttatctttctctccccctttgtcaacatcaaaaataaatcatgaatagagaggagaaaaatgttaccacttgttacaatgtatgagaatcaagtgataccaaaagacattataacaatcattcaatattaatcaagcaaaagcaagtacagtaacacatcaaccanaaacacaatncaacacaatcaatcaaatatacaat

SEQ ID NO: 200629 - DNA, 279 bp, Glycine max
ttttaaatactcttaattaatatttgttattttattcctttattaatatatatgtgaggggtagagggtgtcacatgtgccgctcggggaggaagtaatgttctacttcactttttgtctcttactctcaaaacctttggctctctcagttatgtgggttctacttaatggttaataagaaatctttgtaatgtatgttgctcgctgcgattcctaatgttggagtgcacctaacaaaaaattgtgcaatacattactgatcagagcgattgaaatatg

SEQ ID NO: 200630 - DNA, 453 bp, Glycine max
  unsure (1)..(453): unsure at all n locations
agcnttgggtcttttgatttaactatctttaacaaaaatctggaaaaatttcaattnttatttacttacacataatattacctgttatgattgcatgattacattgtcaaatcaaatttttttgtgcaatttgtaatctttttatgtggatgttgttttgaattggtggaatgtttgcaaaattttgagcaatttgttagtaattcttttattttcaaattgttggatattaatttaatggaaagacactgcattaggatatgtgatatcaaagaggtatgcgcttcaagcactgtatctcgttcaattatttgagagaaaaaaaaattatatgctatgtgtgtaattatataattgttatatatctaaatgataaataagtttgtcatcttatttatcttacatattaaattgtttaatcataacgaacgacctgattactatgggacttat

SEQ ID NO: 200631 - DNA, 354 bp, Glycine max
  unsure (1)..(354): unsure at all n locations
cttgtatggtagaaggtgtaagacaccactatgttgggtatttctcttataccgcaccttatgtcaaggtgatccaataaaggatgaggactgctcaaagtatgcaaaaaagttatcacgataagaggaggaaagacctggaatttgaggttggtgatcatgtattcttgagagtcactccgtacactggggttggtcgagcgttgaaatcccaaaaactcacacctcgctttatcggtcctttccaaattcttaaaagagtcatgatggaaacttgcttgtggggcttctatggaggctggatctttgagcttcaatggggtcctttaatggtgattntcaccatggagatgc

SEQ ID NO: 200632 - DNA, 348 bp, Glycine max
  unsure (1)..(348): unsure at all n locations
catagatngaatttgcaattgcatctcttctttcagttttctgtaacaaaaatgtgagaaagataaacatacatgaaagtacatcaagtgagaatgttagaggagctaatcttgattcttgagtcgtgaccaatgaccatacaaccaaaatggaaggtttaagattagatttaacattaaaaaaaaaaaaatcaaccatcaatatatggatgtatggtcaagattaacccctttcacttctcacactctcacttaataccattccccacccacgcatatatattgaaaatagagcattntgagtcatagagaatagaacgatgaaatgttcaaataatatacacacct

SEQ ID NO: 200633 - DNA, 346 bp, Glycine max
  unsure (1)..(346): unsure at all n locations
agctntattcccttaaccacgatgtctctttctaacacaagagaatttcaattttcaacgtacaaattctactaaatagaaatagacatatcatatgaagaacttaataatttaaacatatagtattgaatgcacaagaatatatgcctgcgtgatgggaccaaactaagtaaaggcacacgcagcacaactcaaagcaatggagagagttattatgaatgaacattgagaaaaaaggcagaggcagaaacagagaagcagaagaaaaccacactctnttcatggccaanatcattggcaggagcagaagaagaagaataacaacgactactacttcacaactatg

SEQ ID NO: 200634 - DNA, 295 bp, Glycine max
agcattattttgaagatttgactaaacttcgacagcatttggcattggtctctcagtacaccacatgacatcggtgaaattaatctctcgataatccagtatgcactcaaagaacaactctggatgcattgtaccgaaatttcatcacattaatcaaaataataataaccttaacgaatgaatctaacataaaaataccagtctccccaaactgtccagacggacaagtaaagactaaatacaatgactaatgcaaattgtccgctagaattattgcattcagtctcaaacggga

SEQ ID NO: 200635 - DNA, 427 bp, Glycine max
  unsure (1)..(427): unsure at all n locations
gatcttaagtcacctgaagctgcagcttgaagcaactaacgcattggttaatttgtgtacccagctgttcttgaatcaaaaatctgtacctgtcgtaagagtctatgggttatgctcctctgctgaccaccatacagacctttgcccttccatgcagcaacttggagcaattgagcagcctgaagcttatgctgcaaacatttacaatagacctcctcaacctcaacagcaaaatcaaccacagcaaaacaattatgacctctccagcaacagatacaatcctggatggaggaatcaccctaatctcagatggtctagcccttcacaacaacaacaagagcctacttctttctttcaaaatgctgctggcccaagcagaccatacattcctncaccaatccaacaacagcaacagccccagaaacaa

SEQ ID NO: 200636 - DNA, 425 bp, Glycine max
  unsure (1)..(425): unsure at all n locations
ctgcagctttggcatttgataaattgggtgagttttctctctgggttccttgntgaaccaattatcagacttatcaaggtaatccttgtggcgtctacccagacttatcttccttcaccggaagtggcgtctacccagacttatcttccttcactggaagtggcgtctacccagacttatcttccttaaccggaagtggcgtcatccaaatcttcgtagcctgtatcaagtgatccgttcctagtcaggttcacatcattacgggactcaatcagacatccgactaataagttattgtcgtttgaatttgctcagagcatcaacattcaatttcgagcgtgtcgatatattacaggactcaatcagacatccgagtaaaaagttattgtcgtttgaattgctcagagcttcgtataaattcgagc

SEQ ID NO: 200637 - DNA, 332 bp, Glycine max
  unsure (1)..(332): unsure at all n locations
gtgcgagctcaaccgaagttgtatttcggccgacgccggcattttgtcggccaggaaaacattatcccacctcggcaaanaaaaaacatgattcaccggtattgacagaaaaaaatgctggccttaatcggccaggaaagatgaccgatcgaggtctaaaaaagaagcatgaccggattacgccgatcgaacatttcctaatagatatcctccaagtattattcagggattgaatggaaaaaacaatagccgacatcggtagttaaatagccgtgactgatattntncagccaacattgcgcaacttctttcacaaacgctggccgataata

SEQ ID NO: 200638 - DNA, 438 bp, Glycine max
  unsure (1)..(438): unsure at all n locations
tgcagcttagaacagctcagaagtaatattccgccaataactatgatcatttctaccttacctattntccaatatggccttggtttgtgtgtttagattgccaccagagtcctaaatagacaatatctttcattacaagtttgcaacagtcccaaaacccaatttttgccgaaaccaagtgtcatgatttctatattaccaattttgctagctgttgatgttgcatcatagttttgctatgtcatctacctttggtctcatctgtttaccttacaatgtaggcaattctatcattagcctttttcaatatatagaattggcaacatgcaaacatatctaatccaagaaattccaccactaatagccagcctataatgcataaccaatgaagtcccccatctncaatttattccatcttctaattntattggtagttct

SEQ ID NO: 200639 - DNA, 403 bp, Glycine max
  unsure (1)..(403): unsure at all n locations
gctctggagtctcgctttgcgccttctcactctgatgatcccacttgtttctgttcaaactcatccaacaagattccgtgagtaactactctttgacttcgaggctttggctaacaaaataataagccttccgcctccttttttattaagttgttttatctccagcctttcaccaaaaatatgatgggaagtccaagcgctccaacctctttcccttagtcaagccatcgctctcgtgcggcttcaggaggagaagttttgtgacttacgtcatccaacccactctcatgcttactctctgcattctcttcggcctcgtncccctcaaccaaatatttcaccaaccccaccattacttctaccttcacccttattacccacaccaccaaaactcttcatacct

SEQ ID NO: 200640 - DNA, 427 bp, Glycine max
  unsure (1)..(427): unsure at all n locations
agctttctataaaaggtagccacattntccgacatcatgccacttattatcaattcgagcagcaataatactggttatacaaatctactttaaataaaatagaaaatacaattcaagtaaatcattaattcaaccttttggcttatctttgctaccagtaaactggtttcccatgaaacaaatatcttaacttgcaaggggaacaaatctggaaaatagtcctcttcatatgggatggttctaaaatctttcactgcattattaaaatcattatgcctacaagaagagtgagatgaatgatgaatcaattttctacttctgcaaacaatatgttcttagatatattggcggaagatctttcatcagtagaaagaagacttaagatatcattcatcgctattaaatcattgtgaataatatctaacct

SEQ ID NO: 200641 - DNA, 466 bp, Glycine max
tgcttctacagatacataatggtattcttggttgctagtatcttggttacaatatgttgtagatttttatctatttaaatgtaataattggcactattgaagcaaacctccacttataaaacagagtatataaaaccataatgacttttctcttaagttgaacactctactataaatacatagtaaactagtgtagttgttgaaaattggttcaactataaatgaatcattaaaaaatatttatattttagagttgatcaatttgtagagtgttgtaatataatattggtgcatgtttagaaatccttaagtttggagaaataacttaatttttcaaaagttcttcaagcagttgagttgttttgcggatctcacaactatcggaataaaaaagagattcaacaataaatgagtcttatcaagccttggcattccacctacataaatgtattagtaataatcttat

SEQ ID NO: 200642 - DNA, 461 bp, Glycine max
  unsure (1)..(461): unsure at all n locations
agcttgtagaatggctagacatgatacatgcacggtttggtttggttcaaggataaaaagggatgccccacattatttccatgacacaaaatgcaaaaaaatgatgatttggaaactttatgcaaaactggtcatgcatgcacctatgcggacactcaagtgtcaaatttttatggtcatgtgatgctagggctcaagattcatttcctctattntaatcaacccaatgtttccaaaatatgttcttttatcaatttgtgcattcatccgagtccatttcgggcgtccggngaaatttcacagcattcacccttcaggtgtagacacattttccaaaaattgtgtatgatcaatgaactttnttttggagatcgtctcttttcaaaagcatgtcgttttttagctagacaacttattntctttntntctccttctttnntttttatcattttatcattatc

SEQ ID NO: 200643 - DNA, 326 bp, Glycine max
tctacttatgtggcagggcgggtttccttcactttcttggttccaacgctagctctgaccactggtcttccttcccgcgatgcttcttttcatgtccgtctgagtgggcttatagcctaaaccatactttccacgattcccttgggtttttatcaagctagttatgccgccattgtctttgcctaaacccatcccgggttcatacccgttccccaacataactcgggccatcattaccgccgcatcggacagacaaggttgcccaaagagggagtccaccgaggaaatgctgaccacctcaaaagactggaaagcggtttctaacg

SEQ ID NO: 200644 - DNA, 466 bp, Glycine max
  unsure (1)..(466): unsure at all n locations
cttaatattttagataccatgactctgtctgtatgattcttctattgagggcaacctttcttttatagaacaagtggatattgatgtgggttggttgaccaacgacactgattcactgcttttgctgattcaattgtttgaaatgatgggaagtgcccggtttgtatccttatcacctgctatcattcaaggaagtataattatctggtgtcaaatatagtattttcattaacagttgcttccttactgtaattngaaatttgaactaagtttttggtcgtctttgatattccatattcctaggctctagctatgattcctgatctactggatggtcgggcctcccctttctctagagtgcatactttcgagttaaacatggatagaccttccttctnctttgntatacctnctaatgtcatggcctacttatttagtggaatctctgcatttgatttccatgaat

SEQ ID NO: 200645 - DNA, 424 bp, Glycine max
  unsure (1)..(424): unsure at all n locations
ctgcagcttcatgttctatgtgggcctcccttcctgatcttgtatcatcaccaaagttcgtttgaccatatttacatatagctttccattttccctctatattctttcttttgaagggggtcaagcagcacaagttaatcctcttttatttggacttcttttcacatcttcaacttcttctatatttggagaattttctgcttctttcaccaaattgctttgtgcgtcattagcaacttgtgtttctaatggagccatactattaacggatggatcaataggcgtacccattttttgtacaatacacaagtaacaaaatttacaaatatgagtcatgtaaaattgtaaatgcacaaaactaactcttatggctagantacagattttaaactcaatgaatcaggcaaactacaacatcacaata

SEQ ID NO: 200646 - DNA, 411 bp, Glycine max
  unsure (1)..(411): unsure at all n locations
atgccacactagactcaaaatatgcaacaaacactatacctaaatcagggtcacagaaattggaaaaaaatattttatccaagcacaaacttcaagccttattccatgtattggggggaagttatggctggccatatgggtagaggtgtcatatatgagcctgtatggaggaaaggaccttggactgctgaagaggacaagtgcttgatgagtatgtcaggatgcatggtgaaggcagatggaactctgttgctaggctcgcaagtaagaaacaccaaactntattcaccggtctcgttcttaatatatatgactggatattcacatctataagtgacaatatagcaataaaacaactgcaactgtgtcaacctctactgtcatgatgctacattctgttcaccgaagctc

SEQ ID NO: 200647 - DNA, 466 bp, Glycine max
  unsure (1)..(466): unsure at all n locations
agcttgacattgcgggttgatttacccttactttcactctagctattagncaattcaattaagaaagagaaatcccaaagagaaacgtccgattgattttttttcgctttattttactaaaagggtattttttgattattatattattattttacctcttttttgatttccaacgtggttacggcacgaccgaacggtcagatttcattntaacaganattaacggatattacaaatcaaatgatcggtgaaaatttattttatttttttattacgcgagaaattacttaaataaatgactgaagcacgttaaaaggaggtacggaaagtaaaatgaaacgagaataatagtacacaaaacaaatggggaccaccacgggtacatagaatgaattgaanaggtcgatttggggtacttactggttgaagaccanataacaatgaagaacgaatgatgaatgtcgaa

SEQ ID NO: 200648 - DNA, 346 bp, Glycine max
gaccttccagaagagtatggagttagcaccacttttaacattattgatttaattccttttgcaggtgaagccgatattgaggaggaggaactaatagatttgaggtcaaatcttcttcaagggggaggggatgatgcaatcctccctaagaagggaccagtcactagagccatgagcaagaggctccaaaaggattgggctacagctacggaagaaggccctatggttctcatgagtttcacggtagatttctgagcccatgggccaaggctggtgttagtaagtgaaaatgactcacttttgcgtatacaacttggataaatcgtatcaaactctcctacttcat

SEQ ID NO: 200649 - DNA, 457 bp, Glycine max
  unsure (1)..(457): unsure at all n locations
ctgtcatgtnctttctcggtgttccacacgtctgtggctcatttcatcctctattctaacttcaaaggtttaactttgaatgaaatgtatagttaaaaatgacctaacctaaattttaaattttgaatcaccaaggctttagtaatggacaatgaaatggccatttatgcatttactttttaggatcaacatatttgacatgaatactctacactaagtgtgtgttggtatagtggtcttagcagggaaattgtatttcaaaaggatggctgtgtcatcaaaactcctaaatttgggcagttttcctcttanataacaagttaacaaagacacttcagggactctaccctgtaagccacctacgtcatgtccttgtttatttataaaatgcactaaacatggattataagttaaactcatgtaagcatatccattctgcntaacatgttactataca

SEQ ID NO: 200650 - DNA, 395 bp, Glycine max
  unsure (1)..(395): unsure at all n locations
tagaaactcaagctnatatatgatgtactttctaacatgaaaatttctggactgatttattttaaatggatcagcttcctttttttctgagggatcttgtagaaataaagacttgaagggtgaaaatataccttttttttacttcgctaagaatattatattgaatattttttcctacccttgtttttacttggggtgtttttcatgtcttgaaaggtgggtttgataacttgatacaacaacaaagcttcatcccattagacgaggtcgattacatgaatcacacgacaccattttgacacggttaaaacccaaagtttcagtatatcgaaataaaagtagacatttgttttctcttctggactgcactatagngccatatttgtttatgttat

SEQ ID NO: 200651 - DNA, 387 bp, Glycine max
  unsure (1)..(387): unsure at all n locations
agcttgatacataaggagcgcacatcacctgtatgatttattattatcaatttaaatctataaagactgtttatattgcctacttagccgacagtgttaagtattgaaaatttctgttatttataatagtattgcacagtcaaagtaaaagtgattatatatatccatccatccatctatatataatctgattttgattttcaagtacaacaagcatttacacttttcctcatatgacagcgcttaattcagatcatacaaacaagactaataatcacaactaagacttgtatattttcaaagcttatgcttctttntttcgggggggggggggggcaactttggttcaatggcaagcaacgactcacatctctgatactttcaatc

SEQ ID NO: 200652 - DNA, 383 bp, Glycine max
  unsure (1)..(383): unsure at all n locations
actctangaagtttgcacaacggataaagagtgagcggaagctatattccggatagttatatttcaccccgagtgatatttgttttccctagataagcagaccgcggaaaactgctagtaaaagctggagcttttgcttcgatcacatttgactatttcactgattacaacaggcaaagatgtctctctggtgttgatctttctatgtttcgatcaaatgagtttcccattatgacactttctgaaatccatataattgaaattttataaagaaatgattgatgattttaaattgaaatttattcaaaatgtaatcgttgcaagctatgaaattacttgcagaatataggtatggtggtaaaaactattataagcggttatat

SEQ ID NO: 200653 - DNA, 371 bp, Glycine max
  unsure (1)..(371): unsure at all n locations
tttaacgacgggtaatcggcctttttacgacgattctcaattgtcattataatcaatggtggtaaaagtgaatttcaattaatgatgggtccaaaaaacaccatcatctaaaatacaaactttctaagacgggtctgatataataaccgtcttaaaaaactgacattcaaagtcgggtataatagaaccggcttagaagaataaacattctaagacggttattacatcaaaatagtcttagaaagtttgtcagaccctgctttcttagacgattctgatgtaataaccgtcttagaaagctgacatcctttaatattgtaatgttttctcttttagtcccttntactttaagcgtatagaaaccataatta

SEQ ID NO: 200654 - DNA, 216 bp, Glycine max
tatataagtatttgttgcgtaagtatttataaatggattatataaactatacgctgttcttataaaatatccagtagaatatgttaaaataagactacaaatagtttataataagggtctcttaaacacatatagaagtacttattatagagggaactgatccatcatccattaattaaatgcgctcatatgtaactacccccacttaatatacat

SEQ ID NO: 200655 - DNA, 434 bp, Glycine max
  unsure (1)..(434): unsure at all n locations
agcttngaatagtcatcgcttcattctcgggcgatagattatttcaccaaatgggtcgaagcggcttcttataccaatgtcacgaggagtgtgatggtcatattcataaagaaggaactgatttgtcgatacgaactccctaggaagatcattactgataatggcaccaatctgaataacaaaatgatgcaggaaatgtgcggtgatttcaagatccagtatcataactccaccccctatcggccaaagattaacggngctgtggaggctgcaaataaaaatattaagaagattattcagaagatgacggtgtcatataaagattggcatgagatgttgccttttgccctgcatggatatcgaacctcgatacgaacttctattggngcaacgccgtattccttgtgttatgggatggaatcgatactcccatt

SEQ ID NO: 200656 - DNA, 345 bp, Glycine max
  unsure (1)..(345): unsure at all n locations
gtgaaagctttgcgagattcctcacggaaaacgttacggaaacgtttcggaagcgcctcggcttaaatttttttcacggaaacaatttttccaagcaaattcgaaagagagagaagtgcctaaagggctggaccccttccttcttgccttcctcccctatttatagcaaaataggggaggtgtgtgccgcccagctcgcccaggcgagctcagctcgcccaggcgagcagggttgcttcctncagaagcaaccgccttctggaggaatcttctgganggcccanatgggcctgngtgctattntcaccccccattttactaagtacacccctctctngctatttt

SEQ ID NO: 200657 - DNA, 363 bp, Glycine max
caaatggacttaccttgaatcactcctcttataccccttctgagccttgtttcccttttcttggttagaagctcactacaaaccttaagtgaaaaaccatgatattaccatatccttaaggaaatttggagctttggaattgttctgggaataagagtggggggcttttgtttcattggacaacattgtttggtggctatgcttcatgatgaattttgggccatacttgatgtacattgtatattgagtaaatggtggacatgctgaatgaaatggtgtttattaaaggctatagagtaaaaaataaaaatcgaaaaaaatatgttcaaaaaagaacaagaatagctataaagttgagtgaat

SEQ ID NO: 200658 - DNA, 386 bp, Glycine max
  unsure (1)..(386): unsure at all n locations
agctttacatnagattttagtaatgacccacaacctatcatttaaataacttaatgccattaacctatggaattaaaagaacttaatggttgagtgtaactgaaattgtggcaaccaaaagtctgatgcctgggttgccaattgggcccttattacaacttgaactaaacctaactaaagcctttttagttgattaacccaaaacatattgttggtcagccaactttacaaggattaggccattatttagacaaactgaacactctaaaattgagacaaagtggtgccatttagtcctcctccatttgggccatgatacaactcacaaccttggacttttctccttgaaacttgggcttgtattcaatagtatggtcacacttgtg

SEQ ID NO: 200659 - DNA, 369 bp, Glycine max
aagctttctcccaaggcctaaatgacatttcaagccagcattaactcacttttttcttcttttaccacagaaatcagacttagcctttcaactctcaaagcctcactctttttccactcataacaccacattctcactttccaaccctagggtaactctatatttcatctctaacagtgttccatgggcacatttcagcatacaaacatcacaaacatcatcacaaaaccctaaaacagaatgggtatggctaactcacccaaacatggcaatttcaacgagctttcaacacaagtcttcacaaataatcatcacacagcagaaacctagcaagactacccatcatatctccccagaccctaatcccac

SEQ ID NO: 200660 - DNA, 410 bp, Glycine max
  unsure (1)..(410): unsure at all n locations
cattcttggtggcccgctccttcttccatggcttattccctaatggatgacacctcctctcacctcttctcctttgtcttccgctacatctccatggtggaaaatcaccattgaaggacctcattaaagctcaaagatctagcctccatagaagctccacaagcaagctttcatcaagtggtaatcagagcacaagagcttcaagttggtgttccttanacctccattatttttatggtttaccttctcttgcattattgtttcttcatttatctccatgtatctcctcacgtgtcttgtgctaaatgtttttaacatgattctttagagtctccaccgattaaactcgctatagacgctagatttgattntctatggatcanaattcttggtattggtcttgagccatg

SEQ ID NO: 200661 - DNA, 447 bp, Glycine max
  unsure (1)..(447): unsure at all n locations
aactaagcttttatccaggctcatctaggtggggaagccacttctttcatggctttatttcagngganggcgccgcctcttacctcttctactttgtcttccactgcatctccatggtggaaaatcaccattaaaggacctcattgaagctcatagatccagcctccatagaagctccacaagcaagcttccatcacatggcaatttgatagaaatataatttacaatggcctaactaatgagattaccctcacccatccttggcactaaatttgtgttgcatcctcaaacaccttcataggtcaaggatagtaagggctngtcttcaaaggccaacgggaaaggaacagaggaatatgatttcttcaagaagattgttaagaatgagaatcatcttgcaacaaacagtgatattaaaagaacactccttcttaacaatcttctacc

SEQ ID NO: 200662 - DNA, 250 bp, Glycine max
ggttcatctccatgtggtgtaaaagaagcccttttaagcataagcgagaaggaccgatcgataaaccgacactacataatcaatgaaaaagaattcaagcaacttggattgaatctatcaatccccgtaaaaaaaatcacagagaggcatctgcacctcggtaacaaaaaaaaaaagggcaacggcattactagaagtctcttaatagtggaaaaaccaatgaacaaaggtaaccaagagaacaacgttg

SEQ ID NO: 200663 - DNA, 361 bp, Glycine max
  unsure (1)..(361): unsure at all n locations
tgcatatatataatatatttnaangcctacatcctcttcatctagcacagtttgtttgatcttaataaaccaatatttcactcgtgaatatctgtactgttttcgatctgaattataatacacagcattgatggacccaagtcgtgccttcaaattgcacagcaacttcgtattgagctgttcaccacgaaagtagtccataacatgacaagaaatcaactatgtcaacagcactctgaaggactacatcgaaaagagcaccaccaatggtatatagatctggcatggttggaaagaaatggcctgatcaataagaagaaaggattgtgataatcgaaagtgaagctaaattatgtgaatg

SEQ ID NO: 200664 - DNA, 462 bp, Glycine max
  unsure (1)..(462): unsure at all n locations
tgcaagcttcatcaagtggtaatcagccacacagagcttcaagtaggtgctccttanacctccattaattttttgctttaccttctcttccattggtgnttcttcattntctccatgtatctcctcacatgtcttgtgctaaatgttgttaacatgattctttagagtttccaccgattaaacttgctataaaagctagatttgattttctatggttcaaatttcttgttcttgttcttgaaccatgaattgtgttgagtttacgttcctttgagttttgtcatgttattttttgtggctgaaacctaaaccatataattcttacaaaaataataaagtagaagaacacctcaaaaatctagagtgacttgctcacctatcgtagttctgcatagaagcatgtctagtcataaacttgcacataagattcttatgtgngctgaatttatttcttgttctttg

SEQ ID NO: 200665 - DNA, 374 bp, Glycine max
  unsure (1)..(374): unsure at all n locations
tatccttatggcttgccttcggacttcactccccgtgcctctctgtttatatttaagccaagcccctacttctgaggggcaactcccgccttatgacgactatcccgggcaagacgatgaggaaggagatacccatctcggccccctgctccacctcaaagatccgtccccacatgaactaccccaaccgaacatagtctgccatatcccggcctcacccacacccgtaaaagaatctgttcccttcgcggaagataagggaaagatagaggcgcttgaagagaggntaagagcagtcgtgggccttggcaattacccattcttagatatagcggatttatgtctcgtgcccaatatcgtcattcctcccaagt

SEQ ID NO: 200666 - DNA, 334 bp, Glycine max
tgtaaagctagttgttacaccacttacattgaatgcaaactcatttaccccacacttactagccctgaagagtccatggcttgaaagctccaaaagaggatcaaaatctggctttgaagcgttgaccaaccaacaattcagaagaagatcatctttcctgatcccgcacgtggtgaatatccgaagaagcaatagccataaagtcattaccttttggaacaaccgaggaattcaaatcaccccagcattcaacttcgtgaatatccattctcacgccacagaaatgtgtaccccctgctgatagagagactaaccgaaccgaatccaactgatg

SEQ ID NO: 200667 - DNA, 386 bp, Glycine max
  unsure (1)..(386): unsure at all n locations
gcttctcaaaatgttgatgagaacgctagattaaatattatactancttcatcttaancataagacacttcttaaaaatttatttatttatttttataagatatctttctaactgcttgatgtataaaatatatatatttcttatatatccttacttaaatattctttttccaaccattattaagaaataagtaagttgatagaaaaacaaaatattttacaatcaatagataaataattaattaatttaatgcgataactaataattnttttaaggatctgaatctattggaataatcttataattatgaaggaaagagattataatatgatacgctgttgccttactattattagatattgaaaaagaggcaacttttcactat

SEQ ID NO: 200668 - DNA, 386 bp, Glycine max
agcttcttcctattttgcttgactccggggtgatgtgaagaagaaaagggttcagccccttatgcacttctctctctctcgaaatatttgaggaaaattagttccgtgaagaaaatcccagccgaggcgcttccgtaacgtttccgtaacgtttccgtgagtcattacacgaagattctcgaccattcttcaagattcatcggtcgttcttcgttttcttcagtcttcaacgggtaagtacctcaaaccgagcttttcaattcattctatgtacccgtggtggtccacattttgtttcatgtatttttattctccgtttcatctgctttttatacccccttttgacgtggctaagccacttatttaaggcatttctcgcttaatct

SEQ ID NO: 200669 - DNA, 413 bp, Glycine max
  unsure (1)..(413): unsure at all n locations
tctttgaganaacttncttgagaagctagaacttatntactttcttttctctcataacnaagctcacctccttgagaagcttccttaagaagattcctaaagaagctagagcttagctacacatacctctctaatagctaagctcacctccttgagatgagaagctagaacttagctacacaccccctataatagctaagctcacccccatgagcaaaaaacatgaaaatacaaaaaaagggccttactacaaagactactcaaaatgccccgaaatacaaggctaacaccctatactactagaatggccaanatacaacgcccaaacgaaggagaaacctattctaatatttacaaagataagctggcttatacttatgccatgggctcaaaactacccttaggttatgaga

SEQ ID NO: 200670 - DNA, 442 bp, Glycine max
  unsure (1)..(442): unsure at all n locations
agcttattaagagggcttctncacacactttctcttggcttctttgagaagctttctcaagaagcttctttgagaaactagatccttatctatccccacccctcttttaacttaattaacctccttaaaaataattacggatgaaaataacgcaacaaataatcacacatctaacataattactaataatctatatatatatatatatatatcagggtgttatagatctatacacctgcttgatcaaccatcatcataaatcatccttaggaagtgatggggaacaagtatatctctaccactgccacagtcccatacttgtgtactcaaaacattcactaggtactctgacaccaatatcaattgtcaatctaacatataatcctattatgaataatcaaccgagcgaaatccccaaaaagatataccttcttgctcatca

SEQ ID NO: 200671 - DNA, 306 bp, Glycine max
  unsure (1)..(306): unsure at all n locations
aaatggtgcattttggctcatcccattcaagtaaaaaccacattcatctaaaaatactgtgttctttcatatgaagtttgcggctagggttgtcgcttgcttctgaaaggttgtgacatgagatgtgaatgaacccatgaacaaatgcttaggatggtggctgtactggatggctctaagcctatccttgcctcttttatgaatatgcatatcatatgagctctntatccctcatttgttcatgcttcaacatgtgcacgcaaagtgtttgatgaaatgccacaacggtaaactatgctctctttt

SEQ ID NO: 200672 - DNA, 444 bp, Glycine max
ctgagctgcatctttagcgtgaagaaccgcctctctctatctgctatcgggcttgcagctcccctggttcttatacgaagtcactgaggtacttgggcttgtgtgtgttgcgttttggtctgttattgcctctgctattagtagtcatgacttcctcttggttggaattattgtctgatgctgttatctgtgtgatatctggtactgctgttagtgtgttgctatcatctgcatggtttttttttatcgggaaaaatatataaatatttcattatgtaaatagtgatgaagtaccagaggcactttgtacatagataggatcccatagatatggttccttagacacaactattcagtttaattaggaccatattatggctatacatctgctaaggcccaatataattatccttagtgatcaaaaaccttgtcgtgtacattcat

SEQ ID NO: 200673 - DNA, 217 bp, Glycine max
catcttccggcaatacatccgaagatgccccttcggacatgtcgtccctttgtacttatcaaagtccggtactttgaacttgggaggaatgacgatattgtgcacgagacataaatccgcttaatccgagaatgggtaattgccaaggccctcgactgctattaacctctcttcaagcgcctcaatctttcgcttatcctccgcgaagggaacagat

SEQ ID NO: 200674 - DNA, 304 bp, Glycine max
gacttttgaaacagcactttaagatgtgactttgaaaacttttaaaaaaacactttagaatggactttggaatttattttcgaaagagtcactggtatcaattccatgatagtgtaaagattagacatctcatatgtgactccttatgttaaatttgaaatcaaatgttagaaacactggtatcgaatacaagattgtgaattattaacaagttcgaatgattgaaaagattatcacagttggactttgaattcgaaataaccgttaaaattggtatgagactgatatggaatgatacacttgt

SEQ ID NO: 200675 - DNA, 218 bp, Glycine max
tattggcattcattccttacaatcagaaaccacaaacattgtcaatattatgaaatataagacctaacctcaacctacacataggcacatcacacaacaacatgcaatgtcatctataaaaatagagcatcatccatgaaaataataatggccataaacctcctacgagcgcgtgacatgcaatgaaacacctgacatttaaaccccaatgaatcccc

SEQ ID NO: 200676 - DNA, 469 bp, Glycine max
  unsure (1)..(469): unsure at all n locations
agcttatantatttggtgaccacagaccatcctcccacagttgttatcgagtgtccccccgtccatttactagtctttttcctaatagtgggaatgagcttccatcccattcccttgcttcctctcttctatccccatacattcatattctatattttatttggaggcagaagaagcatacgagaagcatgtgtgaacctagaccatagttgcacttttatagtcttttctgaacaaaattctgaaatatgatattgagttgagttcatgtttatcccaaaagaatatagaggttatgaaaaggaaagaattatggtggacatagaggaaatggacataatgttatggccataagttaatatttacacggcagtctgtatagtcttgaatctgcacaataccaacgtagaccaattgtttngattcataccctntatattaattactggctaggcgtggctactcacct

SEQ ID NO: 200677 - DNA, 470 bp, Glycine max
gcttttggttcaagaagaagaagaagaactccatttattccggcttgtaaggattgtaatgaaatgattggaaaagtatattatatgcttgaaatgcaaaacaaagccttgcttttatagactcttcatgtctggtcaagacaaccatttagaagagttataacttttagaaaaacttaaaaccaatttaaaaaagtcaaaaacctttttgaagagctacatcttttgatttattcataaaccagtactggtaatcaattaccaaattagtataatcgattacacaaagcttttaagtaaaaggatgtgactcttcacatttgaatttgaatttcaacgttcaagggcactggtaatcgattaccaaacattgtaatcgattacatgcttttgaaaataattggaaccgtgtaaattcagttggaaaaccttttcaaactcattttgctactggtaaatcgataccacaa

SEQ ID NO: 200678 - DNA, 384 bp, Glycine max
  unsure (1)..(384): unsure at all n locations
actcagcttgtaagataatttattgagcttgagatctaatcaaaattaaatttattcttcatctgggctctgtaacaaaagaggaataaccaaactgctatgatatcaccttaatgtggtgtcctggactgctatgatatcagcctgttgtgaaaatcaaaactacatggatgcccaacagttnttcagccaaatgaaataagaaaatgttaaacctaactctactaccattttcacacttctctgggcatgtgcaggcccgtcactgttaaagataggtgaagagatacactgctcttttatcangctgcaagaattaagggtcagttatggatgggtggaagtactttgacaacattcagacactgctctttcngattgatg

SEQ ID NO: 200679 - DNA, 471 bp, Glycine max
cagtcacctgcagcatgcagcttttacacccattaactaactccagctctcacctcacattaaaataacaattgacttgtttttcccattgaactttcttcatgaaatctccaaccacaaaggttgtgttaccatcatttgcttattttcaagtgacttaagtctctttccccttgatgtttcaaacaataatttctttcctagggtttttagtcaaggatcagccgaattcatttttcatttcacataataaaataactttcatcttttaagcaattgctttaccaaaatatctctttatttttaattacaatatgtactcttgttgttgccttttggcaatcacaacatataggatatgcactttcccacaaaggaacttgtttgcaaagacatttttttagctaatcaatctcatattctactgagtcaaacctagtctctatagtagatcaaactatataggtctac

SEQ ID NO: 200680 - DNA, 384 bp, Glycine max
gtcacaagagaatagttcaagatggtgataaatactattggtggcgtgaggcaacctaatgccttgtgttgatatttagaaaattgttttgaagatggagggaatccgttgttgttgtatattaattatggcaatatggcacctacctttgaagggatatttttttaaagttctaatggtcctaaattcattataattagtaaggaatgtcactggtttctctgatgaaagacttatggatgtcgttgacgtgaaagaagttacttgacatttttttaccataaacatgtatatggtagtgatggttgtgttaataaactatatgatcttataacaccatgatgggggagacattttcatctttacatttattcttaggatcat

SEQ ID NO: 200681 - DNA, 356 bp, Glycine max
tgagcagcagcttgttctttttcgttggaaatggcatccaccttgcttccaaacactttgaggtgagagatcccgggctttcttccactccatgcttcttgtggagtcttctcatgcacgcttcttgttggagaacgatttgctaagtaaactgcacatgccactgctttagcctaaaacttcttcggcatcttcttgctcttgagcatgcttcgcaccatgttaagtatggaccggttctttctttctgctacatcattatgttgcggcgatcttggcactgtcagtgggcgaccgattccatggtcttcacaatatttgatgaacttatttgaagtgaactcttctcctcgatc

SEQ ID NO: 200682 - DNA, 432 bp, Glycine max
aactaagctggtttgggcataacaccccacctgacgtcctcagggtttctgaatctttcgacatatctccaagtaccactctgtggtcaacgaataaaagtaggaagactgactcttccacactttctcacttcaagcttgtaggattatgggggacccggcatatggggtactaggtgcaagtcgactctccacatccacaaatcccacgttaatccaccattcccagttgcccaccttcaactgagctcacgtatctccacgtagcccatatcctcattcctctcaacaccggagtcccatcaatcccttcaagctttcacaacattcaagaagattcacatccaacatcatgaactatcataaaccaagaatacagggcagatgcagaaaactctgccaaaacacaaccaataccacaactttcttact

SEQ ID NO: 200683 - DNA, 445 bp, Glycine max
  unsure (1)..(445): unsure at all n locations
agcttntgtgtgtttcttatcttttttattataccttaaaactccctcatattggatggtgacacttcttgtacttacaccatcaactctaatataccgctgtcaagagaaaaaaaattccttcatccacaactatgatgataaaaaagatgtgcataaattttatttggttatgtctatagaatatctcaacaaatatttactattacaaggaacattacaagttttgtgaacaaattaacctaagaaaacacttcttagtacaagtttgtgaagaaaatttataatggagaaagccttacgatttatttggaaaacttgatatagataattattgagatatttggtagatgtaggtaaaagttggtcaactcccataaatttaagtctttcattatttntatttggggtgacttaatgtgcaatcatatcattntaataatca

SEQ ID NO: 200684 - DNA, 339 bp, Glycine max
  unsure (1)..(339): unsure at all n locations
catgctggtttcaaaactgggggataacccattaccctcaagagggtaatatccactattaaattacaggcaagcttatgaaagattcaccataaaatttcttttctggctaactcctaacanggatgtttaaactaaaagtaacttgatcagaatttaattgattttcttgaagtaactctaacggaatggcagcctttcatgttggtgacatctctgctttatgcactaccagcatattctaggaagaaaattaactgatagaactttatacatgcaagatctggaacggacactttgccaattttactatntaatcataaacaacttaaacattac

SEQ ID NO: 200685 - DNA, 429 bp, Glycine max
  unsure (1)..(429): unsure at all n locations
accttgaacataccctctctcttctctttcanaaccatgctatgtgctcgcgactggtctctttcttcccttcgcaacttgagttcactattgctaccccatagagctccgcgaaatttgttccggccatactctttcttgcgagccctcttggtctcttgatcaagggctcttgcaataattgcattctctttccgtaacccggcacactcctttcgaacgtgtgtagcggccaacttgaacttctccttggcaagttttgcctttcctaactcgcttttgagagtttggacttcttcgtcctctttcggtgcttcaaaactctcttcgctgacgactgttaacttggcgagccaatctaaacctcgtatatgaactttcattcatttcgggcacccaccaatgatgccattacgaatgcctctaagc

SEQ ID NO: 200686 - DNA, 231 bp, Glycine max
gagtacgtgagctcagttggaggtgggcaacactggatggtgggcaacacgggatggtgggctatatgtgatttgtggatgtggagaatacgtttgcaccatcgtccgactgccatctagtaccacatgtgatgggtaccccatgatcctacaagctgaaaagaggaagtgtataagggtgagacttcctgcttttattccgtgaccacagactggtacctggagatatgt

SEQ ID NO: 200687 - DNA, 417 bp, Glycine max
gctttactttgtggagggccgcttccttattttcttgtctccaacgcgaattttgaccattgttcttccttcccgcaatgcttcttttcatgtctgcctgagtgggcttataacctaaaccatacttcccacgatttccttgagtatttatcaggctagttatgccgccgttgttttttcctaaacccatcccgggttcaaaaccgttccccaacataactcgggccatcattaccactgcatcggacagacaaggttgcccaaagagggagtccacggaggaaatgctgaccacctcaaaagactggaaagcagtttctaacgattcttctgcggcttccacataaggcatggaggatgggcagcttaccaagatatcttcctcgcctgacacgatgaccaagtgcccctccacta

SEQ ID NO: 200688 - DNA, 338 bp, Glycine max
  unsure (1)..(338): unsure at all n locations
tgttttctttaccttctcttccattgttggttcttcattnttctccatgtatctcctcacatgtcttgggctaaatgttgttaacatgattctttagagtttccaccgattaaacttgctatagaaactagatttgattttctatggntcaaacatcttgctcttgttcttgaaccatgaatggtgttgagtgtaagaccctttgagtgttgtcttgtgtatttttgtggctgaaacctaaaccatataattcttacatagatagttgagtctaagaaacctcanaaattacatgacttgttcacctattgagtttcttcatgaacacatgtctgtca

SEQ ID NO: 200689 - DNA, 334 bp, Glycine max
agaaagcgagatagttgttggctgtgatattagtgaccagcccttcggaaacttataccgagatattttgggcgacatgggcctagttcaaaacttttaatatcagagcccgatgaggctcggagcttatgagtaactctaacagcgagaccctgggcggagttctgttgagctggtcgataaccttgaattcgctctgctgaattatacggaggaactcgctggcttctctagcgaacctccttttaccatgcttttcttcggagaccttgtgcggaatatattattcaagcgtgggtgcttgcatcgtgtcattaccacttttcctctcctg

SEQ ID NO: 200690 - DNA, 339 bp, Glycine max
  unsure (1)..(339): unsure at all n locations
ctagaaatcaagtgataaaagtgatcataaattcctgtatatttgtggagaaacgcacaatatatctatacacanatggttgttgcttgcttgaatcttgatctcacgtattgcattgtcatcatcaaaaagggggagattgtagatgcacatgccctcggtgttttgatgatgatcatgatgaagaatagcaaatgatgcaaatgattcaagaatacaagccacaacatcaaagatgatcactagtacattangaaggaaattcctaattgatataacaaaatgtttggccaagtaatgcatgttaaaaagagttcttcaagagatttactctctgga

SEQ ID NO: 200691 - DNA, 450 bp, Glycine max
tctgagtcacctgcggcatgcaagctttaaggaagctacctagctatcaactataatcatgtgtaacacttgttgtaactttgatgaatgagagtcttgtgagacacaactcagagttcaacttctctccctttttcttccttcaattttgtgctcccccctctctctttctctccctctttcttttcctccattgaagcatccttccaagcttcttatccaaggctcatcttggtgatgaagctcttttttccatggcttattccttaatggatggcgcctcctctcacctcttctcctttgtcttccgctgcatctccatggtggaaaatcaccattaaaggatcccattgaagctcaaagatccagccttcatagaagccccacaagcaagcttccatcaagtggtaatcagagcataagagctttaagtaggtgctccttaaacct

SEQ ID NO: 200692 - DNA, 467 bp, Glycine max
  unsure (1)..(467): unsure at all n locations
agcttgtctcagcgtttacgcgaacacactcttttcttgtcagccatcgctagcaagtaccaagaagaattaaatctagccacggcccacgagcacaatgtggcggacgagtatgcccgagtttacgcggaaaatgaggctagaggaagggtgatcgactcgttacaccaagaggcaacaatgtggatggaccgatttgctcttactttgaacgggagtcaagaacttccccgattgctagccaaggccaaagcaatggtggacacctactccgcccccgaggagatccacggacttctcagctattgtcaacatatgatagacttaatggtctatataattagaaaccgctaggaagtttgtattgtcgctcagatcttgactagttataactttctgaataanatgagtttatcccacgttnttactccaaaaatcagtgcgaatcaagtcacttccgtatttta

SEQ ID NO: 200693 - DNA, 305 bp, Glycine max
tatcccacacaacatattttttctaccgagtcacttctttctcttacaaatcaaataaatatgttggaaaaatgtgcacacaaacaaattatatcgtcatacaaatagatttaacaggtaagcacactatctttttatctcaggatatacaagggaatgagagcttttataacttaagaaatacaagaatgagagcttgaaggttagagagaatatgcaattcaaaattggatcttcaactcttcaggtatatataagcttctttaaacaattaatcgtgtacaaacggtcttaatttgcatcta

SEQ ID NO: 200694 - DNA, 451 bp, Glycine max
  unsure (1)..(451): unsure at all n locations
agcttnctaattcttctacaagccttttctgtttcgcccatcaacctnaaaacttgttccacttccttctatcaattcaaagttaaatatcccaaaagattatattgtttctcctaacaacgtcgatgctataaagcctgcctttcttattcctactaaaataacattaacttgtactaataatgactagtgtcaataaaaatgaattatgatttcacattgttaaaacaaaaaaaggtgatatataattaaaactctatatattaataatatcaggaccgggaaaatttattaatttagagagttattaatttatcgataaattaataattattaatttaaagagtttttagtaattatactatacatatcagacaaaaagaataattaatctatgtctattaagaatacgttatagcgaaccttgagactcaacctaaattagtaacta

SEQ ID NO: 200695 - DNA, 334 bp, Glycine max
  unsure (1)..(334): unsure at all n locations
taaaccctagtggtanttgactaacgatatctacaatatgtattattcaagatttgcgtacccatatctttttgtgtccaacataagtaatacccttagacattctgttcttcttatggatgcatctgaacttgaagtgtccagacttaccacacaagtcacatttgtctgaaatagactatgacttggaggatgttgttcctttttcgaagcccaagccacactggtcatggagatgttgatggagattcaaaagagtgtggacagtatatgaacttttcaagaactttacagagtctttagttagacatgcgaacttcttcccttagctttt

SEQ ID NO: 200696 - DNA, 470 bp, Glycine max
  unsure (1)..(470): unsure at all n locations
atcctctgagtcacctgangctgcagcttatataaacttaacgcttcatctattgagagatcccaattagttgttgtctaataacttgggcgctctacatgtggcacattattgtgaaaagagagtgtggggaccaaaacatcttttgtagtgtatgttcaaagaagtacatcttgccggtgtcgccttgtgctcagagctgaatttctatgtacggttcaattacaacaatgttaataacacatgaaaaaaggaataaagtatgccaagacaaggcaattcanaacttccctcttgtgcgctatggcatgtgcgatttacttaaccatggagtgtactgtctgatgataacttctcaattcttgaggatcgagtaattattacattgccttgggactatgagccaagtgttaaagcacttgtcttcttatgactagatgctgaggtagcatcnccaatgattgatactt

SEQ ID NO: 200697 - DNA, 470 bp, Glycine max
  unsure (1)..(470): unsure at all n locations
catgccagctttgcttctacaggaccgattgatntctcgcttttaatgcctctcctaataacctggtcactgcacaaacttcacaaataggggccattccaaatataatgactatcatcgctcttaatcttattattttgagctttagatgctaagggaggaaaaatagaagcaaccaaataattcacaatattatcaaaccaaggagtggggaaggaatcaaaaatattatatataatgtacaaatggtcatccagaaaatcatcctgaatgggtgactccttagacgcacgctcaatcctactcatatggtcagccacgatgttctgtgtaccgcttcgatcactgatctcctaatcaaatcttggnccaaagcatccanctgataatctaagcttgatcaactttcttctcaggtacttcagagctgcatggtcagtatacacaataacacgagtaccaagtatata

SEQ ID NO: 200698 - DNA, 470 bp, Glycine max
  unsure (1)..(470): unsure at all n locations
agcttgnattaanactaatattctatggtaaccacacctactattggctctaaacaaatnaataagatttggtggaagtttgcacaatgactaatgtatgaacgtcttacggatgaataaatcactcaacactcttagtcttttctatcaaggtttattacgtattttgagagagttgtatctataaaaaaatttacaaaaagctttttacaaaaaagaatgaatgaatgattcacttagagatttatatcttgtttcttcaaagcttcaaccttcttcttcaagtatctattgtctcacaatggttggattcttcacttctttttttcatctaaagtcttgagcttgttggagcatttaatactagcattaaatgcacatgtcttcttcatgcnaagtccatgctgataggctatcatgtcttgtacttcacaggaaagtctctttctttagcataacatgattgcaac

SEQ ID NO: 200699 - DNA, 471 bp, Glycine max
  unsure (1)..(471): unsure at all n locations
agctataaaacaaatgcctaaatatcccaaatatgcatgtgaattangaagcatcaacaagaatcaagccaaggctattgtgcaagcaatcaatggggcaaaacacaccaaaagattatgatgatggatggctcaaattctcacaaaggtaaacttatcactttcaaattgagctttcaaaactatcatgacatgtagaggaaaaacaaggatttgaaatcataaaatgtcaagagacttttattttcagaacaattacccatttcttgaacatatcctataattcaaagaanaatatgcaaagttgtacatgcaaacagaattgacctanaatattaaactagaaacccaacatacttaanaacaaaactagcaagaccaaactaactaagagatattactaaaccaaaaccaaagaacacttccccccatacttaaacaacacattgtnctcaatgtagcacatataaa

SEQ ID NO: 200700 - DNA, 454 bp, Glycine max
ttaccttttggtcctcctcatagttgttgcacgagaaaacatgctctattttcatctcccactccaaggagtccttcggatcattctttcctttaaagggaggaatggtgagtttaataccatcaattcgcttttgtctaagaacaccatcattccctcttctcctcctttcttctccattaggatatctattctccatttgatccaacctctcatggagcgcatcatctccgttgttcattaacctctccaaatttttcatcaaagcttgcatttggaattgcgaaagcctcactccatcattaagaattgttcctgccatctcaaacaaacaaatcaaacataacaagaccattattagtggttgttgaataccttactcactcaagtgtatcacacaattatggcttttcttaatgaaaacactcttgcctttaccactctaattcccctt

SEQ ID NO: 200701 - DNA, 370 bp, Glycine max
ggaaaaagacgaaaggaaagaatataatacaacagtcacattttcattggaagctgaacagtgaaggtgaagaaactctatgcgaaaatgcaaattccaccacaatttttttttcagccaccaaccctcattgtgcaaaaaatgacaaatgaaactctgaacaccatagttgagtgaaaaagaaagtgtatgtactaacactaacaacataatatatactgaaatattatttatttatattgacttaattaaatcaatatatataacttaaatgtcagtgataattatcctaaaacttaaccttcttaattaaaaacttgtagtcattgacacagcgatttaaaaataacttatttaaccctgacaaagt

SEQ ID NO: 200702 - DNA, 437 bp, Glycine max
  unsure (1)..(437): unsure at all n locations
gcttgtaggaatatggggtaccctcacatgttgtactaagtggcggncgggcgatggtgcacaacaagtnttccacattcacaatgcgcgcataaacccaccatcccctggtgcccaccttcaactgagctcacgtactcccacgtagcccatattctcgtttctctcaacaccgggtccccatcaatcctctcaagcttccacatcatccaagcagaacaacattcaaacagcacaagctatcacagccaagcaaaacagagcaaaggcagaaaactgtgctcaaacaccaaccaaaatcacagctttttctcgcttaaagaccccagtaacaattccttcgatccaaatcgntaaccggtggatcgactcgaaaattttactggaagtctctaatacataagcctacattgtgacgcgtgggatctactanaaaa

SEQ ID NO: 200703 - DNA, 357 bp, Glycine max
  unsure (1)..(357): unsure at all n locations
tcaacccagtgtgttcaaataattctcttttatcaagttacgcacacatccgagtccattcatggctttcggaaaaatcttcattgcattcacccttcaggcgcacacacatttttctcaaaaatctttttatgttccgactcgttaattggcggtcattntctttcaaaagcgtgttggcgtttaagattttttcttttagctntttctttcaatcaattctttcaaaaaatntacaataggtttgtaaccccttaaattttttggcatttagacaaaccatcacanagtacatacgacaatatgctagaaacggtgaatnttgtcaaaatgagatacaaattgacttaaagccta

SEQ ID NO: 200704 - DNA, 430 bp, Glycine max
  unsure (1)..(430): unsure at all n locations
gcttagaccaagcactaaatctatgtatctaaacccctcaatttagtggatattcaaggtttgagaagtgaaaatgagaatggggtaaatttggagcaaactctcacctcacacaagtctataaccttaatctaaacttgctcaaactggttttacgcctaaaattccaccgaatcaaaatttgactcctcaacacccaatttaccctagaaatggctcttgccttcactttggtcattcatttttcccctttgcacagcccaagctntcccacagtcctaaatgacatttcaaactaggattaactccctttaacctccaattaccaccaaatccagaattaacttttcaaactctcaaagcatcactctcttccactcatagcactacattctcactttctaaccctaggttaactctacccttcatc

SEQ ID NO: 200705 - DNA, 358 bp, Glycine max
  unsure (1)..(358): unsure at all n locations
tcgagaaccatgaggcattccctagctcattgagaagttctttgatgatcggaatggaaaagatctcttaccgtgattgaatgagtgccctatatcaacaacatacgcatgtntcattttttctttacacaatccggaaagaaaagactacgttggcggatatgctggaatccgcaactccatacctgattgtcaatcttcgtcttctaaaagtgtgggtatctgtacggtctaatgttcacggagttggctgcagggaggagggtgatatgatgatcgtgttgtcgcgggggaggtaatgatgaagtgtttgggaatatggagtggtatctgagttgcagttcgttaatggcgagaa

SEQ ID NO: 200706 - DNA, 375 bp, Glycine max
gctttgatgcaacatttggagacgtcatgtaacacacgagatgatgcgctccatgagagggtggatcaaatggagaatagagatcctaatgaagaagaaaggaggagaagacggaatgattgtgttcctaaacaaaaccgaattgatggtattaaactcaacattccttcatttaaaggaaaaaatgatccggaagcctacttggagtgggagatgaaaatagagcatgttttctcatgccacaactatgaggaggaccagaaggtgaagctcgccgccacagagttttccgactatgctcttgtgtggtggaacaagctacaaaaggagagagcaagaaatgaagagccaatggttgatacatggacggagatg

SEQ ID NO: 200707 - DNA, 337 bp, Glycine max
acggacctatgaaactaagcttcacattcaatttcgagcgctccgatatattactggactttattctacatccgagtaaaaagttattgtcgcttgaatttgctcacagattcgatcttcaattacgagcgcttcgatatattacgggactcaatcgaacataccgagtaaaacttattgtcgtttgaatttgctcagagctgtgatattcaatttcgagcgcgtggatatattacggctctcaatcagacatccgagtaaaaagttattagtgtttgaagttgctcaaagctttaacattcaatttcaagcgttccgatattttacaggactcaat

SEQ ID NO: 200708 - DNA, 460 bp, Glycine max
  unsure (1)..(460): unsure at all n locations
agcttgtnggttaagtccacgattgtcacctgttcatgtaacaattgttagccgtggctatacgagacatcttgccaaacaaagtcaggttaacgataactcgcctgtgctttttcttccatgctatatgtagcaaagtcattgatctcagtcatgtttgatgagttggaaaatgaggccgcaattatactgtgccagtcggagatgtatttttccccttctttctttgacatcatgattcacttgattgtgcatctggtcagagaaatcaaatgctgtggtcctgtttatctaaggtggatgtacctcggtgagcgatacatgaagatcttaagagggtatacaaagaatctatatcgtccagacgcatctatttgtgagaggtacattgcagacgagccattgaatnttgtcagaatacttagagaaggctaaacctgtgggcttttgatctcggatg

SEQ ID NO: 200709 - DNA, 491 bp, Glycine max
acatgaaactcagcttgaggattatgggatccatacatgtggactatgtgttttgttggcgagggcaaaacaattctccaatcctcaaatcacgtataacccaccatcccctgttgcccacctcaactgagctcacgtactcccacgtagcccttatcctcgttcctctcaacgccgggtccccatcaatccttccaagcttccacaacatccaagtaattcaacatccaagcatcatgaactaatacagccaagaaaacagggcagaggcagaaaactttgcccaaaacacaattcaatatcacagcctttcttacttaaagaccctagtaatattctcttcgtttcaattcgttaaccggttgatcgactcaaaaatttcactggaagtctctagcacataaatctacattatgaccggtgggatcttgtagaaaacgttcagaacccaatcttgactactctttccacaaccagcaaagacacaacac

SEQ ID NO: 200710 - DNA, 307 bp, Glycine max
gctattgatcataagaccctcttttccactctatttaacgagtttaatagttatgtacagtaaatataaaaactctcatttccttaaaaagaattaaaaatttatatactgctaatccaataaaaattattattaaaataatttttaatatagttattataaaaattaatagatttattagacatagcgatatataactagatataatagcgtaaaaatattttatactgagtgtctaatttattttctcattcaataatgatatgaatttctctttattataactcttttccttgaaaattaaatg

SEQ ID NO: 200711 - DNA, 264 bp, Glycine max
attgttacattacacacaaatatactttgtttcagtttcttcttagattgaaatattaattatgcttgaagaaacttttataacaccaatttcctcaatctgattatctctatatctcatggaagatttttattaacaggtaatacatgatgtgattaaagtttcaattgttgatttttttttaaatgacctcttaatagccaattctttttttccaaccaaaacaaattggtctacacatccttaacaccaatatcttaccta

SEQ ID NO: 200712 - DNA, 424 bp, Glycine max
  unsure (1)..(424): unsure at all n locations
gcttagcaatcatgtnatttattagctgtccacgacttatacatcctcattngtgagttccagatgttccaccatctcctcagcaatggaaattgctgtatcagaattgatatagaatgggaaatggatattcctcgctccacctagagacatattaagtattaggcatatgtatctgcatattgcacagtaaaagaaaaaaagattcatctgaacgtaactcaccacaagcatttgcaattctcagtgtgagtgaaattgtactttcagcatttttctcccctcttagcataaatttgttattctcggtcatcctcacaagatcaaaaaatgaaacttgagaagtttcttcaattcttcccatggaggagccaggtgaagtacgcctggattaaaatctatctccatgggatgaggctcacat

SEQ ID NO: 200713 - DNA, 302 bp, Glycine max
  unsure (1)..(302): unsure at all n locations
atatgcctagatataattntctcagctgggaccaggaaaaaaggaaatagaaaaacccattcttcaaataatctgcttaactctcttttactttccttccatgtacctacttttcatgaaaatagtggatgccattaaatattctaaccaatttgtgaaatgaacattctgctgaccattttctcgatcagctctcgaagaacatcattcgctcctgagaatactttctaaccatcacataatagacatgatgctgagaggtgaaattacaatatgaaacaacatacctcccaactgctact

SEQ ID NO: 200714 - DNA, 402 bp, Glycine max
  unsure (1)..(402): unsure at all n locations
atactcagcattaggatgcacaggccaaagntgagtatatgaaaagattgtgttaccaagtgaaggtgcaaattaccaagaagaatgaaagctatgaccagcaagcccacaagaaaaggaaggaagtggttcttgaacccggtgatgatcctggacattngagggccaatgttttccaagaaggagggaatgatgagaatcctgaaactagccaaatataggctaaagacccaagtggagaatgacgaatgccccattggagaaagacgaatgcctcagtggagaaggacaaagcctcgagtggaaaggataagaccctgngcagaacctatcagactatattgtactgacgccagataattgacgccatataatagtctatttaattaaagattttgtgaa

SEQ ID NO: 200715 - DNA, 413 bp, Glycine max
  unsure (1)..(413): unsure at all n locations
ctnaagcttttgtcgcccggataaactatcatttcgtatcgcggcgctacaatgttattgaatcatatatcagcaataaatataattggcttgcgcttcaaacacgctgttgaagattaaagtattactacttcaaatggtgttgcggtgtcatcattcaagaggcgcgtcctttatctctttcctatgacatttaagttcgcataatagttctgactacttattttgtccatgtcatctatcatctatcatgatacaaacaaggccctgacaatgcctacgtggcattagcagggcttacgctgcgcactgtgagcccttctcattcccgcccacaaaggtctcatcacactgcatctattggttctgtcgcttagtgtagaccgcgcactgcgctcccctattttttcgct

SEQ ID NO: 200716 - DNA, 429 bp, Glycine max
  unsure (1)..(429): unsure at all n locations
gcagctatgcgcacactttttacgaacgtactcgcacaagacattcttatnactaagaaaaatgcacccatatacaatcaaggcaccttcgttacctagattattcacatgtacttccaaggtgtatttgttacctacatcacacacatttcctttgctaaattcacatacatgcatactctaagcactttggctatcaaaaattgcatacgtgcacatcttggtatttctcatacctatacatacacaaacttcatgatgaatcttgactatctacacaataaggtgctacatttcatgctttnttcaagtgtttttactacctaaagccgcatgcaaaatgaagtatattttcttttgcttactaaaaacgtattcaaaataaaaggtattnttgtaattgattttctttacataacatgcaacata

SEQ ID NO: 200717 - DNA, 243 bp, Glycine max
atggcttattctctagaagagggtgcatcctttcacatcttctcctttatcttctgctacaactccgtggctaaaaatcaccattgaaggaccttattaaagctgaaagatccaacctccatagaagcttctcaagcaagctcccatcaaccaagcaggtcaatgaatttttccagccaatgaaacataaatgcataaatattatcatttggtcaaaaggttattggaaaactctgaaaacta

SEQ ID NO: 200718 - DNA, 358 bp, Glycine max
  unsure (1)..(358): unsure at all n locations
atgcatatacagctacagacgtgttggaattgaaacatactgacatttgtgggccatcttatacaccttcatggaatgttcaacaatattttatatcattcatagacgattactccagatatgcatacctgtttcttatacatgaaaagtcacaatctctggatgtgttcaaaacatttaacgttgaagttgaanaatcactccacaaaagaattaagagtgtcacatctgaccgcggtggtgaatactatggccgatatgacagctcaagtgacaacatccgaggttctttgcaggtacctagaggaatgtggaattgttccacagtacaccataccgacggtacctancatgaatg

SEQ ID NO: 200719 - DNA, 379 bp, Glycine max
gttgacagaattgattagcccatgaatttcctctggggctgaacaccacttagcgatggcctttgctttggctagtagtcgcgggaggtcttgacttccatttaaggtcaaggcgaacctatccatccacatggtcgcttcttgatgcaatgcatcaatcactctccctcttgcttccttctcggcatacgcttgtgcgaagtcctctactagtttttgttcatgggtcaaagaactggttaactcttctttgtactgccctattatagctagcatggtttctccgtggcttctaagtgttgggccaaactcctcttggatcttgagcaagcagctaactcctcctttaagaccatgccttgtactcgtgactggtctc

SEQ ID NO: 200720 - DNA, 372 bp, Glycine max
  unsure (1)..(372): unsure at all n locations
taaagcttctcattctttgataagttaacaaagtagaaacacatgttggtttactaatatttaactacttgtgtaggaaatgatattatgtatagttgaaacttcttttactctaccataagttgcatacttgttaaagacttattgcgtctttgaagttgttcctttgaagcccttttcaccattttgaaagctgcaaaccaggtttcaattaatgtctaaaatttgaactattaaattcttaattgtgcttctattgtgacaccgtagttgataattgattatggttntctagtatttgtgttctataattgaactattaaattcttatttgttctatatatagagattgagttgtagttgcaatatata

SEQ ID NO: 200721 - DNA, 357 bp, Glycine max
  unsure (1)..(357): unsure at all n locations
tcctttagtgcgatatatgagattagacgcatatatggatgtttatanggtangagcacatgatgtgtttatgacattacaaacttcattgttaatgtacatccaaaggcaacatcactaatttagntgttattttctcctccatcatccagcaccgntaatgagataactatagcttaataccaagttgaggaactacaacaacatgatgttagaaccaaagacatagaagatgtctaaccactcaaaatctcatagntntgctaataacaaagatattaaactttgacgaggtttattaagtgttatatgttaaaatgcatgcaatatggatacaagtattgtgttcatacctta

SEQ ID NO: 200722 - DNA, 400 bp, Glycine max
  unsure (1)..(400): unsure at all n locations
gcttgaaacgctgaagctgantcgcgnttttttattgggatgcgactctggaaaggggtggaaagtttaattcagggttggctgagattcatttagagaaggttcaggttagcgatgtgggacttttgggggtttctaagtgtntgaagttggagtctttgcaccttgtgaaaacacccgagtgttccgacgtgggactctgcgaagttgcggagaggtgtaagatgctgaagaagcttcacattgatgggtggaggaccaacaagattggggattgtggcttgatgtctgttgccaaacactgtcctaacttgcacgagcttgtgctgattgctatgtatcccacgtacttgagtttggctgccattgtttctggttgccacggtttggagagggttgc

SEQ ID NO: 200723 - DNA, 375 bp, Glycine max
  unsure (1)..(375): unsure at all n locations
atanaaactcaagcttttgttgcacagaattagatgcaaacctaccccgcaaggtctttgtatataagactccaagaagaatgggccagagattcaagggaaggccctatggttctcatgagccttatggtagatttcgagcccatgggctaagtatgagcccgcttatctttgtaaatattagaataggtttttccttcgcttgggccctgtattttggccattctagtagtataaggttttagccttgtatttcgaggcatgtatccaatgcatcaaaacgtataccaaatataaacataattaacataaatgaaaaagtggtcattccaagtttaaagggattgatatccaaatcacatgggtgactctaaa

SEQ ID NO: 200724 - DNA, 394 bp, Glycine max
  unsure (1)..(394): unsure at all n locations
agcntaatattaatgattgggtctggtcttcttaattttgcatggccacttntgaatttggcactgtgggtgatgttcttacttcttagtgacggctctctggtcggacgcagaaaattataattttagaaagcatgattctagttacagcttctgccaaatactcaatttggagaaaccatccaagttttgggaactccgaaatatcttgatatgtatgcactcttttttctctatagattaaatttctcttcattgtacttctataaaccaaacaacaattattatcggctcttattctactcacataacctatttctaatctacccaatacaacgtacaagacactntataattctcagaatggacaaaagacaaaattacttaatataaa

SEQ ID NO: 200725 - DNA, 305 bp, Glycine max
agcttgctctaaaatacattgactttgtttttatgggaggaggttatatgccaattttgctttaagagtaatgtcccacaaaaactaactttccaaatgtttgccttcgcaggaatggcaccgaggaagcttgcctcaaagaggtccaagaaggacaaggcggccgaaggaactatttccgccccggagtacgacagtcaccgctttaggagcgttgtacatcagcagcgcttcgaagccatcaagggatggtcgtttcttcgggagcgacgcgtccagctcaaggacgacgagtatactgattt

SEQ ID NO: 200726 - DNA, 221 bp, Glycine max
tctatagaggctggatctctgagcttcaatgagatccttttatctgattttcaaccatggatatgtagcggaagataaaggagaaaaggtgagaggaggctccatccactatggaataagccatagaaggaggagcttcaccactaagagagtgtcatggataagaaccttagagagaaaacttcaatggaggaaaagaatgagagagagggggcgggggg

SEQ ID NO: 200727 - DNA, 460 bp, Glycine max
  unsure (1)..(460): unsure at all n locations
agggctgcaagctatgaaaaggggtgtttcaccttctcgctaagacaatctgttggcttagcgagcgtccgctaagcgcaatattcatgggctaagcacgaggaagattctagaagaagatgagctgtacaggttcgttaagtgcaccgcttcatctcactaagcgcaccactttagttcatccgctaagcgagaaaggcacgtgctaagccaaaattcactaatgtgcgctaagcggtccataattgcgctaagtgcacgagcacgaacaaggccacctatttaagcctgaaatcagattttagagggggagtttgcactgagatccagagctttgcatttctagagtttctagagagagaaagggccaagttctagagagttntgaaagattntgctatgtgaagatctgcagagaccagagctggaaacaagagtcagttngagagcttgagatgag

SEQ ID NO: 200728 - DNA, 406 bp, Glycine max
  unsure (1)..(406): unsure at all n locations
gtttagtctcagatgatgcagctgagtttgtagctacctcatgcactcctctaatgactatagcatcatttctggcgctaaattggtgggagttggaagccatcttctcaattaaatttctggcttcagcaggagtcatgtctccaagggctccaccactggcagcatctatcatacttctctccatattactgagtccttcataaaaatattggagaagaagctgctccgaaatctgatggtgagggcaactggcacatagttttttaaatcgctcccagtactcatacaggctctctnncactgagtgtctaatacctgagatatctttcctgatnggtgtggtcctggaagcannggaaaatntttctaagaatactctcttaaggtcatcccagctcgtgat

SEQ ID NO: 200729 - DNA, 409 bp, Glycine max
  unsure (1)..(409): unsure at all n locations
ggagaatattaataggctctttttgttctccaaccaggtagcttcggtacagatttttctcaatggcctgtctcatcattccagtgagaccttcccccactaagttaaacaacaaaggggctagagggtccccttgtctcagacctcgagtaggagcgaattctttagtcggactaccattaactaaaatggaaatagatgctgattgaaggcaagcagcaatccattgtctccatttagtacagaagcctagtcttgacagcatgtagtccaagaaagaccaagatactgtatcataggccttttcaaaatccactntaaaaaccataactggctgctttgtcttcatagcttcctccaccacttcattaaggatcagaattccatgaaggatatgtctatcctttat

SEQ ID NO: 200730 - DNA, 335 bp, Glycine max
  unsure (1)..(335): unsure at all n locations
gggtgaaaaccttgngaggttcgatctgggttacaagctgtttaatgctgccaagaggaggatttctttggaaaggaaagaaagaatattatcccgtttacaagggaggggaccacaggtggaaagggtccctatttgtcacatcaacgagagctttgttagcgcgggatggatgcacgaagatcaagttgttgtgttggatgaagaaaccaatcaagatcagccaaattaagtgcagtcgtgttccccaggctttgaattgaagaactggcagatcatggagcgacctgagatttctgtgtcaaatccaatgtaatcaagtagtttggacccta

SEQ ID NO: 200731 - DNA, 298 bp, Glycine max
tattataatatttaataggtttatcatactacaattaaaattctatattatagtaattatatttaaaaaaaattataatattttaaaactatttgatatatcatttttgtacatcacaataaatgtaatataaattttttaaatatataaaaatgagtttcattcaataatctttttaattttgttcaattcattaaaacttggcacaaataattaatctatataattataattcaatgttagatcaataaaataatattttatataaatttattaactataaaaaaagtcactatta

SEQ ID NO: 200732 - DNA, 437 bp, Glycine max
  unsure (1)..(437): unsure at all n locations
gcaagcttcttttctggaaagctccttctctggttgttgtttagattaggattagggatggtgcttggtcttggatgtgcagttggtggattttatggctgatctaggggtggcctttgtggatgattgagcgttcttggttggtagggtggtgagtaatgggaaggactaatattggctgagtattgatattgttggggaggatattattacatgggattcaaaggggctagtgggaaatttggccatgtaggaacaacaatcacaacattgngtgctccctccttcttattccctccactcatcccaagtcttttattactataactcacattagcagcatattcaaatttccctattctctgacccacttcgatccttttcccaacaaacaataaatatgcgaaactttgaaggcatgtaacctacatcttctc

SEQ ID NO: 200733 - DNA, 412 bp, Glycine max
  unsure (1)..(412): unsure at all n locations
tgcggcatgcaagcttcatgatgaatcaaaggtgattcaattgtgttttgatgataaaaatgatgataacaaaagatgatgacaaaggtgatgacaaaaagctcaaagatcaatcaaagaacaactcaagtgaatcaaagatcaatcaaagaacaactcaagtgaatcaagaacaattcaagagttcaagataagaatcaagaagaattcaagactcaagaagaaagtttagagtcaagattcaaggttcaagatctcaagaatcaagatcaagattcaagactcaagattcaagaatcaagagaaggcttaatcaagataagtatgaaaattttttctcaaaaattgagtagcacatgattnttctcaaaacatgtttaccaaagagtntttactctctagtaatcaatca

SEQ ID NO: 200734 - DNA, 470 bp, Glycine max
  unsure (1)..(470): unsure at all n locations
cttgattcttggaacttgaatcctgttctttgttcttgattcttgaantcaacttttctcttaatcctcgaagtgtacttgattcaatcttgaacccattctttgattcttgatatcatcatctttggtatcatgaagtgtcctgacttttgagccttttttcaccatctttgttatcatcaaaactctttgaatcaatcttgattcatcatgaagcttgcttctacaatctcccccttttgataatgacaacttctgaaatcaagaaacacacacacacattttttcatagtcgatcactcacataaatttccattcttcccctttgttttngaatttatgcttcacttacaattaagttaattactcatgtgaagtcttgatttaatctctatttctctcccacttntgcatcaacataaaagtataagtgcgtaacaagtatgagacatactaatactactaatcat

SEQ ID NO: 200735 - DNA, 463 bp, Glycine max
  unsure (1)..(463): unsure at all n locations
cctgaggcatgcatgcttgtgcatgtgtgggaagtgctagatatattatggtccaagnnccaaagagttttgagaganttttctatgtgaagattcgcatagatgagagatcgaagcgaaagctatcttgagagcttgagatgagtttgtgagtgattgcgatatcctagaggtgaatgagacatcctcaccacttgtatttcttcaatcttacatcttgttcttctctgtgtagcacaggaggtctccggactatggaaaactaaatcctttgttggatcttccctatatgttcctgatgtaaatatacttctatctatgtaatgatgttatatgcgttctctgtgctatctgcttttcattccatctgagcttataggagaaggaaactattgcttgactaatcagttgcttccattcttgtggaagatactcatactcttattcatcgttacctgattca

SEQ ID NO: 200736 - DNA, 511 bp, Glycine max
  unsure (1)..(511): unsure at all n locations
tccttgagtcacctgcggcatgcaagctaacagggctgcgttggctgaactgtttctgtagctngcatggttgnggttagtgtctcttagtcaaaggtgatcgaggattgaatcaaccttccccgagagatcagagtacttgtcggagagcaaagcttgactgttggttagacgagcgattgcatcttcaagtctatccgtcgtcgtctttctggtagcgtggtcggccatggcgatggtggccgcagcaggttggaccagtgttaggtgggcagagggtgagtaaggaaaggaacgaaggaagaggaaagtatagcctttattcgaggcaaggaaaggcacctcctgaaaacaatgactgggtattaagtgtttgcatgccttttatntgtcattatgcaataatatatatactgcaagtaatacatgcacaacggccttaaccgtataacgaacctaacaactctaacgaccttttctaatacacatgtgcctatggttagctatctac

SEQ ID NO: 200737 - DNA, 439 bp, Glycine max
  unsure (1)..(439): unsure at all n locations
ngagtcagaaaaccatggtgagtaataaaagaaaaacagacgcatgttcttatgtggattcacaactgaagtatagtagcattaaataaggaatcactatctaaatttcgttaagaaacaatcatcaccaagcgtaatcgttctatatttaacgttaaacaaattttgggaaagtataaaccaatgtaaaacaaacacacttttattatacatcctctgcatatatataatctagaaccagaataattatattgaatgtgaatctcttaattgatttagcttatttttattcttaaattaaattttattttttattaaaacaattatgaatgagttatttattataatattcataatgtatatactncacaatgattataatactataaatcttatatatctaaacatttatttatgcaacatataactgttagacaag

SEQ ID NO: 200738 - DNA, 368 bp, Glycine max
tagcttggaaagagctattattcaccttcttgctatgcttatctgctggcttagcgagcgtccgctaagcgcaacactcctgggctaagcgcctaagcgcgaggaagactctagaagaagatgagttgtacaggttcgctaagcgcaccacttcatctcactaagcccactaagtgagaaaggcacgctatgcaagatagacgcactaagtgagaaaggcacattaagccaaaaatcactaacatgcgctaagcggtccatatgtgcgctaagcgcacgagcacgaacaaggccacctatttaagcttgaaatcagatattagaaagggatgttggactgggaatctaagctttgctgtcttgggttt

SEQ ID NO: 200739 - DNA, 451 bp, Glycine max
ttggagtagaaacatgggaccaactcatcttatatcaaaatggatttcatatctagtgcacgccttggagaccatacaatgttcctaacgatttcttattatgtgggccattaagtctatcatatgctggcaatagccgagatgcccatgaatctcttctggggcggagtacgtgtctgccattgccttggccttggctaacaatcggggaagttcttgactcccgttcaacgtaaaagcaaaccgatccatccacatgcgttgccttcttggtgtaaagagtccatcacccttactctagcctctttgatcgcgtatacttgcgcatactcatccgcgaatctatgctcgtgggccgtggctagacctaactctacttggtacttggcgatgatagctaacatgttgagctctgctcgcataacactgagacagcctctttggaccttga

SEQ ID NO: 200740 - DNA, 381 bp, Glycine max
  unsure (1)..(381): unsure at all n locations
acatattnctaaggctgaaagcaaaacatttgagctttcatgcatgtgtcaatgataggcttgtcgtcatacttttgtaattgtagctttaagttgtattttagtgtgatcattttttgtaaatagcaattcttattagcttgtgatcttatttttgttggttctaatacctttgagggggagatgaaaggaatccaaagttggttataggtgcattaagagataatagttatacctattcctagttatgattctttttaattcaaaactcagcctttctggattatacaatatcttgttctattctgctttctgcttggttaataacgaaatttcatctcaacaacttaacttagatgttttggctaatattaatataac

SEQ ID NO: 200741 - DNA, 407 bp, Glycine max
  unsure (1)..(407): unsure at all n locations
agctaacttatctcgctgtcttccttcttcttccatgctacttactctctctctctctctctctccctcattctcttcctccattgaagcttcctctctaagcttcttatccaaggcacactcttggtggtgaagctcctcctttcatggcttattccctaggggatggtgcctcctctcaccttttctcctttatctttcgctgcatctccatggatgaaaatcaccattaaaggaccttagtgaagctcaaagatccagcctccatagaagcttctcaagcaagcttccatcaagtgatatcagagcacaagagcttcaagtaggtgctccttaaacctccattaatctccattggtgnttcttcatttttctcccatgtatttctcacatgtcttgtgttgaat

SEQ ID NO: 200742 - DNA, 248 bp, Glycine max
tcctaaagggagccaatcccagtcactccttattaagaactagttcttttctacctctgtgtgcctttagttgaatacacccttgttcggatctctatcttggctctaaccctctcatgcaacttcttatcaaactctcaccaagattccccttctttatgtttaaaatacctgtccagtgggaggggaatgaggtctaaccatgtttggggatggaacccgttgacaacctcaataggggactgcta

SEQ ID NO: 200743 - DNA, 484 bp, Glycine max
  unsure (1)..(484): unsure at all n locations
ttaagtcacctgcggcatgcaagctggtgtcgcactgtcaactgacgttgtttattacatagctgnaagaagtagttgagctcaaagtctttggatgaaacaatgacttgaagactttggagtatttcttaaccatatacctatgaaacgcgataacacaagcgctattaatctaaccaagaatcctgtcatgcattctacaactaagcacatagaaataaggcttcattttctaagagatcatgtgtccaaaggtgactactactttgagttcatcgatagtgaacataaatagcagacatttgcacttaaccgtttgttagagatagattctttatattatacatgaactaggcatattgtatgcatctatcatagaataacatcttgtctgcataagagtgtgttaacattgtcactcatacattagcatcgttggtgtgcccagcgattggtcatgtgatactattttttgaaacacagt

SEQ ID NO: 200744 - DNA, 338 bp, Glycine max
  unsure (1)..(338): unsure at all n locations
agcnngaggactatacctacgactgaattctgtctngnanctgactaagcccggatncaaggtaggttgcagcaccggctccgcttccctaactgcactggaggcggttgcggtggctttatcctctatggttttttggagttctaacatgacctccgagatggaagccatttgatcttttaaggccgatagatcagccttcttctgttcctgcacgctctcttcattaaccatctttctggatcgagtgtataggggtgccttggggtctcttacgtatgatgaactccttaagaaataacaacggtgagatgccaccaaactgagttgcaatggat

SEQ ID NO: 200745 - DNA, 403 bp, Glycine max
ttttcttaagctttttctacaaccttgtctccccctttgtcttctatcaaaagccaaagaactcgaatatcaacacagatatgataaaggagtagaaaaatatataaatatcagagtatataacacaagaagccatactcacaaagaagaaatatattaaaccagaatccaaagaactgagaatgtcaacaaccacaaaacatccaagactgaaatttaaaaaaaaaaaaaccacttgatatataagcgaagtacttagcataataatgtatattctaaaaaactataagccaaaatacacggcttatatgagataaataatcaaaaactaaatattaacaagacggaggtggtggtggaagatcaaaactctgacgaatgtatccgacattctctttaagct

SEQ ID NO: 200746 - DNA, 340 bp, Glycine max
  unsure (1)..(340): unsure at all n locations
agcctagagatgtagagtatgatcctttcttcctttaatnnngantggcttcagatatatttttatgtggaggtttgagatgtccggctgctcatgtattatgttcttcctgaaacacttgatggcatggcttntgattctccagcggaatgtgattgttgttgagacaaagcttatattggtctgataatcagcaaattggtcatttagtgtggcaattactcacgtcctttgtgctcgctttagtgatgaggaatatttctacaatagatgtaaagcgaattctccttagcgtcgtgcttagttaaggacactatttgcatcattttgaaaatggaag

SEQ ID NO: 200747 - DNA, 366 bp, Glycine max
  unsure (1)..(366): unsure at all n locations
agctngagatgaggaagtgtatattgtttattcttcctgcttttattcgttgaccacagagtggtacctgtagatatgtcgcgggggtcatgagaccttggggacgtcaggtggggtgctattgcccaaaaccaagcttgaccaatcccgacccaacccgatcatattcagtcagtgagaacctgtgatgtacctaaacaggcgagctcctgtcagtcaacatataaaggaacaaagaccacaaagcaaggaagcttgtgtggtggctagccagctgtgaactttgattgatatatgggttatggcctctggtaatcgattaccaatggtgggtaattgattacaaggcttaaaaatgaagacaag

SEQ ID NO: 200748 - DNA, 429 bp, Glycine max
  unsure (1)..(429): unsure at all n locations
actcagcttatccaactaacatggaagaaactattataccatgcttctaagatctctcacacattataatccgtatccgcgatcgaaatgagccttcaatggaagtcatgaaaatgaaagcgcgcctagtccattagctggctaagaagtntatgatcaggtaaaggatatcgaatctatgctttgggaagacacaaaagaaaccatcatctgatgcaaacatatggaagataaggttagtagtctttgatcttccatactggtccgatcttgatgttagacattgcatagatgtcatgaatgtgaagataaatgctcgcgattctctaattggcaccctccttaacattaaacgaaagactaatgatggcttgaagtgcaatctacacttggttgacatgggtatatgagatctgttcatcctatcta

SEQ ID NO: 200749 - DNA, 452 bp, Glycine max
  unsure (1)..(452): unsure at all n locations
agctngttgggttgttgtgtcccctgtctgtgcttcatctgccctgagaagacctctcccttgatttcatcatagggctacctccttatcacggcaacactgtcattctcattgtagttgaccgattattgaagggcatgcatttgggcatgcttcctactgtgcatactgctcacacagtggcctctctgttcttggagctggttgtgaagatccatggggtaccccgaagcttggtctccgacagggacctgttattcatcagcaagttctggcaggagctttttcgtctaagcagaacgcaattaaggatgagttcagcctatcaccctcagagtgatagccagattaaggtcctaaaccacgttattgaacaatatttgcggtcctttgttcaccaccggccatctaattggggcaagttcttgcaagggcagagtactcccataaca

SEQ ID NO: 200750 - DNA, 445 bp, Glycine max
tctagctacccgtacatgcgccccactaatataacccctcttgcattgtttaaacagaccctatttggtaaaatggttttaaaacaagccccctacagtaaatttgcccctcttttaacaagaaatcctttctcatgacagtgaagttactcgagaatgtgccaaaagtatgattggggaaggggggatagaggtgatggtgaaggaatctcattcgaatctataatagtagatttaaaaaaatatcctttttggtaagttctatttctcgtttagacaatggttatgttcatgtattaatatctttataaagaaattcatgcttttagtatggatgtgaaataatagttctgtaataaatcaaccaaactgttttaattgtttaccggttgatttatatcaaatagtcaatggttataatcaatcatatacaactggtttataa

SEQ ID NO: 200751 - DNA, 444 bp, Glycine max
cgcatgcaagcttgaaagcatgaacaaagtgaggcttaattgattctataagagaacaacatatgatttatgataccactagaattggtttgtgtgttcatgatgagcaagggggattggtttaagcaatgacattgtggagacaaccatgcatggacgttcaagaaagtgaaacatggggtttattaatgacttcattttgtagctacaataaattagaatcatgtagtgtttaaattagactgtaaaatgatagttggtgagataaatactgcatgtggggacagacaaaattgagaaatattgccgttgaatgtagaaatatcttagttgctcattcatcctatggaataggatttgttaagaggtaagctgctaatggagttgctcatgaagtatcaaggatgacttcatttgtccctatcctatacttattaatcatgt

SEQ ID NO: 200752 - DNA, 430 bp, Glycine max
  unsure (1)..(430): unsure at all n locations
tagaattttatatttcgcgataaaaaaacctggcgatgatgccaccccctacagctgtatnagatattacacagataacagcctccgaccaatattccaaccaagaggaaatcatgactaacaattgcggaagcaatatcagacccaaacgcaacacacacaggcgccagtacctcagtgaaatgggctataaagcgttttccaacgtttacttgatacctgtgggttatgcaatttcaaaatgttgttataacaacttagcaaaatatcttgtatgagatggctataaaaaggtgtaatgatgaaataaaaagatatgagaattattccctgcaatatagctattcttttattccagctagctatcaactggacagaccttagctattctttattccagttagctatcaacagactaataggaaagaac

SEQ ID NO: 200753 - DNA, 454 bp, Glycine max
  unsure (1)..(454): unsure at all n locations
cacctgaggcatgcaagcttngaanacatgtgatcctttggcncttctttctttcagctngatcctatgtctacagccccaatcaaacaatcaaagcatggattcacaaacaaattgcctcatgaaatttgccaataacattacaaccatagctccaaattaccacaatggtaagccgaaatttgaagggagattgtactaacttgtaggacattaaagaaaatgcgaaatatgaaagcaaaagtgcacaatggaagcttggggctgctgccaaagatgactcctataagcttgttggcggttttgagtcttgtggaagaaatgggtgaaaatggcttcacccncccttgttttaaaacttccatcaatacacttgccaagcgagcgaattaaattttgtttgcaaaaaaaaattttttgcggattggtatccactgtttgatatattttttct

SEQ ID NO: 200754 - DNA, 425 bp, Glycine max
  unsure (1)..(425): unsure at all n locations
agcttatccttatggcctgactccatatctttctccccagtgccaccccggaagatntaagccaagcccctactttcgaggggcaactcccaccttatgaagactatcccgggcaagacgatggggaaggagatacccatcttggccccctgctccacctctaagatccatccccgcatgaactaccccagtcgaacatagtccgccatatcccggcctcacccacacccgtaaaagaatctgttccctttgcggaagataagggaaagattgaggcgcttgaagagaggttaagagcagtcgagggcctcagtaattacccgttctcggattagcggatttatgtctcgtcccaacattgcatccctccaagtcaaagaccagacttgataagacaagggccacatgtccaaaggatctccgga

SEQ ID NO: 200755 - DNA, 360 bp, Glycine max
  unsure (1)..(360): unsure at all n locations
tcaagaatgcccanactccctggaacttggacctctctctctctctctagaaatctctaaagatgctaaagctcaaggaaaagcccaaactcccttctccatctatgatttcaggattaaataggtggcctcgttggtgcttgcacgcttagcgcaactctggctcgcttagagcacataagtgaattttggcttagcgcgcatcttatcgcctatcggatgcatgtaagcggtgcgcttagcgagatgagcccttgcttagtggtgcgcttagcgcgtgtccagctcatccttcttccagaatcttcctcgcgctcagtcacacgagtggtgcgctctaccgcaagagtggtgcgctca

SEQ ID NO: 200756 - DNA, 409 bp, Glycine max
  unsure (1)..(409): unsure at all n locations
agcnnctatggagcctggatctttattcttattgtatgcctccaatggagaatttcagccatggagttgttgcaaaagataaaggagaagaggtgaaaggaggcgccatccactagggaataagccatggaagaagaagcttcaccaccaagagagtcttggataagaagcttataaaggaagcttcaatggaggaagataatgggagagagagaaaaaaaaagtggcatgggaatgaaggaaagatagggagagaagttgaactttgaagtgtgtctcacaagactctcattcatcaaaggtaccacaggtgttacacatgcttctctttatagcctaggtagtctccttgaatagcaagtattacacccctccaatagctaatctcacactatgccaaaatacatga

SEQ ID NO: 200757 - DNA, 419 bp, Glycine max
  unsure (1)..(419): unsure at all n locations
agctgcctatccgatgcagcagtaaggttggtcttagttatgnngnggaacggtaacgaaccctgaatgggtttaagcaaagacaacggcggcataactagcttgataaatgccaaaggaaatcatgggaagtatggtttacgctataaacccactcaggcggatataaagagaagcatcgcgggaagaaagagcggtggtcaaagctcgcggttgagacaagaaagtgaaggaagcccgccctgccacataagtagaagctttataagcgcgggcctgggagacgaatgtcaagtggtcacgatatacgaagatgatgttccgagttcatgggatttggtacgaccatgccctcctgattaccagctaggaaattggcgagtggaggaacgccccggcatttacgcaacgagcataat

SEQ ID NO: 200758 - DNA, 389 bp, Glycine max
  unsure (1)..(389): unsure at all n locations
ctttggcccttagtattcacactaatcatcaactgaaaatatacgaactaaagattggtataaaatacggcccaattatagaataaagcttgaaccataacaacaagcatacttccctttcacttatatgttctggatactgattattctgccaaatagtgtgatgttcagtattatttccttctatccaaatcacgtgggtctttattataaatcttttctagatgtgtagcaaattcagtaaaaatttcagctcaaaattcgaagtaaccaattctcagtaatctntacaactttgtatgtccaagctgccaacaccagcgatgtatttaagcatggcatattgattgcattngcttactatcaccttccatgtatgtaaactcact

SEQ ID NO: 200759 - DNA, 346 bp, Glycine max
  unsure (1)..(346): unsure at all n locations
agctnggtgaacaatagttcacanannaatttatctgttngggnaacaagaatcgctagcttattattcggtagattcaatgaaggtctcaccgaaagagagtgagcctaagtgaagctcttgtgatcaaaaaatntatctaaactaggtatacggcctgcgatttgtacagttttatttttatttaaaactcagaccgagaaatataaaaaatattgatagtgtactgttcaccagttgacacgtgataagctgctggacagtctatatatatatattatgtattgataacattgccttaataacattcccagtacaatatatattcccttgttatagtatatat

SEQ ID NO: 200760 - DNA, 424 bp, Glycine max
tggacataacacgagcgctcaagaacagtagctggtatccattttcctgacatcaaaaaaggacatagtagtataagacaattatcttcctgacataaaatccaatgaaacaataggcgatcatgataacattaagcacattatgtttccttttacattatacatatacaaacagttctatacataaccattacatctatctgcatatatactatattccaaacgaaaaagaacgtagcagatactatactgaacaaaaatatatgtcgaatgaaccttaaaaagtaatgtattattcctgaagagcctaggacatgcctaccattcagtactggagcaaggaccccgctactaacctttattactgtaataccataagcaacatattgacaccttcagccctcgagaaatatagaactgctca

SEQ ID NO: 200761 - DNA, 395 bp, Glycine max
  unsure (1)..(395): unsure at all n locations
gatccttaagtcacctgcggcagcaagcntgagagattatagctttgttgtttattctcttagaagctgtcctgtaatctgtcgccataggctaggctgtagccttcatcatgaattattatatatatatatcagcaaactaaggctgaggatcctttttatgtgcatattttcatactcaagcatttcaagtttgtaacaaaaaaaaccactctacaccaattgcctacatgttctccttagtacacaccaaacacttgtcagtgtactgtctatcaaaagcattcttaaagaggcctatgcattgtccatgtgtcaaacccggaggactcttgcatgagggagtttggtagagaatgccatatttaattaaagtgtcttcatcttatggctga

SEQ ID NO: 200762 - DNA, 427 bp, Glycine max
taatgttgtgactttcgaaaaaatctcagaaacaagtcactcgaagaattgtgacttttggaaatgcatttcttcgaatatagccagtggtaatcgattacacattaggtgcaatcaattacacatcagcagatgtgactcttcattctaaaatttgataatcttaactgtttaaaacaatggtaatctgatactacattttggtaatcgataaccagagagtaaaactctttggtaatgattttgtgaaaacttcttgtgctactcaatgctttgaaaacactttaatacttatcttgattgagtcttctcttgattcttgaatctcgagtctcgaatctcgattcttgattctcgaatcatgaatcttgaatctctgcttgagacattgctatactcctgaatcttggcatcacaaataaccttg

SEQ ID NO: 200763 - DNA, 376 bp, Glycine max
  unsure (1)..(376): unsure at all n locations
taaatttgctcgatatattattggtctcaattggaaatctgagtccaaagttatggcccgttaaatttgctttgcgcttctgatgcgaatcttacgaggcggatcgtttgatacacgctacggagatttggatgccgccactatcagtgaaagaagataagtctggtagacgccacttccggtgaacgaagataagtctgggtatacgccactttcattgaacgaagataaatcagggttgacgccacaaaggataccttgataagtctgatattgtgtcaacaacgaacccagagagaaactctcaccaaattctatcanatgccctatagtttctttttattcaaacgaaaaccaatacttatagtgtatctga

SEQ ID NO: 200764 - DNA, 445 bp, Glycine max
  unsure (1)..(445): unsure at all n locations
atccttaagtcacctgcggcatgcaagcntgaagggtgacccctcctttnctatttttttacaccggaatgngttactattattgtgatcattctttctccgccattgagggaaccacttgggctgcctgatccctccacctttgggtgtattctttgaaagattcatgccccatttttgcacatgttctgtagttgcatcctatccggagtcatataagaattgtactgatactgcctaacgaaagcaaccattaggtccttccaagaatggactcaggaaggttccaagttagtgtaccatgtaacagctaccccaggaagactttcttggaagaaatgtatcatcagttcctcatcttttgtgtatgccctcatcttccgacaatacatctttagatggttctttgggcaaatagtccgcttgttcttgtcaaagtcaactc

SEQ ID NO: 200765 - DNA, 352 bp, Glycine max
catgccattttcgctataagagtaatgtcccactaaaactaactttccaaatgtttgccttcgcaggaatggcaccgatgaagcttgcctcaaagaggtccaggaaggacaaggcggccgaaggaactatgtccgccccggagtacgacagtcaccgctttaggagcgctgaacaccaccagcgcttcaaagccatcaagggatggtcgtttctccgggagcgacgcgtccagctcagggacgacgagtatactgatttccaggaggaaatacggcgccggcggagggcaccactggttactcccatggcgaagcttgatccacaaatataccctgagtcttacgccaatgc

SEQ ID NO: 200766 - DNA, 334 bp, Glycine max
  unsure (1)..(334): unsure at all n locations
aagtattcacatccacaaattgctcataatccctccaccctttgttgtccacctataactgagctcacgtactctcaccgagcccatataatcagatatctcaacatcgggttccccacaattctaccagactntccccaccatccagtgtaatcaacatccaaactcatacaaactaacaaaccaagcaaaacagggcaaatgcagataactctgaccataacatcactcaaaatcacagctgtccacatactaataccccagtatcattccttcgtaccaattcataaccgatgatcgactctaatatttacagcaagactctagtacatag

SEQ ID NO: 200767 - DNA, 425 bp, Glycine max
  unsure (1)..(425): unsure at all n locations
atgctgccgaatgaagaagccattggcttagttattccaaagcccactngttatattgtgggcgtttagtatagaagaagagaattactttgtgcacccaggaattttttgaaattctgaaaataccccttgctaacttcttcttcttttccttcttcacggaccattcattctgtggttttattctttgcatttattcttgagagaggtgatcgttcgttattgtgtctgttttggttgaggcgcattggttacggtagttcgttggcaagtggtagttgaggtgatggttggtgtggctattaacgatagatgttagttgattttctcttgcaactttgatctaattctatacggatttacaatcccgataaaacatatggattaatattccgtgagattgtaatggattgacaatcctatgt

SEQ ID NO: 200768 - DNA, 175 bp, Glycine max
cgcgagaaggaactggggtatcaaaaagacatagccaacggtcccccaccagaacaaaccccagcgacacacacaaggcactctcccctcggtgatgcgaaccaaccgaaggcccgaaacagaccccggcgcaagataactcagcaagtgggacaaaagcgaaaactaaaactga

SEQ ID NO: 200769 - DNA, 347 bp, Glycine max
  unsure (1)..(347): unsure at all n locations
atcgangcatggatatgtttgtgaaccttttagtatgtgataattgctgattatttaatacagatgacaggttcaattcctgaaggacttaatttacttcttatgctgagaatctttctgtgtcttctttacgtatgcccctacagtttcaaagctccaaggaggtgctgcattcaatgttattccaaattatgtcatcattgatggcaccctccgagctcttttatagaacattgagcaccttaacagcgcattgccaggtttgtcaacaaggagaaaatatatcatttgcaacataacctgaatctgaattaatgtctgctttgaacatcacacccataataatc

SEQ ID NO: 200770 - DNA, 389 bp, Glycine max
  unsure (1)..(389): unsure at all n locations
agcttataatatatcgaggcgctcatttttatctttgangctcttgagaaattcaaatggccataacttttaactcggatgtccaattcatgcgcatcacatatagagacgctcaaaaatgaacaacagaagctctccagaagttaaaatggtcataagttttcacactgatgtccgattcacgcttatattatatcgagacgctcaagaataaacatctgaagccttcgaaaaattcaaatggtcataacatttcactcggatgtccgattcaagcgcatcatatatacatacgctcaaaaatatacatcggaagctctcgagaaattcaaatggtcataatctttcacacggatgtcctattctggcgcataatatgaatagatgct

SEQ ID NO: 200771 - DNA, 378 bp, Glycine max
  unsure (1)..(378): unsure at all n locations
cttaagcacctgcagctgcaactcatgtattatattgaaatcttttttattttgnccaagggcccacttttttaagataatattataatttatattgtgaagcatttcctatcaaaacaaaaataatattgtgtttccattttgccatttccattttgccaaataatattatattgtgaagcgtcagaactaaaatgcacntccattttatcaaaactaaaatgcatttccattttgccaaatgcattntgtccaagggcccatttatattgtgaagcgtcagaggtacgtatacgtaagtagcatttccccataataaaacgacctcagcctagtcatcaatccctcatttgcgtaaacccgtgtcgatatcgcgct

SEQ ID NO: 200772 - DNA, 307 bp, Glycine max
taaaatgcagctatatagaaaatgattattttaacagtttaaaaacttataatttatttgagaggaagaaccgatagcttgagctctgatataggataagatttatgatgctagaccacaatattggaaagtgtagagtgaaacgaattaaaagggtcctaagtcagttaattggaagaggtggtaagttgttagcatttgaggagacgggtacatgagcatggagggttatttgtttatgatgaaagaagaaagattgatacgccctttggttaggcagagaaagggtcactctgagggcatgaac

SEQ ID NO: 200773 - DNA, 284 bp, Glycine max
  unsure (1)..(284): unsure at all n locations
aaagaactnaaagccacanacctacgggataaaaagaacttaanggctgagtgtaattgaaattgtggcaaccaaaagtcacccccaacagccatcaagccagccaccatttggtctcccanaatgttgatgcctggtttccaatagggcccttattacaacttgaactaaaccaaactaaagcccttttagttgattaacccaaaacatatatttggtcagccaacattacaaggattgggccattatctagacaaactatacactctataattgagacaaag

SEQ ID NO: 200774 - DNA, 269 bp, Glycine max
taataacttcctctaaaataacacggtaaaaaccttactaaaccaactaatatagactattaattaggtccagaaggtctacaaccaattttgattgtataaaaggatataccacaatagtcgaagatgacaataattgaaaaaaaatagaatcattaaagaaggaaaacattgagaactcaagtatgaaacgttaattaattcatataaaatgattggtgaaagtctactccctctgctttaaagtaatataaaaacaaattctattg

SEQ ID NO: 200775 - DNA, 183 bp, Glycine max
gacccaaccagtataaccgggaaacaggagcgccaaaccaagcacgggccgaatacaacaccgggacggcgcccatatccctcgttcaggccacgaagaatgcgaatggaatcaaccacactaggtgccgccacaaaaacccggaggaacacccactcgaaagcagcaaccacagccacatac

SEQ ID NO: 200776 - DNA, 378 bp, Glycine max
ctactaacaccgtgtgaaccatgcaagcttgctgaccgtgaattacatctgctacttacaatagcaactgagagaccctaatggtcacgatatatttataatctcaattaatattcatatgctacacaactcaatatttcttttgataaattaaaacatgaatatgtatttcataaaaactgatctatgactataaacagatagtatttcaagaggatcaataatatccaataatttctccatgacatacctgtacgtatgcctcgcttggctgatcaatatatctcaagaataatatactcatggaaactggaagattaactgtacagggttcattatgtgcctgccgtgaattatgtataatagaatcaacctgtg

SEQ ID NO: 200777 - DNA, 289 bp, Glycine max
cgcaataaacttcaaattatgacatagtttgcagacttaacgcagagttgtcactataaaattcaaaatgcacttaggtgttgcactatattatcgtatgccaaactttgcattaaaggtattaacaatcacttccaaacgaaaaataataatagtatattttggaataatctctccatcttctatattggacatgatttcccattttcatttgttatactaacggaatatgagttttcaaacctagcatctgttcagtaaatcatttgcacaaacacacgttcagtat

SEQ ID NO: 200778 - DNA, 111 bp, Glycine max
  unsure (1)..(111): unsure at all n locations
agctnggagagcaagataagagagcatctttttanattatactgaggactgctgaagaggacaatgtgagtctcctcattagaacgagggagaggattgatcggtgcctgc

SEQ ID NO: 200779 - DNA, 419 bp, Glycine max
  unsure (1)..(419): unsure at all n locations
agcttagccagatagaatgtaaagatggtctattcnntaacacaatntatgcaagtatccagcacaaaccagaagaagactgatgcatctattaaaaatctagaagttcaagtaggacaactggcaaaataactatccgaacaaggaagtggatctttctcagcaaccacacaggtcaacttaaaggaacattgtaatttaattacaacaaggttggggactatggttggtttgaaggataatgatgaaaaaagaataaaaaaagagttgataaagaaaacgagatatacgatgaagtgatgactagcgaaatagtggaagacacagtggtaagtgaagaagagaataacaaatcaattgaacaaaccagttataaagtgaaagctatagtaaaccatccaccaattgagcatttttct

SEQ ID NO: 200780 - DNA, 434 bp, Glycine max
  unsure (1)..(434): unsure at all n locations
acctgcggcatgcaagctngtgatagtatgacaaagaagaatgcttcncatatctgtgggcgagcggggggctagtttaaatctgatttgaccaggaaatgggcacttgcagccgacaaggacgctgtggacaacactgtctgtgaaaaatacggcattagcaaggagaaatgggcccagttntttcagacctgctgagatccctcgtgggaggtatgtactttgtaatttgaattgtttccactaaaaattcagttcttataatagactgtagaaatcatttaattaatgtctgaaatttgaggatgtgctaaaaaaaacacaggccatctagaagccccacgtgtggtctcgcggggttatgattattagaacagaactgatggtgagaaacaagaaaaactaaggaagctgtatccgagcactggggcgta

SEQ ID NO: 200781 - DNA, 413 bp, Glycine max
  unsure (1)..(413): unsure at all n locations
agctngcataacatagtgaaatatttgtcttgtttattgccgctaagtgaagcttaatcttggctaagcgcaaatccatgcgactaaccattggcttagcaggcttcttgccagctaatccaacgttgtagacactgtaacctagcattttctattaagcggcattcctgtgtcgctatgcctagtgacgttttttgtaaagcccgctaagcgaattttgtctcgctaagcagccagtgtcttttctagttttatttttcggtttttaaaatttgaataaccgcgtcctgattaattgtttggttctctatatgcagatggcctctaagaaacataagaatagtgattctagaccacatgatcataatgataataggagatttcaatcagaggaagcttggagaggatgcttc

SEQ ID NO: 200782 - DNA, 363 bp, Glycine max
tgcttctatcaaaactccactagaaacgtgggtgtatttattatataggctgaaaatcatcaactataaaaatgtcttggaagctagatagctaaagtcatcatattaacaaaatacacaaaagactgaatcacacactaaatactactagctgtcttattcgaatgaaggaactacttataaagtcagaacaacaattgacgactattatacacccttaaacgcttcacaggggagaatattgaatgaaatcatgaacatgtgagcaaaagaatagatcttgatgtacctaagccattatgaaccgggaatggtcatagagatccgccaaattattgtcgctaacaccgtataatggggcat

SEQ ID NO: 200783 - DNA, 400 bp, Glycine max
  unsure (1)..(400): unsure at all n locations
nnnagctggtcgaggtacttacccgtttgaatanctatgaacgatgaagaacgaatgaagaacgttgtagaacgggtcaaacctttgcgagattcctcacggataacgttacggaaacgtttcggaagcgcctcggcttagattttcttcacggaaataatttttccaagcaaattcgaaagagagagaagtgcctaaggggctggccctttttcttcttgcattcctcccctatntatagcaaaataggggaggtggttgccgcccagctcgcccaggcgagctcagctcgcccaggcgagcagggttgcttcctccagaagcaaccgccttctggaggaatattccagagggcccaagtgggcctgggtgctatttgcaccaccattcttactaagta

SEQ ID NO: 200784 - DNA, 287 bp, Glycine max
agccaagaaacaaaaggaaccataaaggcagacaaacacagacatgttaaaagcaaggtacaataatcaccacatatatactaaaagcagctcccagttcaaggaatgatgccaataaagcacagcttgatatttcaatgtcaagactacaattcggtgatgctcataataaaataaaataaaataactacaatttggagatccactcctccaaagcacatcttctctgtggaaatagtaacgtgtaactatatcatggatatactcgttacaatagattcaaattt

SEQ ID NO: 200785 - DNA, 253 bp, Glycine max
acttgagtcttataaataagaaggaataatgcttttcagatacagcacactgtctgacctaaataggatccatctactctcatctatgcagcccttgaagcaatttcaccgatgaacacattataaaatgcgataccgacccttgttgctatgtcgaggaacataacctatcgtaagactaaacaccgaatcattaatgtactatatattacaaaccgcccttagatggacatgctttagtcaaataacacca

SEQ ID NO: 200786 - DNA, 233 bp, Glycine max
actaaaaactcagcttctataatggattagcaggcaacatatgtttttcagaaacatcaagcaacgatgtgcgccctctacacaggcactaataactaaactctatgcgtttgagcaagtattgtacgagttagagcatactctcacatttgaagttaatatcttcactgagaaagtatttgcactaatacgattaggaatttctcgctactcactttaattataaaacatgc

SEQ ID NO: 200787 - DNA, 408 bp, Glycine max
  unsure (1)..(408): unsure at all n locations
agctncataaagacagtggaggggcttcnctcngttaagccatcaggtccttgcatctgtccattgttaatacaatgcgttgttgagttgtgaacttctttctgcatgcacagggtcctctctctggctctgctaagaggtgtttgcgtttaacctttgtggtgtttcagacactgcattattggcaggtcaaggatctttggatattgggagagacttatctgttccaacactgtttcccttcacttatatggcaggggcaggtttccttgcatgttataatccgccatttaatcatattcgctccatgactatggataactgaaaataaaattaaatgccatgatctatagttctcttctgttacattagttataaatcctaaccttctcatatctatcatattct

SEQ ID NO: 200788 - DNA, 459 bp, Glycine max
  unsure (1)..(459): unsure at all n locations
agcttcaagaagagctacaaaagagtttttcttttacattcccaactctctngagtggcatttgtattgattgttgtattgggtgttgcatcttagtctatatcatttcatatatgcatcatgcatcatcatacaggagttaaaagaaaagttctaaagttagaaaaaagtttctatagctaaaactctttattttaattgattacaggttgatcataatcgattaaacaaatgtttgaagcttgcagaaaagtgtctcgtattggtttaatagattacaggcttatagtaatcgattacacaattctttttgagacgatgattgatatttcaagagtctctactttaatcaattaccagttgatataatcaattacttctctcttanaaagtggtttagaagtgatcaaaaacactttaatcaatacattgagaatctaattgattacatgggtcatg

SEQ ID NO: 200789 - DNA, 257 bp, Glycine max
tttttttttagatttactggggaagactgtgagacctacttgagcgtggccggttgagagccttaatgagtttgagtgatgtagatccttgagtgaagagacatctaccactttgattttgcatctttctcttggcttctcttgtgaaaaaaagcttctggttgaaagctaattcttgtggatttactcgtggcctgattaattattttatctttaatgagtaatgagactctggaacttttttactcatatgctta

SEQ ID NO: 200790 - DNA, 469 bp, Glycine max
  unsure (1)..(469): unsure at all n locations
agctntaatccgntgagagatcccagatatccgttgnctaataacttggcgcttgacatgaggctgctattgtgcaaagagagagtgaagtacagtttgctattgtcacctagtgctcagagctgactttcatcatatgaatcaaaggaaacgttaacaacataagacaaaagaaattaagaatgtcaagacaagacaatttaaatcttcccttttgtgcgttatggtgcaagcttcttactgagcctatgaacgttactttcttgagaatgtttttagtacttaaggatccagtaacttgtccattggctttgtactgagtcaagggctaaagcacttgtcttctcaaggccagacgttgaagcagtatcatccaatgactgataccttgtttttcgtacaagccgttaagtcatgttttcgctgtgctcataagatatactgaactatagctaagcagaaatgtaat

SEQ ID NO: 200791 - DNA, 264 bp, Glycine max
ttatttgaacatcattcttcttctctataggaaaagtgaacattgcttgatttgaaaaaccaccgaggtgaaacccctttgttcatggctgcaatgcatggaatgctgaagatgctcaagcatatggcctacctgtcaggcacacgaaatatggtagatatacgagatcatttgcatcgatctgacaaatatactgctcttcatgccagtgtcatggcgcaacattatggtatgtcattattatacgtttggggtggtattact

SEQ ID NO: 200792 - DNA, 401 bp, Glycine max
  unsure (1)..(401): unsure at all n locations
agcntagatcatccacgactaattgtttacttctatcctgctactggtagaggatcggggccccacaaagaaaaatttcacagttacctaggggttgcggcaagagaaaaaattccaattgtccactccaattgaaatcttgtcctgaacgatcaaaagaacctaatatgggaagacatttcggtaagtggttttaacaacatgtatgtttatcattgcctttataagtcacttttaaatcaataatttagttactgttacataacacctttgatgtgcagtgcaaatttgacatccctgaacgtgacaatgcaaaaaaaaggtgatgtcaacaatcacaactagatggaggcatatttagtcttcctagacgtctaaatttgactatgctgacaatgatg

SEQ ID NO: 200793 - DNA, 370 bp, Glycine max
  unsure (1)..(370): unsure at all n locations
aagacattanatatgnatatgggaatcgatcaaattggtcttctaagaatcacatcattgcattcttctatttaattgattattatatgaatatctccactaattaactggttcatccacgagtaaacaagcatggtgaacaacctcagcatatatattgtgtagaatatcaaaattgtaagtaaattaccttgttgaattaggaggcacttataaaactaagaacaaattaagatcatctccacgaaatagatcttccacacaatacatacanttatgattatttacgcggggagtactagcagcggcgcaagggtgtgtttttcgtaaactttcacggttgctattcgtgctaaacagtagttttcaa

SEQ ID NO: 200794 - DNA, 325 bp, Glycine max
agcataaaccacagagtctggcgacaggtgcagattttatattcatggccagttgggttaccaggttaaccaaggcatctagtttaccttcaagcttcttagtctcagctgatgaagatgaattcgtggctacttcatgcactcctctaatgacaatagcatcacttctggcactaaatgtctgggagttagaagccattttcttaattaaatgtctggcttcagtatgagtcatgtcttctagggctccaccactggcagaatttatcatacttctctgcatgtactaatcccttcataatatattggagaatgagctgctcag

SEQ ID NO: 200795 - DNA, 397 bp, Glycine max
  unsure (1)..(397): unsure at all n locations
agctnngcatttgctatagaagaaaatatatttaaatatgcaatgataaaataatgaaaacaaattcagcaaaatcatgttgggctgcaaaaagtaaaaacaaaaagaagtttaatccacatgtgttgaagcaaaggaactacataagatttataaaagatattcgcatattcaagtgtcgtttgtgatatttctacacacagatataaaggaacaattacaaatatttgttatgttccatgcttcaatatttgattagatacataatagtatcaatcgggagagtttaagcttgaactaccctcacatttacattttaaagaaatggaataagataataacataacatatatctatatacaacgtctaattgataggatatgagaaactacgataa

SEQ ID NO: 200796 - DNA, 408 bp, Glycine max
agctgaagaggatgcgttaatgtgttatttatattgagagaaagggggagcacgaaattgatggaataaaagagggaaagaagtggaactttgaagtgtatctcataagactttcattcatcaaagttacaacaagtgttacacatgtctttatttatagactaggtagcttccttgagaagctttcttaagataacttccttgagaagctcttttaaaaaaacttccttgagaagctcgagtttatctacacacacccatctaaaaactaagctcacctctttgagaagcttccttgagaagctagagcttagctacacacccttatatagctaacgtcccccatgactaaaaccctgaaatcaaaaaaagatctactcaaaactgctaaatgcctgataccgctaa

SEQ ID NO: 200797 - DNA, 374 bp, Glycine max
  unsure (1)..(374): unsure at all n locations
agcttctatccaaatggacttaccttgaattattttctttgatagcccctttgagcctattntcccctttctttgttntgaagctcattacaagccttaagtgaaaaaccatgatatcaccttacccttaaggaattttggagctttggaattgttttgggaataagttgggaataagtgtggggggatatgtttcattagaagatatgattcttggccatgcttaatgttttattttggccatgcttgatgtatatatatattgcctagttctttctttaatcttcaattttgtactgctcaataaaaataaaaaaaaatgaaaaatgaataaaataatcagttgctgcaaattctgcaatttcgtactcttc

SEQ ID NO: 200798 - DNA, 253 bp, Glycine max
tgatcataacacaactgctcctttttataaaattatatatccatgtataaaagaccaggaccatacacataacatagacctatttatattgttcactccccccccagaacaaaatgttacaaaatcattctaatatcaaaaaaaaccccaaactctgataaaagttctacatagccttgcttatgaagtatgttggattcatataccactcataggatgaaactctgaaatttgtacctttgcctcacccatg

SEQ ID NO: 200799 - DNA, 246 bp, Glycine max
  unsure (1)..(246): unsure at all n locations
ccttaagtcacctgcggcagcaagctttaatccctaaatatgagagagtgctgattgtggnncggccacacccttgtgcctatgtctagtcctcaagcaactcacttagaaattttcctttctcttgtgagaatctcttttacaaagtttgacacccatagggacaactcatcttttgtgttcaaaaattcttccaactaaaaaaactctgggtccctaaatcatttttttgaattaaaaaaaaaa

SEQ ID NO: 200800 - DNA, 195 bp, Glycine max
cttcggaatccaagggaggccgactaacactctaattagcgaaccaagaggaacccaagagaccacgaaccaaaccgcctcaaaactaacaccactccacatgtgaaatcttttaaccctacccacaagcctgatgcataaaatgcgcccctaacattaacagcaaaaattgtccaacgggactctcaacaatgg

SEQ ID NO: 200801 - DNA, 423 bp, Glycine max
  unsure (1)..(423): unsure at all n locations
aacctgcggcatgcaagcttgacacttttacctcacagggcgatcnttcgntttggttctcaccttcagaacctcttgaccttctcccattacctgcaagtaaacattgtgttctggagcaggcttatcttcaacaaacaagtcaaaatcaattntctggtcttcaatagctaattccagcttcctcttccccatgttaactatgcagcttgtggtcaacatgaacggcgtccccaagattacagggatgtcagtatcttcagagatatccatgaccacaaagtctgctgggaagataaaatgcttaaccctaaccaatacatcttcaattactctgtagggcctggtaatggagcggtcagctaattgtatattcattcgaatgggcataatctccaactctctcaatcttctgcacatgga

SEQ ID NO: 200802 - DNA, 85 bp, Glycine max
ctgaagacagacagacgaggtttttttcttgtgataccacaatctccagggcgaccgtgtcacaactcgcaaccaagaactcggc

SEQ ID NO: 200803 - DNA, 461 bp, Glycine max
  unsure (1)..(461): unsure at all n locations
agctntaacctcatagtctctgacagtctttatattgggagccaatccaatccttgtgtccggactctcagccacttatgatagccgccgatgatcccattactgcttcccctaagctctctgtcctttcttcacgccgcatcccatgccttgcgaactccttggagtaccctagcattgtggtcactgaaacctcgtgcgatgaaaggcgtgatgctttcgtctgatggtactcctctcatgggacatccttcgcatgaagatagaatactgattcttccttccttctagcgagggaaccatttaacagacgcccctccatgctagccaagagttggtcccaattcgtctttcttttttcgacgcacgagcggtgaccttgtagcggatagacggggcctaccttctggagaatagggtgaaactaaccacacatagagagctggagacagcaaacattc

SEQ ID NO: 200804 - DNA, 372 bp, Glycine max
  unsure (1)..(372): unsure at all n locations
agcttctagccaaatggacataccttgaanatantccttnngaagcccataagagccttgtttccatttccttgtttagaagctcactacaagccttaagtgaaaaaccatgatattaccatatccttatggaattgttttgggaataagtgtgtgggggggggtaaccatccatcatctaataaagttcatccatttaaataatacatcatatcatcttataattattaatcttataaattgactgaccataatacatatctgtaagatattatgttattatactcatatcaatttactttatataattcacagacgcaatagtttttaaatatatatttactgatcttacatttcttatgtatattagta

SEQ ID NO: 200805 - DNA, 408 bp, Glycine max
  unsure (1)..(408): unsure at all n locations
agctcttcatagtagaacgtgagtaactgnatcnatcataattgagatcatctccctctccgtcatgggtggtacgacttgggctgcgagatctccccatctttgggcatattccttaatggactcatgctctcgcttagtcatactctgaagctggttccgatcgggagccatatccgtattgtactggtacttcctaattaaggcagttgccaagtccttccatgatcggatctgggaagcttccagattggtgtaccatgctacagctgctccggccaagttgtattgaaagaaatggaccaacaaacttttcgttcgcataatacgcccccatattttcggcttacattcgaagatcccttttcgacatgtcgtcctttgtacttatcaaatccatacttaaac

SEQ ID NO: 200806 - DNA, 331 bp, Glycine max
ctcttacatggacttgatggggcctatgcaagttgaaagccttggaggaaaaaggtatgcctatgttgttgtggatgattcctccagatttacctgtgtcaactttctcagagagaaatcagacacctttgaagtattcaaggagttgagtctaagacttcaaagagaataagactgtgtcatcaagagaatcaggagtgaccatggcagagagtttgaacacagcaagtttactgaatactgcacatctgaaggcatcactcatgatgtctctgcagccattacaccacagcatatgggcatatttgaaaggaaaacaggactctgcaag

SEQ ID NO: 200807 - DNA, 427 bp, Glycine max
ctcaactggaattacaacgttccaatcaatttcaaaatgtgtcttatttattacaatattttgggaatcgattaccagtgtgtttgaacgttgaaattcaaattcatatgtgaagagtcacatcctttcacaaaaatgctttgtgtaatcgattacaatgatttggtaatcgattaccagtgataagttttgaatcttcccatggttgtcaaggttttctacaagttataactcttctaatggttttcttgaccagacatgtagagtctataaaagcaagaccttaactcgcattttacacacattgaatacattgatttcaatcctttacaaccctcgagtctctttgaacaatcttttgtattacttcttcttcttccttagcaaaagctttcgtagattttctgattctctaaaccttgagaac

SEQ ID NO: 200808 - DNA, 401 bp, Glycine max
  unsure (1)..(401): unsure at all n locations
agctnngcttctttagagatctgatattttctggactncgttnatngngcaacaaaggacgcctagtatctcaaagcggctaaccaaaggttgcatgttatcaagtaataatccccggacgaaattatggtatgacaaacatagtgttcaattttaatttcttcattataattataaaaaaaactggcagaataagggctcttgaccctgttgttgtgtttacactttagttttctgtttttttttactcattctcctaattgggagaggtctcttgttgacaaacctacctgaaaatcagaatcttcttctcaggtcatattgtaaacttgaccatggtactcaataggaataacatcaagggcgcaaccagttggatatctgaatctcctaaaccctat

SEQ ID NO: 200809 - DNA, 396 bp, Glycine max
  unsure (1)..(396): unsure at all n locations
tggaggactcttaatcactccctgtgttgcaacttaattattataagggttcttgtccaatagtgcacccccatcgtgcattggttgctaagcttcattagatgattacaagttatcaacaatacaaccttgctcatgttcctttatgaggataatcaagtggcagatgtgtttactaagtcctggatttcgctacaatgtgactatcggattttatgcatatgcatgttccttatgtcttttattgattctgattgtggatgaagttatataaggggtgatcatgggtctanatcaatccaaacaattgggttggctcagattaagatttgggacacaaaccatctaatcaccttatattatgagtaatggtatgtcctacatgtaatatgcttg

SEQ ID NO: 200810 - DNA, 399 bp, Glycine max
  unsure (1)..(399): unsure at all n locations
agctagatagtgtagaggagcactttattggtgctcatttagactccacatagtggccactatgaccggaactagacacaaggcataccctctaaaagccattagttctatgaacttcaattctcaaaaatcaaaataattctcaaactctggatgtggatatgttgtgagctgatattgatactgatcgatgtttttattatgctgttctaatcattgnttgagtgagaatgaataggagctgaatgatgagttatatatggaaagaaaagttctcagaaatggtcaagtagatgtatgttgcctaccctttctaacaaaagatatgtaaaggtttaactttttctaaatggaagagcttatgataataacatcctaagggttgtgtcgtcgacataa

SEQ ID NO: 200811 - DNA, 426 bp, Glycine max
ttatttattttcctttcatataaaagaaagaatgatcttgatcatgcatacggacataaaaccagctggccatctctgtccaagaactacaagattggtaactatgatctatcccaacatcaagagatttggtcaggaatggcggaggtcccgtgtcatgaaatccttcaattggctctgctggacattcaccacctaattgatatgaagatgatggtgatgattctaagtattcttctttacatgatacatataattcattcttgaaatattatttggattaacttgatgggtgtgtggcaacgatacgtgaatattgttattctcgcttctaatgcagaatgccaactttatcgccacccgattaaattcagtgaggaatactatcttacacctaacccaacttgtactgcatatagtctgaaa

SEQ ID NO: 200812 - DNA, 411 bp, Glycine max
  unsure (1)..(411): unsure at all n locations
agcnncggaagaaaagaaaggaacaagcctcttttgcttagcangaaagaacccaggtagncgaagagaagttcaagtccatagccatcaaagtcggaaaagagtatgatgaacgaagggacgtcaatacggccaccgctgaagctctggaacgagaaaccaagaaggcctgaaaggaagaacacgaccaaagcaaagttacgaggggctgtatagggcagcaatagtgagctcaagctccgaagaggagaaaggcaacatcacgggccaaaggcatgaccgtgaaggacgagctaaaggtccgcactaggccaaaaagaaattgcgcccaacagttaagcaagactgaagggaatatgtgggccatcatccacaattgcaaagagaagcgtatgccagcggcgactcacg

SEQ ID NO: 200813 - DNA, 411 bp, Glycine max
gaaagataactctctaaatcttctaagaagatataaagcaacaacaacaccatcacatgccttcaatgtgggaagcaaggtcacatcaaatctaaatgtcttatctaccttataaaacaacttgttgaaaagaaaggaaagatggatagaaaatagaaaaatgcctacatagcttgggaagacaatgaatcctaatccttggacttttctagtgaataagaaatttcaaatgtgtgcttgatggtatgttcaatggacaactcctcaaccatagaagatactgtggtaaattctaaatttgaagaagtattgaaagcattcattgaaatgcatgaataagcgcaaggctagctatttcaaacaataagctgataagcatttaaactgcatatcacgaaatgggctcaacac

SEQ ID NO: 200814 - DNA, 435 bp, Glycine max
agcctaattattccataacaacaaagtattgtgttgtatgttcccacatgggtagaaaaaaatcatataaataaagtaagtttaaattgtaatgatgcttaagggctctttaaatatcaaagtatttgtttcaggagcaaaacacctaaatgattgagatgtcattattaaattctattaacgttttaaaataaaatatataaactcttttagtttaactgtgattcactataaagattcttatactactaataaataaattttttttcttaaatataacttgtagaataacgattatattaatcaataatcttaccaaacataacaatcgataattgttaatgtgtggatatattatagataaatctatatgttgcgtacattattataaatctaatggacagaacttatacatgttattgtcatcttcttcta

SEQ ID NO: 200815 - DNA, 333 bp, Glycine max
  unsure (1)..(333): unsure at all n locations
acctgcctgcatgcatgctagccaatccaacatgacgcgggttttttcnttctgagagaaccggcgacgtacctaaacaggcgatctcctggctgtcaaccgataatagatcacacaccacttagcgatgaggcttgcgtggtggccggccanctatgaatcttgagtgagtgttggaatatgacctctagcattcgattaccaagggtgtgtaatcgattacaatgatttaaaatgaagacatgatgttaagatggtctctggtaatcgattaccaatggtgcgtatcgattaccacgcttaaaaatggcgtcaagaaatcgagatggtctc

SEQ ID NO: 200816 - DNA, 434 bp, Glycine max
  unsure (1)..(434): unsure at all n locations
agcttatgttttgaaagagatacgaattaatgtctatgaaanncaaaaatntatagactgcccacacctactgtctcgtggggggtatgaactgcttgacatgaaacttatgtgggagaataccaatcgttgacatgaggaacatcagtttactgaaaacccatcactcaacattgaccctccatcccctatggcaagacacttgaagtggaatatcgcacgcacaaatagttatgaccaaatgacttctgtaacggacaagaaattgagacaaaatgtgagttcatgctctttggtactgcattgccaataaggtagccaacatataaattatttattctattaacaacttacatctgcagattattacagacaacacacaggagtttgttcatggtacagaatctgaaacgcatgccgcctacatcagcctg

SEQ ID NO: 200817 - DNA, 391 bp, Glycine max
  unsure (1)..(391): unsure at all n locations
agctngcaaaagaactcatctccagattctttatataggagctgtccattggggttttaaaaaagcttataaaataagaattccccaagcattttccatcttttggcttttattttagcatgagccctatcataaagagcttcaacaagtgactctgtggttctgagcagtgttttctcaagaaaatgtacatatttttgggatggaggaggaccatcatagacttccatggcggtatctttaatagtagtaggagccttataattagaattcacttcttcaataatgggttggacttgatgaatgaaggtgaatgtggatgttggaaactctacagtgaatgagaaatttctctcatacacaacaacanagtctttcttccattgacaaa

SEQ ID NO: 200818 - DNA, 253 bp, Glycine max
aggtcaggaatttcaattaaacccttacctcctgaagcgagaaaaaaccactcttgcgggtaacagaagaaagaaaataataatgtgaaaaatatatatattaaaaatcgaaattttggggaatttcaatttcaatgtcagagattctattatggtttctaatcgacaagagactctcagaccctaatccgtcaattcgcgctcgtgaacttcgataatctgcgggacgaatcgatatctccgaggcatgtct

SEQ ID NO: 200819 - DNA, 373 bp, Glycine max
  unsure (1)..(373): unsure at all n locations
atgctngtgtccaacataggacgcnctttttttatanagggcccncactcaaaacccagctcctacacatcctctccctgtcagcagttccaatcctagcatgagtgccaatccgggaaggaaccctccactgaagaagcttctggagttcgccgctattccgttgtcgtacacaaacttgtttccatctttgatcgccaaccaaatggcgatggtgacccccggaagaatttacctgtctcctttcccttggtggtacaaccccaacgcaacctacacgtattatgggggtacctgtggcattcaatagaacaatgtgtggccttcaagcataaggttccaagtttgatcgatgtgtggtggctaacattcc

SEQ ID NO: 200820 - DNA, 366 bp, Glycine max
aacatactcagcttcatcaggggatcagacacagagcttcaatttttcttcttaacctccttgattcaatgtaccttctcttccattgtagactctacaattttctccatgtatatcctcacatgacctagtgctaaatgtagtaacatgattcgtctaagtctccaccgataaaacttgctatataagctagatttgatttctaggttaaatctctgttcttgtcttgaaccatgattgggtgagtaagggtcctatgagtatttgactatgaatattgtgaggctaaaacctaaaccataaaattcttacaaaaatatcaaagtagcaagaaaacctcaaatatctagagtgactagttcacct

SEQ ID NO: 200821 - DNA, 386 bp, Glycine max
  unsure (1)..(386): unsure at all n locations
agctnttcgattcattctatgcacccatttttgtttttattgngtntagnngcattttattctcgtttagttactttttataccccctgtcgacgtgcttatgccattttacttaagtcgttactcgcttaacttaaaaataaaataaatctccaccgaacgttagaattgattatccattaactttggttaaaatcaattccgaccgttcggtcgttgccgtaccacgttggaattcaaacagaggttaacaataatatcatgacctgaaagtatcttttagtaaaattaagcggaaatccatcggacgtttctctttgggattctattcttatggaattgatattactaaggtgaactaagctaaatcacctgcctagtaagct

SEQ ID NO: 200822 - DNA, 351 bp, Glycine max
  unsure (1)..(351): unsure at all n locations
agcctaacaagagtatgggatttttttgtgtttggcctacntatctaaaaaaactttataaacagctagaggcctttatagcatggttgtaaacttgcgatttaaatcgtataatcatactaatttacaattctactagaggttggtgatttanatcggaagcaacatcgaaaccggagattactcgtccgattttgcttagactctaacgagttttggtatactcgcgtgtttgctccaagtccacgggtttatgataacccgaaactgtgtcgtacaactatcccctaaaatgactcctcgtgatctctgtctactcactcactctgccttgtataagctactcacccc

SEQ ID NO: 200823 - DNA, 412 bp, Glycine max
  unsure (1)..(412): unsure at all n locations
ctcaagctggtaacaatactagctataggcatcaagtactntgatgccactcttatgaaggggaggaatatcgttgaatatagcaactctacagcaatgaggaacacaatggttgtcacagaagccaaagttgtggcctgttggacctccatcaaaatggcaccaaatgctaagccaagactttgagagacaatgacactgtatatgaccacaatgagggataagagaaatgtcactggatgaggcttgagccctcccatccaatagattatgaaggcatatgcagttggaagtgcaagttctattggcatgtctcctactggtctggctagacagaatgaagaaagactgacattccggaaaacgtccttgatagcactctgtttcttgggaaatgtgaaaaagcattata

SEQ ID NO: 200824 - DNA, 363 bp, Glycine max
  unsure (1)..(363): unsure at all n locations
gatccttaagacacctgcggcatgcaagcttacaatataagaaatattatttttattgncatgaaactaccctataccaagaatatctgagtggaggcataaaactcagcataaaactcattccaattccacagttattcctactcacataccttagtaacattctctttgttctgatacgttaaccattggatcgccttgaaagttttactgagggttcctaatacataaatctaagatttgactgttgggatctgctagaaaatatctaaaacacgagatgtactacctttcctgtgactagcactgcacaactcaattttctgcataattggcaaaatttgcagcacaattagacagctt

SEQ ID NO: 200825 - DNA, 352 bp, Glycine max
cctcttcaaaggaatttggattggttgttatattgtacgttgcatctctagtccatatcaatatctttatgcttccatgcgtcatcatgagctaagtgacagaaacatttgcaggtccgaaagatttctcataaggcgaaactctctatcttaatcgattacaaccttatcataatcgattgcctatggtgtcgaaagcttggagagttatgtctcctattcggttaaccgatcacaaccttctccgtatcgataacacagttgttctaagacattgactgatttattcacgagtctctactttaatgggtaccctggtgataaatcaattatctctcctttcttgaggcgc

SEQ ID NO: 200826 - DNA, 385 bp, Glycine max
agcttataagaacaaaaatgtcttattatttctctaaatgcatgtgaatgaggacgcatcaacaagaatcaagccaaggctattatgcaagcaatcaatggggcaaaacataccaaatgattataatgatggatggctcaaattcttacaaaggtaaaatcatcactttcatattgagctttcaaaactttcatgacatgttgagaaaaatcaaggatttcaagtcacaaaatgtcaagaacttttatttataaaacaaatacccatatcttgaacatatcctataattcaaagaaaaacatgcaaaatctgtctcgcacacatattgacccaaaaattaaactataatcccacgaactaacaactttacaaattaacacaacca

SEQ ID NO: 200827 - DNA, 429 bp, Glycine max
actcagctgaatgaaagtgaacaattctgagccttgtctttttctaagctagttgtagagtgaacacatatagatttatcaattctcatactacacattttcaaactgtaactgaaaatgattagttcatgaaatctaacctattaatatacctcaatatactctggctacatgctttatcgttaacgagaagtaatagcacggcctaagggtgaatgccaatggcatgaattaaattcttgtgccacccaaatggaaagctctctcaccacttatttcattggtgtgatgccattatgtgaaaatctcactattgatggctgcccactacacatttccgtgaatgttttcctataatttttttaagaagaaatatgtcatgttatctcaatcttaaaacgtttataccgctatttaatcattttgttc

SEQ ID NO: 200828 - DNA, 407 bp, Glycine max
  unsure (1)..(407): unsure at all n locations
agctntatctgaagaactcgccaagcgcacttattgtttaatcgagttcatcctttgaggataaacattcatcctcttgctgaactacctatggctaagcaagggtgaatcgctaagcctaggtaacttaaccaaatttcgtatcttaagccttgcgctaagccgactntacctgagctaagcgcatttcatcacggaaaactttaggctaagagagcttagcttcagctaagccgacatgttatgttgctcatggcgtgcttagcgagctgtatcccgctaagcgcctattgttaatttaagcctttattgctgtttgtcaacttgaacgatcttcggtatcatgaatcttgatttctctttagttacaaatggaatcaagaaaaagagctatatcagataacatc

SEQ ID NO: 200829 - DNA, 481 bp, Glycine max
  unsure (1)..(481): unsure at all n locations
agcttgtgactctagtcaatttctttaattttattctcttaaaaagttgtgacttttgaaagaatcttcagaaacaagtcactttaagaattgtgacatttggaaatgtatttttcaaaatcagtcactggtaattgattaccatgaaggtgtaaccgattacacatcaacagatgtgactcttcattttgaattttgaaaattaaaacgtttagaaacactggtaattgtttacaagtattgtgtaatcgattacacaagtttaaaatgtttaaacacaagttgtaactcttggaaattgaaatcttaacattttaaaacactggtaatcgattactacctgttggtaatcgattaccagagcgtaaaatttcttggtaatgattttgngaaaacttcttgtgctactcaatggtttggaaacctctttagtacttatcttgattgagtctctcttgattctagatctagatctagatat

SEQ ID NO: 200830 - DNA, 198 bp, Glycine max
catatcccagatcagtatatatagaagctagatgataaatgtgaacaaatgatcctactccgatatcactcaactggaggctataaggtgcttgatccgaaagttagcacattataatcagaaggatgttggatttgataatctaaaagctggaactgggagcagaatactgatatgaagggaccttcaataatgata

SEQ ID NO: 200831 - DNA, 292 bp, Glycine max
cctgagctcacttaacagaaaatatcgtttttaagccagacgatcttaacatacatagacatgcatacactacattcatggtttgaaaaggttacaactccataataaatattaccagccaaaaacaatttaattttgtcttaaacctttgataccctctaatgccaacctgaatgatataaatgacaatacatgaaaacttaatacatttatcaaccagtgaaaataatgtgcaccaaacacacagaaaaatcattgtatgcagaggaatttgtttgtttttggatgccac

SEQ ID NO: 200832 - DNA, 309 bp, Glycine max
aaatattaataactgcggaaaatcaatttttggccactggtcatcgatcactacagagatgaatcggtgaagaagacctattaacattaaatatcttggccaaaccttatgggacttcaattggaaataccatcctaataaatataccctgtctaagacactaaagactgacttggtcatacagcctgaatatttctaacttctgtgactcgaagaaagcttgagacgatgcgaaacttcgtatcatcaaaacatacaggttgatcctgttgctacaataaatccttagcgcctccattgaaaacttag

SEQ ID NO: 200833 - DNA, 418 bp, Glycine max
  unsure (1)..(418): unsure at all n locations
agcttccatcaagtggtaatcagagctctttattcttaagtaggtgctccttaaacctccattaatnnttttttctttaccttctcttccattgtggttacttcatttttctccatgtatctcctcacatgtcttgttctaaatgttgttaacatgattctttagagtttccaccgattaaacttgctatagaaactagatttgattgtctatggttcaaatttcttgttcttgttcttgaaccatgaattgtgttaagtntaggttcctttgagttctgtcttgttattttttgtggctgaaacctaaaccattaaattctcacaaaaatattaaagtagatgacaacctcatatatctatggtgacttgttcacctattgtagtgttgcatataaagcatgtctagtcttaaactt

SEQ ID NO: 200834 - DNA, 394 bp, Glycine max
  unsure (1)..(394): unsure at all n locations
acactataaaactcagctttggaaagggtgtctcaccttctcgctaagccaacttgttgtcttaacgagcgtccgttaagcgcaacactcctgggctaagcacgaggaagaatctaaaagaagatgagcttgacacgttcgctaatcgcaccgcttcatctcactaagcgcaccgctccagtttatccgctaagcgagaaatacgtgctaagccaaaaatcactaacgtgcgctaagcggtccataagtgtgctaagcgcacaagcacgaacaagaccacctatntaagcctgaaatcagattttgtgaagggagtttggactgcgattcacagctctgcatgtctagggtttctagagagagaaaggtctaagttcaagagacgtttgagaga

SEQ ID NO: 200835 - DNA, 399 bp, Glycine max
  unsure (1)..(399): unsure at all n locations
agcttatanccaaatggacttaccttgtctttattttctttgatagcccttttgagccttgtttaccttaactttatttgaagcacactacaagctttaagtgaaaaaccatgatatcaccatatccttaaggaattntggagctttggaattgtttgggaataagtgagggggtttttgtttctttggataacatgttttgttggtcatgcatcatgatatattgtgagccatacttgatgtacattgcatataggttaaatgttggacatgctgaatatgatgctgtttctcaaaggcttcaatgctaataaaaatcgtaaatataaagataccctttatattgatgaatagattctaatcacaaaagaatgtgagactctcggctctactcttatg

SEQ ID NO: 200836 - DNA, 400 bp, Glycine max
  unsure (1)..(400): unsure at all n locations
tcagcttgatttctagacagcgtagcctgtgttaattgtttccaanaacaactcttcgaccaagtgcatttttttgataccccgagagaatgctccttcagtatcctcaaaactggtttcaaatgttcatattggcatgctgatttgcattgatattaaatatcatcaaatacacaagcacaaatttcttaggaacggtctaatatcttattcataaagcttgaatgtcaatgggcatttgcaacccgagggcataccaaattctcataatggccctcgtcatacacaggctgtttgtgatgtctactccttcatcttattgatttacctgattcaaatcaatgtaagaaaatgctgctccaatactctgcataaccattatgaagaataaaaattttgg

SEQ ID NO: 200837 - DNA, 124 bp, Glycine max
gcttaagcgcaatgcaactataatactttttactcggaagtagatagagaacggttatttacgaaacgctcgacattgaatgtttaagctttcgaaccatcttaactataataacattttactt

SEQ ID NO: 200838 - DNA, 395 bp, Glycine max
  unsure (1)..(395): unsure at all n locations
agcttaagatgagtggtattcttgtatcttataattcgnctcctcacctcaaaaattggggggaacctgttgtgtatgatgtttctccctccattacgatatctctcaactcacagatcccttaaagataagagctctagataccaatttgttgtgttttgttaataacagtaggcagaaatattaaacaatgaaagggagcgtaaagaaagaaattgagactacaaagacttgttttattctgatatgaagcaacgtatttaaaaacatggaaaagatagtaattgctaacaaaataataacatcactaacagatagataacaccactatcagatcatgcctagagaataggatcataactgctctatnctatcagtcaacatgactcttattt

SEQ ID NO: 200839 - DNA, 400 bp, Glycine max
gaacattttgccatggtattaatgaagaaagtcaaatctttctttaagtgttggaagcgcaccaataacatagaagttttcacacaaacaaaatattcaaatcaacttgaaaatgcacaaaatcgagctaataatttggagttggaagtgcaatagttgacaaatattacaaaaaaaaaacaagaggatatctatatccaacttcatattgaagtaaaattccaactagagttaattgaaactaaccgagaacaaatgaaacaccatcttgaaaatgaagtgaaacctcaaatcgtagacatattgaaagaattgctaccgctgaatacctactaactaagtgcaagataatatacaaagtctttattgaaattttttttagattattatgtggcatatt

SEQ ID NO: 200840 - DNA, 190 bp, Glycine max
  unsure (1)..(190): unsure at all n locations
agcttaaggatggaatacttacttgttggttatgaacanaagcgcaaaacggaatcaaataatgcgataaaggatgaccctacggctgcaaattcatcaatcccgtgggtatggcttttgaaaggggggaaaagacactcttgaatgtaaaacctcccacctttccgtatttttataatttggcgcaagg

SEQ ID NO: 200841 - DNA, 455 bp, Glycine max
  unsure (1)..(455): unsure at all n locations
tataagagcanaattgccttaatcatttccaaatatgcatgtgaattaggacgcatcaacaagaatcaagccaatgctattgtgcaagcaatcaatggggcaaaacacaccacatgattataatgatggatggctcaaattctcacaaaggtaaaatcatcactttcacattgagctttcaaaactatcatgacatgtagagaagaatcaaggatttcaagtcacaaaatgtcaagaacttttatattcaaaacaattacccatttcttgaacatatcctataattcaaagaaaaacatgcaaagtcgtacgtgcacatgatattgacccaaaatattaaactgaatatccgatgacactaacaacattaacaaattaacacaactaacaaattaacaatacccacagaactagcataaccaaagaacactcgncccccccctcccatacttaac

SEQ ID NO: 200842 - DNA, 226 bp, Glycine max
tttaatagagtaatattttaccgaatctctacctcctgctttaaaacgatgagacacttttttaaaacatgtgtccaagttttacccagaaagaacaactgacttatctctgaaaatttttccactatcgaaatattgtattataagggtgtgtataccagtgatgctctatgaactgagattttaacttaagaaaagaattgtttctatacagtgctactatgaa

SEQ ID NO: 200843 - DNA, 428 bp, Glycine max
  unsure (1)..(428): unsure at all n locations
catgcaagctnntctcatagttgctgctcttattgttactctttcttatcaatcagcactaagtccccctggtggagtttttcacgctaatgctggaaacaataataataataatgttaatatcacttccctcaattctactactattgctacccaaggaattaatgttgggacttctgtcatttctgaaggtgatttcttgaccttatcgattttcaattcactttctcttttgacttcaaccgtaacaatgtatattctcacgccaagtgggatagtgggtactatattgttcacgcacaatgtttggtttgcctactgctatctatattctataagggtaatatccccgactaatgctaccaaatatttcaatttgattatgctgngtttattcttcttcttgtactcgggagtatggtggacat

SEQ ID NO: 200844 - DNA, 376 bp, Glycine max
  unsure (1)..(376): unsure at all n locations
gcacatatggagatgtaatgaaacaacgagatangtgctccttgagaggttggatcaaatggagaatagagatcataatgaagaagaaaggaggagaagagggaatgatggtgttcctagacaaaaccgaattgatggtattaaactcaacattcctccatttaaaggatagaatgatctggaggcctacttggagtgggagatgaaaatagagcatgttntctcatgcaacaactatgaggaggaccagaaggtgaagcttgctgccacggagttttccgactatgctcttgtgtggtggaacaagctacaaaaggagagagcaaganatgaagagccaatggttgatacatggacggagatgaanaagatcatg

SEQ ID NO: 200845 - DNA, 409 bp, Glycine max
  unsure (1)..(409): unsure at all n locations
gcaagctnttctccagcatatctctacctctactttgttttatctgcttaagaatgcaactttngcagcttaagccactacttgaagagattgaaagtaggtcttcaaggaaagaatatggtcaaattctggcagaatgccacagactatactgtgagcaatgcctctctttggtgagaacttacatgcttagtcattgtgtattggttggatattttttcaatattagtaagtcaactgatcgcaagattctnttaggctgatatttcctagcatttatattctctaattttgagagggaagttggaagagagatccgaagagcatctcccctgtctatttctgttactactataactatacctttcncctgccttctccttttagaaggctattaacttctctaatg

SEQ ID NO: 200846 - DNA, 343 bp, Glycine max
tccttaagcacctgcggcatgcaagcttgagatgaggaagtgtagaagggtgtttcttctgcttttattgatgaccacagagtggtacctggagatatgtcgcgcgggtcatgagaccttggggacgtcaggtggggtgctatttgccaaaaccaagcttgaccaatcctgacccaacccgggcatagtcggtcagtgagaacctgtgatgtacctaaacaggcgagctcctggcagtcaacagataaaaggaacaaataccacaaagcaaggaggcttgtggtggctggccagctgtgaaacttgattgatatgtgagatatggcctctggtaatcgattac

SEQ ID NO: 200847 - DNA, 339 bp, Glycine max
  unsure (1)..(339): unsure at all n locations
tagtgtgacttgtgatgtgagcgcaagaagactcttctntgtaggcatgtangctcgatcacaaaggatggcatggtcactagctaccatgttttcaattagctccatagcttcatcaggtgtcagtttgatcttcccatcagcggaggcatcaaataactactttgaatagggtcacaagccatcaatgaagatattgagttgaactggcttgctaaacccgtgggtggtaatctttcaaagtagaccatggaagcggtcaaaagcttcacttagtgattcattgngaaattggtggaatgaagatatcttcaccttcccctcagtggtcttggactc

SEQ ID NO: 200848 - DNA, 424 bp, Glycine max
  unsure (1)..(424): unsure at all n locations
catgcaagcnngnnaaagaacttaggaaaaatcattacttttcttgtacgcacatcgntcacgtatatgatatccactccacaaggtttgaagtagaggagaccttcaaccctataacgcaacgtggtggacaaaagtgggcagttaacttgaatggtcatcattgtcaatgcggaaggtattatgtgcttcactatccatgtccacacattattgcagcttcgtgagcatgaactactaccaatatatagatgttgtttacacaaatgagcacatcttataagcttacttcgcacaatggtggtctcttgggaatgaagcggctattcctccttctgatgacgcatggacacttatccctaacccaactacaattcgtgcgaaaggtcggccataatcaacaaggataaggaacgacatggat

SEQ ID NO: 200849 - DNA, 286 bp, Glycine max
  unsure (1)..(286): unsure at all n locations
gcacccttggccatctttgttctaacccttgccataagtcctccaagaacttctaaaggctccttgcccttattccttgccttgtcctcatcagaaggggatgacaaaaggtgcattttaagcttttttctggacccaagctaacctctggctcgcctgagcccccanatagctaaggggttaagtaatcagctagtctgggcgagcaaggttacattaagacgaagcaacaactcgcctgtgtgagctctaccatgcctatgagagcatgcatgacccctaatgc

SEQ ID NO: 200850 - DNA, 410 bp, Glycine max
cgacaataattttttactcggatgtccgattgagtcccgtaatatatcgagacgcttgtaattgaaattagaagctctgagcaaattcaaacgacaattacttttgactcggatgtccgactgtgtcccgtagtatatcgagacgctcgaaattgataactgaagctctgagaaaaagcaaacgacaataactctttactctgatgttcgattggtgcccataatatatcaaaatgctcgtaatcgaaaatggaagctcttagacaaatcaaacgactaatttatttaagtcggatgtccgattgtgtcccgtagtatatcgagacgctcgaaattcagaacagatgctattataaaaatcaaacgacgattactttttacacgaatggtctgattgagtcccataatat

SEQ ID NO: 200851 - DNA, 142 bp, Glycine max
  unsure (1)..(142): unsure at all n locations
tacctcacccactcaagtgtatcacacaattatggctgttctctaatgaaacactcttgccttttaccactctaattccccttgagttcttangcaattcaagagattatggccacaacaaagaacaattcaccaatatgtg

SEQ ID NO: 200852 - DNA, 310 bp, Glycine max
  unsure (1)..(310): unsure at all n locations
cacacatcttcatacaaaaactctattttntctatttattattattattatatatattgtaatgcaaaatatattataattttttattgtagagtttagaaacacttatatacaactatcaatatcaaccatcaaaacttttccaaaggagcatggaaaggaagggaataagatagaggctaattcccatatgcagacacagaagctagagaggatgccaacagaagacatatatgctagtgctgaggccttcatcaaatacttcaggcaccatctgcttcttcagaggcttcaatccatagagaatcac

SEQ ID NO: 200853 - DNA, 410 bp, Glycine max
  unsure (1)..(410): unsure at all n locations
actcagcttcacatgtcttctccacatacacccaaaccacctttggtaatattctactatnntttctacttcaagtattaccccaactttctttaatcttgtctagggtgcccatacatccaagtccaacacagcattctcatcggtgatacacttgaattnttattcttgacttcttaccactcataacttacttccacataatgtttattttcttgtttatcctcatatacaaagtgaaactaaaaaagtatacacaatcattacacagaacaacaaagtaaaaataataggatgaaccgtcaacagtagagttcctccacaaacaaaccagtctcataacactcaacatcatgcaactgctacttcagttcagatagcgccctagccaatagcatacatcatataat

SEQ ID NO: 200854 - DNA, 283 bp, Glycine max
  unsure (1)..(283): unsure at all n locations
taagaggagtgtcccactggtaaaactaactttccaaatgtttgccttcgcaggaaatggccccgaggaagcttgcctcaaagaggtccaggaaggacaaggcagccgaaggaactatttccgctccggagtatgatagtcaccgctttaggagtgctgtacaccatcagcgcttctaggccatcaagggatggtcgtttctccgggagcgacgcgtccagctcanggacgacgagtatactgatttccaggaggaaatatggcgccggcggtgggcatcact

SEQ ID NO: 200855 - DNA, 405 bp, Glycine max
  unsure (1)..(405): unsure at all n locations
agctttcttggttgcgatgaatcataatatttctcataaaggtagaaatgatgcacatgcaacatgaaaacccaacaaaataaggtctaaccttttgtactaatcataaaaaacgaacaaagatgtaaactttgttgttgctatgaatcaaaaaaccacaataaggtaataaatgatgcacatgctacatgaaaacccaacaaataaaggtcgaaccttntgtactaatcataaaaaatgaacaaagatgtaaactttgttgttgctatgaatcaaaaaaccacaaaaaggtatgtaataatgcacatgcaacatcaaaacccaacaaagcccgagcataatcgtacataacaacaaaccacccaagagaatccgaaaccttcctatacataacaacaaactcat

SEQ ID NO: 200856 - DNA, 354 bp, Glycine max
  unsure (1)..(354): unsure at all n locations
ttatgatggaacaacaatgctaaaaatacttaagtttaagtaactgcacataaggtttgtccttctaagaatagttggagagtctgatattcttattaaaattgaaattggttttgcaattgcatgcaggcctgtatcaggggcttccatgaaccctgcaagaagtattggtccggcacttatcaaacatgtntaccaagggttatggatatacgtagttggtccaattgttggatccatagctggagcacttgcctataattntcttagatccncatacaagccaccatcagaataaaccacatggctggctttcttgaagagcagtgaatataccacatgctgtctaataat

SEQ ID NO: 200857 - DNA, 470 bp, Glycine max
  unsure (1)..(470): unsure at all n locations
agcttcaaccaaggggagatggaccattttttgtgcttgaaagaatcaatgacaatgcttacaaagttgagctgcccggtgagtataatgttagttccaccttcaatgtctctgatttatctctttttgatgcagatggagaatccgatttgaggacaaatccttctcaagagggagagaatgatgaggacatgttcaagagcaagggcaaggatccacttgaaggacttggaggacctatgacaaggtctagagcaaggaaagccaaggaagctcttcaacaagtgttgtccatactatntgaatacaagcccaagtttcaaggagaaaagtccaaggttgtgagttgtatcatggcccanatggaggaggactaaatgacaccactttgtctcaattttagagtgtttagtttgtctaaataatggcccaatccttgtaaagttggctgaccaaaatatgttttgggt

SEQ ID NO: 200858 - DNA, 213 bp, Glycine max
tgagctcacgtggaggtgggcaacaggggatggtgggtttatgcgcgctttgtggatgtggaaaacttgttgtgcaccatcgcccgaccaccacctagtaccacatgtgatgggtaccccataattctacaagcttgagatgaggaagtgttgaagggtgaaacttcctgcttttattgttgaccacatagtggtacctggagatatgtcgcg

SEQ ID NO: 200859 - DNA, 357 bp, Glycine max
  unsure (1)..(357): unsure at all n locations
tggcgctctaaatngagggaatgagctcatatatgtggggcaattctggttcgtcttcttgcttgattgggctgaatcgggggtttgtatgacatgaccctaggcctataatgcantttgaagcaatgggacatgccgcattgtccccgttctcttgctattgatgcctaaacgcgcgcccaccaagcgttcggtgaaatgcctcaatggcattagcgtgtgattntcgtacggaaacaacccatggggcaatttggtttgcacatattttctattttttgggacatgcattcactttcgaaagggctagagtaattgccccacatatatcctacgcctaggaaccaaagtttttat

SEQ ID NO: 200860 - DNA, 380 bp, Glycine max
  unsure (1)..(380): unsure at all n locations
tctttaccttctctttcattgatgattcttcatttttctccacgtatctcctcacatgtcttgtctaaatgttgtaacatgattctttatagtttccaccgattaaacttgctatagaaactagattngagtctctatggttcatatatcttgctcttgctcttgaaccatgaattgngttgagattatgttcctttgagatttgtcttgttattcttggtggctgaaacctaaaccatgaaattcttacaaaaatattaaagtagaagagcacatcanaaatctagagtgacttgttcacctattgtagttttgcatagaagcatgtctagcatgaaattgcacatacgactctatgtgngctgatttatttattgttc

SEQ ID NO: 200861 - DNA, 470 bp, Glycine max
  unsure (1)..(470): unsure at all n locations
agcttatcccaatctgttatttgcaggttttatgtattataantatgtttttcacctcttgcaactgccaaattcatggggtatgaaataatgcatgttacatgaaaaccgtgataaaaaggatccaaggacgctaatttcaatccatatgcctacagtcaaccaccctatcagaaagcataactcatttcaaatcaccaacccaatatcaacactgtactcgtatcagcatgcaaaactctgcctactcaaataacctaggatgccaattaattattaaaatgttcacaccactccttgccatagaaagttctgcaatactattagccaggtttcatagaacataaacagaactagagtaccttgaggagcatccaaccacaggccagaggtgagtagtagtaatggtggttatattcacttattaactaattcatcacaccattcaacanataataaatcagatgact

SEQ ID NO: 200862 - DNA, 409 bp, Glycine max
tattaataatataattaaccaaaatgaatcatataagcaagtgataatacgttccttttgagttagttttttagttaagtcaaaacatcaattttaagactaataataactacaatgtataattaaaacaataaatatgtatgaactcatatgtgtaatttaaatactttattgtattgtgtttgacttcaaaattgtgttaataaattaatatataccttatttgatgtaaatattctttattttataatgttaattatttatgttcttattagtaaaaaaggtcagaaatattgtgtttcagttaatttggtgatatatatagtcaaaatataataaatatataaagtaatacatgaacttaatgttatatttatcggattcgacttcatatgaataagatatatat

SEQ ID NO: 200863 - DNA, 302 bp, Glycine max
  unsure (1)..(302): unsure at all n locations
ttcctcttatttaatgctntcttagatcctccagacatgcttgaatgaatcttgnaaattagacaaagaacactataatagtgattgagataggaggaaactttcaatattcaatgactattattatcctgaagaagctataatactaatctggtatcaacatgaccaccttactattccctccacctgacattgttgataaataatatataatgcatatggaatgattctgagttatttttcattataactatngactattgttgttgcctaagtgaatttattgttattctttcctttat

SEQ ID NO: 200864 - DNA, 348 bp, Glycine max
  unsure (1)..(348): unsure at all n locations
cagaattctaacagattaccttctcaatctgtccagaatcccaaaaatgtgagtgccattacattgaggtcaggaaagcggtgtcaaggatctcaaccagcaacatcttcctcatccgcaaatgaacttgcccaacttcactctactccagaaaaagatgatgacaaaaatttaaagactaagttacctaataatttctatgcatgtgaatcttccactggtaattctgatttatagaagcagcatacccctcttccattccctccaagagcaatttccaacaaanaaatggaagaggcagagaaggagatcttggaaacatctagaanagtagaggtaaacacacct

SEQ ID NO: 200865 - DNA, 466 bp, Glycine max
ttaagacactgagcatgcaagcttggctatccgctgagcggagagtttttctttcctatcttgcgcgctaagcaggatgttccaacttcaacttcttcttcaaggctatttcttcaagtttctacatcaatttacctccaaagcacttgtaattttccttcttttgaatgctgctcatcaagaattaaaatgatattaaaatcctcattattctattaaaaacaacagtaaagcagaggaaatctaactattcttctctaattcgactatcaattaaacctagatttcctagttatcatgtgccttcacttatctcaattagtatgcttatccaaattagccctgctatctaacgctaagcgtgtagtgcccattgagcttgtgcattgtgctaaactcttgggacgcagaaagcacatatcttctatcaccaatttgctctttggagattactttacttttatgc

SEQ ID NO: 200866 - DNA, 380 bp, Glycine max
  unsure (1)..(380): unsure at all n locations
ccattntgacatattcgtgcatatgtacatagagactaacccattgctaatagcctatattgagacgggtcaatggggttntatataactatgttaattgctaatagtcaatgcctatcagtatcatcacataatccaatgaccttagacttcattgtataatagcaacacaatcatattaacataataatttacataatatggtcgtcattatgaggatcaatctctcagacaaaagtcaaaaggaaggggggacacaaggacagatgcaatntaaaatccaattgctgttttatatcttccccatgagagagagatgatatctcatcactttgagtttcaatgtatgaacaattgtgcacacagtggacactgttatg

SEQ ID NO: 200867 - DNA, 329 bp, Glycine max
aactctgatcacaaattaatgtgacaacacatttgatatatttatttaatctatccacaatattttatttttattgttgaacataaaataaataattagagagcatcgcacaatttttattgtactcattaattattagtctatagtattaatcataggagaaaatgtatcaaccgaatatcaatattaatcgcattaatgataagatattagtaagacttatttttacaaaacgttggcttcgtatatcgctgagacttagtaacgcgtgattaaataatatttaataccactcaatcatttagttcatattcaaatatcttcataat

SEQ ID NO: 200868 - DNA, 449 bp, Glycine max
agcttctaggctcaccaggccatgttggtttgttattgcagcaacctgctatccctccactgttgggaatgggaggtgttcgctgttctgtgaaaccagcctcacgcagtgccctccactctaagaaccaggagacctatgccttcgctcaagtcccatgattcaattctcaacttggagcgggcaggccaacattttgcggtcacagcccaacccagcaaagccaaagaactgttccatcaccttggtgcccccactggggtcacaagctaacgtaactcagctcgacattcaatcaagcttttcagagggtatataaagaatttgttgtctccttttctatcctatgtgggacataagtaagaagagagtgtgctagttaacactaacaatctcaaagagcttctttctgcctcttttttctttctggatgaaatggaagataaatt

SEQ ID NO: 200869 - DNA, 155 bp, Glycine max
  unsure (1)..(155): unsure at all n locations
ggaggaagaaggagaaatagttgctattcaccattcttgctagcatcaagtgttcatctccatcacttcttcccttcattcttcttgaagaccaaacctatgtaagtgggcacttattcgtggacttanattggttgtgttgagatattcaacca

SEQ ID NO: 200870 - DNA, 427 bp, Glycine max
  unsure (1)..(427): unsure at all n locations
agcttatatgaattagagtttgagactcttgtatgccaaaatattctcaagactataacacatttcattctctcatataaagatataaaatttgaaaaaatactaacaaataaatctaacctgttgatcagagacacagagtctatctcacaggttatgtcaattgagaataatgtgagggtatttttgtttgatttataaaatgtgtaaagaaagaaaaatgacatatataccttatattaaaaataaaatataatatatatgagggtatctgtgccatttgcacagaaaaagctactgattagtccttccatctaccttttacctttcgtctaaatttggacagaacttgagatcacctgngtccatgatacaggcttccttacttccactatctgtgattaccaaatgaaggaacgcaaacata

SEQ ID NO: 200871 - DNA, 397 bp, Glycine max
  unsure (1)..(397): unsure at all n locations
gtttatctatttatagtataaaattatattattgatcactatgatatatttgaagttatttttttattgtctcaatacaaattatgattctcggtttaaaaattagattggtgatttacgacttgataaccatgtttgtgattgattgataactatgctcaagaccacaagtcttttgttttgtaacacttgccttcccgtgttacttacatattactatttctatatgagataattataattcttggcctgctttcttaacacataagtgatgtaatgcaggtccgtttcaaccactttntaattactcttctaatgatttgctcttaanttttcttttaggattcaacctgcttgcctgccaatggagtttaatatccctgattcaaaacacaac

SEQ ID NO: 200872 - DNA, 344 bp, Glycine max
acacaagtagtaggcattgttactatatcatcatatagcaaggccctcacaaaagtatgcgaagggttctctaaccgaacttacgccgtaatcccatactatgattgcgcccaatttcacttgcttatgacgctattaaccatgcattatgttcaagatgagctcgcgatatgactcaccacaatgatatatccgtgaccgaccagtctgttacctaacaataaaaaacagagaactgacgtgcgtactatgcaagcgccattttataccaacgaaagtgcgaggccacaatcgtgagttttgagcaaacattgaaagaccgagaaactaaaactttatataca

SEQ ID NO: 200873 - DNA, 380 bp, Glycine max
  unsure (1)..(380): unsure at all n locations
tcagcgtttatgcgagacagttaccaacatgttagctatcatcgccaagtacgaagaagagttaggtctagccacggcccacgagcatagaatcgcggatgagtatgctcaagtatatgcggaaaaagaggctagaggaagggtgatcgactctttacaccaagaggcaaccatgtggatggatcggcttgctcttaccttgaatgggagtcaagaacttccncgattgttagcaaaggccaaggcgatggatacacctactccacccccgaaagattatggcttctcggtattgcacatatgataactaatggcccataattaaatcgtagacacttgatggctctaaaccttgctggatacactttttntcttttttt

SEQ ID NO: 200874 - DNA, 264 bp, Glycine max
  unsure (1)..(264): unsure at all n locations
tacctatctacttactatccttctttaggatccctaaaacagtggtgcacagaattgtttccatccagagaaatttcctttggggaggtcaccaagacgccaccaagattccttgggtgaagtgggacacacgttgtcctcctaagaacacatggggcctanggattaaagacttatctaaatttaatgatgctctacttggcaaatggtggctgggagctggctaataaccacaatcaaccttggtctataatgttactttct

SEQ ID NO: 200875 - DNA, 470 bp, Glycine max
  unsure (1)..(470): unsure at all n locations
ngcagcttcttggtgttcacatgagagatatttcaatgacgttggaatccatgattttatctttgatttaacatatcagaacataaatattatgtagccaccaaaatgaaagaacaagttagcttgaaattcatgatttggtcacatttctctgtctcaatcctattcaaaaaaacaacaaataatttaaaaaaaaaaagaagaaaaaaaaaacaatttatgaaagacaacatgataattactgcataatttattcaagaacgcaatactcacggcatcagacatcaatatccatttgtcaccacaacctaattgatttttcacaacaaaatatatatcaaatattcaagcgaaaacacaagaggcgaaatcactcacaacaaaatatatattctattattgatataaccgtaacaaaatttgcatgaattcctactgaattttttcgcgcaggaaaatccacatcacat

SEQ ID NO: 200876 - DNA, 262 bp, Glycine max
  unsure (1)..(262): unsure at all n locations
gtcatttcttcttctttctttcttccaaagccatttctaaagttccaagaactntctccatcacccacaaccaccattagccaccacaaaccatcgttgttctccacatcgagaggaacccttcaaccgaagcggaatcttccaacttggcttgcggtttcggtagagaacgaaaccctaatctgacctttcattntctttcgaggtaaccatggttctacgcttggttcttggtagtttcatcttgtctttgcatcttttc

SEQ ID NO: 200877 - DNA, 467 bp, Glycine max
  unsure (1)..(467): unsure at all n locations
agctngtatagttcccctatttatggtcattttgtagntaaattggtaaataaatcttgttttatggttaacgctgtctctagaacatttccattgaatttaatgatgaaatctgtgcattttcaagtgaaaaggaggctaagttttgaattgcaaaatgtagcagttgggctaacctcagtagctgggctaagcgcatatccaccgctaagcatagcttcagcgtgcttagcgcaaaggagaatctgacagagcatcagcatcaaaggccgcgtgctaagcgcgagatcagtgcgctaagcatagcaagtgccttcagccaggctaagctcgagactggcgctaagcccaatttcacttactcgcgctaagcacgagcgtggcgctaagcgcaacatcatgattttagagcctatttaaagcatgccttgtgcagaattagggtaccacttttatgacacttttat

SEQ ID NO: 200878 - DNA, 434 bp, Glycine max
  unsure (1)..(434): unsure at all n locations
agctngaaggtgtgtaacccaccatttttatattttattactggaatgngtctaccatcacgattaccatctccctttccatcattgggggtgccacttgggctgccagatccctccacctttgggtgtattctttgaaagattcatgccccttttttgcacatgttctgtagttgcatcctatccggaaccatatcacaattgtaccgatactgcctaacgaaggcaaccattaggtccttccaagaatggactcgggaaggctccatgttagtgtaccaagtagcaactactccagtaagactttcttggaagaaatgcatcaacagttcttcatcttttgcgtatgcccncatcttttgacaacacatctttagatggttcttagggcaagtagtccccttgtacatgtcaaagtccagcaccttgaactt

SEQ ID NO: 200879 - DNA, 328 bp, Glycine max
taaggtgcaccatctgtatccatgtatgccctgaaacatattggctttcattcgtacatgtgcaatgatgagcgttgcttatctaaatgatatatgaaattctgattctgaggacagatgtcgtacaggatgtcacgacatgacgcttcagaacatgcagcttatgtgtgtctgaatgaacagagtaatcatggaaatcacacaggagaatcgtcacgccggtcggtgcacctcacctacatatgggagtaccaagcatggaggacatcactctcactagtgttagtcaaagtctaacagccctgttacaaccttctacctaaccact

SEQ ID NO: 200880 - DNA, 447 bp, Glycine max
  unsure (1)..(447): unsure at all n locations
agcttaacttctcacataggtaagacatctttcttatgntaaatgcctctccacacaaaaaatagtccaatttcacatgcttggtcctagcatggagaacatgatcatgagctagattgttgaagaagctaaacttattcttcatgaacttatattaaaggatgactaagactagagtatagatgcttgtaatttaagatgatgtattaatgaataaaaacaattttctttcagtttaaaattaacgtacaaactttataaattattattattatcttcaagaaaatcaatgttattcattcaatacatcatctagaagaacaagtacctataatgtggtttacgccatctttaatccatcaaaagtcatgaggtataagtttagcttctacaacaatcatggcaccattctcattggtgtagatgcttggctttatagtgcacttc

SEQ ID NO: 200881 - DNA, 308 bp, Glycine max
  unsure (1)..(308): unsure at all n locations
gctgcagctcaaggaaatttactcacactatttttatgncgttgtatgttgcttaggattgaatgtcgagagtaaaaatcaacaaggtaataagcttgatgttgcaaatatgaaaatgctgcagagcacacacgcaagataatatataattcggaatgtttgcatttgagagggggtngaagtagcatgagcatccattgtggaaaagatggtaattcctgccttaggtagttcgggcatgtgtagaaaagacttgtaaatagccaataatgagagtggattagatgaagggtaatcaaatgtgcaat

SEQ ID NO: 200882 - DNA, 464 bp, Glycine max
  unsure (1)..(464): unsure at all n locations
agctnctatagaaggttcgttcctaatttctttttaattgcatcacctctcaatgagctggagaagaagaatgtggcatttacctgtggtgaaaaacaagagcaagcctttgctttgctcaaagaaaagcttactaaggcacctgttctagctcttcctgacttttctaaaacttttgagctagaatgtgacgcctctggagtgggagttggagctgtattgttacaaggtgggcaccctattgcttattttagtgaaaaacttcatagtgccaccctcaactaccccacctatgataaagagctttatgccttaataagagccctccaaacttgngaatattacctcggttccaaggaanttgtcattcatagtgatcatcaatcacttaagtacattagagggcaaagcaagttaaacaagaggcatgcataatgtgtagagtacctgcagcaatttctata

SEQ ID NO: 200883 - DNA, 440 bp, Glycine max
agcttgttaggtcctgcgacaaagtatatatgataatggccatgttatagaacaaatcagtaaataagaatttccttcatcttcttggaccaatatatatttgcattaataaatgaatttcttagttgactgtaattttgcaatcaatcaaccacctcttgccaactgtttctaaaggccatcaaggaaaaaaaaaatccatatattttagaaggaaattaaacattttagcataagatattttcagcatcaaaataaagattccgacagagaagaataataatcctactttaaaaaacaatgtacaatttcagagccaactattgttctattctcataaaatttgaacatatcgcaacagaacctaagcaaatcctcccagccactaacaccacaattcatcataacttatatatacacatgagctgaatttcctcgac

SEQ ID NO: 200884 - DNA, 475 bp, Glycine max
  unsure (1)..(475): unsure at all n locations
tcacttagttgttggaactgaagtttgtgaaagttgacgatggatattggtccacattatttggctcaaccaactgtggttgagttagaggaattgaaacacaaggggtgctgaacatggtgctgcatgcaagcacctcttgaaccggatcttgaaattggacaaagtgtggaacatgattctgaatttgaggatcacaaagctggttctgtaattgacctttttgagcangcatgtcatcanggtcattgtgttgctgctgtgaggtggagaatagtgaagaagccaattctaaaagctcacggttcaccatgtactggtgcatgccaaggagtctttggatgttgatttgtgatgaaccatatatagatgcgtttagaatggaattgatgtccaatagatcaagtcgaggacctgtgtgtacanggtcaatttccattctcagaagcctttttctaatgtgaagtgtcaatag

SEQ ID NO: 200885 - DNA, 352 bp, Glycine max
  unsure (1)..(352): unsure at all n locations
atggcactgtcagtgccatctctgtgatgtgaatcgcaagtatcccttcccccacattcatgttntgtttgatgcttgatctcagcactcaaggtaatacacatggataaggtagcaatcaacactacttattgttgcatagagaaatactagcaatatactctctaacacactctntggaacacactntctactattggctganattattaacaattgaaactttgganggcccacatctcatttgatgagtctcccnctgaattggacttttcacataattaagaataatagagatgtgtagaaagagttgctgctacctctcgcacatactatactgaagcttattgac

SEQ ID NO: 200886 - DNA, 430 bp, Glycine max
agcttgaagagaggaagtgtggaatgttgtcacttcttacttttattcgatgaccacagagtggtacctgaagatatgtctcggggatcacgagaccttggggatgtcatgtgggatgctattgcccaagtccaagcttgaccaatcccgacccaacccgagcatagtcagtcagtgagaacctgtgatgtacctaaacaaacgagctctctgcagtcaaccgataatataacaaaaaccacaaagcacggaggctcgtgtggcggctggccacctatagatcttgagttatatccggaatatggcctctggtaatcgattaccaagggtgggtcatctattacaaggcttaaaaatgaacaccggaagttaagatggtctctggtaatcaaatcccaatgtcttgtattcgattaccacgcctacagat

SEQ ID NO: 200887 - DNA, 442 bp, Glycine max
  unsure (1)..(442): unsure at all n locations
agcnngangatagaaatgggagtttttttttatgataggaagtaatctggctacgtaattctgaatgcatggtgattctagcatggctgttgttatatgctgccgacattatctgaaactgaagtttgtggcattcatgcatcacttcccacatccgattcaacctgacatcaaagcataacagaaacagatgaaatacaaaagctagaagctcatagcaatcaacataagttgaggtgtgaaccatccatccctctgactatgaaaacatatgttgcttactaatccaagatcaaaaaactagcattcaaaggttgatcgcagaacatcagtgagtcacaatagaaagccatcaatcttgcataatcaattactaaaagttaactcttaacactataatttggaaaactgtcaatttgcattgacgaataatgtactccta

SEQ ID NO: 200888 - DNA, 417 bp, Glycine max
  unsure (1)..(417): unsure at all n locations
agctnctctaaatattgcatctaagtttttaataatnntatgaattaagctaatgtcaaattttactgaaccacttcattacaataagtaaggtatacttacaaaatggcttgtggatgctttatgttgtgagggcattgcagctggttttttttaactacaacaaacaaagcaagagtttttcccttaaagtgatgtctacttttgggaacattagccctattttccgagtttcaatggtactctatttgcagcattctcttcatttattttgaagaagcaaacaagaaaaaatgattcgcctagatatctaaaatacacctctntatcctcattcacttcattagtgatggtaacctgaccccatccattttgcaagatcaggatctctgtcttagtctttattacattatcctc

SEQ ID NO: 200889 - DNA, 445 bp, Glycine max
agcttgtaactcactataccttatacatctttttatctagggactaataaaagtaaaaataaaatattattcctattttctgacttttcattatctcactttttttttcatgtgcctccttctctaaacctttctctccaaatgtcgcaccttgaccgccaatgagggttgtatgacctactgttattttctttttgctcattatttctttcttttcattgttaatttattcaaatgtgttcatagtcattttccttcttgtcactatagtttttattcttttggccaactctagtgaggtcatgtcgtgccactgccgccatcatcgagatcctatggcggcctcgagccaccaagcccttcttctgctagtcgtaggggccgcacctcctcgatggatgtgtgatgaggacatgaccaacagcaaaggcaatgatccacttga

SEQ ID NO: 200890 - DNA, 321 bp, Glycine max
  unsure (1)..(321): unsure at all n locations
ctatggaggctctatctttgagcttcaattacgtcctttaatggtgattntccatcatggagatgcagcggaagacaaaggagaagaggagagaggaggcgccatccactagggaataagccttggaagaaggagcttcaccaccaagatgagccttggataagaagctnggagaggatgcttcaatggaggaaaagaaagagggagagaaagagagaggggggagcacataattgaaggaagaaaaagggagagaagttgaactttgtgttgtgtctcacaagactctcattcatcanagttacaacaagtgttacacat

SEQ ID NO: 200891 - DNA, 256 bp, Glycine max
  unsure (1)..(256): unsure at all n locations
tacgacacaccgcatgttctccttttcttcgccgctcacaagctactctgaggatatgaatactatactcaaaaccgggaatgcaggcggctgcctggactctctagtgtctaaaaaagaaggtcatangatgccttggcacaagattaattttctctaaccatatcaaaccttacatcacgagaatagtccatgtaaacaacagagcatatctacgcgcacaactagagcgtcagctatcactctctcagtcact

SEQ ID NO: 200892 - DNA, 456 bp, Glycine max
  unsure (1)..(456): unsure at all n locations
ttaagtcacctgcagctgcagcttgtcaaattgccatgttgggtgttttatattacccattctgtnttagggtttttgtgatgatgtttgtgatgtttatatgctgaaattgctgatggaaatctgttagagacgaagggtagaactaacccaaggttagaaagtgagaatgtgatgttatgagtgaaaaaaaaagagtgagactttgagagttggaaggctaagtctgaattctgtggtaaatggaggttagagtgagttaatactagcttgaaatgtcatttagaacatgtgagaaaggttaggctgagctagagagaanaacaaatgaccaaagtgaacaaagagccattgctagggcaaatttgggtgttgaagagtcaaattttgatttggtggaattttaggtgtaaatccagtttgggcaagtttagattgatgttatggacttgtgtg

SEQ ID NO: 200893 - DNA, 376 bp, Glycine max
  unsure (1)..(376): unsure at all n locations
atcctgactcaccatanaccttgacccattgtgttatatgtcaattcttaccctcggaagcaaaaaaaaaggggagagggaaaatttccaatcaaagaggaagcaaaaaaggagagaaggaaaatttccaatcaaaggaaaaaaagagaggaaagggaattcccaatcaaagagtgggagaaagcaaaaagaaaagaaagaaaattcccaatcaaagaatgggagaaagaaaaaagagaagaagaaagggaagatagttcccgatcaaaaaaaaataatatgcagaaaggtctttggaccggacaatatctgaacaatacagaattgtcaccaaatgaataaaaagaaggaaagggaaccatgacctacaatggtc

SEQ ID NO: 200894 - DNA, 472 bp, Glycine max
  unsure (1)..(472): unsure at all n locations
agctngtagcacaactggacatgatatatgtcttgtgttggtttagttaaaggataaaaggggacgtcccacattatttccatgacacaaatgcaacaatgatgatttgaaaattttatgcaaaactagtcatgcatgcacctatgtggacactcaagtgtcaaacttttatggtcatgtaatgctagggctcaggattcatttcctctattttagtcaactcagtgtttccaaaatacgttcctttatcaatttgtgcattcatccgagtctatttttgggtgttcgaaaaactttcacagcatttacccttctagtgtatacacattttttcaaaaactggttatgatcagtgaattctttcaaagaaaagttggaaattatctcttttcacacagcatgttgtgtttagccggataactctttacttttattattctatgnttcttttttcttcattctttctcttttc

SEQ ID NO: 200895 - DNA, 435 bp, Glycine max
agcttctcgcactcatggagtggtcctatattatctcgcggcacacgggcaccggtatgaccccatacgaagtcgtctacggcaaacctcccccttctcttccaacgtatcttcaaggttcatcctgcaacgacgccgtcgacaccgtacttcgtacacgcgaagagacccacgcaatcctccaacgtaagcttgtcaaagcgcaagaggctatgaaacatttcgcggatcagaagcaccgtgatgtggtttatgaggtagaccaactcgtccatgtcaagcttagaccccatcgccagtcttccctgcgatcccagccaaccagcaaactgaccaagcactatttcggaccttaccctgtcgtggaacaaataggtaatgttgcatatcgtctgaagttacccgagggatccaagatccactccgtattccact

SEQ ID NO: 200896 - DNA, 469 bp, Glycine max
  unsure (1)..(469): unsure at all n locations
agcttattcaaaagtacatttatgaaaatataattttaagaanaaataaacttatataaaattttatcacatttttttcttaaaaatatttctgaataaacttacccaaatataaatgtggataccgtaatttttcaccgtactgaatggtttgaaactataaagcctcttggctggagtatgaagaggaagttacatatgtgaatttaattagaatgtaattacagngtaatatttttttaattnttataataataattacataaattaaactttacatatatataacaatgatggtatctagttccaaagtgagaagcataaaactccacgaattcaaacctaacagtggaggcagggcatgcttgatcattcaagggacgtaatggaatanaatatcttcccatataagtgcaaaccatcacattcatgtacttntgtctaatatattattaagttaactttttat

SEQ ID NO: 200897 - DNA, 455 bp, Glycine max
  unsure (1)..(455): unsure at all n locations
agcttaaaagaactcacaagcattttccattattgccatttcagtgtttcaataaacacccatgacccacccaagcacacataactggtggactggaggcaaaaaaaaaaaaaaaatagaagttaagggtgtaatccagcattaagtcaagatattgaaatccagacggtaacaagataacgatatcaagtgaagaaatacagacaaaataaccatgacaaatcttgctatatttttttccccatcacatcgcatttttgccatataaggaacatactaagccagttactctcatgataattggatcaatcagtggcattatttcttttttcttttttgacaagctattatttttatcttttgagagaaacactaaaaacttgttaatgattctatttttttaaataagacttacacactcattataagtttntagaacaattcagttaataaca

SEQ ID NO: 200898 - DNA, 415 bp, Glycine max
  unsure (1)..(415): unsure at all n locations
tacaattatggctgttttaaccccacacattgtgttttgatttttaattntttttataatttataataacttttaacacctagaagtatattttaaaattaagattaaaaaaaaatgttacctagattcagattcgtccgaatctaactttattccataaagtaatataaattataattttatcagaaaaaacagacaattttttacaaggattaaaaataaattgagtattttgcttggataacaaaacatattntaatcgaaattgaataataacgaacgcatgatgaacaaaacctgtacataaacgcaaggagttcttcagtacagtgttactaanatcagactgtctaatgactacataggatatggcagaacatcataacacatatatataaaccctcatattattgta

SEQ ID NO: 200899 - DNA, 426 bp, Glycine max
  unsure (1)..(426): unsure at all n locations
catgcaagcttcttatccaaggctcatcttgttggttattctccttcttccatggcttactccctagtggatgacgcctcctctcacctcttctcctttgtcttctgctgcatctccatggaggaaaatcaccattaaaggacctcattgaagctcaaagatccagcctccatagaagccccacaagcaagctctcatcaagtggtatcagagcacaagagcttcaagtaggtgctccttaaacctccattaatatttttgcattaccttctcttccattgatgattcttcatttttgtctccatgtatctcctcacatgtcttgagataaatgttttatacatgagtctttacagtttccaccgaataaacttgctatagaagctagattngattctctatgcttcaaatttcttgttcttgttc

SEQ ID NO: 200900 - DNA, 435 bp, Glycine max
  unsure (1)..(435): unsure at all n locations
agctngagatgaggaagtgttgaatgttgattcttcctgcttttattggtgaccacagagtggtacctggagatatgtcgcgggggtcaggagaccttggggacgtcaggtggggtgctattgcccaaaaccaagcttgaccaatcccgacccaacccgggcatagtcggtcagtgagaacctgtgatgtacctaagcaggcgagctcctggcagtcaacagataaaaggaaaacaagaccacaaagcaaggaggcttgtggtggctggccagctgtgaaacttgattgatatgtgagatatggtctctggtaatcgattaccaagggtgggtaatcgattacaaggcttaaaaatgaagacagggggctaagatggtctctggtaatcgattaccaggggatgtaatcgattaccaggcttgaaaacgaggtca

SEQ ID NO: 200901 - DNA, 454 bp, Glycine max
agcttcagtataagacttaggctctttattatcagagacattaggaataaagttgtgataatgggaagagagcttattataggaaatcacagaggatataagatgtttggtgtctggatgattagtgacagtggttgatgcgaaattggtttgatactcattgtatttgatgggtctggttcaaactttttcagtcttacgaagggaatgttcggaggagatgggttcagtatatggctggtcaacaaatataagttcatgttgaggaggtaaaggtgtaggaggaggggaatctatatgagaagaaaaggcttgtggattatgtgtagtgatggaagggtgagcaacggtggtatggtcaacaatgttgagagtggagaatggaaagcaattcttatataatatgtacatttgagacacatcaatgtgtcatgtatggagatttacacaatgt

SEQ ID NO: 200902 - DNA, 460 bp, Glycine max
agcttgacgctcccttctggacatttcactttatcacaggagaatggatgaccaatgtagaagacaagaatactataccagatgaccaacaatgttgtccaccctatctctatcgtcaatcatccaacagtaggggtgggaataggctaggccaggccaggctttgaaaggcctgagtctagcctacgatgaatctttgaggcctgagcctggcctatagtctatcaaaggcttttattttggctcggcttgacctttataaaaacctggcctagcctaatagcctttttaaaagccttcttcacaataaatatttaatattttatggagtaggaacgtaatacgaaagttaataaaaaaaaaaaggaaagtcaatcaaaataatgaggaatatataaggacacatgactcacacctaaattgtaattaaagtccttgattataggaatagaagttatgg

SEQ ID NO: 200903 - DNA, 453 bp, Glycine max
  unsure (1)..(453): unsure at all n locations
agcttgaagaaagagtcatagatgcttgtatataatctataattnatagntnggaattgaaataggtattattgagctcatcacctcacgaacgaattctattaattattttaatacggttaattctttggacataaaacataataacttgcatttgaaggatcaaatcagtataaagtaaaataaaggaggtaaataaggagaaattgtttacctttgaaggacataatgagaaattgttaagaaaataatcaaatactactgcccaattagatactttgacttggtgcccaacagcaattagagtgcatcgacaatttctattttgacttagtgtgcatgtgcaacagcaattatagctttcaacggtcaaggttctcactgccacattaactattgttgcccaagcggcacttatatatctacaatagtattacacaatatataggagta

SEQ ID NO: 200904 - DNA, 273 bp, Glycine max
  unsure (1)..(273): unsure at all n locations
gcctattaacaacttcgcgttgcccatcggtttgtgggtacaagtaggtgaaaataacaatttagtgcccaacttgctccacaaagtcctccaaaaatggcttacgaacttagagtccctatcactaacaatgctccttggcaaaccatggagtctcacaatctccttgaacaacaaatcagccacatgggaagcatcatcaattnntttacatggaataaatgagccattntagaaaacctatcaacaaccacataaatggaatctctacca

SEQ ID NO: 200905 - DNA, 464 bp, Glycine max
  unsure (1)..(464): unsure at all n locations
agcttcaagaattatggcctcatcaatctacttgtttcccgagggaaattctataaatagacctcccatctttaatggagtgggttaccactactggaaaacccacatgcaaatctttatagaggcaatagatttaaatatttgggaagccatagaacaaggaccttatgttccctctataatagtcggaagtgcaacaatagaaaaacctatagcagattggactgaggaagaaagaagattagtacaatataatttaaaggccaaaaatattattacatctgccttaggaatagatgaatactttagggtttcaaattgtaaaagtgttaaggatatgtgggatacactacaagtaacacatgaaggcacacaaaatgttaaaagatctaggataaacactttaactcgtgaatatgaactntntaggatgaatgtaaatgaaagtatacaagacatgcaaa

SEQ ID NO: 200906 - DNA, 411 bp, Glycine max
  unsure (1)..(411): unsure at all n locations
aaaagggggagaatgtgaatgtatgtatacatgattntgatgatgccaaagaagaatctaacaaggctgcttcaaatgataagcatttgcttcaagaataattcaagattgcttcaacaaacaaagcccttgtttcaagattcactaaagaccaagcattgccttaaaacaatgtgctttcaagacatgcaaggctctggtaatcgattaccaggaagtgtaatcgattaccagaagacagggttgagaaatagctgttgaacaaggttttgaatttgaattttcaacatgtaatcgattaccatatgtctgtaatcgattaccagcaacgagactgtggaaattcaaattcaaaagccataactcttcaattattactgtgaatcgattacacaacattgtatcgattcc

SEQ ID NO: 200907 - DNA, 240 bp, Glycine max
cttgtgagtcatataaacctaaatcttattaaccgggccaacctttattagccttttgcattataatggatcactctgctactgcattgagaattatgaacagacggagtgtgacatctgatagaaagttctaattttacaagctagcaagatttgaagatcaaacaggacaattcttcgggatctagaatcatgtcttctacaagtactataccagcgcactaatatcgaataatctca

SEQ ID NO: 200908 - DNA, 450 bp, Glycine max
  unsure (1)..(450): unsure at all n locations
agcnngcacanaacttgatggagtataactctgtatgcanactcatgcataatagaaatatatttgcttcactcccatctttctcttattctttcgttcttttttaatgctcattctgctagactttgcagctcataagcgatttagtttagaaatatttagaagcgtgaacaaaagctctgtctgaattctctttgaactctgttatgtgtatgcagctatgactattgaggatatggagcatctacaattaaggtatgtcactcacctgatttccttttttttcttgcgcgtttttgtttcataatgaaattttatttgaactatgtttgtgattatttctttaactgtgggagccatctgagttcaacatgtattacgacatacatgctntatataattgttngaagactgaatatggacgtaagcaagaagaattgatttttatgg

SEQ ID NO: 200909 - DNA, 254 bp, Glycine max
  unsure (1)..(254): unsure at all n locations
ctcttacctgttgagaacttcacaatntcaagacatttgaaatgcctaaaagttaacatgctttgattataatttctctgattcttcanatgttctgtttggataaattaattcaaatttttttaattntaaattctgtatgtaaataggacaattcaactttcttcatatgcaaaattntaattntatatntattagatgaaactttaatattaaattgtatagaacacacatacaatctaattgtgaaatat

SEQ ID NO: 200910 - DNA, 289 bp, Glycine max
  unsure (1)..(289): unsure at all n locations
taataataataataataataatatctttattctatcaaatcttatcttatccatactttattacatctagattttatttcgtccagattttatttcatccaatcttatcttaacttatccagattntattttatttcgtntatgggcttggacttaaaatatatatgtgagcattgnggctgaggacctatataacagcatcaaggttttagtatagggagttcttttcggataggagaataattctaggatcttagaattccatgttttagtcactgttatacacact

SEQ ID NO: 200911 - DNA, 468 bp, Glycine max
  unsure (1)..(468): unsure at all n locations
agctnggaaggatgcttcaatggaggaatatattagagaggggggagcacgacattgaaggaataaaagagggagagaagtggaactttgaagtatgtctcacaagactctcattcatcaaagttacaacaagtgtacacatgcttctatttatagactaggtagctttcttgagaagctctcttgaggaaacttccatgagaagcttctttgagaaaacttccttcagaagctagagcttagctacacacacgccctctcacaactaagctcacctccttgagaagcttccttaagaagattcctaaagaagctagagcttagctacacatacctctctaatagctaagctcacctcacctccttatgatgagaagctagagcttagctacacacccnctataataactaagctcaccctcatggaaaaatacatgagaatacaaaacaatatcctactacaaagac

SEQ ID NO: 200912 - DNA, 478 bp, Glycine max
tactaacctgagctgtaaacttgatgtctatctttgaacttcatttgttgcctaacattggacatgaaagagagcttattgcagtggtgttcataccttgtagtctgcactaactgtttcttaggattgcgcgtgacttgatttagctattcttttgaaagaaaaaaattatctttttaattgaataatatgtctaaaaaacttataataattatttatgcccccaccctcaaaaaggaaatacctcaatagatgttccaatgcttatcttataagctaaaaagataacagctcgcgacaaaaaacactactataaattacatttttaatcacttaaatggacctttatagtcttcgccatatcatattttgtgtttgtgccatcaaagtttttctgataggagatattatagtgcttgactcatgtgttcaatgggtctaggctctactagatcctctatagatatacgcgatattg

SEQ ID NO: 200913 - DNA, 233 bp, Glycine max
ccgacgtgcggggaaaacaagaacagatactatcctaagaaatcgaactcaagccaaaagtcaattggaccgacttcacgatgtcagaaataaaaccattaaacaaaaccagggagtcgaccaggaagaaaatagggaagaacaaacaaagagaaattacccaaagatcgcataatgagattgcaaacaaaccctccaaaaaagaaagactgcccacaagaagaaactttaac

SEQ ID NO: 200914 - DNA, 244 bp, Glycine max
  unsure (1)..(244): unsure at all n locations
tcccccaaactaaggacttattataacttgaaacccttatgctctcttagaaccctaaaacaaggccaaggatatcaaaactatgctcatgggtctattctaacaaatcattattacttttggctcaacaggggtgcaagggataaattcatcatactgtcggctttgatgtgaatcttacggngcggatcgtttaatacatgttacagagtttggatgacgctacttctggtgaaggaagata

SEQ ID NO: 200915 - DNA, 299 bp, Glycine max
  unsure (1)..(299): unsure at all n locations
caactggattcctaatntttcactacacctatctggatgtgacgtcactggcatttacgtggtgccagcttctcacttgtggatgcactcacagaacataccttcatgtgttggactatctaacgcggggacttgctatgctatccccacacggatgtgggaagcactatctcatggttcgtgtttaaagccctctcgtaagcgtatccatggcgagactgtgactactgtaaagaatgcaatatgtgtcgcaacctattgcctaagctcatatcactagtgtgaggagataccctatc

SEQ ID NO: 200916 - DNA, 432 bp, Glycine max
ggacctcaagcaccgcagcagcaagccagcgaggcagcagagactctcattagttatgaagaatagcacgaactccctaagcacatagggcacgcttagcgaattcatgaccaaacccagaaaagatctccaaacgtacaaacttgttaagccataaggataggcttagcggtccaaacacatgctatagaggtagaagaactacacaacatgacaggacaaaaagacccagcagtaacaaatatgaaaccaaacaacaaaaattgcgtgaaccctacaacaccaaaataaccaactagtgattaaagagagagacgaaacaacataaaaggaaatgaacaacctaagaagaacaggatgctataatcctcggaaggaataaaaaggagaacgtctggaggaaggaaaaaagacgaacgtgaaggacaggaa

SEQ ID NO: 200917 - DNA, 382 bp, Glycine max
accgctgcagcagcacgaactgagacctttattattatggtatccttaagccacgcgtggaaagacacagctcccgcaaggcgcaccgacttcactattatacccagaactcgcggcggtcgacggcaccgctccggactccgccgaactcgtctaagatggagtcgtagagcttctcgagctgatccggcggcgcggagacttagatgccgaattgcgtctcaaagaagcgcatggacatctatgccgcgctgaacttctatcgcaagaggactcacattaatttgaagtccagcaccccgaactgcttgtaccgctctttcgaaagccgctcgtcgctacaagacgacacgcggctgcgtcgatcaccccacaccatcaa

SEQ ID NO: 200918 - DNA, 311 bp, Glycine max
  unsure (1)..(311): unsure at all n locations
agctttggaagtggtaagcagcgcttatgtgtagtctcccccagtgaaaccgcgctcatccgacgtctgtataatggtatggcatggatacgagcctgaaaagggtttgggccataacagtgatggcgtggccagcttggtagagttcaaggagaactatggaaggttcgggctaggatataagcctacacacgccgatgtgatgagaagtgccctataaatgataggtagaaacattggccagcggcaaggaccacaagtgaaagggactctcttatgtcacatcaacgagagtnttgtcagcgcgggct

SEQ ID NO: 200919 - DNA, 420 bp, Glycine max
  unsure (1)..(420): unsure at all n locations
agctttgcacaatatgcctaatttccatttgcttatgttgtgccaatcacccttactatcatcaacttatgagccattgctatatataaataggttaagggagggacccattatcccattcctatcaagaagcacctcaggagggcacaggagattgcagctcagtgcaaattgccctagatataacattggtgattatgtgctagagatttttctgcatcttgggaacacaaactttaatgaacaaaaaggatcgttcagatccatattagcaaaaataaagccacatttttagagtcttaagattgattttgcttggttaatggtatgctaaaccaaactaaangtcagattttcctatctcatcattagtatcaatagaggccttctatcaaacaacaaaactcatttagagtctta

SEQ ID NO: 200920 - DNA, 327 bp, Glycine max
  unsure (1)..(327): unsure at all n locations
attaccactggtttatattgaaagccttggagatagagtggtcagtgctaattgaaaatccataatataagcaaataaatagccagggacaaggcattcataactgaactagataaaaggatggatgtctttgttcctgttaaactacatttactctctggctgctagagaatctgtttctacatttatcaaccattgcagtgcataatggaagcactggaactagagataatttagttntgagataagattaatctgttgtcaaggatttaaactttatacacatacagcctctatccactaattaagagtaaatgacatatgaaa

SEQ ID NO: 200921 - DNA, 457 bp, Glycine max
agcttatgctgtattatggaaattccttgtttgacacctattaacttatcctctgcaattgtgtcagaaagaaggttgctttggagatgttctaacccatgtttttttgaagtttctctcacgttttcaaggaaacacaaagcttcaaaatggtcagcaatggaattataaactgcagtagaaattgtcattttacctactccacccagcctatgtatccctagcatgtggacgacatcatcagatccaacatccagaagcactttaacttcttgcatttgtgactctagtccatctgtataatccgcaacatgtaaaggagaacaattaatcttcttagagaccaactcaacaatcctttgaataaacccatattcgtattcttcccaatttaatcagagaatattgtgagaagtcaaacaaaatatgtcatcttcatatctcgatatgtatgtat

SEQ ID NO: 200922 - DNA, 464 bp, Glycine max
  unsure (1)..(464): unsure at all n locations
agctntatttatcataacataatcatctaatttagttntcacaagaactctattgttntttataaccatgatgcaaaaatcatgatcatggccatatttatgctaccttttatgttcatatacgtgtagcttcataaaacatgtatgatttttttatttgaattttgtacttttcaatgttggtgttactttaggagtgaattaaacttaaagttcaatttatctttttttcaggtattgtagcaactactacggagaattaccggatatagaactgtgcgattggtgccatagcgaggagaagaacttgagacatattggctccaattcgaagaaaccggtgtcggccggaaacgaggccggagccacccaccgttcggagtattccggcgagaaaatgatcaagcagcatgatcatcatcgtgaagagagtggttctgagaagggtaagagtcccacaccat

SEQ ID NO: 200923 - DNA, 477 bp, Glycine max
  unsure (1)..(477): unsure at all n locations
gctgtctagaggttatgcganaccgagaccaacatgctagccatcatcatcaagtaccaagaagaattaaatctagccatggcccacgagcacaaagtggcgcacgagtatgcctgagtgtacgcggaaaatgaggctagagggagggtgattgactcgttacattaagaggcaacaatgtggatggatcgatttgctcttactttgaacgggagtcaagaacttccccaattgctggccaaggccaaagcaatggcggacgcctactccgcctccgaggagatccatggacttctcagctattttcagcatatgatagacttaatggcccatataagttggaacctctatgaagttcgtattgcactcagatcttgactatntataactntctgaataaaaagtntatcccacgttgttactccaatatcagtgcgattcaaatcaatcccacattntatctctacatgcattcat

SEQ ID NO: 200924 - DNA, 455 bp, Glycine max
  unsure (1)..(455): unsure at all n locations
agctngtaaaatatatgaattccatgaatttatatgacacanaaggaggccaaagtatgaacaatctataaaatatgaattccattaatttaaaatcacacaaaaatatgaattccatcaattccatgaatttaaaatccagaggtatagaagaaggaactgagtttcttcttgtcgactatgaatagaagaagccatccaaaccttgttttgtctaagctctagtctcagattttctatatcaattctacctttttccttgactcctaaatcttctattactaaatgaaaagcagtgatgagacaagattagcacagaggttgttntaatcatttatcagtactgagtgtggcaaaggtgttacctgtggcttgngttccaaaaagctttgctcgctagcaagtngtttcatttctagcatcactttgtgtgtagggtttatgctacgcacaag

SEQ ID NO: 200925 - DNA, 438 bp, Glycine max
  unsure (1)..(438): unsure at all n locations
agctntagccaaaccgcttagcgacaccttattcttggctaagcgcgactcagtgtcgccaagcgcaattccttacggccataactaaggtccatgaagctaagcgccagtcatggcagctaagctgaattccttgcggcaatgtgagcgctaagagaggccttatcagctaagcgcatgctcctctgtacttaagatgcatcattttagctaagccagccatagcctggcttagcgagagttacaacttttcggatctgcaaacctcgctaagtggtttgatcctgtcgctaagccaagcctctgttaaaaaaaaaaaaactgattntgaatttgaaacgtcggctaagcgcgcatgtccactaagcgagcctagttgagaaaccaaatgtctctctggctcacttagagcagcggtccactaagcgaaagtgtcaa

SEQ ID NO: 200926 - DNA, 402 bp, Glycine max
  unsure (1)..(402): unsure at all n locations
ttaagcaccgagctgcacttgnaagactgaggaaacatttttttttgtcgccatcgacgcggatgatttcctccaaagggttgaagagaggagagcttcatccctataacgcaacgtggcggacaaaagtgggcagtaaacttgaatgatcgtcattgtcaatgcggaaggtattctgcgcttcactatccatgttcacatattattgcagcttgcggttacgtgagcatgaactactaccaatatatagatgttgtttatacaaatgagcacatcttataagcttactccgcacaattggggcctcttgagaatgaagcgtgtattcctctctttgatacacatgaacacttatccctgacctaccacaattcgtggaaagggcggcaaaatcaataggat

SEQ ID NO: 200927 - DNA, 352 bp, Glycine max
  unsure (1)..(352): unsure at all n locations
agcactatgaagacagagcgangctttcattgtgttncngacgaacaatctgcattacctcgtgcggaaagagaaggactctgaccttgggagggtcttgggggataataggattaggaaacgccgcggtcagatacgccagtatgctacagggtatctcagagcctcttggagcaaggccttatcttgtttgaaggatgaagggattggagggagctccaataatgcatcgaagatggctttgaaggagaggtacaagagcttcaatgcctggtttgaagaaatacacagggttcagacagcttggaagggaccggatgatcagcttccggaggagctgcggatacctata

SEQ ID NO: 200928 - DNA, 404 bp, Glycine max
  unsure (1)..(404): unsure at all n locations
cttgggagtctactcaataatcatccacaaacactttctccaataatttagttttctcattgaatttcaatgcatttggntatatgaattaataaaggagaataaatgaaatacgaaaaaaattattgtttgatttgtaaatgaaactgatatgaaataaatgtttttaataagttttaatattgttttaaacagaagtgtgggcaacaaaaggatatactttctagaataaaaaacacatttttttaatttgtcagtatatctttatgagcatttaattcgcaataatttgttctttaaagatatctaagttatgtctattaaaataggatatctaagctattctatgaacatacctcttctttctcttattcactaaataggaagaaacaaaatactcctcc

SEQ ID NO: 200929 - DNA, 433 bp, Glycine max
  unsure (1)..(433): unsure at all n locations
agctttggagaaaatcaaatggtctttatttttaaacgaaagtccgattcaggagcataatatatcgagaagcttgaaattgaacaagggaagctctcgagaaactcaaatgatcataacttatcacacagaggttcgattcaggcgcataatatttcgagacgctcgaaattgaacaacgaatgctctcgagaaattcaaatgttcataacttgtcacacggaggtccaattcaggcgcataatatatcgagacgctcgaaattgaacaacgaatgctctcgagaaattcaaatggtcataacttgtcacacggatgtccgattcgggcgcataatatatgaagatgctcgaaatngaacaacgaatgctctcgagaaaatcaaatggtcataacttgtcacacagatgttcgattcaggcgcataatatat

SEQ ID NO: 200930 - DNA, 226 bp, Glycine max
ctcgagagcattcgttgttcaatattgagcgtctcgatatattatgcaccagaatcggacttgcgtgtgactagatatgaccatttgaatttctcgagagcattcgttgttcaatttcgagcgtctggatatattatgcgcctgaatcatacctccgtgtgacaagttatgaccatttgaatatctcgagagcttacggtgttcaatttatagcgtctcgatatgt

SEQ ID NO: 200931 - DNA, 454 bp, Glycine max
  unsure (1)..(454): unsure at all n locations
agcttgccacccagctcgcccaggttagtcttgttgcttcctccagaaggcggtgccttctggagaacttcctggaaggcccanatgggcctggttgttatttgcaccccttttttactaaatacaccccttgcctttttttgctgattctttttccgtaacgttacggaaacttatgaattacgtaacgatacttgttttccttccgtaatgttacggaaccttacaaattatgtaatcatcccttttttgctttctggaatgtcacaaaactttacggattgtgctacaatgctttcttttgacttctggcatgtcttggaacttcacgaattgcctaacgataggtgccaagtacctcgaagtggtcaaacgagggtcgcatcccaacaatggatggtccccggacgaaattatggtatgacagaggctttttcagacccctgcgcccact

SEQ ID NO: 200932 - DNA, 461 bp, Glycine max
  unsure (1)..(461): unsure at all n locations
agctcgaagacaagactatacgatgtatcttttttgngtatagcaatatctccaagggctaccgtgtctacaacttgcaaactaagaaactcgtcatcagtcgagatgttgaagtttatgagtatgcttcttggaattgggatgatgaaaaagtggagataaatgttcttatacctgctcaactacctcaagaagaagctgaggaagaagacccaggtgaaccaccttcacctccaccacaacaacaagatcaagaactatcatcaccagagtctactccaagacgagtatgatctttggtggacatatatgatacctgttacttggccatacttgaacttggaagctttgaataagcgtcatagcatgaagtatgggtcaaggcaatggaatacgacatacagatgatcgagatatacaacacatgtgagttagtaaatcatttccatggataagatatc

SEQ ID NO: 200933 - DNA, 424 bp, Glycine max
  unsure (1)..(424): unsure at all n locations
agcttattcacaaatgggtgattgttttttatattctagatagaggatcgataaacaaaactatggagattagtgtatcttataattacctcaacagtggccatttggaatgcaaagagggaaagtaataataggatgaagtatgaactcgaaaggaaagctaagaataaaagagagtggttgtgagttgatcgaagtaagagaggtttaaatatatagttggagagncttcaacactaataccttcctagagagtgtgaggaatggccacttccaagaatctttttcaagcagacaactcatgccactatataccaaanaattaaatataataataacagagatcaccatttccagttgtaaatgattnttgtttcctttcatttannttttcaaaatattacttttgacannatactagaat

SEQ ID NO: 200934 - DNA, 316 bp, Glycine max
gactatcattatcactttctctgctgcattgaggcgccacttgagctgtcaggtctctacactttcgggcgtattctttgatagaactgtgcccctttctgcacatgttctattgttgcatcctatccggaaccatatcaaaattgcactgatactgcctaatgaaggcaaccattaagcccttccaagagtggactcgagaacggtgcaggttagtagaccatgtaacagctaccccagtaagattgtcttggaatgaatgtatcaacagtatctcatcttttgcgcatgcccccatcttacgataatacatcta

SEQ ID NO: 200935 - DNA, 439 bp, Glycine max
  unsure (1)..(439): unsure at all n locations
agctacaataataaagatatcttatttgttattatatttcagctcacatcaacntattcttatttattcaattaaagaaaatttttatattttatattaacttatttgattaatgcacaagtctcttcaattaaaaatatataaatttattaataaaaatataaaacaatatattaaatataaaattcatgggatagatctttatgatgtatgaaattntattaacacacaaatttgatgtatgtatatgataatatattatacatcatacaaaattctggtgtgattcttataataattaatatcttataatatattaatatggttaattagtgtgtatatatacaccaatatatatttctagtaattaaaatataacagataaatacattattaattataatatactanaaattataagctatataattaatacaat

SEQ ID NO: 200936 - DNA, 147 bp, Glycine max
cggaaaagaaaacgagcgagaaaacaaaccagcacggagacaaaggaaaagaaaaacaaaaagggaagaaaaaagaaaaacgaaaggaacacggaagagaaagaagaaacacaagaagggacaggaaaaaacccgaaaaagagaaaa

SEQ ID NO: 200937 - DNA, 409 bp, Glycine max
  unsure (1)..(409): unsure at all n locations
agcttaatcattngccttagaccaaaactgtgttattgtgaanaaataatagtcaaagagatttcaattgagctaagaagaatagaaaagtattaaactacaaatgttctatcaagggcagtaactagcaatctggtatgatgaatgtcatctactagaacgctaaaggattggataatcaaccaactctcaactatcttaagcatttatgctagtctcataaactatatattttactaatagttgatccttggatcagtttagtagaaatctcgtgcttgtattggaagacccttaaactaaagaattttgttgtaaacgaccatggtgatgatccccctaacctgtgggctttcaatagtccagacttgcagcctactatccttcaaactaccaaataacatatatc

SEQ ID NO: 200938 - DNA, 434 bp, Glycine max
  unsure (1)..(434): unsure at all n locations
tttctaatgacattcttgaagagataggggttctctctaccaaagtacctccctcactagttttctattatgaacttttttattttttgaaggatattatgaactttattaatagttgatattgatatcattcttatatttcaaaaccaggtggtcatcttatctctggatcccttaccacagtcaaacacgacaaaagtggtgtttgcagttgatcctgatagtaaatattcagaaatgtctgcagctgccattagtttgattagagcatcattcagatacctgggtatacgccaatcatatctccagctctctacatccttgtttgggttccctctggtgtgaggtgctgaattataggagggtcactatcattcacaacagagtgtgtccctctgcaatggtgagacttattcactntactttgaattctc

SEQ ID NO: 200939 - DNA, 419 bp, Glycine max
  unsure (1)..(419): unsure at all n locations
agctntctacttgtctatttatacgaattattgtatccaaactcggcccaaaagtgctgttcttctagactgctaccaaaatgaagaaacatatgcaaagcatggaacgaaccaatgattgtttcaagcttgcgggaattcgtaattcattacaatttacatgtgtgtcgtactctcaatccctttgatgaatgaaatacttnttttgagcatttgcaatcgaaaatgattgatccttgcttggttaggggtatactgtgggtgagaaaaaacaatgatattctctcatctttgttctgttttatgttatccaggatatcttggtggttgctatgtcagtgctctgttgggtgccaaaataattagattcatagtttcggttcttcttatttgttaattatggttcttgatacaacaca

SEQ ID NO: 200940 - DNA, 452 bp, Glycine max
  unsure (1)..(452): unsure at all n locations
agctntaacaaaaccttgaactgattagttacttatcatccgcatacacccttcactattgtggttttggaacactcaatatttttggataaacttctctataatcactcataggagaagaaaattttaaaaaaaaagtaaaatgaatttgagtttatagcatagaagctaaaatcagctcatgcacatcaacttttggaaatataaatgagaggacttttacaaaaattaagggcggcataagttaatctaagtctataggagaagctcaaatgctcaattcattttacctctacttttcccctcctgtaaatgcttatgaacaagtttattcaagcaggtctaaagcacaggtatatgaagaaaacttactttggagcatgaacagtagcatggtcattttgtgcaacaacctgagctggtttctcgtagtgaggaaccatatcaacctc

SEQ ID NO: 200941 - DNA, 470 bp, Glycine max
  unsure (1)..(470): unsure at all n locations
agctnggaaggattcttcaatggaggaattgaatgatggagagaaaaagagaggggggagaacgaaattgaaggaataaaagagggagagaagtggaaatttgaagtatgtctcacaagactctcattcatcaaagttacaacaagtgttacacatgcttctatttatagactaggtagcttccttgagaagctttcttgagaaaacttccttgagaagcttctttgagaaaacttacttgagaagctagagcttagctacacacacccctataataactaagctcacctccttgagaagcttccttgagaagattcctaaagaagctagagcttagctacacacacccnctataatagctaagctcacccccatgccaaaatacatganaatataaaaaaaggtccctattacaaagactactcanaatgccctgacatacaaggctaaaaccctatactactagaatg

SEQ ID NO: 200942 - DNA, 464 bp, Glycine max
  unsure (1)..(464): unsure at all n locations
agcttgacatanacctagtattctttgttctaccaagccactattaactctaaacaaatcaataagaattgttgaaagtttgcacaatgactaatgtatgattatcttacagacggatatatcactcaacacttttagtcttttttgtcaaggcatacaaagtgttttgagagcttagtatctatacaaaaatttataaaaagctttacacgaaagaatatgttcgcgtagatgattcatgtcttatttctattccatatatatagttttcattttcatgtatctattggctcacaatggttaaactcatcactttgctcttcatctaaagtcttgagcccattggagcatttacgtcctttctttaagcaaagtccatgttgataggctagtgtgtcttgtactttagtaggaaagtcacttctttcatcatagtaagtcagcaacaacagaatgcacacctt

SEQ ID NO: 200943 - DNA, 215 bp, Glycine max
  unsure (1)..(215): unsure at all n locations
tattttaatggcgttggttaccattattggaaaacccacatgcaaatttttataaaggcaataaatctgaatatctgggaagcaatggaatttgggccctacattcccactatggtggcaganaatacaacatagaanaacctanggaagaatggagggaggaagaaaagagattagttcaatacaatntanaagccaaaaatataattacatct

SEQ ID NO: 200944 - DNA, 431 bp, Glycine max
  unsure (1)..(431): unsure at all n locations
agctntanaagacctgagcctaacctactataatatttttaggcctgagcctggcctatggcctatcaaaggttnttattttggctcgtactggcctttttaaaagcctagtctggcctgatagcctttttaaaagtctttttcacattaaatctttaatattctagagtaggaacgtaatagacagttaaagtaaaaggaaacgttgacaggaataggtaagttaataaaaataatgcggaatataaagggacacatgattcacacctaaattgtaattaaagtcttacttgattataggaatagaagttatggagcagtaatgtataatcaaagtgtgctagtttcaaaaaaaaattaattataccanaaaaataatataagtatatattgggtacccacaaataatatatatatatatatatatatag

SEQ ID NO: 200945 - DNA, 310 bp, Glycine max
  unsure (1)..(310): unsure at all n locations
tgtagctctcatcaacttagttttcgaggttagttgtaacactaaattactactattttgcagtttgccgtattataatttaatgcatacctttatttgaattttttttggggaagactgctttaactgccctatgggatgatcattttttcttttgtatttaactatttgaatgaatcttgaataatgagtgatattttctgagttagtttattttgagtatttaaagctctgcatacaatcagaatgttattgggaaagaataaataagcgccattcatttggcccttagaaagatntttattattta

SEQ ID NO: 200946 - DNA, 462 bp, Glycine max
  unsure (1)..(462): unsure at all n locations
agcttgcttgtggggcttctatggtggctttatctttgagctccaatgaggtcctttaatggtgattttccaccatggagatgcagcggaagacaaaggagaagaggtgagaggaggtgccatccactatggaataagccatggaagaaggagcttcaccaccaagatgagccttggataagaagcttggaaggatgcttcaatggaggaaaagaaagagggagagaaagagagaggggggagcacgaaattgaaggaataaaagagggagagaagtggaactttgaagtgtgtctcacaagactctcattcatcaaagttacaacaagtgttacacatgcttctatttatagactaggtagcttccttgagaatatttcttgagaaaacttccttgagaagcttctttgaaaaaacttccttgagaagctagagcttagctacacacacncctctcataac

SEQ ID NO: 200947 - DNA, 383 bp, Glycine max
  unsure (1)..(383): unsure at all n locations
cgccagcatagaaaaacgggccatcacatgtgtatgagaagaaccgggatgccacggtggaagatggacctagcggggactcaccagagacaccgggtaggagggggaccatacacactgctagagcactagctagagctgggaatggttccgacgtagaagcacatgatgtagatcgcatgacaaaacagtggncaacatcgggagctctagtgagacgagaatatgttgtacccaaaagggaagtcacggcacccgagagatagaggtcacacacagcccacatgaacctgccccgctgaggaaggttgcactacatggaagccgaacacgaagttcacgataaaagatgacatacacacccacacagaatcctaagcaat

SEQ ID NO: 200948 - DNA, 422 bp, Glycine max
tagcttttataaatgacttatcatattatttactgccatacccatttctagccttgcattggctagttatactctatcctcatgggtagatagtttgatttcttctatagctatagcaaagatagtttgaatccttcaatagctctatcatactgttggattcactttctagctttataagcattgttgaagatttcaacaaaggcattaatatcttcatgcagctcttcaataacaagaccttcatattcctccactacatctactgcttttttgatttctgctttataatcagatgcggataaagaaaattcaagcttcattcaaagccaacctcttgaatttctcaacagcttttcatattaatattggtaacaaaaaacacacgatggtgtcctccaaagtccagtccaataaaaaat

SEQ ID NO: 200949 - DNA, 445 bp, Glycine max
  unsure (1)..(445): unsure at all n locations
agcttgtaagaattgcaagatcatctttcttgacaactccttgaaaattattgccatcaatacgcagagatgacaatttagagagtgatccaatactttgaaatggatttccactgaatttattaatagacagatagagatatcttaatgatgaaagttttcaaaatgatcttggaagagcaccaccaattaagttgttggaaaaatctagcatgtcaatagttntaaaagccccaatttgatctgtcagattgcctgaaagttgtgaactccgaactgcaagtgttgtgagtccatgggaaatacaaggagcaagaatttctaaaagttgattaacctgttggtttagtttgagatatgataaacctatcntccttaagttgcagagataaccaaagaagttggaagtggttccttcagtagatatatgacanatcaagtcaac

SEQ ID NO: 200950 - DNA, 106 bp, Glycine max
atacaatccaacaagaaatgcaattaatcctttctccttaatggtatgtatatatgaaagaagtgagactggtgtacatcatcattaatgatgacactcttgtctt

SEQ ID NO: 200951 - DNA, 457 bp, Glycine max
  unsure (1)..(457): unsure at all n locations
agcttgtagaatggctagacattatacatgttagggtttggtttggttcaaggataaaagggatgccccacattatttccatgacacaaatgcaaaaatgatgatttggaaactttatgcaaaactggttatgcatgcacctatgtggacgctcaagtgtcaaatttttatggtcatgtgatgctagggctcaggattcatttcctctattttaaatcaacccaacgtttccaaaatatgttcttttatccatttgtgcattcatccgagtccattttgggcgtccgggaaaattttcacagcgttcacccttcaggtgtacacacantttttcaagaactagtcatgatcagtaaatttttcacagaaaagttggaagtcatctcttttcacaagcatgtttgttnttcagctagacaactctattttctttttctttcctttatattatcattat

SEQ ID NO: 200952 - DNA, 433 bp, Glycine max
  unsure (1)..(433): unsure at all n locations
agctngccgcccagctcacccaggcgagctcatctctgccaggcgagcaagggtgcttcctccagaagcaacagccttctggaggaatcttctggagggcccaagtgggcctggttgctatttgcaccccctgtttactaaatgcacccccctttctatntttttgtaattctttttccgtaacattacgaaacattacgaatttcataacgatacttattttccttccgcaaggttacgaatccttacggattatgtatttactccttttttagctnttgaagaagttacggaacctcacagattgcgcanaaacacctcttttcgacttccgccacattatggaatttcacggatcgcgcaagcctgcttccttttgatttatgagaacgtctcgaacttcatntgttgatgtcatcaagtaataatcccc

SEQ ID NO: 200953 - DNA, 470 bp, Glycine max
  unsure (1)..(470): unsure at all n locations
ttaactactggattgcattcttnaacagcctttttttttttttgaaaatctcgaaacagtcattgaaaaatgtgactctggaaacttatttttcgaaatcagtcattggtaatcgattaccattaaggtgtaatcgattacacataaacagatgtgacttctcagtttaaaatttgaaaatcataacgttagaagctctggtaaccgattacaagtattgtgtaatcgattacacaagttaaaaatgatgtgaaaatgttgtatcactagttgtgactcttacaatttgaattctaacgtcttaacatattgataatcgattacatgaatatgggtatcgattaccagctttgtaatcacgtttgaagacaatattgattactgggaataacatactatcttctggtaatcgattaccagagagtaatactctttggtaatgcatttatgacaacttcttgtgctactta

SEQ ID NO: 200954 - DNA, 468 bp, Glycine max
  unsure (1)..(468): unsure at all n locations
agctngatagagtgctggtttctgatgggttgtttgaattatggcctgatagctctcaactcaaccttgagaggaattattctgatcactgccctatcatcctcaaatctaagaccactgactggggccctaagccttttaaggtctttgatggttggttaaagatcaaggattatcagcaggtggtgaaggattgttggtctgcttatcagcccatggggtgggggggattccatgaaaaccctctcttggttaaggattgttggtctgattgatggttcttgggttgaacaccctctcttggttaaggctgaggttttacaacactttcagaatagattccatgaacctcaacttcatagacctaccctagatggggtatctttaagtgtgttatcttcttctcaaagagatattatggctgaaccttctaaagaagaggagatcactcgtgctgtgtggagttgc

SEQ ID NO: 200955 - DNA, 449 bp, Glycine max
  unsure (1)..(449): unsure at all n locations
agcttatgcgcatgtttccttacgaacgttcacttgcggaagacatcctattaaccgaaaaatgcacccatatacaatcaaggcagctttgttacctagattatttacacgtatttccaaggtgtatttgttacttacatcacacacatccccttggctaaattcacatacatgcatactccaagcattttggggtacccaaaaattgcacatgtgcacatcttggtatttctaatacctatacatacacaaacttcatgatgaatcttgactatctacacaacaaggtgctacatttcatgccctttttcaagtttttgctacctaaagccgcatgcaaattcaagcatattttcctttgctgactaaaattgtattcaaattatatatnatatttttggaatatgtttntttttcatacaacattcaacatantttatatatatttt

SEQ ID NO: 200956 - DNA, 383 bp, Glycine max
  unsure (1)..(383): unsure at all n locations
agcatggaacaaatatttagaatttttttttctcttagaaatctctgaaagatgtctgctagctgatcattagaactaacaaattcagtaataacttccttagataggactttctcctggacaaaagaacaatcaatttcaatatgtttaattctctcatggaatactgaattaaaagctatatgtagggctgcctgattatcaatacatagcttcatttgttgagtatttccaaactccaattctagaagntgtttaatccaaacgagctcacatatgtgtacaaccatagctctatgttcagtctctacactagaccttgcaacaacattttgcttcttactcttccatgagacaagatttcctccaatagacacacaata

SEQ ID NO: 200957 - DNA, 440 bp, Glycine max
  unsure (1)..(440): unsure at all n locations
gcttaaataggaatctgccctatgtaggttttaattgttattaanaanaatgcataagtatataattattttacttcttatttcacatttcttgcctaaacttctaagcaattttttaaattttaagattataaatgtttgaaatttattccgttttcttaattttaatcatgatcaactataactttaagtgaaagcatttttaaaataaatttaatctttgtctacaatcataagctagaaatctataattgatatttaaaaacatcaaatttactccaaagagaatttgagaagcaatttgttgcaaatcatatatttcattactttacgcatcattaaaaaaaaaaatcacttgctgtaagctttagctgtgttatgacaagctgaaggtcaaagcactaanaaaatcacttgatataatggctttgatacttaag

SEQ ID NO: 200958 - DNA, 477 bp, Glycine max
  unsure (1)..(477): unsure at all n locations
gctgtggctcgggattgtttattgtatacaacatatacttcttttcttttaccaaatattaaaacaacaaccacatatacacaagtcttgtactctgtttctagcactcatcgcatactaataaagctaagggcagtagttaattactagcaacaacaaagaaaagaaatcagagatgaaatttgggagttaaaaagcgaacaatgattgatgtcattggtgaaaaggaagagaagagttgaagcttcttagatgaatctattatatagcttaatgaatttattatatagcttaatgtaatataactgggcaagtaagcagaanaagtaggcaaaccttatacttgacctcagtcttaccaattaaccacaagtgtacttactacttacttggagcctcgatatatccgatgctcattgaaaaatgtctttcttcacctctttacactagaaacaagtgagtcagaatgctgttact

SEQ ID NO: 200959 - DNA, 331 bp, Glycine max
tgtaattaattagtcaatatgaaacaattactgactatagttaataaatgtagcttacaaatttctattaatgacccacatgatgagcatggtattggagagagggcaaagctattctcgtggatttcgagagtttgattttggggaacaaatatgtgacatgaatttgcatgaaagtgtgtgtcatatgatgagagaatcgtcttactgaaaagtttataaataaaaatctaaattgacatgaatgtgaaatttgtcaataattacgcctcttcctataaatactaatacattattttcatatgggagactcgcatgtgtattgatcata

SEQ ID NO: 200960 - DNA, 406 bp, Glycine max
ttcatttgtctctgacataacaacctgtatattggggtctattaaaagccactgggtcctaataagccgtaaatctaaatgatgtccctgtttgtttgagtagcaaagggtgtcttattcagacgatccagtcaaaacaagcacaaacattaaacaaggaatttcacaaacttctgtaagtagtaaaaaggcaaacagaataccaaaatatatcaggctagagtagaagtaaaagacaagaccatcatagcaaacagcaataactagaatataaaggaagtagtattgcacgtctccatgcttctctttgaggccagatctaaattaccaattactcatcaatcttgacacttgcgattgattgatttatatacacttgatatctaaacacatcaacaagccaatg

SEQ ID NO: 200961 - DNA, 444 bp, Glycine max
  unsure (1)..(444): unsure at all n locations
agctccttctaaaagtagtttcattatgatttataaataagacgagtctcacgagttaaaataaatttttcttaactaactcgcataacccctccatataatttctctaaaaaacaaaaggacatgtaaagttcatattaatttatggagaatgctatttttttctattagaagtatttctagaaaaacttactcaaatagaccttatttatatatatagcatccggaggaatattaaacctttaatatcataagtttaaaaatatagttcagccaatgccaattgagttacaaagacgtacaaatgatagcaatacattctaagatatacctctctttagaaaatcgagagaaaattattaaattattaaacaatctacgtgctactctttatatattntctctcaattattagtcaaaaaacaatacatgaactctatctga

SEQ ID NO: 200962 - DNA, 448 bp, Glycine max
  unsure (1)..(448): unsure at all n locations
agcttgccaacccatggaagctcctaatatctctcacactntntagggtgggccattcttggatggtcttgattttctcagggtccacttggaccccatttctaccaactacaaaccctaagaaaaatatattatctacacaaaaagtacacttctctatatttgcatatagggtatttttcctaaggactgaaagaacttgcctgagatgtcctaagtgatcatctatgctcctactatacactaaaatatcatcaaaataaacaactacaaatctacctatgaaatcccttaagacatgatgcataagcctcataaaggtgcttggtgcattagtgagcccaaaaggcatcactagccattcatacaaaccaaacttggtcttgaaagcggttttccactcatcaccctttttcatcctgatttggtgatacccacttttaagatc

SEQ ID NO: 200963 - DNA, 451 bp, Glycine max
  unsure (1)..(451): unsure at all n locations
agcttgtcgttgttggagaacataatctatctaactntagtgatggagaacacaatcaacatgaagataaaataggttattagagatcgcagttgatcaatatactccacatatagttgagtctaaataaacaagctcaaaataactcaattttattctttccttgttaagttaattagaaggaataaggcacttaatttttgttatcacaactcaggttgttacttacttttatatgtttgacttttagaaaacttctctacgtttactcctcaattcctcaaatcaaatcaatttaaaataatgaactaaattgtaaggactagtgtagctcatttcaagcaacaattgtaatgtaaaatcaactacacatatagctaanaaagatgttaaagaacatttatganataaagccactaatggtggaataacactataatctcaactaata

SEQ ID NO: 200964 - DNA, 353 bp, Glycine max
  unsure (1)..(353): unsure at all n locations
ttgcaaaaagggttgtactgctcaccancattttctagaaagcataatttaactcttagaaagtgcatctcctttgttctaaaccattttgggtgtcttaggcgtccattatgaagtgttctaagtcttctttaatttaaaagtggaataagctcaaaaaaataaccacaactcattatataacaaaaacaagncacaatgtacatacaaaaacaccaataaatccatgccatcttcatgcacatcatgctattttacaatcttttatcacataatcttcatataaaccatatatcacgagataaacacaatacacacgcaaaaaacaccaccacagagcatgataacacaca

SEQ ID NO: 200965 - DNA, 411 bp, Glycine max
  unsure (1)..(411): unsure at all n locations
aagccattcggttctcttttgcagttcttcacaacaaaaccatatgcttgtgagccctctagccttccaaaatatcctcccagcaaggagatggatgcaaagctacgggatgaagaagctaggaggtggcttaaattacttttgacatataaatagatcgttcatcaacagtctgataaaacccttattttcttaaaaagtttcccgaaatgcatacatgttggttagattctgatcatgtctcatgttctttatctaattgaggaggtngctaggcatccatataactntaacatgtaatttagntatccttctccatctttattntctcgatctcatgatagtggaggctganagtatatatattctagaagacactgaatatgacacaattcagtattaatctcatat

SEQ ID NO: 200966 - DNA, 404 bp, Glycine max
  unsure (1)..(404): unsure at all n locations
ctgagcatgcagctgcgngttggaatcataataactggggttcttattcttaaatatgcatgaaagcagttaataaatcacatcattattagatgaatatgagaggactattgatttactagttcagtaaaacacgcaactttatagctaacgcgtaaaaattacatcacttgtgggatggttacaacagataataaatcccaatcattagatgaatatgggggagaagagaaaacaatgaataagaaaattatgaatattgaggcatttttctttatgtaatcaagaaaaaaactaaaaaaaaaattgatttctaaaaacacattttttttcttcttcattaatttattgctatcggtccaaacatccttgatgctacacacgggcgtatgcatgacaatggg

SEQ ID NO: 200967 - DNA, 422 bp, Glycine max
ttaatactcactttgtttgctctgtaacagtagcatctcttgtttatttctcggtattttctccaaagctgatggatgacttctcaccaaactgcttagccagttgacccacctggatcttaatgtttatcatggctgactcaatcctctcatggttggacatggacatttgcataaactgatctattgtctcctccagtttggcggacctctgaaaaatatttggcccttgttggggtggcatgcttgaaagtacaccctgtgccttattgaattgatttctagggtgtgatctccattgccctagctgattgtatggatcttgctagaaacccgaaaatcctccttggatgtatccttgcctctgtcgattacccatgtgatgaacttcctctaacgagttcttcaacgggaatgccatg

SEQ ID NO: 200968 - DNA, 402 bp, Glycine max
  unsure (1)..(402): unsure at all n locations
ctgagctgcaacttaacccgagnncccctgatgagcatataaattcttatgttgacaccctgcccttcattgtcggttacaaggaaaattacacttggcatgaatatattgtttctctaagatatggcgctctcgcgaaagatctattttttctttgcaaaaagcaggttcacctttttaggtgaaaaaacccggtggaccgttcggtcctgccaacaaatcttattcggagacccatgaattgattgcctagcgctggtcatgcgccctccaccatcaaatctagagccctgcgaattgattgccaagcgctgttcaccaattctccattctcaatcttattcggagacccatgaattgattgcctagcgctgttcatgcgtcctccaccatcgagactgg

SEQ ID NO: 200969 - DNA, 398 bp, Glycine max
atgaaccaagtggattcaagtaggggagagaatgacagagatgatgactttaagccccaagaatgattccaagattgatttcatgagaagcaatcaataagattcaaacatcaagagaagtttgattcagattcaagagaatatgaatgctaattcaagagaagaaatcaagaagacctctcaagggaaatattgcaaagatatttcaaaaaacaaacataacatagtcttggattccataagagtttttctcaaaattttctaagctaccagagattttactctctggtgatcgtataccagtctcatgtaattgaataccagtggcaaagtttgattttcaaagcctttaaccgaatttacaacggttcaaatgattttaaaacggtgtcaaccat

SEQ ID NO: 200970 - DNA, 353 bp, Glycine max
tactcagcgtcagcctgtccgaaatgaatatttgagtacgtaccatccatcttattacactgtaaatgactttctaatttttttctacgttcctcattccattcatccacaatggggatccacaaatcttgaaacctactctataccttcacttctctggttttccctcacttccccgtattgatttaaaaaccgaatctcatcttcaatttatcaagggccgcaatgaataataagacatacttcttaaactctttgaatttaacctggtaaggttatatattatactccggaagaatttataattaaaattcaccgacagtactaaaagttgctatactatatctataaat

SEQ ID NO: 200971 - DNA, 379 bp, Glycine max
tactcagcttgaacacaaaagtagatgcatagaataatggcacagccatattcttagctgaaatcaaaagatcctagccagacgtatatgacttcccattacatcaaccaactggtggggcaggactacattaaatatctcatagccttgggaaaaaggaaactgttcatcagctcaccctttttagccaattcagctaacttgtcctatgatcctatccaattctcgtatacaaagattgatcaagcttatatttctggattttatttcttcatttcaatgcccaatcagtgtaacagaccttaccacaaacattctacgtgccccatatttgtaaaaaataaaaaaaaaaaataaaacttctgtccccattggccaa

SEQ ID NO: 200972 - DNA, 389 bp, Glycine max
tggagttgcaatagtgctaaggtttctggtggtagttactctatattgtcgacaattaactaggggtcctgccttcatgatttttaagtttaatgtgctaagttgttccaagcttagtctttggcaagtgttgtcaaagatattcatgaccccctgattaataggaaagattcaacacctataggatatgaagagacttttggtgtattgctaatattgctgactttataatatgatgcaaggctaactcaatgatgcctactccaataaaaaatgtcaatatttttctgttagctcctatcaccctatattattctggttgttcagacacttcttatgaaactgaaaagttcaacgttgtctgtgttacttgtcaaagtttaagtggc

SEQ ID NO: 200973 - DNA, 411 bp, Glycine max
  unsure (1)..(411): unsure at all n locations
aagtgacctgcngcatgcaagcttncttacttgttagtgtcttgattgcttattgttgttgtgtggatgctgctttacttgcttcatttccttgctttctttatcatgcaggtatcttgagttccagtttagttttcctcctgctgacacatgcaattctgtgttctccatatgaggttttgcttttgttcccttcctgctaagtttagttgcatatgtatgttttttggtggaattgtttattttttgtcatccaggtagtccatgaggctgtcttttgccctttctcatcacaagtataagggttgttctttaagttatgcagttgaggataatgtctaatatgttttatgacttattcattttcttatcagctttattaaattgtttctgtcatttatttaactttat

SEQ ID NO: 200974 - DNA, 427 bp, Glycine max
atactccgctgtcgaactacgtcaatgatagagttacttagtgtggcgaggtatgcatgtgtcctcaaaacaatgtgattgtgaaatctagttatgaaagcaagtgataaagtggccgcataaggaattttgtctataataaaaaattgaattgcgagagatgggtttacaataatcatcttgggtgatgatcgacttgttacaaattttaaggcggggtctcaaactcataattctattctttaaccaccatcaagtaccattgacaaaggaataccccaagacctataaaagtcgaatcccaatgggaagagttgttgaggaagttagccttaaagttgttggatgagcatataatggtacctgggaaatgattgcaagactttactatccttggggtgtggcgccaagtattgactatgctaca

SEQ ID NO: 200975 - DNA, 126 bp, Glycine max
aaaaaaggccgcactgagagaaaagagagacttatttggacaggggactcccgggtcctgacggaggacccccagagaacgagaacaagccccgaagccgggaaaagcggcccccccaaatgaaca

SEQ ID NO: 200976 - DNA, 275 bp, Glycine max
actacataaatacattcatactttcacctgaccaaactaaaatcctttactaacaacatttgtgtgattaaaaacaaatgaaatttactattaaaaagatgcactacaacaaacatcccataacatttaaaaactcataccgttaactcttgttgaatataaacacaccatataccaaagccaactatagaatacaaaccctaaaaaacaaacaaaactataatatactcccatacattatttctatctatgtatgaaaatcaacaactccctat

SEQ ID NO: 200977 - DNA, 391 bp, Glycine max
  unsure (1)..(391): unsure at all n locations
agctttacatgcatgtgcacaccatatntactatactttgatcaactgatacaatctatttgattgaaaagataatttatactactcttctaatgtagtggacaactaaaattaaaataatataatagaaaatactgcttaagccattcaaatcaagtcattttgaatctcaccattagtatcatgcatgtcaaagataaggagaatcaggcatcgtaatgcataacacaaccaaacattaaaagaaaacatgcttcctaaagccaaccaaggtaaaaatgtattcatatttcatgaactttttcaaaattataagacacatataaccatatataaaaacatggcagaacagtctcaccacatgaacaacatagaccacacatttcagaaa

SEQ ID NO: 200978 - DNA, 363 bp, Glycine max
cacctgttctcctttgtcttccgatacatcctcatggtggaaaatcaccatcaaaagaccatattgaagctcaaacatccagcctccatagataccccacaagcaagcttacatcaataatcttaccttttctcgtgaagggcttgtgagcaaatgcacaagaagtgagtatgcttttaaagagagtgcatagaaggaataagaatgcgctcagaataggaaacacaaaaaaaatgatgacgctagaaatgtaaagtactctgaagggagctgacgggtcacgcattttcaaatactacccaagtatttactgacttacgcgcttaacacgcacgtcgccgctaagcgctccaaggaaacccc

SEQ ID NO: 200979 - DNA, 375 bp, Glycine max
accaacaacctcctttgaactaaaacccgcagcatcctccttcggtgtttcctttgttgccactatcaccttcattaataagcgaagattctcaaattcctccttatttctttccctacttgccactaccaccaccagtaacttataagaattccccttataccaaaaattctcaaagttcttaaacctttccttcaatgccacaagacacctccaccacatttcgtaagtctcttaatagttctagtcgttcacaaaatacttcaattgatgatgttgatacacaatttccacaatttttacccaaattaggttagaaaatattacagtagaggaaggaggagggagttctacatagaagaaaatgggcacacg

SEQ ID NO: 200980 - DNA, 442 bp, Glycine max
  unsure (1)..(442): unsure at all n locations
ctaagcttttaactntanaaaagaatcctgctctgacagatgagctcagatatcttattaatgggtgaattaatttcccactaacaaacttttaacccccttctaaatgataggctccaaatgtagaagtagaagcaacaatcaatttaataatgttctttatacatgcaagacaaaattgattgcaataatataaatgagataagggaagagagaaatgcaaactcaaattatactatttcggccactttccgtgcctacgttcagtcctcaagcaacccacttgaaattttccactctctttgtaaaaatccttttacaaagtctgaaccacatagggacaacccatccattgtgttcaggaatccttacaacttaagagaccctcgatcccttaatcaatctctttgaataagaagaagaagaaaaattctctctttaa

SEQ ID NO: 200981 - DNA, 367 bp, Glycine max
ctcaagatgttttaaaggtgaaagaagcgcctaagagacattgtgacataaaagcctgcattgccatgtttgcaaacaacaacactcaaagctatgaaaaaattcacaaggtatggaactaagttactaaacctatataagagacgccatcatcaatgcccattgtaatcattggcggagcatatggggagacattggatcgagcagtgaagttaaatgactttactgcaggatcagaaacctttacctagaaacaaaatgaaaagaagaaaaacgcttgctaaacatctaaaaggcacactgaatatgattagaataaaaaaagaacctagacgttttagtattctacaaatgcactattactcca

SEQ ID NO: 200982 - DNA, 443 bp, Glycine max
  unsure (1)..(443): unsure at all n locations
tatagatactcatgctngcanaacgaacannacaccattatagcgagtgttgcctcattatattatgaagatcctttccttctattctttaaagcaaataatgtatataacctcaagtaacatttcaagctcttccacatcattttcatctaaacaaacagatgctaaacttgctctagatatctttgatcctatggggggggaggcagcaaaccaatttgcagcacctgatccactaaccggtgatgctgaaccagcctttcttgacaggtacaggtcagccatatcatcatcatcatccaacaattgttcaagctcatctctgactagtaccagataacaagaacttgtgatgggagagggaaaatggatatatgttattttctatttaaaactgatcaaagcatgttacattcacattaaacttctattaagaagaaaaa

SEQ ID NO: 200983 - DNA, 330 bp, Glycine max
ttctcgagcgcccattagttttgctagccatacttattctatatgtgatggtgtatctaaactcttgtcttacgaaattcatgaacgtgtatggtcatcatatgtgagggcttttaatcatctaatttcccaaacttttataatttttggttcaaatgcttttaagttccataggcacccatccaagtaggaaaaataagacacatgtatcactttcacatcaattgggtatagaagtgacaaggattctaactgcgtaacaatttgactgcatgtttgatgccattcaacatcatggaatagtcgaccaaaataatttggtcatcctat

SEQ ID NO: 200984 - DNA, 426 bp, Glycine max
aaatcaaccagctaggaattcgaaagcccactccagagtaggagtagccttgtacatctcaacaaacaaatcgaacgtgacacgaccaatataggtgctgctagaatacctcacccactctcaagtgtatcacacaattatgggtgttctctaatgaaacactcttgccttctaccactctaatccccatgaggtcctacgcaattcagagatatggccacacaaagaacatatcaccaatatgtgcaaggcaaggctagagagacaaggaaaagggtaaccaagaaaaaggctaacatggctctaagcacgaagaaagaaatcaaattcagaattaagaatacaggaacaatccttcatgcaccaaataaaccctaaaagatttctttttaaagttcttcagcatgaacaatcaccccaattttt

SEQ ID NO: 200985 - DNA, 396 bp, Glycine max
  unsure (1)..(396): unsure at all n locations
catgcaagctagatnggggagatgatattagctanaatcttattttggttattcagccaantcattcaaggaaacttccaaagaaaaacgtccgattgatctttttgattatttcattcaaagatattcttattattctattattattgtgccttttattggtctaaccgagattatagcgcgaacgatcggtaggattttattttaacagtaattaaacgatattacaactcaaatgatcggttgaaattcattttattatttattaggtgagaaaacggcttaaataaacggctaaagcacattaaaagggggtacggaaaacaaacaaaatgaaaataagagtacgcgaaacaagtggggaccactaagggtgcataaaatgaattgacagat

SEQ ID NO: 200986 - DNA, 434 bp, Glycine max
  unsure (1)..(434): unsure at all n locations
ctacatacacacgaacacanggtgtgccagagagagatgntcacatgtttcccagaatgaatatcttgcaccatctgcatcattaaatttcactatccgctggccctggatcacatattctcacaaataacgctccatcaaatggatattgatgcataatttctaagcactcaatttatacagagaatgatttatgttcaatcccaaaactatctagcttaccacctaccaacacaaagccattgaggaagcgagattcgcaagattagcatcagttatagtagttcaggtgcaacacttttctttctatatcggtctataaccaacattgtcattgaaccataattctcttatgaagaattatactgaactttaattatcatgatatacatggcgtccccaatggatttgagttgctcacaccaccatatcta

SEQ ID NO: 200987 - DNA, 397 bp, Glycine max
  unsure (1)..(397): unsure at all n locations
acctgaggctgcaacttaactttttcgggacataggatctcatcattatgtnggacaccgcttggaagagccgaaaaagcgcttctatgagtttccatgacggaaggctcgtttgagtgaaggccaagatgcttagaaccgtgtaagctatggccaaaagggtggttaccatgaggggtagtttgaaccataaggtgactttgtggtcagagtctctctcttgcagaaggggtttggtgatggtatagttggaggtggcgttggaagtgaatcgagaatagaagttatctgttgctaaggctaagagtgagagcaagaagattgaatcaacagctgaaagaagcactctttgcggacatggagatagaaaaataaacctcaaccactgaactatgag

SEQ ID NO: 200988 - DNA, 406 bp, Glycine max
ttaagcacctgcggctgcaagctgtgtggtggttttgactccaaggagattatctttgttcactggttttgctgcaccttcaccagctccttctgcttctgctgagattgaaggtcctgctgttgctcccactatcactgccaatgctttgaatgggggaattttgatggtggctatgggaatgattgctatgtgggttttttttatgtgaattggagttagtgttgtttaacttggtgtatgagactgtcacagtgaggtgattgcctgtggtgttattttttgcaggaaaaaatatgattcgattcatttttataatatatattatctatgttctggcctttgccccgtttacaagttcttgttgtgtcttctaaaattatattggatggaatattgcacaaag

SEQ ID NO: 200989 - DNA, 269 bp, Glycine max
aactgaagcggtttttgattgagttctgacgctatccatggagtactcctttacaggggaaaactatatatctgaaatcaacggtctaaaataatcacatcaaattcccctttaacttcccaacagacacgcgtaccactctgcctacaaaggcggaattaatgactggtagtggacatacaggcaactgataccattaaacgtgccacccagtagccattctcaggaaaccgcaatatcaatgatataaacgaaccttctcttcttcc

SEQ ID NO: 200990 - DNA, 369 bp, Glycine max
  unsure (1)..(369): unsure at all n locations
cctgtgtggttcatgccttcttgacctagtagttccactggaggagggcgttgggggttacggtttgggtttttaagggattacggtttacgaggggaggacagcgcactctgcgtctaccgttttctcctttctgtctctccttctctcccctccctttccatttcccccattcccccctctttctccccccctttcccttcctccaaccatattttatccntgtctctctcctcttttcctcctctctgtactccccctagcccccccctttcctttcccttctcttcccttttaccctccccttttccctccccctctcctcccctttctctttcccccctcctcttcttctttccctccctcccc

SEQ ID NO: 200991 - DNA, 415 bp, Glycine max
tctgagtgcagatccctacaattagccaagtgcaatgcatacaaactacacaattctttattggcataaataatgattccctctaactaaacatttgtagcagtctagcagttcaaattaaattgccacatagccaatggaagaaaagactgaaggttacaaggcttacctttgcttttgaagtaaagaccggatgtggctagtcttctactaatgctggcttgtactgaacaacagtgggttacaatgctgcaatacgaacacagaatacagcttgtcattgttagacaagcggcctcataaatattaagaaaggggctgaattaaaatttcgtgactattcctaatagaaaaattttctctttcttaattattccctacattcaaatatttctttgtttacacgctcttaata

SEQ ID NO: 200992 - DNA, 402 bp, Glycine max
  unsure (1)..(402): unsure at all n locations
agcttntttatttcagatgatgcagatgggtttgtatctttctcatgcactcctctaatgactatggcatcatttctggggctaaactgctgggagttggaagccatcttctcaattaaatttctggcttcaacaggagtcatgtctccaagggctccaccactggcagcatctatcatacttctctccatattactgagtccttcataaaaatattggagaagaagctgttctgaaatctgatggtgggggcaactggcacatagtttcttaaatctctcccagtactcatacaggctctctccactgagttgtctaatacctgagatatccttcctgatggctgtggtcctggaagcacggaaatttttttctaagaatactctcttaaggtcatcccag

SEQ ID NO: 200993 - DNA, 336 bp, Glycine max
aaaccacgaaaaggaacaaatatcaccgccgagaaataggagagagggaactgaacccgcaataggacatcgtatcgaactatatagactctcaagactgagagcgccaaccactcaaccagtctccccaaaagagaaccaatagtgatagaccatagtacagcgaataacaacatgagcgtaaacaagtgatactgagcaggtgggcacccataagggtagaacaactaccaaggggatggccggaaaccataacgggcaaagccaaacacccccggccctaaccagagatcccagagagactaagtacccctcggcctaagatgaaccccccac

SEQ ID NO: 200994 - DNA, 282 bp, Glycine max
agcatgccctgtaagaatgaaaagccctcgcattaaggtaaaagacactgttctttggctgccaaggtcaaaaaatagtagccagatgtaccaattgatcgaagttacgacttagcagtgcattcagatgtgggtcagggaagttttctgaaatctgatacagatgagaattcagactataagcattgcacggcactgaataatgatatgtggcacagggcactgctgtgaacgggaaaaaaaatgaaaaggtcaatctcagatgccgcccactggggggac

SEQ ID NO: 200995 - DNA, 392 bp, Glycine max
tgcagcttgagaggatgcttaatggaggataagaaagagatattgtgggggggggagcacggaattcaaggaataaaatagggagagaagtggaactttgaagagtgtctcataagactttcattcatcaaagcaacaacaagtgttacacatgcttttatttatagactaggtagcttccttgagaagctttcttgagaaaacttccttgagaagcttctttgagaaaacttccctgagaagctagaccttagctacacacacccctctaataactaagctcacctccttgagaaaattccttgaaaagattcctaaagaagctagagcttagctacacacacctctataatagcttagctcacctccttaagatgagaagctagagctta

SEQ ID NO: 200996 - DNA, 326 bp, Glycine max
agtgctatgatccaaaagatccttccacccaagcataaagatcctgggagtgtaactattccttgttcaattggggaagtcaatgtgggaaaatctcttattgacctgggagccagtatcaatttgatgccactctccatgtgccaaataatgggagagttggaaataatgcccacttcgatgactttacaattagttaaccgctccattactaagccatatggagtaattgaagaggtttggttagagtaaaacatttattctcccggcagactttgtgggaatgatatctctgaagatactgacatccctgtatattgggaatg

SEQ ID NO: 200997 - DNA, 315 bp, Glycine max
ggtcggcagaggagcacaaaccacagagtcgggcgacaggcgcatatatcctattcatggcccaggtgggttaccaaggttaaccaaggcgactagtttacactacaagcttcctgaaacgcaacctgatgaattcccggatacttccatgcactcccctaaagacaaaagcatcacttctggcactaaatagcggggagtccgaaaccatcttctcaattaaatttccggcttcagcaggggacatgtctccaagggctccaccactgacagcatctatcatacttctctccatgacgctgagccctttataaa

SEQ ID NO: 200998 - DNA, 407 bp, Glycine max
  unsure (1)..(407): unsure at all n locations
tgcagcatgcagcttgaaaacanagccacacatatgccaccatattatctttgcccaccctaancacaaagaataagagaaggacctacaaatacaatagaagatccaacactcatggagacaggcacaaacttcgatccatggacatagtacattaattatcttaaaaggttcagaagagtcacaccattagaggctctgctatagaaaaaaggatcttacctaacattactatcctaaaaaaaaagtttagttctttaaaaaatacttactatactccacgggtagcaatacttattacataattcaggctcccctttccacgattaacgatcatgaataaaaaaaaattactaatcggagctcattcagctctatattctacataagtatcaaagacaaacaaa

SEQ ID NO: 200999 - DNA, 426 bp, Glycine max
  unsure (1)..(426): unsure at all n locations
tgcagaccaanacactaagctacttcaagtcatagaattcaatgtttatatatattnttcaatcttgcaaaggtttccgtttctgaatttgacgaagagacattttctccggtacacttcattgacaaaatattaaaaagtttctttatgcactatctttaaacaaagtcatttgaactcaaaagtttatgtagactcatagagtttcataaatttgactcataaacttaactagtaaattcgtaagagttcatttcatataagaataataacaaaatatctataaataacagtaattaaatatttcaactatataattaagtaaaatagttaatcataaatttcataataattaaataaccaagtctagtaatgtatcactactagataataaccttgcagattgtacagtagcgatatatcact

SEQ ID NO: 201000 - DNA, 414 bp, Glycine max
  unsure (1)..(414): unsure at all n locations
agtcacctgcggcatgcaagctntgagcttattaaacgaccataactatntactctgatgtctgattgagtcccgtaacatatcgagacgctcgaaattgaatgttgaagctctgagccaattcaaacgacaataaatttttagtcggaagtttgattgagtcccgtaatatatcgagacgatcgaaattgaatgttgaacctctgagcaaattcaaacgacaatcacttttttctcggatgtctgattgagtcccgtaacatatcgagacgctcgaaattgaacgtggaagctctgagcaaatacaaacgaccataactttttactcgaatgtctgattgaggcgcgtaatatatcgagacgctcgaaattgaatgtttaagctctgagccaattcaaacaacaataactttt

SEQ ID NO: 201001 - DNA, 433 bp, Glycine max
ctcagcttaacattcaatttcgagcgtctcgatatattacgggacacaatcaatcatccgagaaaaaagttattgtcgtttgaatatgctcagaggttcaacattcaatttcgagcgtcttgatatattacgggactcaatcagacatccgagtaaaaagttattgtcgtttgaaatggctcagaggttcaacaatcaatttcgagcgtctcgttatattacgggactcaatcagacatccgagtaaaaagttattgtcgtttgaattggctttgagattcaacattcaatttcgagcgtatcgatatattacgggactcaatcagacatccgagtaaaacgttattgtcgtttgaactagttcaaagcttcaatattcaatttcgagcgtctccgtatattacgggactcaatctgatatccgagtataaag

SEQ ID NO: 201002 - DNA, 396 bp, Glycine max
  unsure (1)..(396): unsure at all n locations
agctntgaaaaaacaagacacagatctacttgcgaatatttcatttattctttcttggaaagagctctctgtatatttttgtataaatacaaagctctcaaaacaccttgtaaacttttagagaaaagactaaaagtgttgagtgatatatccatctataagacaatcatacaatagtcattgtgcaaacttccaacaaatattattgatttgtttagagctagtagtggcttggtaggacaaagaatattgggtttaagtcaagcttggggtagagcttgcatgtgtaagagctagaagtggtagtgaaaaatacttgtaaccttgataagttagtggaaacttggtgagttaccaagaattggaggtagtctcgggtttgagatgaaccaatat

SEQ ID NO: 201003 - DNA, 430 bp, Glycine max
  unsure (1)..(430): unsure at all n locations
nggaattccgcataagggaaccttgcattggtcttatttgtttgcaatctgctgcagcataatggttgatacttaaagcagaagactatttctttctctcttggtaatcagatattgtattattaacaatgaaggaaaaactcctctcagtatttcctgagcattttagttctcccctctatccttgcagaagaatggatcttattggtgcaaatgcattttcattctgcagaaaaaagaaagagtgtaatttcgattgtatttgttttacaagactgatgcctattgctgatttgatactaagagttgagaatgcatgtcgaaatgtttcagagtctataaggtttgtatgctattagccaacataaatatctgcatgcaaagtttttataatgcagacattcaagatgatatacacattagtatatta

SEQ ID NO: 201004 - DNA, 409 bp, Glycine max
  unsure (1)..(409): unsure at all n locations
agtcacctgcggcatgcaagctntcaacccctcttcatggtggaacattttgatgagatntttcaaaatacaattctcaatgttctcgaccatgtggccacctttggagaccacctttgccttttgcactccatactaagatgtacaattaaagaaatcagattttctgtacacacatttgcattgaacatcaacacaaggtttcctcttcccaacatcatcaaagatgccctgaaaaaacaatataaaacagaaattcacgtaagagaaatagtcaaatgcagtggttaggtccagtgaagaaggcacataatatgcacacaggtatgtatatattatatcaatcactagcataattttttatggttggatggaatgaagatcatcacattctctaccacgtgacctc

SEQ ID NO: 201005 - DNA, 370 bp, Glycine max
cactaacatgtcgtcaaaccaataccacctggtcgcttaggaatcacataacccaaaagttaatcacatgacgtccctgacgtgacactaacctctcttcccactgaacaacaaataagtatgggcttattcaggataatggacggtaataaagaggcataaaataattcgctgacactatgctaataataaatttcaattcacagcgtcgatatttagaaatagtgactagaactcaagagattacctaaatttatgaaaattataattagaatagtcttagtacgatcctatttatatttccattcaacctcaatattgtactgattttggaaaacgcgtgctggtctgactctaataaaatgaagaa

SEQ ID NO: 201006 - DNA, 404 bp, Glycine max
ctgcagcttctatccaggcacattcttggtggtgaagctccttcttccatggcttattcccttgtggatggtgcctcccctctcctcttctcctttgccttccgctgcatctccatggtggaaaaccaccattgaagctcaaagatccagcctccatagaagcttcacaagcaagctaccatcaagtggtaatcagagcacaagagcttcaagtaggtgctccttaaaccaccattaattttttttctttaccttctctttcattcttgtttcttcatttttctccgtgtatctcctcacatctcttgtgctaaatgttgttaaaatgattctttagagtttcaaccgattaaacttgctatagaagctagatttgattttctatggttcaaatttatttttct

SEQ ID NO: 201007 - DNA, 426 bp, Glycine max
tcagcttagctttgtcccaggcttcatgtagacttgtccaaaatcgcgatgtatacctcggatccctgtcggatacaatactaaaaggaattccatgcaaccttattacttccttgatgtacaactccacgagtttctccattctatacttcatattcaccggaataaaatgagcagatttggtgagtcgatctactatgacccacacaacatcatgtccacgactagtcttgggtaaactagatacaaaatccatagatatgctctcccatttccattccggaatctccaatggcttcaattctcctgacggtcgctggtgctcaaccttagctatttgacatgtcaaacatcttgctacatattcagccacatctttcttcatgccatgccaaccaaaactttcttttcaaatcttggtacatc

SEQ ID NO: 201008 - DNA, 360 bp, Glycine max
  unsure (1)..(360): unsure at all n locations
atcggngaaacaaataaagaaataatgtgagtgataataatgggatgagaaggaaattgtgaaaaaaacatgtgcataaataacatgttcacggtctacaataaaaaagaaatgcgaatcaaaagagaaggaacaaaaatcaaaatcaaagctagagggtgacctcagttgcacttacagtgacagattcaaagaacacgaggttaacttaagctagtttcggatggttatttgtttatggcaataaaaacaaatttgcaatccaaaaatcaagaaaatgaagaaaagtaaaagcattataacgtaactggaaattttttgtccaaatcaaagtctaagatattgttccagccaagttgt

SEQ ID NO: 201009 - DNA, 384 bp, Glycine max
  unsure (1)..(384): unsure at all n locations
ctgcagctcgacaaggacttcttatgatactctccattctttacgaactaannctcaaggaagaaggctgaactgcacatagaataaaattaggaccctttgtgtcctcaacttgaagttgcttcttgcgtccaatattcataaatgatgattgtggcggaggaggttgtaacactaaattactgcgccttgagtcattttttttatgagtgactntggaaagaccaggcttgtgttcccaaaagaagggtatgcttactttatcttgaaagtaaacatcgttattaagagtgcgctccatggagtgtatgtgatgctatgctattgctatttgtgttatatatgcaactctcgcttctccctacgaaagtatatgcatgccac

SEQ ID NO: 201010 - DNA, 143 bp, Glycine max
  unsure (1)..(143): unsure at all n locations
ctgagcatgcagctgagagacattntgcttcttgccagaatctatctctatctccatttcttagcttagctacatcaagagtttttttggaataagcggcctcagaataattaagacgggggggggggggggggatactatat

SEQ ID NO: 201011 - DNA, 431 bp, Glycine max
  unsure (1)..(431): unsure at all n locations
gctgccattatagctgagctgatttatagatgattcaccttttattatcattnttatgttcaaatattcttttattctcttttgctcttatttttatcttatcctctaacatgaaaatatatattaaatacttaattaatgtgcttaaaattattaaaagaaaaacacttccctgctcaagttatgaatgagataaataagccaatcttaagctttatatttttctaacaagtcaaactcaagatttaaatttggttgatttaaatgagtcaaacttgagtaccattattatttggtcagcaaaacttgaacttaaagattttgactcagtttgacttattcacacccctagtcacaatgtacaaacatatcaatttccctgagtgatatccaagtactgaaattgtctcgtgagttatcaataagtaact

SEQ ID NO: 201012 - DNA, 366 bp, Glycine max
actattttttttcatgtttcagatgcatgtagcttgtgtcttcttcatagataggacatgcacgatgacccttaaaattgtatccactcaaattcccatatgctggaaagtcattaatggtacaaaatagcattgcacacaacttgaatgtctcatttggatacccatcaaacacaacaaccacctcgttccacaactttatcaagtcttcaatctagggattgagataaacatcaatgtcatttcttggttgtcttggacccgatatcatcatagacaacatcatgtattttcgcttcatgcacctttgctgggggacctttcatggtgatttcatcattgctccatttgtcatcatccttcact

SEQ ID NO: 201013 - DNA, 423 bp, Glycine max
cttcttaacaattatcatatagttaaaatatgtcttctaagtagagagagatacacatgggttcatacataaacaaccaaccagaaggttaaataaataaaatttagcatgagcatacaggacaagagaaaaagcttttaattcacgtataaaaataattactaattaatattccctccactcgtatcactcaacaaattgcacattgcgcacatgtctaaaaagactgcaaaacaagaaagatacacaaggtcagaagattcatttaccaaccttcttagctgcacggagcagcagttcttctattaaatgttgggctggaactccttccggaaatttttcatgaagctctcaacatgagaaaccacttcatcattgtttagatattgatatacaccatcagatgagaggatcatgaactgg

SEQ ID NO: 201014 - DNA, 352 bp, Glycine max
  unsure (1)..(352): unsure at all n locations
gacattgnagaggcaatgggcatcattggaatggaccttcttagccttattccatatctcataacaagtaagaaaagcctgaaattgttgttgaagattaggaccaagagtgaaccagagaaaattacacaatgaagtatcaattgcttcccatgggattgttctgaggtgggaatatccttcacctaagttgtcaagtgaccagcacaaccttagccttggaaccaaagctcaacaacgacggcccatgtattgtagttggttgtctcggttaatttttcacatggaatcaacgatacataagtgaaagtcataatggaggaagtggaagcaagattggaagcatccatga

SEQ ID NO: 201015 - DNA, 432 bp, Glycine max
  unsure (1)..(432): unsure at all n locations
tgacacacatatccctaacctaattattataaatagactgagctctattataattggtttacatcaccactaccacaagaatttcatatagaattcaagttaaacaatttttccgagggtttttatttctactctttntctatgtacctgtgaacattaggttgtgtttaatagaaataaatttgttttttttttagtttagtgatgaataaccaataatgcatgaaaaatgtatcaaagaatgaacatcctaggcaaatttaaggaataaacaaagtcaagaaaaattttaaagctcttcaataacctaagtaaggtataagcaccaatagttatgaatcaatagaaaaaacactttcattgttcataagataccagttatgcaaagagtaataaatcattgcttatggcatgcaacgagttgggctgtga

SEQ ID NO: 201016 - DNA, 394 bp, Glycine max
ctgcagctgaaagtgatgattgagattttattattttcgttcttacagaatgtaatactcattacatataaggtactcagcgtactagttaagtgtgttttggtttaatgttagattgaacgggcacactttcccatgcatgttttgtgagaagtaggaattcatagcttttgattaaacggctgtttggtggcctcccaacagtaaatcaaacccgcatttaaaccttttttaatctctgctgttggcttgtatatgtattctctctctttctgcagattgaaactgatagggaagcaggagggaacaaaggtgtctctgacaagcagattcgactcaagattttttcaccaaatgttcttgatatcacacttgttgatctcccaggcattac

SEQ ID NO: 201017 - DNA, 415 bp, Glycine max
  unsure (1)..(415): unsure at all n locations
tctctgagtcacctgcggcatgcaagcntgatgattacattcttccctttctaagctttttcttaattcttcttgatatcatcaaaatcttcatgatttacaaatatgttttataacagctactaaaatttgaattcgaaattttagactgtgtaatcgattacacaattttggtaatcgattaccagcagttaataaacgttttaattcaaattttaaaagctgtaatcgattacacaattcctgtaatcgattactagacaggattttcagaaaaatatttctaagagtcacaacttttcaaaggctttattcatgactaccaatgatctatatatatgtgacttataacacgaatttgctcagagtttttcagaacaacaagtgtttatcctctcaaagagcaaaatcattt

SEQ ID NO: 201018 - DNA, 426 bp, Glycine max
  unsure (1)..(426): unsure at all n locations
cagctgcttctacaatctcccctttntgatgatgacaactctgaaatctataaacacatacacatactttttcctagtcgatcactcacttaattttccattctccccctttggttttgagtttatgcttcacttgaaattaagttaattacttatgtgagttcttgatttaatccctgtttctctccccctttggcatcaacaaaaagccaaagtgcgtaacaagtataaaacatacatacactattaatcattcacaagacattcattgaagaatataaaaccaatcatgaagcaagaaacatgaatagatcaaatatataaaaactacttagtcatataacataattcataattgttcaaacataccatgcaaataaaagaaatattaaattattcanatgtcataataatatagccaaatac

SEQ ID NO: 201019 - DNA, 399 bp, Glycine max
ctgcagcttgagcgttaacatccgagcggttctcaataattttctttctggatcgccaagatatctttttggttgctgctccttctccaaactagctagctatttttcactcatcaccccttaccagttattttaatcataagtaggagaacacagatatcgacgatcacttgaatacaagaaatctatttataatagatatttcttggagtatatgatcaactaaaagaaaaattaatagtgtccatatatcttttaacaaatttatggaataaacaattacttaatctctagaaagtggaagacattgtgaaaatgtcaaataattttttaaatgtcaaaaaaatatctcgataactatttaatatcatgttgctccctaaatatatattcatatta

SEQ ID NO: 201020 - DNA, 403 bp, Glycine max
gtttctgaagctttacaggttaaagtgagttgttaacatcttgagagattaagaagagatccattcaattaagctttggttcttgcatttgaatgacaaggatgtgtctctccttaactctgctttcatatgtttttacatattgttacaatatatgcatgagtttctaaagcatgctagaatatggttttctagtttgagctaagggtatgtggctcttaggcttttattcacaaaggaccccagggttgggttccttagtctctttttctgggtaggaattgagattgattgtgattgcttgtaagaactcaaagtgcataatggaaatctaattcaagttgaattagataattggagtagtttctctagaaatagagagtgaaccaatattaatcttgtt

SEQ ID NO: 201021 - DNA, 396 bp, Glycine max
agcttcattcttagaatgaagtaagtagagatacatatatcatgaataatcatctataaaggttatgaagtatttcagactatttgcatccatgtctggacaacatatgtctgtatatatgatttctaataaattaaaactcctctttgcaccctttttagacttgttagtttacttacccttaatgcaatctacacaagtctcaaaatcaacgaaatccaaagtactaagtactccttcatttactaatcgcttgattatcttaatagagatatgtcctaatctctggtgccacaacatagagggattcttcattcacaatatatcgttttaacccaactgaaacgtgcatagaattataagtagcgtcgcttttcaattcaatcgaataaatac

SEQ ID NO: 201022 - DNA, 389 bp, Glycine max
  unsure (1)..(389): unsure at all n locations
agcttggctgcgcagcagctctgaattcgngagtatttatagaagatgacgcattgtaatcgattacaggtattggtaatcgattacaggtccaataagccttctggtaatcgattacaggatgttgtaatcgattacaggctgcctgttcatgtgtaatcgattacactggatggtaatcgattaccagagcctatcctaggctagtttctaagagaatatctatatttatgctcaaatacatcctatatgactaattttcactactaatacactaaattcaatcattcaattactatatacacaagaaatcataaattctatcataaagacaagaattcaaacaagatcaaacaaaataatctacaatcaaaagataaaaagtaaat

SEQ ID NO: 201023 - DNA, 436 bp, Glycine max
actcagcttctatccaggctcatcttggtggtgaagctccttcttccatggcttattccctagtggatggcgccgcctcttaccttttctcctttgtcttccactgcatctccatggtggaaaatcaccattaaaggacctcattgaagctcaaagatccagcctccatagaagctccacaagcaagcttccatcagaagcattgaacacagaaaacataatcaattagatattaggtatttacatcattggttcattagaaatccccaactagggtgcttagccagccattacaaagaaacccaaacaataaatcttacaaaacctaggcttcaatgcacaagctactcctcttgatgcttctagggctcttttcccgaaataggcactatggtgtgctctaaaatctgtgccaatcttctgcctacaatctgta

SEQ ID NO: 201024 - DNA, 369 bp, Glycine max
  unsure (1)..(369): unsure at all n locations
gtgagtcttccttcttttattngntgaccacagagtggtacctggagatatgtcgcgggggtcatgagaccttggggacgttaggtggggtgctattgcccaaaaccaagcttgatcaatcccgacccaacccaggcatagtcagtcagtgagaacctgtgatgtacctaaacaggcgagctcctggcagtcaaccgataaaagaacaaagaccacaaagcaaggaggcttgtgtggtggctggccagctatgaatcttgagtgatatttggaatatggcctctggtaatcgattaccaaggatgtgtaatcgattaccaaggatgtgtaatcgattacaaggcttaaaaatgaagacagtatgttgag

SEQ ID NO: 201025 - DNA, 393 bp, Glycine max
gcggcttcaaggccaagtctaagagggataggaacatttttgtcattctcaatcatgatattaacgtgtaaatgatatatgaaaaacctaacatagcaagaaaaagagaaagtacgaaatcaatatctgactctaaatttctccttactttattacatcaatttatgcagattagaaaaatgtacgagttatagagttcacgctcaatacaattgcatatcaatttcacaacaattggttggtcaaacatatacaattcacaattataactataaggatagaataaaaaaataacaaacatccaaaaactcattccaagtgatactctaaggatccctacacatgtgctcaccaattgagaataactcatcccttacctctaagcggactcac

SEQ ID NO: 201026 - DNA, 405 bp, Glycine max
  unsure (1)..(405): unsure at all n locations
ctgcagcatgncagcttgnttgttttacctagacaactagtgattactattttttattttctatatgtctcttccatcttattcttttcttgctcgctctctttttgctcctttttttccatgagatattttgctacctaaacatacgtatatttttgtgaggtattttgctatatacatgcgtgtccaaggtatcttgctacctaaacatacatatatatggtttgtgagatatttttgctatatacatgcatatccaaggtatcttgctacctaaacatacatatatatattttgtgaagtatttttcctacatacatgcatatccaaggtatctttctacctaaacatacatatatattttgtgaggtatgactaccttccgagcttgtgcttgttttattt

SEQ ID NO: 201027 - DNA, 346 bp, Glycine max
cttattccctagtgggtggcacctcttttcacctcttctcctttgtcttccgctgcatatccatggtggaaaatcaccattgaaggacatcattgaagctcaaagatccagcctccacagaagcttcacatgcaagcttccatcaagtggtaatcagagcacaaaagcttcaagtaggtgcttcataaacctccattaattgtttgctttaccttcctttccattgatgtttcctcattttttttccatgtatcgccacacatgtcttgtgctaaatgttgttaacatgattctataaaatttccaccgattaatccttgctatagaagccaaatttgatttttta

SEQ ID NO: 201028 - DNA, 414 bp, Glycine max
  unsure (1)..(414): unsure at all n locations
ttaagcacctgagcatgcagcttgtggatcnatggacttgaaataatnaatatatgtttgttgaattaattattaatgagcctttactaattaaaaaacttatccttcttaatgttactagatttaattaggcttttactactaagttaagaaagcaaagaacatatatagaaacttaatcaaaagtaaaagtgattattaaagtgcacagcggaaattaaagagtgtagggaagaagaagacaatcacaagaattttatactggtttggcaacaacccgtgcctacatccagtccccaagcaacctgcgattcttgagatttctttcaaccttgtaaaatcctttacaagccaaagatccacaagggatgtacccttccttgttctctttgaaaacccaagtggatgtaccct

SEQ ID NO: 201029 - DNA, 255 bp, Glycine max
acaaaaagagcagactaccgacgcaccggaagagacaaccaccggcgagagggaagagcacgctaccattagcagacgaacgcatgatgatgactgcgcccacagagaccagaaaacgccgcgaaacaaaaccacgaaaggactaccccaacagggaggaaacgccaaccaaacgacacgcagggacaagaccacaggactcagcagccagacaaacccacgaaaggacaaacccataccgaccttactagacaa

SEQ ID NO: 201030 - DNA, 352 bp, Glycine max
ctggtaatcgatacaagccttgtgtaatacattatttgctttaaatcttaaattcaaaatttgcaaacttgcttcacaaatgaattagtccactggtaatccattacattctctgggcattgattaccagagagaaaataccacatattttaaatcacaaaaagctcttgtaaaatattctttggctaaacctgtgcattatcaattaaggaatgctttcctagattctaaggactaagttcatcatttttcttgaatttctgtgttcttgacttgtattaaacttgagaagcgcttatctttggtataataaaactttatatatcacatgcttttacaatttccccttttg

SEQ ID NO: 201031 - DNA, 332 bp, Glycine max
  unsure (1)..(332): unsure at all n locations
caccgcagctgcagctacaagcacntacaatatgatcgnaccattatcttcatctccacacagacctacgcgcatattcctgaactatagccctatttctcactatttctttcaaaatcaaacaatcattgcatctctcctcgagatagacaaacatgtgcctgaatcctaccatcgccacaccgtcccttatggtataccaaatgcactccgagcccctcatcactcctgtcactggcaagttctgagtcgccggctattaatgaaactgcaactctactattgggtcatgaaacccacatccctcccattaaaccacaacccaaatccac

SEQ ID NO: 201032 - DNA, 415 bp, Glycine max
tgcacagcagccagatcagatgagcttcaatcacgatcagagactcttgctctatgatgaactgccaactccggcacaacttctgacattggaaagcccaaaacgatgcgcgccatcatggatatgacaggatatctggtaggctaactctccaccaatacagtatgttgcaaacaacattacgaggaaagagaggttcttacaagttcttgcctatatctgattttgtgccttgaccctgtgaagttacatggagaaatttatcaaaccccatcaatcaattccggggagatcttaccataaccatgtataaagatgtggaccattgccatcttgccaagccaaaccttgatcatgagaatgcaacggggatccctaacgaatgtacattgtatatatcctttaatccatcaaa

SEQ ID NO: 201033 - DNA, 406 bp, Glycine max
  unsure (1)..(406): unsure at all n locations
agggcggcatgcaagctaacctntntatgctccgtaagaaaaagaatattttattatgagacaanggggtagagaatctctgagacgctcacttaccctattgcattaaacgcacagtatcctccgcagctgaccgcgtggctgcgacctgaaatcggaagcgaaaacaataaataaatagggcaccacatcccggaaagagaaagagaagagaaaataacttacagctccgatctttaggagaccatcaacagtgagatggagaaatggattacccatggcaatagcaacgtcgagccttggagactctgaaagcctcacccaaggcatctttcacgctcactcttacatccttccttaggtgtcttcaggtatcatttagaatcccacacataggaaacggcac

SEQ ID NO: 201034 - DNA, 387 bp, Glycine max
ctgcaagcttcatcaagtggtgatcagagcacaagatcttcttgttgtgctccttaaacctccattaattttcagctttaccttctcctccatttttgtttcttcatttttctccatgcatctcctcacatgtcttgggctaaatgttgttaacatgattctttagaatttccaccgattaatcttgctatagaagctagatttgattttctatggttcaaatttcttggtcatacgaacttttaaaaattactaagaattagtcactgcgaattttgagctgaaatttttactgaattttctagacatctgtaaaaaagtttaaaaaaagaaccaagtgatttggataaagggtaaaaatactaaaaatcacacaatttggcagat

SEQ ID NO: 201035 - DNA, 244 bp, Glycine max
ttttcgggctgatggggcctatatacggcaacaggtctcactcttggcgaacagtggggaaaccaaccctactttgagggccagtgtacaacaaacgatcctagtactgttttctcacatcttcggtcgaatgtgtcttatagatcggctaagatagcgactaccacggctctccctgcggtcgtaaacggcgaaaaaagcatcaatcgctgcttggtccaccaacccatccacatttggagag

SEQ ID NO: 201036 - DNA, 394 bp, Glycine max
agcttcatggtgaatcagaggtgattcaaaggtgttttgatgataacaatgatgataacaaaagatgatgacaaaggtgatgacaaaaagctcaaagatcaatcaagaacaattcaagaagttcaagataagaatcaagaagaattcaagactcaagaagaaagtctagagacaagaatcaagattcaaggttcaagatctcaagaatcaagatcaagattcaaggctcaagattcaagaatgaagagaagactcaatcaagataagtattaaaaagttttttcaaaacttggaatagcacatgagtttttgaaaaaaccttttaccaaagagtttttactctctggtaatcgattaccatattgttgtaatcgattaccagtagcaaaatgag

SEQ ID NO: 201037 - DNA, 428 bp, Glycine max
  unsure (1)..(428): unsure at all n locations
tatccncacaagggtgcagaacagtnggcgagtctgcattgattatatgaggctgaatcaggtaaccagataagatcatttttccctgcctttcattgatcaaatgcttgagcgcttgataggtaagtctcattactgatttcttgatggtttttctggctatttacaaattcatattgctcctgaggataaaaaaaagaccacattcacttgtccctttgacacttttgcctataggaggatgccctttggcctatgcaatgcccctggcacctttcaacggtgtatgcttagcattttcagtgaatttttagagagttgcataaaggtgtttatggatgattatactgtttatggatcctcttttgatacatgtttggataatctggataaaagtcttattagatgcattgaaactaaccttgtgt

SEQ ID NO: 201038 - DNA, 399 bp, Glycine max
  unsure (1)..(399): unsure at all n locations
gcagcttctaaggaagttntcttaagagagctgctcaaggatttctcctagtctataaatagaagcatgtgtaacacttgttgtaattttgatgaatgagagtcttgtgagacacaattcaaagttcaacttctctctctctttcttccttcaatttcgtgctcccccctctctctttctctctctcattcttttcctccattgaagcatcctctccaagcttcttatccaaggctcatcttggtggtgaagctccttcttccatggcttattccttaatggatggcgcctcctctcacctcttttcctttgtcttccgttgcatctccatggtggaaaatcaccattaaaggactccattgaagctcaaaaatccagcctccatagaagccccacaag

SEQ ID NO: 201039 - DNA, 399 bp, Glycine max
agcatgcagctgttctgactcatttccctagaaatgacgctcctatccctttcctccttctccattacgctgcctttgatcttcaagaagtaaaggactccattgatgaagatacaaggcctacaagctctacatggagctaaatcatgtggtatcaaagcatcttcatctaggagattgtctttaggtatctctatcttttgctcagtcaattcactttaattcctttctttatcgtcttatccatgtatctcttccattgcggattggtgctgtccagagtagataaaaaaaataaaccgattaaatcttagatctacacttgctcttgcatttctatggttcaaaatttataaatctactattaaatcatgtttttgtgtttattttaggctctat

SEQ ID NO: 201040 - DNA, 283 bp, Glycine max
aagcatgatatccctacacacattgtctcctgtaatccttattatggatgacgatggactaaatctaaatccaaaactgcgaatgcctacgcaactcaagaacttaaggttgaactatgcttaaatagaacacggaaccgcttctattgcctctataaatgacatgattacactggagaaacctcaatattcaacatttcgaggctttacctatgatggaagttcaattagtaccagagtgaatttcacaactcaaaaatcttgcgaatttgtctttggaaac

SEQ ID NO: 201041 - DNA, 402 bp, Glycine max
tgcggcatgcaagcttcacctataactttttatcactaaaacgagtttgttctctggacaacatcatctgctgcacaagcttttcatttttaaacaacatggcttagtagtttgttccatgatcaatgacttcttttaattagcttgcaacttatatggacagtagctaatttccaacttatatagagatcatataaggtacttttaagatattctaacatgaataatcatattctgagatatttcctagatactttggtgtcaacctagtgaactcttaaattgttgcaaggttgttagccagattgaatatccctcactggttgatctaaaggggcttcttctagacttagttgctcaactctaaggtgctctgtctcgtatcacgtatcccacatatca

SEQ ID NO: 201042 - DNA, 436 bp, Glycine max
gatactcaagcttgatacatatataattgtcacttgcgtagtaggtatgtattttattttcacattatgctacttatgcgctaactataattgtaattctgctattctattaacagacatgataagagaagatccatcaatataaatttcattgattcaagagaggattaacagtgaatttgtgtacaaggtgtcgtacaaaaaagcttggttggcgaagcaaaaagccattgcacttgaatatggcgattgggaagagtcatatgcgaaactttcgtcttggctaacacacatgcaaaatcattctcctggatcatattttcaaatactacatgatgattatattgttggaaacacggttatgtccaaaaaccgacagtttcatagagtgttttggacttttggtcaatgtaaggaggctttcaagctttgtaag

SEQ ID NO: 201043 - DNA, 308 bp, Glycine max
acccatcatatgtcccaaaaccccatacccgcgaaattcaagagagaaagatgtccacccaaacctgaaatttcgaagtcccactcggagccgcgcacttcacgactccaaaaatgccctcctttcgcgatttggagcataaaggaccaccaaaggttgaaactctgttcggagcttcaagggagaatgagggagaaagaatggcaacgtgaggaagagagagagctgtctgaaaaaagtgtgggggctgagtgaatagagagaaaagcttttcgggtttaaaataaaaggggtttctctttttctat

SEQ ID NO: 201044 - DNA, 438 bp, Glycine max
tactcaagctatgacatcaatggaatccaagactctgttagacacaagtcatccaattattttcttagaaaagtgacctaagcgcttatgccataatgctcctgagattgtattatctattctacgcttagtaccacgcaattcctcattaaaggattcaccataagaagctatagtatcaagtaaatatagattatcataatccatgagggaaccagttccaacaatatatgaattaaaagacaaaaccacattgtttccaaatgaacacaaataacccaatttgttcaaattagaaactgaaaccatattccgtctaaatgacggtaccacaatagggtctttcacatccaaataaaaacctatacataataataatctaaaatgccctatatctccaacacatattcatctttcagaatcagttggcttccggta

SEQ ID NO: 201045 - DNA, 381 bp, Glycine max
  unsure (1)..(381): unsure at all n locations
tgcagcangcatgctataccaatacagtatacgacaggcagactttatttttaaccggaatgacattcgagttgtgaaatgctcgaatgcatttaagacactcatctgaaaagaaatccatatttctgcacctagggtcaatgaaacaacatgaggagaatacgtttgtgcaccgcaaacatcgatcttccgatgacaacaatgaggatgaagacatggactattcttagcctcggaatggctctggcttctactccaagaacctttgcccttcttttatggctccaccatttgaaagacttattcaaactttcacttggttgaatcgaacgaaaacgaaacaacatgaattttgggctttgggggacgcgatctggataa

SEQ ID NO: 201046 - DNA, 256 bp, Glycine max
acccaaacacgagtgcacaacgagaaaagaagagattttccccaaagcaggggcggaggcaaccaagccaacgacctacggcaacagcgagaagcaacaaagcgggacgagaacatgcagagacaggccaacgggcaccacctcccacacggccaaagaggggggccagagggagacccggggggaccggagaagaggaacacggcggaacagacggaagacacggaaaacccggaggcgaaccgagaaaacgaca

SEQ ID NO: 201047 - DNA, 377 bp, Glycine max
  unsure (1)..(377): unsure at all n locations
tgagcatgcangctnggagtaaaacttaagcagaagagctanatgtgttctgtatacacactggcactaggagaagggggtggaacttagggcgtcgccatggacagaacgtaatcgtggcgaaagagacgaatgaaaatgaatctccgacggcgtagtctgatgaatctcgcggctgccattagaatagaccaagggttcgaactcgatcactgaattgcgacaaaccctatctgtcctagatagaccccgaaaggaccactcgaaccacttcgcaaaagccgaagaccattcgcataaggttgacttgatcagacacatactgggatgattatgaaaaggatcaaaatttagggaaaatcgtaatccaaccccca

SEQ ID NO: 201048 - DNA, 378 bp, Glycine max
gaggaaactggaaccataaaatctacattgtccaaaattgtcaatggaacagaaaatcttgacaaactgataagatattagcaatgtccctcggacagatctagcaatgaatatgaacgaaagaattatgttcatgatgaagacactattcattgttacttttatggtaaagtaggacattacacatccaaatgtaaggatcgacctagaatatgaacgtccaatcgcactcaaagctaacacaagaggactcaaaaatatttgaatacctaagaaaagaataattcttgctgcaaatgtctttaacagcaagaagcaaatgcctatcatggtaccaagtgagtcggctgctcatgtcacatgacaggagaaatattt

SEQ ID NO: 201049 - DNA, 408 bp, Glycine max
  unsure (1)..(408): unsure at all n locations
gacagctgcggctgcatctatcggagggtcgaggagtacgacatcaatgatttctccaatttnggagaggggaagaacaaagatgctgacttcgagggcagcaacctccagctaaaggggaaaatgagaataacgaatggaaagtattatttctcatatcctgctttgattatttacatgactatatataggctaattccttctaacagaatgtgtgaaattctatccaaatccaaaaaggaatctaatagaaatctaataacgatattctgttatgcaggatcgttgcatgcaagattgaggctgatatgtaaaggtgtgtttccaattctgcccctgctacacgtaatccgctaagtaagcaggtttcactatccttctcttggtctctcctttcttctacaccat

SEQ ID NO: 201050 - DNA, 411 bp, Glycine max
cttagccttgagaaccgtgtaagtctacggctggagcagatcttttgtggttcagagatactttcctaactagggtttacacgagagaagatattcaacaacctttttggagagagaaatttctaaccggtcttcccagatcattaggagataacgttagagataaaatccgtagtcaatctgccgatggagatattccatatgaaagcttaagttatggccaattaatttcttacgttcaaaaggtagccttaaaaatttgtcaagatgacaaaattcagatgcaattagccatagaaaaggctcagacaaagaaagatttatgttctttctgcgaacaatttggtctaccggcctgtccaaagcaaaagaaaaaacaatcttcaagaaaagaaatccatgagaataaac

SEQ ID NO: 201051 - DNA, 408 bp, Glycine max
ttaagcaccgcagctgcagcttcacccaataacatcccatatccacatggggaaaaaaagatagcaaatccaatgaagaacaactatgccacatggtattctatcaatatcatacagcaaacacaggttgcaccaaatatacctttagcttcttccttaagatgattaatctcttatgtagcattctcggctactaactttgctacagcctctctgtcctgtacatgttttaaatatttctctaaagcaccaatagaagctttcaactcttgaatttttgaacttatatcccgattttgctcatacttcaacctatagaatattttccaaaaatactaacaaatcaatagctagatggcaaataaaactgaaagttgagctccaagtatcttctctttttttgctctt

SEQ ID NO: 201052 - DNA, 393 bp, Glycine max
  unsure (1)..(393): unsure at all n locations
agctngcttccattntcagtcatcaaagtcacctcctttatgccaatagtcttgcttgtgatatggttgcccatcttcaccgtaccaaaatcccctttttgatatgaagagaaaaatccttcatgaggagtagcatggaaggatgttccagagtcgattatccatatacaatcatcaaatgcaatatttaaataattttcattaccgataagaaaaacattctcatcatatgatgccacaacaatagtggttccaccttcatttttcttctttgggtcaatttgattagcatggaaagttccagccttctgatctccaaaaatctgcactcagactttttatggcctaactttctgcaatagtagcaactcaagcctttggggcgaaacttgg

SEQ ID NO: 201053 - DNA, 427 bp, Glycine max
  unsure (1)..(427): unsure at all n locations
tatacgttgagaatgaatgccattcttgagagttaatgtgcatgttttcagtcaagtttaaataaaagtctccacattttcatccttcctactttatctttgacttatttttcaatctttacatttccaacagttaatctcttgcatttctacttcttcatttttcttttcttttctttttgaatttcattttaacttcttttttttttttacgtttggtgtcatttaacttttattagtaatttattttctttgcactttagaattccatttagtattttcgaagttacatcctaactttntttatataaaaaaaaatcaaattatttgttctttcacatttaaagacatacggaataaatgttgaaatattagaagcggaaattgaacaactttataatgctcaaataaaataaaataaaaataa

SEQ ID NO: 201054 - DNA, 400 bp, Glycine max
  unsure (1)..(400): unsure at all n locations
catgcaacttgncaaaggactaaattgtattcttccatngattgttcttagnctagnaacccttgtgacacttgtcattttgcaaaacaaaagaggttgcctttccctgacaacattattgtttcctcccaatattttgatttgttgcacatggatatatggggttcttatgctcatccttcattactagagcataaatattttcttaccattgttgatgacaaaagcatatatacatggattatttttctataattaaaaccagaagttccaaatcatattaaacactttatatctatggttgaaactcaattttctgtcaaaattaaaagcattagatcagacaatggccctgaattttccctgaaaagttctatgattcccaaggtatttatcatca

SEQ ID NO: 201055 - DNA, 414 bp, Glycine max
  unsure (1)..(414): unsure at all n locations
ntgngtcactcatcgcgaaaagttctcttcgagagtgctgataaactatggatcccggtctgatacaatgctcttgggcatgccatggagtcgtcccaccatgttcataaacagaatggctatagtgtgcgcaatgtgttgagtgggcatcaagcctaaatgcaaccctttataaaaataatcaaccacaacgaaaatacatgtattaccgcgataagctggtataccaaggatgaagtccattgacagatcctcccacgatcgcactggaactggaatagggcacaacagccctaccgaattccgattattatatttgatgcgttgacatgtcacacaacttgcaatatagtttcgggcctctttcctggctaaaccaatgtgaagatgtgttgcagacaatgccaaatcttt

SEQ ID NO: 201056 - DNA, 406 bp, Glycine max
  unsure (1)..(406): unsure at all n locations
tgagcngcaactnctgaaaggggttcctgtcagaccgcaactattcttgttaaaatgactcctaaagttnntgggcaaaattacttgaacctttagtacaataatttccaaacagacaagacaaatgtgcatgaaagtatgaggtgacaagtagattgttcccactatttctatgcaaccatagattcttccaagcatatacttttgtaaacaacataggtttggtttataagcaacatgctctgcagtctgaatgttattgcggttagtttgactgagggaattttaactacaagttatttccatgttacaacacagatcatgttaccattgttcctccaaagttgcaatgatctggttagcaaatgggaaggaatgttgtcttcagagggatcatgtgaaatgg

SEQ ID NO: 201057 - DNA, 385 bp, Glycine max
catgcaagctttgatggtgacgaaaaacagcacatgtctgccattatctttaagggggagaaagcgaatgcatgtatacatgatttcgacgatgccaaagaagaatttaacaaggctgcttcaaatgataagcatttgctccaagaataattcaagattgcttcaacaaacaaagccttgtgtcaagagtcactaaagaccaagccttgccttaaaacaaagtgctttcaagacatgcaaggctctggtaatcgattaccaggaagtgtaatcgattaccagaagacagggttgagaaatagcagttgaaaaaggttttgaattcgaatttttaacatgtaatcgattaccatatgtctgtaatcgatcactagcaccggaactt

SEQ ID NO: 201058 - DNA, 69 bp, Glycine max
ccccacacccctacccatccctctatcgtccctacctataacccacatcctaacttcacctattcccct

SEQ ID NO: 201059 - DNA, 400 bp, Glycine max
aggctgcagcttgaccatctaagctctattgtaatattcagttcttatagtcaagatcttcatccttctgatgtagactctaatgcaacttcattctaatgttggatgctctcttggtatcccttgatatgtcttctattaaggcccttattgtcttgcacttttccaagttcaagtacttagaaggaagcactcttcattatgtagataggcttcaaaggatcgtctaaggcttttactcttgacaatagttctgagacaacatttatgagtagtgttttgagcacctcaaagtgtacacacatatctgcttcttaagaatatttagcattgaaacactttagtatagtgttagtcatcacataatcccctcattcttacaagttgcattgctaatgat

SEQ ID NO: 201060 - DNA, 442 bp, Glycine max
taagcttagcatacaatcagattgtcataaaacattccaataaggaggaatttaatctatatgaatagaaggggaatgctcaggaagtatacagtgaagaaaaggtgacattttcactgtttcttgaggcatctcgtctttttctctacttatataaaatgcactggaaactaagaagtgaatcataacaaaaggagcataaaggtatatatataaatatatgttggagatgtctaatttggagagcaatggtgccatcaaatgacaatgaaatatcactttcttaattttatgtgttattggatttgaactaattctggtccctatatgttctcaattttagttcgttagttacaaattaaatcatgaataattccacataccgaaactgaattgaaaatgataattaaattgtaaataaatattatgcatatataatgaa

SEQ ID NO: 201061 - DNA, 351 bp, Glycine max
  unsure (1)..(351): unsure at all n locations
attaagggatatgcaaggtttgagaagtgaaatttacaatggggtaaatttgaagcaaactctcacctcacacaagtctataacatcaatttaaacttgttcaaattggatttacacctaaaatttcaccgaatcaaaatttgactcttcaacacccaaatttaccctagaaatggctctttgttcactttggtcatttgtttttctctctagcacagcccaaactttttaataagtcctaaatggcatgtcaagctaggattaactcattntaacctccatttaccacagaatccagatttaaccttccaactctcaaagcctcactcttcttccactcataacaccaca

SEQ ID NO: 201062 - DNA, 376 bp, Glycine max
  unsure (1)..(376): unsure at all n locations
ctcggatattcttcaaagttatgcttctatggagtgcagaaatagaaaagaagctaatgagttgggcaataggaaatctttaaaatgaatattctgtcatataacattaaagggctgggtagagttataaagtgggcctctatcaagagattgtttgggaaacacaagatacaccttctctgttgcaagaaacaaagagggactctttggataaggcactgtgccangctttgtggggtcactcagactttgaatgggaatgggtccctgctgtgaatactgcttggggtttattgtgtgtctggaacaatcataactttcacgttgaggtgaaaactgctgaaaggagattcattatgttggaggggggtttgat

SEQ ID NO: 201063 - DNA, 351 bp, Glycine max
  unsure (1)..(351): unsure at all n locations
ctgcatgcantggctgtattaattacttgtacaactattcctctaaatcagcattcagcaagcttcccttcaaatgaattggaacctcttttcattatttttatgcaatgcataaaggagaattaattttaagcttaatcatgtaagagaacaactgcatcaacgtttacactagccactagaacaagtagaatagactgacactaaataccaactccgttgaattatgtggcccgattacgtgtcttaattaaaacaatataggttaaaacaacgtccaattttcttaatgggttaaacaatataggtcaaaacaaactggtgaattagaatccctaaagaatttgacaa

SEQ ID NO: 201064 - DNA, 305 bp, Glycine max
aagagacgcatcaatccattttctgaagctctcttgattactatctggtgctgtggcaggtgatcatagatttcgcaagtggggaaataaagcatgcttctagcttgtttgattgtgatgtacaacttgatgagtatctaattaagagctattacaagacagcgtccttgattgctgccaccacaaaaggagctgcgatccttagtggttctgacagcaatgtcactgagaaaatggatgaatatggaaagaatcttggtctatcctttcaagctgggatgacatattggatttcagcaatcagc

SEQ ID NO: 201065 - DNA, 421 bp, Glycine max
taagccaacaacgttgaatgaatgtcatatcgtttgaattcttaaatttttttgtattaatttaaatctaaatattttagttcaattcaacttgctgctatatttttaatcttattttgcttgtttgctacattctctttttatttttattatcatttatattatcttccacttatttttaataagctaaatgtttttattaaattaaaatttggaaataaaataaaatttattttatcattaacttaaatatttttttaatttaaaaagtgacttttaaaattttattcaatgctagtctcttttcaataatttaaaacatttgatatgtataaatatgataagtgatattctttgataggaaaaaatatttaatgaacattcataatgttgttattaaacatctagggagagagaaaaa

SEQ ID NO: 201066 - DNA, 392 bp, Glycine max
gagctcagctattgtgaatttatgcttcaagatttttttaatatgggattgcaatgaacttattttattgaaagtgaataattggaaatgttctaagataggattgtctagagctcaaacaagatgggtttgtctaaagttcaaataatgcaggcatcttaattagtacgtggtttaatttaacactgcccattggagtgtccggacaatctagaaacacactcacaaaaatataaacaatctagaaattatataatatgagagggaaataacttacttaaaagtaatgcttttagagatattttttatctttattatctattttctttaaatctaataattgtaatgagtaattaattttaatcattaaatttttttaaaaataaatgatt

SEQ ID NO: 201067 - DNA, 443 bp, Glycine max
  unsure (1)..(443): unsure at all n locations
actcaagcttggacanatctgatntngaatggtcagactgagagagaatcttactctgtgatgtgtcaggtaatcgagaaatgcattacgaagccattttttttctgaccattcagcctcgactcatatccaggataatgcttcaggttattgtttctatttaatattgcaattccgtctttgttattaattcaatgtttccatttgacattcattttgccattatttgaatagatcctcatgaatgcaatgctaagtttgaacaactcctacagtagcactcaaaaagacatgaatatacaaggtaataaagttcatttcataggcctggattgtttgactacaataaaacaagattaattttcaaaacattgataaatggtaacattaccaatgtgtaattgaatcaagtgatgctttgattcttcttatttatggattca

SEQ ID NO: 201068 - DNA, 405 bp, Glycine max
cctgaggcatgcaagcttgcataatggaaacaaataagtctacctatgggtttcttaatcactctcattaattcagtttcatcaacaaagtgtaccataattctatttatcaacaacatttttttattagggtagcagtgtagggttattgtattctatttagattggcacctgattcgtaggacctatggttctactattctactggtttctaccttgtatatttagtacctttggtactcacagttattaatacaaattataattttgctgataaaaaaaagataatacaagagagagagaagggcagtggcagtcacaacatatatatagagaagggcagcagattaaattacaataacattcaacactaacaatgaaatggttctgagagtttaaatcaca

SEQ ID NO: 201069 - DNA, 380 bp, Glycine max
gattctaccctttaattatatcttctctagattagaatattacctcttcaccatcagagttgacagtgtcatcaagccgagaattctcatcatctgaacttgcatccaatgttggttctgtattactggtgtacgcatcaatcattagacataggtttgcttcttcctcattatcctcatcagatgatgaattatttaggtcctccctagtgctcataaggctcttctttttggacttgaagaactttatcttcttatccttaaacttttcaaggttaggacattctgacttgaaccgccttggtttcttgcactcatagcatatggctggacttttctcctttctgaggaaggataattttgacaaactgttgaacctc

SEQ ID NO: 201070 - DNA, 393 bp, Glycine max
  unsure (1)..(393): unsure at all n locations
agctntgaggtgtgtaaggatcttgcaaagaaccttttattacctccaatgatagcaatgcaggctcttatttctcaacaaaccaagattccatcaagtgacttaatcattgaggaaagtgaaatcataaacccttcccaaatcattttgcactatgacaagacagatagcttcttggaagagaaagaagatatgcgacaaaaccttgagagaatggaatggagagtgaaggaattggagatattgtgcaaggaaatgaaggttcagatgtcaaggtttcactagccataatgtcttaatctcttatgcaagccaagatttttaaaaaaatgtgcttttctttaaccatttatcaatatccaaaatacattgatatttctttgattgtaaaaa

SEQ ID NO: 201071 - DNA, 423 bp, Glycine max
ctgatcctaaaccgatagctactaccaactacatagtaaaataaggcaacatgaataccaagaaaaagaaagttattacagtccaatacaatttcttgaggaagtgactccaccatccacaacaagattatgaccactaacatacttagattcatcactagcaagataaagagcagcctgagcaatgtccaaagccctcaaagttggtcctctcaagttggcaagccctctaacaaactcctcaatcttctccacctcctctgggaagggcaccccgaaattaatgccctcatcatcaccatcaccacaaggcttccatgcattcacaagcatggaagtggccaccccaaatggtgaaatgcaattgaccctaatcccatacctccccaactcacaagcagtgttctttgtaatcccaactat

SEQ ID NO: 201072 - DNA, 390 bp, Glycine max
  unsure (1)..(390): unsure at all n locations
agctngtgtctatctgtctatctatatcaaagtaattaatatattatcataaacaaaatattgaaactaatgattaaaatttattaaattactttttagttaactttttttctcacaatgttctaaccgatcacaaagctaacaaaaaatcagtccctggctaatacgtgagcaagttacatcagaaaatgcttatccgtgctgtatcttcattaaaaaaacaaaaaaaaaaaaaaacccgcgtgtttggatttatgttttaaaaccacgtcacaacctaaaataacgcagaagctacaatacattgtgtcaaaacagcacggatcattatgggcatttgaagcgatgctaatccaaatacataatatcccttgcatagaaagccaactt

SEQ ID NO: 201073 - DNA, 391 bp, Glycine max
agcttgccgcccagcttgcccaggcgagcaaggttgtctttctccagaagcaacaaccttctggagggcccaagtgggcctggttgctatctacacccccatttttactaaatacaccccctgccttttttttggtgattctttttccgtaacgttacggaattttacgaatttcgtgacgatacttattttccttccgcaaggttacgaatccttatggattatgtatttactcttttttagctttcgaagaagttacggaaacccacggattgcgcaaaaacacctctttttgacttccaccacattacggaatttcacggatcgcgcaaacctgcttccttttgatttctgagacgtctcaggacttcatttactgtgcaacaaagga

SEQ ID NO: 201074 - DNA, 367 bp, Glycine max
accaattagatggaccgcactatacagaccatttcataatacacaagacaatttcataggagtcgtccaacagatcctccctataggactaacagcagggtattagtcataaaacatcctaccatattaactaaagtaatttcaatagtcaaagtctagcatgagtattacacaaacaaaccattaaatccaataggcgatcatctaatctacaaaagccggcaccttttcaagcctatcaacctattcaaaagtgcgaaaaatcacaatggcagcctgcataaagcacaaactgtcaaccatacgataccaaaattaggctggccgatgtacccagcttctaagagaaagtcaactctagcttatg

SEQ ID NO: 201075 - DNA, 387 bp, Glycine max
aacctaaaagtgagagataatgattattaatcacacaaaatggaagtactaagtatttattacctatacttaacaaaaaatacttataacactagaaaataaccataaattggaagagtttgatacaatttacacaagttttatacacaaaagttagttgtattcactgactaacaattcccccaaatttacagttttgcttgtcctcaagcaaaaagagaacatttcacttgtcctcaagtgacaacaacatgcaatgactatgtacaaaggtgtatgcaacaaaagttactgattgcatgataagagaatgaagtaaaatgccctcatcacttgtctttcacaaggtatgcagttatccaaagagaagaataaaatgtaacctga

SEQ ID NO: 201076 - DNA, 416 bp, Glycine max
gctgaccatcccacccacccggcatagtcggtcagtgagaacctgtgatgtacctaaacaggcgagctcctggcagtcaacagataaaaggaacaaagaccacaaagcaaggaggcttgtggtggctggccagctgtgaaacttgattgatatgtgagatatggtctctggtaatcgattaccaagggtgggtaatcgattacaaggcttaaaaatgaagacaggaggctaagatggtctctggtaatcgattaccaagggggtgtaatcgattaccaggcttagaaagggggctggaacattgtggaggcctctggtaatcggttaccaggctgtgtaatcgattacacagagggatgggtcactggtaatcgattaccaggtatgtgtaatcgattacacagtgcctttttgct

SEQ ID NO: 201077 - DNA, 397 bp, Glycine max
gcttaatctgcagaaaaaatactgtgtgtgtcttcatgcttatcgccagtccgctgcgcttagcgcctgagtaaaatttcacaaggcgtgctaagctcagcctgctgcgctaagcgcccagtcaaattttcaattttatttttatgtttttgttgaaaataacctgtgctaatctcttgtgttttgtcttatattttgcaaatggcatctaagaaaaggaaggctccttctacacctacccaggccagatatgacagatccaggttcatatctcaagaagcttgggagagatatacagatattgtggtgcctaagaaactactatcggagaggaatgtagtagtttacttcactgagtttgacgagttcaaggaggaactcgagagaagacactagg

SEQ ID NO: 201078 - DNA, 433 bp, Glycine max
gcttcgcccagatccctcatgtaagactacacccgatttagatagccctcttaggtttagactaacttaaactgagtttcatccgcagatccctcatgtaagactagactcagctcaagtagcttacgaaagtgtagcctaatttagcctaagcttcgtccgcagatccctcatgtaagattaagtttcgatcctgcttgaatcaagttctaaggcaacagtacatttcccaatgctaaagtcgcctaactgtgcacacaaatgggtgatcagaccaaaagcatacaaacattaagcattgaaggaagcattgaacacagaaaacaaaatcaattagatattaggtatttacattagctgttcattagaaatccccaactaaggtgtttagccagccattacaaagaaaccctaacaataaatgagattaaaa

SEQ ID NO: 201079 - DNA, 410 bp, Glycine max
aagcgacgcggctgcagcttctggacttaacagctggctgctagttgtatttgaccatagtgtgttataatttgggctttagtacgtgtatttaaagccttttatcagctatgagaagcaggaagaagtattattaatatacttcttcaacagcaataatatatgtataatgatacatttaaagtgtttgttgaatctccagaataaacagttgtgaaaaagttattgctactattatgcatataattgcatgcctttacctttttcctttagacttttggtaaaaaaaaattggtaagcttgaattgtaccttccagacctgtccctaatactaagcatggtcactatacccgttaatgctagtcacattgggaaaccatactttgattttgatttggtagtttttcct

SEQ ID NO: 201080 - DNA, 441 bp, Glycine max
  unsure (1)..(441): unsure at all n locations
tcttaagaagattcctaaagaagatagagcttagctacacatacctctctaatagctaagaagctagagtttagctacacaccccctataataactaagctcacccccatgaaaaaatacatgaaaatacaaaaaaaatccctactacaaagactactcaaaatgtctcgaaatactaggctaaaaccctatactactagaatggccaaaatacaaggcccgtacgaaggaaaaacctattctaatatttacatagataagcgggctcatacttagcccatgggctcaaaatctaccctaaggctcatgagaaccctagggccttcccttggatctctgacccaatctacttggagtcttctatccaatgcccttgcggngtatgattgcatcactctgttagggttttgaaaaaaaaaatgactcggccttgatcattaa

SEQ ID NO: 201081 - DNA, 395 bp, Glycine max
  unsure (1)..(395): unsure at all n locations
cagcttatacagagaagaagagagcgcgagcaagatagggctctcgttctaatatttntaaatgtaagtccaacatcgatttttaatacaaaactgatattaatcaaatgatgttaacgttgacatcggttttttggaagaaatcgatgttaacttatcatacattaacatcagttcttgaaaacccgatgttaatgaactaacgttaacatcttctttaagaaccgatgttaacaaagtcatgttaacatcgatttttcaagaactgatgttaacgttagttcattaacattgggttttcaaaaaaccgatgtgaacgaatacacattatttacaattatgtcatcccgtttatgttcacatcggtttttgtcaaaaaccgatgttaatctgac

SEQ ID NO: 201082 - DNA, 432 bp, Glycine max
cttctataagatacctacgcaattcctatgcacttgcatgcacacgcgatcaattaaatgccgctaacacgaaatccttcagaagactgggagtgtggctttgcctcttgggccttagtgttggtaactccttgttgttattcacgttgggcatggctacttgaaactcattattgctacttgtaacaacaagcagcgaaaagtatcaaattgaagataaaatgcacaaaaatatagtaaaaatcattgattgaatggtcgaaggttcggttaatgcctttcaatggtcatctatactaatttataagactaagctcaacaataaccatttctcttcgggcgaaatccacttatcacaccactaactttaaattttggttttaacccgacttttgactatctatctagctattttacatttacggtagccta

SEQ ID NO: 201083 - DNA, 401 bp, Glycine max
ttaagtcgacgcggctgcagctatgatattataggtgatcatctttaagtatttgttgtctctaaacgagtagcagtagtaggagtagcaacaacaatagtagtagtagtagaagaagacacttactggaagctttacataaacaggaacgtatggtgtcctaataaagtcattttcatgcacccttgaacgaatatcttgcataagctgcatcaataaatgacactatcaactgggcttggatcacattctcatataaggttccatagtccatataatggatattgatgcataagttaaaagcacttaatacaaagaatgatttagtttcaatcccaaaactatcttctagcttaacagaaacgaacacaaagacattgaggaagtgagatttgctaaat

SEQ ID NO: 201084 - DNA, 432 bp, Glycine max
  unsure (1)..(432): unsure at all n locations
ntagtgaatgtgtgtaaccacagattgtacattgagtgtcctcattgatatgttctacagttgattttgcatgaatttctaattttcataacatatgattcatggatatgatctaggcattctttcttttttacattttaagccactgaccaaatagctatcccaatgtatattattttaccatttgcaaagccctttgagccaaacatttgatattttgttggaaaactaacctaagataaaatttcctaccttaccttaggattaagagagcaagggtgttttgatgggaatttctatcatttggcggctactatgatgtaaatactttatttttatgggtattaaaggaaattaaatatttatcagaaaagacaaggagaaacatgttctttatgaataaataaatgtatgaatcatgtacagagatgt

SEQ ID NO: 201085 - DNA, 412 bp, Glycine max
agtcacctgaggcatgcaagcttagctggcctagccctcgccctcttagccctttgtatagaaactgttagatcctcgggattccaacagttcttcctaaagtaggccaagttaatgatcaggctcaggcgttcaaaagtaaggttgtcagagacaacccctttggctctacataaggcggtgatcagagcaggaaacccaagtctagaagtgttagactgggctatagaagtcatctggccagaaataagagctcctatgttcatgtctatgcgagagactaggccaaagatcaacctagatctgtccactgtcagatcataggtatgtgatgcgggggccaggttggagtatgagagaacactccacacctgggctaaagtagtcaaatctttcctgagaatcctcccag

SEQ ID NO: 201086 - DNA, 424 bp, Glycine max
  unsure (1)..(424): unsure at all n locations
ctgttcactgcttaagatgntgcacagataggcaaagtctgtgttgtggtctgcatacgagcataaaacaaagagtttggcggtaggcgcagaattttgattcatggccagttgggttaccaagttaaccaaggcatctagattaccttcaagcttcttagtctcacctgatgaaaatgaattcgtggctacttcatgcactcctctaatgacaatagcatcaattttggcactgaattgctgggagttggaagccatcttctcaattaaaattctggcttcagcaggggtcatgtctccaagggctccaccatgggcaccatctatcatacttttctgcatgttgctgagtccttcataaaaatattggagaagaagctgtcctgaatctggtggtgaaggcaactggcacataatttattaa

SEQ ID NO: 201087 - DNA, 412 bp, Glycine max
tctgagtcacctgcggcatgcaagcttgcctaaagaggtccaggaatgacaaggcggcctattgaactagttccgccccggagtacgacagtcaccgctttaggagcgttgtacaccagcagcgtttcgaagccatcaagggatggtcgtttctccgggagcgacgcgtccagctcagggacgacgagtatactgatttccaggaggaaatagggcgccggcggtgggcaccactggttactcccatggccaagtttgatccagaaatagtccttgagttttacgccaatgcttggccaacagaggaaggcgtgcgtgacatgagatcctgggttaggggtcagtggatcccgttcgatgccgacgctatcagccagctcctgggatatccgatggtattggaagagggcca

SEQ ID NO: 201088 - DNA, 428 bp, Glycine max
  unsure (1)..(428): unsure at all n locations
ntaggaagcaacattaanattctccactacataccatccacaaaccgatggatgaacaaaggttttcaattgatccattttggcttacctgaggtgcttcatcgcagattctcccaataggtggtttttagttgagtattggtataacacctcagtctacttagttattagaatgacaccattctaagcattgtatggccaccagcctctacaagtgtcggatttcctcccctcaaatattattcccatcccaatttcttaagccctgcataaaaaatgaatcatcctcaaaaccttgaaggagaatatcaactgtaatcgccaaaggatgagagaccaataaaacaagcatagaagacacatcacttttgaagagggggaacttgtttggttgaagcttcaactttaccggcaacattcagctttca

SEQ ID NO: 201089 - DNA, 352 bp, Glycine max
ttgactacaagtgcgatttggagggtgtccctgatcgttcttctaccttgatggtgctttctatcattccttttttttttttgcttctacgtatcctatgtattatatttagtcggaccttttgtgtttcaaatgttaaatcgcaccttttgtatccagcgggtgtttattaatgtcatgcgtagataataattagtttgctttcgtagcaatggtaaatttcgtatcacatacttattattttgcgtgtgcgttctgtcgtttcaaatattgaattgcaccttttgtatccatttctgctgagtaaattgcttatttgggttcaatttgtattactattggaaaataaaat

SEQ ID NO: 201090 - DNA, 447 bp, Glycine max
  unsure (1)..(447): unsure at all n locations
accttgatactcagcttangactattggtgtcaatgaatcactgctggctgtaaagagcatatgatcatcagntcaaggcctcttgcagcttacaataaaaaatggagcgccctcgtttaaatttgtgctcaacaatgaaagaaagatttttgctgctaccacgaatagtttaacatcactcgagaagggtgatttaagcagctgctatacattctacctggtttatgaaattaagacaaagagtggtggatggatatgccctggaaacaataaaaaaagctgtggctatgcctacaatggtattgctcagatgaagttttctagctctaaaattgccgaaccatccaatcagaactctattgaaagtgtatggttaaagaatatgttttggtgagtggtgaaatcggcctgacagatcaaggaccacctaagttcttccatagtgt

SEQ ID NO: 201091 - DNA, 432 bp, Glycine max
  unsure (1)..(432): unsure at all n locations
catggctgctaagattcattttgaagaagcgtaccaagaaatgttttacttattataatctgaggcttgcacatcatgtcatgttgacatgagaagcatatataattgaacaagaaggaacataaattgtgtttattntattgaatacataccaagaataccagtttaatatgaaagcggaacatcggtgtgctcaattttgaaaagtatttgagttggggacaccaagctgaattcttcccatattgtagatccccacacttaatcacctctcttgtaatctgggtgtccagattctacgactttggacactccataccctgttaatggctgcatttacacaacggttagtagttagtaccagcacaaatttatgatcccaaagagtatttttaaaactacactacaagtacaaacattgtctttttaaaa

SEQ ID NO: 201092 - DNA, 389 bp, Glycine max
  unsure (1)..(389): unsure at all n locations
agctntaaagcgcgggtctgggagacaaaggtcatgtggtcgcgatatgcgaagatgatgttccaagtacattggatttggtacgaccatgccctcctgatttccggctgggaaattggcgagtggaggaacgccccggcatttacgcaacgagcataatgtaaacctttacggttttaaaagctctatagttgggcctaggctttagagtttttccttttgttaaggctttgtgtcttttgttttttaatttataatacaaggatctttcttcatctgttcctacgtctctacccattctcattcatttgcatgtttacttctttttctgaaacggcagatccgatgacgagtcccccgagggtactaatacctgngacccgcctatc

SEQ ID NO: 201093 - DNA, 416 bp, Glycine max
tcttaagtcacctgcggcatgcaagctaaaggacatgaggtcttgaaggaactacctcctatgattgtaaaactctatgaggagacaaaaaccttgagggataagctaggcaatttttttggtggtcatgaagtgtttaataaaattattaaggttcaaacaaatcccaaagacaaatttggccatggtttcaaaggaaaaaatgttttgcatgatgaagaagttactatttgttatttttgtggaaaggtgggtcatggaactcataagtgcaaggacctccctaaaaagggcaacccatcaaagggttcgtccaatgcttaccaacacccataagctaacatggaaaaaggacccaaaaagatttggttacttaagactaatataattcttgttgtggatctcattgaaagtag

SEQ ID NO: 201094 - DNA, 397 bp, Glycine max
  unsure (1)..(397): unsure at all n locations
catgcaagctntggaatatatgaagcaagagattggagtgctctttgaagttacaaagatatggagagccatgaaagaagcaaagcaactagtggaagggaatgagaggaaacaatatgccataggatttgattatgcacatgaattgctgaggagcaatcctggatcaacagttaagatcaacacagtgccaagtccagaaggtccaccacaatataagaggctatatatttgtcttgctggcggaaaaaagaggtttgttgctggatgtagactgtgcataggtctagacggatgtttcctaaaaagtgcatttgaaggaaacttgctctctgctgatgggctagatggcaataaccacatctttgttattgcttatgatgttgtggacattgag

SEQ ID NO: 201095 - DNA, 432 bp, Glycine max
  unsure (1)..(432): unsure at all n locations
gggtcgcanatcctcatccatgttgtgacagatagaggttaaatgttctctaccatttactggttntgaaaagcccatatgattattggggttctaatttaatagatagaggttaaatgtacactaccattcaatggttttgaaaagtccatacaaatttgtgaggaagaggtgcagaggaaattgtttcctgaaatactatcaccaaagaagtaaaatgtcaagcaatgcaagacacaagattgatgcatgcaacaaaaatttaaatattaaaagaacaaaaaaaaaacaataaaacttatactactacttatttctaacaaggcaataaccagtctcctcaagaatctagagcttaggcatanattttctgcttcatatatcacaacttacttgaaattgtagatttgtttttagtaaacaagtagcatc

SEQ ID NO: 201096 - DNA, 408 bp, Glycine max
  unsure (1)..(408): unsure at all n locations
tcatctagtgaccatgtcaaacagtctgtaagtaccaaatatatcctgtcaataatcaaggttcaagacacatattcatggtacctcaactacttaatgtattattaagttcatgcatgcaaaggtgttcatatctaactaataaatcaaaatgtgagtggtggacagaagcaaagagtgcaaataccccatgctctatagcaatttgctgatgtatatctgtttgatgatccctttagtgctgtggatgctcatacaggatcccatctctcaccccatgtttntcatctattattggacaaatatcattcgaaattgcagttggagcagataaatttcatgatgattgttagttgggacaatctctgtggccttctcaccccatgatgaattgttcagcttcatgat

SEQ ID NO: 201097 - DNA, 465 bp, Glycine max
  unsure (1)..(465): unsure at all n locations
tatccgacctcccattagtagagccttcattgagaagtattacatgcccaggcaggtgcagggttaggtgccgcagcagccagaggaggaccagcagcatccaactgcagatacaccattgtcgcccctgcaggagacaccatccctggggtctatctctgcccacttgcggaggataaaactccaaatgtacacatacatgcagcatgtgactagctagcaggcagctaatcacaggggccagatgcagttaaacgagaccttctaccggtacaatatgcaccgacagagtcaggaccctaatcccttcccttggcctacccccgagcagtttggggccaccgttgcctagcccggagatgaggccaattntgagacacgagcaggacctgaaggggcacctgtggatgacataagagcttaagaggatgatgatatggctgacgtgctggatttcttcacttg

SEQ ID NO: 201098 - DNA, 467 bp, Glycine max
  unsure (1)..(467): unsure at all n locations
aactcagcttaaccagagggacggccattaagtctgaaagataatgttatgtcttacaagattgaatcgccaggtgagtataatgtgagtactacatttaaggtgtctgacttaactcttttttatgtaaatgtagaagtcgatttgaggacaaatctctctgaagagggagagagtgatgaggaaaaggcaatgaacctttataaggacttggaggacctatggcaagggctagaacaaagaaggccaaggaagttcttcaacaagtgttaatcatgctatttgaatttaggcccatgttacaagtgaaaaagcttcggattgtcaattgcaccatgttccaagaaaagtatagggtgccactcttgttgagtggttntatcagcattatgttagttgaaataaacgcccaaactcgtgttaaagtgggtgtcaattctctttggatgtgcaccacctatgggctt

SEQ ID NO: 201099 - DNA, 414 bp, Glycine max
  unsure (1)..(414): unsure at all n locations
tgtcgcatcggggaacaatatcacantaattgtgggtttcaattgtattcctaacccncaacttacctatttggaagtgacatcatggcaattaagtcccagctttccattgtggattcagtcacaaaacaaacttaaatatgtcggactatctaacacggggattttcgattctatatccacacagatgtgggaagcactttctcaggctttgtatttaaacctctctcgtaatacatccatggtgagattgggactacattaaagaatccaatatctatccgaactattgatctaagctcatatcacttgtgtggtaaataaccctatctttcaagtgatgtgcgtcagttagatctttcaagcaattcattctctgaattcatgaatgaccttttatgtaacgatcaggac

SEQ ID NO: 201100 - DNA, 470 bp, Glycine max
  unsure (1)..(470): unsure at all n locations
catacggaccttaaatctcagcttggtagaactngatttgtgaaagttaaaattgactatttcttaatacctgggaacttgaaaattaatgaaactttcgtttgtatcaagaataacatagtcttagtaatagagataaactaatataagtttatgtgtgtgatcattgcttatctctttatcgtttaattgaccaagagtttgaatttgattttggaattaaagatttctttttttacaaagttttctttcactgtatgaatgtgtttcctgaaaaaaatttatttgttttacaatgttttctttcaaatgataatattttttgctttaaaaagctttttaaattcaactttcattcttgtgatatttgttttntaagataattcatgagatattttagaaatagagataccaacttaaaactatataaactaaatgggataatgaaaacatttatatacaataattac

SEQ ID NO: 201101 - DNA, 463 bp, Glycine max
tctttgagaaaacttccttgagaagctagagcttagctattctcacccctctcataactaagctcacctccttgagaagcttccttaagaagattcctaaagaagctagagcttagctacacacacatctctaatagctaagctcacctccttgagatgagaagctagagcttagctacacaccccctataatagctaagctcacccccatgacaaaaaaagatgaaaatacaaaaaaaaaaagtccttactacaaagactactcaaaatgccccgaaatacaaggctaaaaccctatactactagaatggccaaaatacaaggcccaaacgaaggagaaacctattctaatatttacaaagataagcgggctcatacttagcccttgggctcaaaatataccctaaggctcatgagaaccctagggccttcccttggatctctagcccaatctacttggagt

SEQ ID NO: 201102 - DNA, 454 bp, Glycine max
  unsure (1)..(454): unsure at all n locations
cctcactaagctaataagatcnattattctttttatattcagatcttgcttccaattatggtaatttgatacattcaagatctcaatggaagcaaaacaattgttcacagaaaattgtactgttaagtcaaaacaagaatgcattagaacatattacaggacaagatatatccaaaaaaataaacaagctatcaatgcgaggccaatataatagcacattcccctttgggcaaaatgcataaaccaaggctacaacctaagccaatacctaagatgggttaatccatgagaatacacaaagttcagaatattgtcccctttgggcagacaaatccctcaactcggtgcattccccaataactacatccattcttaactcccaatccaaacacagaacaaccctctttgggcaggcaatcacatgcaaaggctgataacattcctcaaaatacaa

SEQ ID NO: 201103 - DNA, 469 bp, Glycine max
  unsure (1)..(469): unsure at all n locations
ctatgaaactaagcttgatagttcccaattatggtattatgtatgatntttgtttttaatcttgnnntatggttaatgttgtctctagaacatttccattggatttaatgatgaaatctgtgcatttttaggtgaaaaagagactaagttttgaattgcaaaatgtagcagttaggctaagctcagtagttgggctaagcacatattcaccgccaagcgcagcttcagcgcgcttagtgcaaaggagaatctggcagagcatcagcatcaaatttgcatgctaagcgtgagatcagtgtgctaagcgcagtaggtgccttcagccatgctaagctcgagactggcgctaagcccaatttcacttactcacgcttagcgcgagggtggcgctcaacgcagcgtcgtgatttctaagcctatttaaagccttcttgtgcagaattatggtacaaccttctacatcttttac

SEQ ID NO: 201104 - DNA, 450 bp, Glycine max
  unsure (1)..(450): unsure at all n locations
tatcgatgttgaaactttgatgcagcgctatcttcgccttcttcagttgctccccaccattgctaactttgttggccgctcttaaggttcttaccatgggaagaaattcaccctctctcataaggcctccttcaactgcaataacctatttcctcatgacaacaatcaaggtgccaaatgctccatgcctgtgtgccaatattgtgttacacggggtcacatgataggttaggaaaaccactcatggctaggttcaagaaatgattggccaagcaatgaagtcctttgccgaatgccaacggtaagagaatgagcaattgtgcctctctttgcanaatgccatanacacaattctccaaccttggtgtcgtcctttacagaacatccaacaggctcaaataacaatgcttggagatgttgctgcacctgcctctacacttgcacttgtac

SEQ ID NO: 201105 - DNA, 317 bp, Glycine max
cgacaaagcacaacaagacattctgtgagtagtttaaagatacaaactcagcagacgaaaatgcttcagaaacaccaagaaagctagcagacgggcccaaaagaaatgctaatactaggccaggataccacataaacaaggattcattttacacaaaagcacaagacaataaaagtacaacgcagaacagcagggccaccctaagggctgaaactcaacactccgcaagtgtgcatgagagcaaaccatgtgtagcgcccatccctaactttggggtcattgacgaaaattgggagcctaactatgtgaaacacact

SEQ ID NO: 201106 - DNA, 388 bp, Glycine max
gttcaccccttacacatttgtctatctttcgaattagcttggaaaaaatgcttccgtgaataatatacggaccggggcgcttaccaaacaatatccttacgttgtcatgaggaatttctcgaagggtgctaccgtgcttccatgctcttcattcgttcttcatcgctcttcgatcttcaacgggtaagtacctcgaaccaagcttttcgattcattctatgtacccagggtggtccacattgtgtttcgtgtatttttattctcgcttcattgaataattataccccttctgacgtacttaaaccattgtatttaagtcattgctcgcttaacctaacaataacatgatttttcacctaatgttgggattgtattattccgtaacttc

SEQ ID NO: 201107 - DNA, 452 bp, Glycine max
  unsure (1)..(452): unsure at all n locations
attgagccttctgcacactaagattgaagagtgtgtactattttgtgttacttncaaatatttatgttacacacaaaagttttacagttgcattgaatgttcaggtacatagaaagaattgctgtggtttcctcaggggttgagagtatcagtgccagtagcatggaagtggttgaatggatgcagaagatacatgactgggaccccaagtttttcacactttcacacatacctgagaaataccgcctttatgtttccaagttcataaggcaagtggcgattgctcgcatgtcagagtcgcccgaattagcaagtgattaccataggaagttgaaagaagcctatgagactgaagagaaattgaaagatgcagatgttntgagaaggagcaaggagcatntggttatactgcttgatgaggtggagaggcagctgagtgaaacaccttattt

SEQ ID NO: 201108 - DNA, 467 bp, Glycine max
atgggcttcttccaattccacgctgaagacaacttcttgtccttatgcaacagatcttcctttagaaatcccggggttagggcaacttgaggtttcgacaaaccggtttttcccgcagacttggatcgattatggaccgaggaaaaggaaggtctataaggggcataaagagctttgcttatttcttgaatgtcttgcagtagcagttgaccattattcatattaatttctccatcatcaacattagcatcttggtttccacactcaaacttaaatttcatcatcatgtaggcattaaaattgaacaacagtaaaatcaagcaattctgaacatttccgcatatctctaatcgaacaaatcaaaaatagttaaatcataaaaactcattagtccaaaaggtaaaggatacaacatcataggaataaaatggggaacaagatacatcattgtattcatcatcatcatc

SEQ ID NO: 201109 - DNA, 316 bp, Glycine max
  unsure (1)..(316): unsure at all n locations
tacaaggaattactgtgcgactgtatgtgatcaaaatgggtcgttgttccatcaacataaccatatctctagtgctcaataacagagactagaaccacaatacgttgttcttcggagtgtcaaccacatgggacgcgagtcaaatgtcatgttagaaattccagcaagggtgggtattgatcaaaagttcttttcctgtcgcgtcaaccacttcgacaagcattgaaacattgacccttgnttgagtgagaaactctcgaatttttaaaatttgaaaatgtcttatattaaattactcaatgcattactttcgttc

SEQ ID NO: 201110 - DNA, 462 bp, Glycine max
  unsure (1)..(462): unsure at all n locations
tactaagcgttagatgacatgcgagaaccactntggtgtgttcgatgtatatgtttatttgttataaacaatcgagctgtagcaatgactattatgtgcgaataaaaatagatatttgttcatttcattttggtatgcactcaaatactgagacaatgcgttgaatatgcattccgtatttgcgtgggtaggaatatgtgtttgttgtgaaaccaagctgcccantatttgcatgtctttggaaaggtgtggatttgaaaactactaatgataccgaatatttggaatcttcattatgaagtgtggagtcatcatggacaaatgtaccgttgtgaagtgtaaggccctttaaaaaagtaactgatgatcattttcgcttttgtgttgaatattcattattggtggcttaatgtgtttcttcattggtctcagtctgaatgtgtacacagaactggttaatta

SEQ ID NO: 201111 - DNA, 404 bp, Glycine max
  unsure (1)..(404): unsure at all n locations
ngcgaangagaaaagaactaccacatcggcctgcttgatttataagttcgncatacatatcactatatatgtatgtatgaaaacacacacatgagccgtaacctttccgagcacaaagaacacatacacacacatagtagtgctttattaagaatctaacctgtgcagcaacgattccttttacttcaaacgaatctcccatttgaagctccagactgaacatattaactcacttccctctgagactgtttaattcttcaacaggccaatgcaccaactgtctcccattataatcaagccacacagtgcgcggaatcgcctaaataatttaacaaacaaacgtacatgaatatgcaaatccaactcctataatttgcactacgataaaaaaaagaactatagca

SEQ ID NO: 201112 - DNA, 462 bp, Glycine max
actacgctgccccttctttataatttacggaaaagttacggatgttatatgacttgcttttcttcttttttctcttccttcccacccatattaagtgaaatatgcttatttagggttatgggaattttacggaagcactacgggtgtcccggaagccccgaaagcccattttttaacaaaacgggggaggtggttgccaccttaagcaagaaaatgcccagaaacctggcccaaatttgaaaattactatttgcaccccccattttacaaaatacaccccttttgccccttttttccataacattacggaacctcacgaattacgtaacgatacttgttttctttccgtaatgtcacaaaactttgcggattacgcaaccatcccctcttcggcttatggaatgttacggaactttatcgatggcgcaataatggttcctttcaactcccaacatgtcgcga

SEQ ID NO: 201113 - DNA, 412 bp, Glycine max
  unsure (1)..(412): unsure at all n locations
tcttgcgtagccgttcttggtgctcagaanatcccaaattcttatccctcttattactagctattntgaattctttagttcctgaatgtacaaccttcaaattgttgctcgttcccctctttcttttctgcaaaaaagaaaatcaaatgctgtcaaaacatggatgaagtcctaagaaaatcaatatcaaagaaaacatggatgaaatcataattaaaaagcacaactacctatctttcaaagtcctttggttaatttgtcttgtctccttatgtagtggggttttgtttaataatcttatacttttgccttccataaaaaacttatcaataatcctcttttcattaatccaattctgtatgttattgtataaaagatcatgggttctccacctgcctccactactcctcct

SEQ ID NO: 201114 - DNA, 399 bp, Glycine max
ttacatctcccactccaagcaggcctccggatcattcttttctttaaatggaggaatggagagtttaataccatcaattcggttttgtctatgaacaccatcattacctcttcttctcctttcttcttcattatgatctctattctccatttgattcaacctctcatggagcgcatcatctcgttgattcattaacctctccaaatgttgcatcaaagctcgcatttggaattgcgaaagccccactccatcattaggattagtacctgacatctcaaactaacaaatcagacgtcacaagacaattataggcgctgttagaatacctcacccactcaagtgtatcacacaaatatggcttttctcttatgaaacactcttgacttttaccactctaat

SEQ ID NO: 201115 - DNA, 430 bp, Glycine max
  unsure (1)..(430): unsure at all n locations
ttataggtgaaatcaggtgcagccatttcccttagagttctctcacgaggtggaggttgtgccatgttctcagaatgtgccaaatcagaatgctcagaatcagaatgctcaaaattataatgctcaagatcaggatgttcaaaatcaccaataacagaatgcacagattcaccagttatggaatgctcagaatgatcaaaaggtataaaatgatgcctaactaatctatgaaatgtcctatctatctcaggatcaaagggttgtaagtcagatggattgcctctagtcatacactacattcagcatgcacacaactagttgccttgtcatgtaaataaaggtgtaggtttgaactacagctaccctcaaatgatatccaaatgacttgaaatnttgtgagcaaccttataaaatgatgagaagatagcac

SEQ ID NO: 201116 - DNA, 430 bp, Glycine max
tcgatgccacacagaggactccaacttcaatatgtggtgttgcatctccagcacgacagagcactccgaagtagcattttgtgcttccaattgaagcattcgagaaaatcacaatctggaaaattggcattggccacatgcccgtagagtatcgtgggttctccttcatgaactatatcattttctcccttttctaattattgcaatgctgatcatgttatcatatagtattagtacttattttaataattaaaagatgaaaactagtttaataatgtgactaagattatatactacaagtttatattctatttaaataaactattttgaaaaatctcaatgatggctcgcaagaacctcgagaagcgaaaggctgcagctaagggtaatttctctctctgtctttttttcatacctcaaattttatgag

SEQ ID NO: 201117 - DNA, 458 bp, Glycine max
gttgcgaagacactgattgtaactagaagtatttacaactgtttaagctctctcccctttgatcttaagattgttgtaaaggctttaaattttcttgtatgggaaaaagtgctcaagggattttgttcaattatacgtagttaacaacgggtgctctattgagttcataatatgtgtgtagtgcactatgttcaagcataggaattagtatttacaaaaaaaatgtatgcttgccaaacaggttaggttatgggaattagaaagtgaaaatcgcattggagttggtataggtcacatgggagctgtaggagccattgccttttaaaaaagagagcacgatatctttgttagtggtagtaggtgagtattgatgtttcagcattggaatcaatataagaacatttgtgctgaatttaatctcgtgttgcttcccttatgtgttcattgaattctacaag

SEQ ID NO: 201118 - DNA, 470 bp, Glycine max
actcagcttggactcttgggaattggatgaacactaggcacgcaagatatagtctcttttgttaaaagcaagagaaacaactcacttaaagaattgtgactcttgcaaattcatattttgaaagtagacactgcgaatcgattaccattaaggtgttaacgattacacatcatcagatgtgacccttcattgtaaattatgaagattaaaacgttcaaaagctctggtaaaccaatacaagtattgtgcaattgattactcaagttgagaatgtttagacactatttgtaactcttttaaatttgaaatctgaacgttttaaagcactcggaatctattactaccttctagtaatcgatttccagagagttaaactctatggtgatgattttgtgaaaacttcttgtgctaatcactgtatacaaaaactgtgttaatacttatcttgatcgagtcgtctcttgatcttg

SEQ ID NO: 201119 - DNA, 262 bp, Glycine max
cctagtttcaattatctcaaaatcttcattatacacactaacatgatcaacagcattaccttcaagcacagtgccgaactacaaggaataaattattgagtaggcgccagaagaacacatgcgcctcgataaaaactgaagttagcagattaaacctatgcagtccttctttctgcgcctatgaaagagagacgcaacctaccatgacccctgtgtgaaggtaggtagaaattgttaccctctttgcccgctgaccacggag

SEQ ID NO: 201120 - DNA, 465 bp, Glycine max
  unsure (1)..(465): unsure at all n locations
tctggtgggacatcttgacttgctttccaatctggcattcaccacatattctgccttcttctatttacagattggggatgcctctaacagncaccttgtcaatgactttcttcatgcctcttaagtgcagatgtccaaatctttgatgccatattctgacttcatcttctttggaggatggacatgtggaggagtagctggtttcttgaggtgtccataggtaacagttgtcctttgatctgctgcccttcattagaacttcactcttctcatttgtcaccaagcattctgactntgtgaagtttacattgaatccttcatcacacagctgactgatgctgatcaagattgcagtcagtcccttcaccagcagtactttgtccagactaggaagtccatcatgaactagccttcccattccaatgatctttcctttagagccatctccaaatgtcacatagctag

SEQ ID NO: 201121 - DNA, 477 bp, Glycine max
  unsure (1)..(477): unsure at all n locations
actcaagcttcaatntctctttaattaagaatcacattgaaatatgtaaatctgtttctttaattaatncgncatcatcgnctttatcatttatgagtctctgttctctttatgctgatgttaccttgaattctttaactgttaaactactaatatacatgatctaagttcattcatgtggttctctatctgcagattcgctgcagaagaagttgaacaacttgacaaaaataagcagcggtctagggctcttgatggttctagttaccttcctggaatggtatatttttcatgcttatagaaatgaaattncgatttttgatattttggaaaggctattaggggcctacaattgtattgtgattttcaggtgggacttaataatatcaaggagactgatattgtgaatgtaacaattcaatccttaatgagagttacccctctgaggaacttttttcttatccctgaaaattatca

SEQ ID NO: 201122 - DNA, 457 bp, Glycine max
  unsure (1)..(457): unsure at all n locations
taatataagaaaattttgtctggactagagttcncagnnnttcataagaattgtacgtataaagctaaactccgtaaatggaatgtaacgtatatagcactgcaaattggttacatatgtgatgaaccagtaaattatgatttttttaggttatcatgacattgaaatatttattgattttattttatttaaaattattctttcttaaagaatttgactgaccatcactttattgaatttttttatccaaccacattgataccttacgtaaaaaaataaactagaaaaatcgtaacttgttaaactagaaaaatgaactaaatcaaaaagaaaaaaataatagttgaaacaaactgcacaacacaatagagccagacatatatatagaaattaaccaacacaggtgatctaagcagcaaaaattttcttgttcttctgtgtgaattttgtaactgaa

SEQ ID NO: 201123 - DNA, 461 bp, Glycine max
  unsure (1)..(461): unsure at all n locations
tagaactgtcttatatacttntaattggtatatgtccttgtatatctccaatgagaaattgtcctattttcaattttctcaaaatcttcattatacaaactaacatgatcaacagcattaccttcaagcacagtgccaaagaaaatgttcttattattgagctaggggcaagattagtacttgtgcctagataaaaactgaatttagcaatttagacctatgtagtaattntctaggcaagtctctactggtgatcccaacctaccattggcgccttgcttttttttgggaaaaaatgtaaattatattaaacccaaaattatacaataataaacggngcataccccgcagttaaagaaaatcaaaagtctccctaatacaagaagacctatatcaagatgctaaaacaaatgcaacaggtgcgcttgtctatacataagaaacttaatcttgtctataca

SEQ ID NO: 201124 - DNA, 454 bp, Glycine max
  unsure (1)..(454): unsure at all n locations
actagctgcatgttatagcctacctgacatgtttttttgtgtttgcttgaaaactccttcacaaagcatggaccagataggctgcatctgaccattgtggatgaaatgccagaaattggctagaattactgaatattaggatgtcgtttctgaaaacttaaatgtcttattgattgttcatggatactgattgttatgttttctcctgcaacatcttttatgacccttgacttgaaacctatagaatacaaatattgggataattagggaaactatctgaaattagtttttgaattttaacattgtgtctgctggtctattgatgcgtgtatttcttatttctctactcctgttattgtaatgtctttcaagtactactttagtntaaatcatgatcacactatggcttttaagaagtggcttctaatatccttttaaattttgaaaagggaag

SEQ ID NO: 201125 - DNA, 443 bp, Glycine max
  unsure (1)..(443): unsure at all n locations
tatganatcaaagaaatagagatgaaaaaatgaagtgaattctttaattaaccaaatgtaatgtaaaaatcataaaagaacaaaaaaaaatcattaataatacaattttaaatatttcaataaaatctctatttttatttctttatttcccaacaacacttgtaagcatttgtaaaaaaaaaaattaaaaaatcaacagtaatgaaaaaaaggactatttattccttctaaagaatcacgaaaagttcatgttgtctactatatattgcgaattgcgaagatgataaattttaatctataataatctcagtattttcaccactaaacccctaattttaaagataaacttcaatctataatctcaatattttaaccaccaaaaccctaattccttgaatcctcatcgacgttccgaaagggcccaggcgtcgtttcgcgatact

SEQ ID NO: 201126 - DNA, 472 bp, Glycine max
  unsure (1)..(472): unsure at all n locations
accttagaaactaagcttgatagctanaaacttctattcatttgttcatccttttttgattatttgatgtctnaggactagcgttcattccattgctgcatatcagaaagatatcacgctgtacatcattgaaatagaatgaagcatcagtttggcactgagggaaattgtttcacaattaggcactaaataaagaggtgagatatattttaaaaagggtttagagacatgaagccagctagcttaatcatattatttttatactagttgtagtcaatattcaagtacgtacaatgtgtaagtggtgagatcaggatcaacataaccaaaataacacagattcttngtctcaaaataattaaaatataacaattgcgatagattaaaattcaaactcaaattcgaaggtaagtaaaaaggtgagttagaaaaaatgcttgttataaaatgtaactattcaattaatacatta

SEQ ID NO: 201127 - DNA, 440 bp, Glycine max
gattacaaagcgttcctatattatgtctgtgctcacaaaccatataaacaatttctattaggggttgctatgttttacggattacttgatagctaattatactcctgcaattatttgaccaaccagttttagaaatattcagagaggagtttgggacaaactctaataacctcctaaaaactaaaaaggtgatgctagtcatattgtttgacatgagtgattccaatttggaattttctattccactcatgaacacaataattattcttgggcaattccaattctcgaaaaccccgacaaaattgttctcatttgtaattaactccatagtcttcagcacttgcaacacactgcaagaatgcagcccttgtagtgaggtttttaatatattaatgatagctctatctaagatgtaataaagtgtgttagtatatgtcaat

SEQ ID NO: 201128 - DNA, 457 bp, Glycine max
  unsure (1)..(457): unsure at all n locations
gacacatgaaactacgcttgagcaattcaacgacataacgcttttctcgatttctgatngagtcccgncatatatcgagacgctcaaaattgaatgttgaacctctgatccaattcaaaggacaataactttttactcggatgtctgattgagtcccgtaatatatcgagacggtcgaaattgaatgttctacctctgagccaattcaaacgacaataactatttactcgaatgtctgattgagttccataatatatcgagacgctcgaaattgaatgttccacctctgagccaattcaaatgacaataacttattactccgatgtcctgatgaatacagtaatatatctagacgctctagattgaatgttgaacctctgagcatattcaaaccacaataacttcttactcggatgtctgaatagaattccgtcatttatcgagacgctccacaatg

SEQ ID NO: 201129 - DNA, 421 bp, Glycine max
ttcaaaggcttatattctaagagagcacaaatcctagattgatccaaatattattttcaatacaattagcttactcactagcctttcactttaatttgcatttgaccttattacacatcacacattttctttgattgcttttttttaacacaacatatttgtcgtgtgtgctgatgctttaccttttactttacatcccaatcaactcccccatatttggggtaatttgccttgaactatctgctctcctagaatctgaacaaggtatctagagatattcattcaagttcaaggattatatttgaaaatgtaatttagctcacaaaggctgcaaaggatacaattatcattcaagggtaagcttttggtcaattggcttgtatatacacaatcatggccttcatcatgtcctcattcatac

SEQ ID NO: 201130 - DNA, 464 bp, Glycine max
  unsure (1)..(464): unsure at all n locations
tcaacattcaacttcgagcgtcacgttatattatatgactcttttagacatccgagtaanaagttattgtcgtttgaatttgctcagagcttcaacattcaatntagagcgtctcgatatatgacgggactcaatcagacatccgagtaaaaagatattgtcgtcttaaattgctcagagcttctacattcaatttcgagcgtctcgatatatgacgggactcaatcaggcattcgtgtaaaaagttattgtcgtttgaattcgctgagagcttctacattcatattcgagcgtctcgatatgttacgggactcaatcagacatccgagtaaaaagttattgtcgtttgagttggctcagagcttcaacattcaatntcaagcgtctcgatatatgacgggactcaatcagacatccgggtaaaaagttattgtcgtttgaattggctgagagcttcaacattc

SEQ ID NO: 201131 - DNA, 449 bp, Glycine max
  unsure (1)..(449): unsure at all n locations
aagtgcgggttcgagagacanaggtcaagcgnncgttatatgcttagatgatattccgagnactttggatttggtacgaccatgctctcctgatttccagctgggaaattggcgagtggaggaacgccccggcatttacgcaacaagcataatgtaaacctttacggttctaaaagctctatagttgggcctaggctttagagttttcattttgttaaggctctgtgtcttttgtttttgaatttataatacaaggatcttccttcatctgttcctggtctctacccattctcattcatttgcatgtttacttctttttctaaaacggcagattcgatgacgagtcccccgaaggtactaatacctgtgacccgtctatctacttcgagctagaaatgaatcaaacggaagatgaacgagatgaggatgtgggacttccttcggaacta

SEQ ID NO: 201132 - DNA, 456 bp, Glycine max
acactccggaatactcaagctgtgatatccttataagaatatataatatgctttaacgttctattatttttttaacgtgtgtctcaaaggatattattttttcagaaagatatatatcacccataagttattgagtgtcatgtgtatacacataaaataatggtatactattatccaatcataaatcatcatttgaattactttgaaataattattttaaaagtcaatacattcatcatacatggtgaattatgattgaatgactatataaaacttttgatatcagtgtataacgttttctctctaagttattatgcacaactcaaataatttttttttgggtgaactaggaaagactatgtttgaagatattgtctgctatttaaggggttaatatatattctttcacgaagagaaatctatagagaaaacttccaatcacgtagtatttaagac

SEQ ID NO: 201133 - DNA, 407 bp, Glycine max
  unsure (1)..(407): unsure at all n locations
ngatagggtctggannatttagctntgtctacaaaggaactcttgagctagaagacaaagttgttgcaataaaggtcctaaaccttcacaaaaaaggagctcacaagagtttcattgctgaatgcaatgcacttaaaaatattaaacatcgaaatttggttcaggctttaacatgttgttctaacacggattacaaaggtcaaggatttaaagccctagttttttagtacatgaaaaatggaagcttggagcaatggctgcatcctagaacacttaagttttttntttatcagcaaaaatatagtgatattatatacaatatgaagatcagtacaagtggtactgttatatatacaacctaacaccatgctttgcaaagctatggtggcctaatactagaaatacat

SEQ ID NO: 201134 - DNA, 443 bp, Glycine max
  unsure (1)..(443): unsure at all n locations
ggcttctacacatatgacaggagatgtatcttattntactatcctttcccctaagaaaagtggacacgttacatatggtgacaacaacaaaggaaaaatcattggagtcagtaaaataggtatgagttcctctactcctattgaaaatgtgttactagtagaaggtttaaagcatagcttattaagtgttagtcaattatgtgatagaggatataaagtatcttttgattctgaaaaatgtgttatcaagcatgagcatgacaaagatattgaacatatatgtttcaatgaaaataatgtttacatgattgatttaaaacaaaaatctgaagatgatacatgctttctaagtaaagattatgatccatggttatggcttaagagaatngctcatattaacatggatcatctaaatagattaatttcaaaagatctagttattg

SEQ ID NO: 201135 - DNA, 450 bp, Glycine max
tttacaacccaagtattctttatctatcaaaccacttttgcctctattctaaccacttttgcctctaaacaaaccaataatattgttgaagtttgattgcacacagataaagctatatcgtcttacaaatgaaaatctaacttaagcgcattgtctttttttccctcaggatgtactggatgttttgagagctttttacgaacttggaatatacagaagaaagattgaaggttaaagagaataagatattcaaattcaaagtggttcttttaacttcaactcttcaaaaattttggtatttatagacttcttcagcaagtattccttgtctctaaatggttttttgtttcgtctaatcttgcttctgaagaaggtgtttgttggtgctctttttacataaaaaagaatatgtgtaaagaattatgtctatttatatatttctgctcttta

SEQ ID NO: 201136 - DNA, 389 bp, Glycine max
acgagacaaagaaccccggaagagacattcctatcggtctcatcggctcgatggcgtgcacgacgttcttgtactgcatgctggtcgtgacgctttgtttgatgcacaagctatcggatgttgatgagaatgctgctttctctgtggcgtttgaagctgttgggatgagttgggctaagtacattgttgcatttggggcattgaacgggatgacttttgcgctccttgatggggctgtgggacaagccacgtacctcacactcattgctagaacctacttgttgcctccatggtttgctcatgtaatgactattatttctatagactaaatacctcttctatcgtacaactttgtttgtctcttttaaggatttcaatatatttttttg

SEQ ID NO: 201137 - DNA, 454 bp, Glycine max
  unsure (1)..(454): unsure at all n locations
gaagcacagcttgatgacaagaaagaagtttaaatgtttagcttttttaagcaagacaatacagtccaggctgaaggaactccaaaggttgtggatgatgctattgntaatgatgtcctgattgatctcacatgtcaacatgatcatgcgtgcaatggtatccaatgcagacaatgctaatgaggttgtgcacacaagtcaacatgatcatgcgtgcaagtaagttgacacctcaaatgaagctactttagtggaggaaggcttgcatgatgtactggtagtttactccatcaattttggtgctactcctatcaactacactgctccaacttccttaagtgaagattgagtactagagatgataagtcacaccaccgattattatgttgataaacaaagacnggagaataagtaagtcgtttatgcactctatgcatatacattatcattgctc

SEQ ID NO: 201138 - DNA, 414 bp, Glycine max
  unsure (1)..(414): unsure at all n locations
actaagctgaatgagaaggtgacggagaaactttctgtnatttgtttatacagagcggnacctggagatatgtcgcgggggtcatgacaccttggggacgttaggtggggtgctattgcccaaaaccaagcttgaccaatcccgacccaacccgggcatagtctgtcagtgagaacctgtgatgtacctaagcaggcgagctcctggctgtcaacagataaaaggaacaaagaccacaaagcatggaggctcgtggtggctggccagctgtgaaacttgattgatatgtgagatatggtctctggtaatcgattaccaacggtgggtaatctattacaacgcttaataatgaagacaggaggctaagatggtctcttggtatcgattaccaacgggttgtatctattaccacgc

SEQ ID NO: 201139 - DNA, 376 bp, Glycine max
gggaacaacactcaggcgcaaattcttcttcgtttcaagagtaatcagaggaccaaccctagagaatgtaacaatgtccaaaattccaacattagagtaaggtgtatcagtgtcacccccctcggtctcattaatcccaaacacatcattatcatttgaatcaccattcaaaagagattcttgaagagaactatttctcactccagcctcatactatacaaaaaaacccaagtaacagaagaataaacccacactaacagaggaaacatcacaaactaagcactgaatatgcaaagcaacatggctttcatagataacaatgttcactataaagcaatatccggaaacaaataggaaaggacgcaccagctctgaa

SEQ ID NO: 201140 - DNA, 399 bp, Glycine max
  unsure (1)..(399): unsure at all n locations
actaagctgtaaatggtagactgatacatgtcagggttggttgtttcaagataaaggatgccccacattatttcatgacacaaatgcaaaaatgatgattttggaaatttatgaaaactggtcatgcatgtacctatgcggcactcaagtgtcaaattttatggcatgtgatgctgggctaggattcatttctctatttaaataacccaatgtttccaaaatgttcttttatcaatttggcgtcatccgagccatttcggcgtcggaaaatttacagcattcacctttaggtgtaacacatttcaaaatggtatgatcaggatttttcaagaaaagtggaaatatttttatagcatgtcgtttactaacactattttttttcatttntctactgttctt

SEQ ID NO: 201141 - DNA, 466 bp, Glycine max
  unsure (1)..(466): unsure at all n locations
nntaaagttngaaagtgtatatggcttgttcataaaattgtttattatgggcaacttttatgaggaaacggggaaaaatgttatgtctgaaagttcatgcatgttaggactttgggcaagcgtatcaattgttgttcttggtttcacgtttataaaagagttcgtctttacagagacttgagtttacttaattcatttggataaaggttatcaatttaatagttatgtacaaatttaatcgaatatcattggttttggtttgattaactaaagacaatttaaagtaaaagaaaagtaaaaacaacaaatttaaagaaataatgaaaatatggaagatacaaaatttagtgcgtcggaaatacgaaaattgcggaaacgatttaaattaattcaagagaacataggattgaatttcattgttcatatctttagtatcctaataagatcaacatgtacaaatcatttt

SEQ ID NO: 201142 - DNA, 437 bp, Glycine max
  unsure (1)..(437): unsure at all n locations
actaagcttcttcctatttcctatataagggtgagaggcgaatgtgttaatgtttcttcctcctggcaatccgagaacacttgaaattaatgaataanatcggttccgtgaagaaattcctagccgaggcgctttcgttacggttctgtgggtgatttcgtgaagattttcgatcgttcttcgacgttattcgtacgctcttcatcgtcctcagtcttcaaccgattagttcccgaaatctaactttccaattcattctatgtaaccttagtgggcctcatttgtttcgcgttcttttattttcatatcatatactttgcagaccccctcttgacgtgctttagacatttacttaagtcattatctcccctaatacaatataaaataaatctccatcgatcatctgatttgtaacatcctgttatatctgttaaaat

SEQ ID NO: 201143 - DNA, 404 bp, Glycine max
  unsure (1)..(404): unsure at all n locations
catgtgtagtagggatgtgtgcaatgtaatcatcatctacttcagcctttgcggcttcatcattaccagnaccagaggtatcaccccactttacagaaggaagctggactcttggccaggcaacctgagataagaatgcctctaatgtcatcactggctgctggagagatagccggtgaaggatctgcatcaaaaggtgatgccttcctccctaggaagggactagtcactatagccatgagcaagaggctccaatatgattgggctatagctgctgaagaaagtcctaagtttctcatgaacctcacggtagatttctaagcccatgggccaaggttgggtccactcttctctgtacatattagaatagntttttcttcttttatgtttgtagggtatcctac

SEQ ID NO: 201144 - DNA, 434 bp, Glycine max
actcaagcttcaaccaaggggagatggaccatttcaagtgcttgaaagtattaatgttattgcttacaaagatgagctgcccggtgagtataatgttagttccaccttcaatgtctctgatttatctctttttgatgcagaaggagaatccgatttgaggacaaatccttctcaagagggagagaatgatgaggacatgaccaatagcaagggcaaggatccacttgaaggacttggaggacctatgacaagggctatagcaaggaaagccaaggaagctcttcacaagtgctgtccatactgtttgaatacaagcccaagtttcaatgagaaaagtccaaggttgtgagttgtatcatggcccatatggaggaggactaaatgacaccactctgtttcaatattagagtgtgtagttcgtctaaataatggcc

SEQ ID NO: 201145 - DNA, 426 bp, Glycine max
tgcgtttggtttccttctttccccgggagattattcttgtgtctgaacgcaaggagcaacccttaccatttcctcttgcagtaattccactttccttacttgggctttactcttaaacactaaccttgtttcattatttgctcaaaattctagcctatgctcacacagtgtccttctagatagatctcactctatgtccttaaagagtcatatctcatccattccaagacatcacaatagtttcacatcaccatgtgtcataactgaggatggaaccatgaacaaataatacaacaattacctaagatattcatggcatccacattatcaatgacatgactcagaccaactcacaataatgcactatgtaatgaaatgcaatgttcttttctcttttacatatgcatgcgggaccaaaattatact

SEQ ID NO: 201146 - DNA, 255 bp, Glycine max
acatgcaatatcttgcataggatgatacacgcacgggcgccaggaacaaacgcagcacgcaatacgccgctaaaggatcacagaaagaatttccgcgggagcgccctcaagagatgaaaatcgtcctgcaggtacaaaacacttggcttaaccgaatagaagaaacaaagactttcacatgcctgggctggtcctaacatagacatcaatcatattagaaaaatccatatgggtcatgctatatcatgacaagct

SEQ ID NO: 201147 - DNA, 428 bp, Glycine max
tgcatcttggacccaaattctcctcatttccttcctttgtttatcttctttcaagttcattaagtttgttaggtaagtgaagctttatcctttttctatgcttaagttgcttcggattggtttaaatgttgcttgagaatgaatcatgttgtttaaaaattgaaatacgagcatttgaggttttgagttttgaaattgattttttattatatgattaatattgatgaaaagttcttatttgtaaagagctttgatgttgtttatgtattggaatcgatagaaaaggatttgggtttgtgttggtatgatttgtaagccataagaggcaattctctagaatgttaaaattctacaaaattcacgtccactaactagtttcgagtccaatgaccaactttgagcctaatgaccagttctgatgtggatgc

SEQ ID NO: 201148 - DNA, 426 bp, Glycine max
  unsure (1)..(426): unsure at all n locations
tgccttctcgctatatggcttgtcttccaactatacattttttaatgtagngcacacttccgatgagaatgtcaataactccactcccatactcattgagagccatcaacctcaatctgatcatgcacatgtctttcaacccatgggggagacacatgaaataccccaccacaacctagccgatttcgagcctcgcctcggatacgccactgagggataagcagctggtggtgtacccctcagtttcacccacaaccacaacccttgtattttgtggtgggaagagcccctcctgctatggctgaaaagggaaagttggatcagatataagaaaggctaagggtcgttgaacgatgtagagaatatgtctttgctgacantggagaattatgcctattacccaacgtggtcattcctccgaagttc

SEQ ID NO: 201149 - DNA, 449 bp, Glycine max
  unsure (1)..(449): unsure at all n locations
tagatagaaacattgaacacatgataataacctcanaattattttaaaaatatttacatcaagtactcagtagaaattcccaacaaaggattttagccctccattacaagggagcatctttcacaaataggagaagagttttagagaaaataccagattacaaagcagtggggatgtctcctccacctctaagaccctagaaaataactctaaaacctagaatctacctaaaagttaggacctttgcttccttgctcagcttttcctctgttctctgcacacaatttgcagtcaattcagacctctttcacaccatcatgctctctctctntntctgcacaaatcagactaaaaaagggctctctgacctcgaagacgtgcttagcgccattctcgcgtttagcgcgagtaagtgatatttggcttagcgtcaatcgtgcgcttagcgc

SEQ ID NO: 201150 - DNA, 474 bp, Glycine max
  unsure (1)..(474): unsure at all n locations
ctcagctgcgactcttggcaatttgtttaagactaggcactgaaatatattgtgtcttttgtaaaaancatgagaaacaagtcacttaaagaattgtgactcttggaaatatattttttgaaatcagtcactggtaatcgattaccattaaggtgtaatcgattacacatcaacagatgtgactcttcattctaaattttgaaaattaaaacgtttagaagctctggtaatccattacaagtattgtgtaattgattacacaagttgaaaatgtttaaacacaagttgtgactctttgaaatttgaaatcttaacgttttaaaacactggtaatcgattactaccttctagtaatcgattaccagagagttaaactctttggtcatgatattgtgaaaacttcttgtgctactcaatgttatgaataactcttttaatacttatctagattgagtcttctcttgattctagaat

SEQ ID NO: 201151 - DNA, 466 bp, Glycine max
  unsure (1)..(466): unsure at all n locations
actacgcaaactcaagcttggaggccttggatcttcttcatcaatggagtcctttgcttcttgattttattggcagcagaatgaagaaggaagaaagatgattggagacgccacttcaaagagaagatgagtcaagaagaagctaaccaccataggaagccatggataagagcttgaaggtaggagaagattattggagagagagggagagaaggagcacaaacttttgtgcctcaaatgaggtatgaactttgaagtgtaattctcaaatgatcaaatttgaaaaaaggcacacacatgacctctatttatagcctaagtgtcacacaaaattggagggaaatttgaatttctattcaaatttcagttgcatttgaaattgaatttgtggggccaaattntggagccaaaatttcactaattatgattagtgaattttagctatggttcagcccactaatccaag

SEQ ID NO: 201152 - DNA, 415 bp, Glycine max
  unsure (1)..(415): unsure at all n locations
actcaagctgatggaacatggtntaaagaacgcaaattaatatatgaataattattcgtttatacacacacaggcgaggggcatagggagtcacaagtctgctcatacttacatgcactccacacaactcttagagtcttatacatctagaggattgaatacctcatgattcgctaaccatttaatcctctcaatggagatacgatctaatcttacatgaatcacataaaggaactctcattaatattacacctgtttaactatttcgaacacgccttaaaccattagaggccttactttgtgaaccactaagatacgaaccatcatacatgattccattcgcaacacacataatcctttaatatgataagattctctcaagatgtgtctttataatggtaggagcatcctaatg

SEQ ID NO: 201153 - DNA, 169 bp, Glycine max
aaaataagccaaacattattctacagaagctctctgaataacaacgcgcttatgtatccccgggggaaacacaaaaagcataagaaccggaccgtgcacacgatcctcaaccatcgattatataacttctgcgcacctcattaccaaaggccccttcttgatccctgac

SEQ ID NO: 201154 - DNA, 411 bp, Glycine max
tgacaactaacattgataagtgatgaccgtgatgcatgtttgttccatatcattgacaatggttcataatgcaaaataatttattcttttgcagcattgtgatttttcaatcacacttggatttggataggttccaattaaggcaaaaattatgatatttgcttgatcaactaaaatgttctttgtacatatttttctgtgtatataatattaatttatgtatatctaatttttaatatttctggtatttatttttattgtatttttttaattatcatgagatgtcttgggttttatctgtgaggttttttctatcattctaatcacattggcgatgatgttaatttagctgtgattctatttctctgaccttgctatgaaatgatatttaagatgtacttgtgattgata

SEQ ID NO: 201155 - DNA, 445 bp, Glycine max
acacttgaaactcagctattctaaagtgttccgaatggctaacttcattaatattggtgatgcatagcacaaggttcgacactctttgtcaaacaagcagctgctatgaacttaaagataagcgacaacttcaaaattccaccagcttccatggcgtccctttcagcctttagcaccataatatctgtcccaatatatgatagaattattgttccaattctaaagaaagtcagaggtaacgaaagaggcatcagcatccttgggaggattggcattggcttaatattcttagtcatactcatgggtgttgctgccttattagaaaatatgagattaagaatgcctggtcatgagacaatgagtgtgatgtggttgataccccaatcttgatccttggcttggaaattcaatttatctaattgccttgcaagagtatttctatgat

SEQ ID NO: 201156 - DNA, 455 bp, Glycine max
  unsure (1)..(455): unsure at all n locations
acactacacgaaactcaagctggtcattncatcaacaacaaactcgcggagtaatctctcttctactgtatccagaacnngcccttccacgtacaatttccacatccagttcacgagaggcacaagaaacttcccgtctttgtaagtcctccttccacatgctaatttaagagccacaaccccgaaactataaatgtctgattccttgctagccctacctccgtcgatatattctggggcaaggtacccataagtccccactacccctgtcctctgagtcctcaaccttggatccaacaaccttgtcatcccaaaatcaccaagctttgtgctaaaatctgtgtccaataacacattagccgacttaatatccctatgtagaacactttgctctgcattctcatgaagataacgaatggccaaagccacacctattgctaccttgtacctgtgtg

SEQ ID NO: 201157 - DNA, 462 bp, Glycine max
  unsure (1)..(462): unsure at all n locations
actcaagcttgaggaaacaaggactcttacattttatntgtttttaacgntcaaggacactggtaatcgattaccaaaacattgtaatcgattacagccttttgaaaatatttggaacattgtaaattcagttttgaaaacattttcaaactcattttgctactgttaatcgattacaataatatggtaatcgattatcagagagtaaaaactctttgataaaggttttgtcaaaaactcatgtgctattcaaagttttgaaaaactttttaatacttatcttgattgagtcctttctttattcttgaatcttgagtcttgaatcttgatctcgattcttgtgatcttgaatcttgaatcttgattcttggttgtaggctttcttcttgagtcttgaattcttcttgattcttgaactcttgacttgntctcgattcacttgagatgttctttgattcactt

SEQ ID NO: 201158 - DNA, 463 bp, Glycine max
  unsure (1)..(463): unsure at all n locations
cttattacataagttaatttaatttatggaagaaactcaatttattntactcttatctctnnnnctcctataagtgtttattaagaagtttatacaaagaggacctaagaagaattaaaaaaatctatatgcaagtgatgactacggagaaaaacagccaaaaatgatgtgtcaaaaaagccaaaaatccctatgttgtctgctggtcaactctttgttgaacatcaaatagcactttttgttcatcattaagtatggagtacatatcatgtttactatgctatacaaaaagctctatgcaataaacataattttaacaacaataacaacaccagggatgtttccagaaatatagctatgagctaaacagagaactccattgcaatcttctaaagaaaattatntatttaaagaatatataccctctgaaacaaaaaactattgagatatttaaagtcttaat

SEQ ID NO: 201159 - DNA, 460 bp, Glycine max
  unsure (1)..(460): unsure at all n locations
ntaatgaacttcaatgttgtcttgagggcatattctccttatccactatggnnggaattgctccacttaaggatcaccatttcctgaaaacccttgtcctgcaaccaccagtccatgaccttgaaaggcttatgaccccaatcaacacttttggatcttagaaggataggacaatgatctgaaaaatctctatctagaacaaactgtgttgtgtcacgccactgaatcaaccaattatcagaaatgaagaacctgtccaacttactcatggcactaccattaggtctgaaccaagtatacttcctgcctatagatctaacctcttctaaggccatatgagagatccaggaattaaattcatcaatactggatgagttgaccagattctgagatgaactcattctctcattttgatttcttatnggagtgaaatctcctaaaatgcaccacatatcacttt

SEQ ID NO: 201160 - DNA, 453 bp, Glycine max
  unsure (1)..(453): unsure at all n locations
ntagatatatattnntatattntaattataatttaattgtgttgcactattactatacaaaaatntatattttcaaccactcataaataatctttgactatttttggattattcaatactttcttatatctaagactatttttttcatttattattttataaatattaaaaaattataaaaatatatagtagtatgaaataataaatatattggtcaaagaaacctttgtccattaaagaatgcagaatagtgaaaaattgacaattacttagctaataaacctttgatttaatataccaatataaatttcaaagtcaaaccaaacattaatgttacccgcaatatttcaaagtcaaaatactgtaattaacggctgttcaaagaaatacaaattctagtattatatttttaggtaaccactttaaaaatataaaaaattaatctagagttat

SEQ ID NO: 201161 - DNA, 463 bp, Glycine max
tgtctccattatttccaagtgggtgccttctcctatcctttctaagctatgaatgatatgaaaaccaagatatgtgaatagagtaaccagaaacatgaatttaatatgaaaaatgagctatgaatttgactaaattaggcttaggtgtcttcgtaagaaatgtatccctagattatagctaacttaggagtcttcattaggattgtgcaatcagctcatgttcctcctaattttaggcatagtagatgattcaactagcttgaggtaaacgtagaagttgtagataattgtcatatctttcaaacaagataggaataaacttgattgagttagtataactctagatataacatttataccgtatagaggtcatatgagtgtaaaaggaaataaatgatgtagtaccccaagaacttaagatattatatacaaactataggtgttaatagataattgctataat

SEQ ID NO: 201162 - DNA, 400 bp, Glycine max
  unsure (1)..(400): unsure at all n locations
actatntaattttaatttaatgatgaaatcttcgagataattatctagattntgtgattcagctcttgatgtcttccttgtatttttgtcccttctttgttgattcttaaaattgattttctttcctctcttccttttcctttttttttctggctaagaaactctactgtgtgaggagactttcatcagaaaaaataagtgtgtatcttttcttgttatgtcacatttattttatatatataatataaagggaaaaagagagatttattttatatttattcaaaatcttctaaattaatcaacacttataattgcaattatatatgtcccacgatagtagactatctcttattgtagccaatcttattgcagccaatacatatttattttacccactctt

SEQ ID NO: 201163 - DNA, 428 bp, Glycine max
gctgcttcatagaaaggagcgagaggaattcttattcttccatatcttgtgatacatcaaagacgaggaatacccatgggaggcctctgacaacaataagagaatgttgcggacgttggcattcgactttctcctaaatggaaatatcttgtacaacaggaaccatgatgttgctttgctactatgagtggatgccatggaggctgattagatgcttgtggaagtgcatgagggatcctctgggacacatgccaatggacatgccatggcccgaaagattctgagggcagggtattactagctcactatggaaaatgattgttgcatccatgtgaggaagtgccacaagtgccaagccttcaccgatgatggccatgctccacccgtacctttgaatgtgctggcagtaccttggccattctctacgc

SEQ ID NO: 201164 - DNA, 454 bp, Glycine max
  unsure (1)..(454): unsure at all n locations
ngaaggatgnttaaattgttntgtgggcagagacagtgattatatggttaatagcattgccagtggcattgacccatctattccaggttctcacaaactcctcaacttccatatatgctggtcatcttggagacattgaactctcttctatctctgtgagccaaggggtcatgagttccatctattttcagttgttggttagtacattctaatctctccaatattaatgtttttttttttcatttgagatctaaacacagaaaaatgaagttaccgaatccattaatgtgtaatttaattgtctttatgcccaaatgataattaacaccagcaagtaaatgtgttatttttttcctcttatgaagcacagatacgatacatatccaatactgtgatacgattatgttaaatttattggatacaatacgtgtaagatacatgtttagaaatatat

SEQ ID NO: 201165 - DNA, 443 bp, Glycine max
  unsure (1)..(443): unsure at all n locations
actaagcttctcccaatatctataaagggggagaaagaagtgttatgtttttccccttngcacttctctctctttcaatttgcttggaaaaattgtttccgtgaagaaaatccaagccgaggcgcttccgaaacgtttccgtaacgtttccgtgagggatttctcgaaggttttcgaccgttcttcgacgttcttcattcgttcttcatcggtctttgatcttcaacgggtaagtacctcgaaccaagcttttcgattcattctatgtacccgtggcggtccacattgtgcttagtgtatttttattctcgtttcatttactttttatacccccttttgacgtgcttaagccattttatttaagtcatttctcgcttaacctaacaataaaataaatttccaccgatccgttgaattgtattattctgtaactttggtaaaat

SEQ ID NO: 201166 - DNA, 457 bp, Glycine max
  unsure (1)..(457): unsure at all n locations
ggaaatcgaacatcagaagctcacgagagattctattgttatatcatgncacaaggatgaccgattctggcgcatcacatatcaacacgctctacattgaagatcggaagctctcgcgaaattcaagtggtcataacccgtcattcggatgtacagattcacgcgcataatatatccagacgctcgaaattgaacatccgaagctctcgagaaattcaaatggtcataactagtcacacggatgtccgatactggcgcatcacatatcgacacgctctaaattgaaaaccggaagctctccagaaattcaaatagtcataacttgtcacacgaaagttcgattcatgcgcatgatttatcgagacgctctaaatcgaacaacgaatgctctccagaaatacagatggtcataacttgtcgcacggatgtccgttcatgcgcctatatatccagacgc

SEQ ID NO: 201167 - DNA, 422 bp, Glycine max
  unsure (1)..(422): unsure at all n locations
tcttttttagacctcgatcggtcgnctntcctgaacgtatattactgtcatttnttcgatcaatatcggtgaataatatttnttttgccgaggtgggctaatgttttcctggccgaataaatcggaacatgccaatttcggccgaaacgacacattagttgagctcgcacgatgtcggccagcgagcgttttttttaaaaaaaaattgcgcaatgtcggctgaaaaatatcagtcggggccatttcacgaccgatgtcggctattgagttttctattcaatccctgaatgaaatttgcaagatgtcgattaggaaatgtttgattggcgtcatccggtgatgcttcttttttagacctcgatcggtcatctctccatgcagacgtcagcaatcatttttttcgatcaatttgcgtgaataat

SEQ ID NO: 201168 - DNA, 458 bp, Glycine max
  unsure (1)..(458): unsure at all n locations
ntgatgcaacatttggagaggttaatgaaacaacgagattatgcgctccatgagaggttggatcaaatggagaatagagatcataatgaagaagaaaggaggagaagagggaatgatggtgttcctagacaaaaccgaattgatggtattaaactcaacattcctccatttaaaggaaagaatgatccggaggcctacttggagtgggagatgaaaatagaccatgttttctcatgcaacaactatgaggaggaccagaaggtgaagcttgccgccacggagttttccgactatgctcttgtgtggtggaacaagctacaaaaggagagagcaagaaatgaagagccaatggttgatacatggacggagatgaaaaagatcatgaggaagcggtatgtgccggctagttactcaagggacttgaaattcaagctccanaaactaacccaaggcaacaa

SEQ ID NO: 201169 - DNA, 442 bp, Glycine max
  unsure (1)..(442): unsure at all n locations
ctggcttcctttgatntccgacacgtctcggttcttcatatattgtgcaacaaaggatgccaagtatctcaaagcggcaaaccaaaggttgcatgttatcaagtaataatccccggacgaaattagggtatgagagttgcccctctttacttaccttttatcggagataagaggaaagcaaagataagacactgatttcgtccgtcttgccctttccgtgattagtccatgacgactctcgtctctccttcttctttctctgcacaacacaaaacaaacacaaacaacaaagaacaccgataacataatatacacatatacacatgtttggcgaaggaaccgatcgggaaaataacaaaaaaccatatttcccagtcaccagaggcttcgtgcttgataacggaggacacatgaacagcgctaggcaatgaattcatgggtc

SEQ ID NO: 201170 - DNA, 446 bp, Glycine max
  unsure (1)..(446): unsure at all n locations
atatgctcgtgaagccatatctaacctccagttgttatttgctgctaaccctaactaactaaccaacctctaactacccttcccgcctaaggatcttatgatcagcttttacaaggaccaactcatcctaactggtaaacatcccaatgcttgggtaactgcttcactctcctcggacgtccccgttgcctggcttcattttctttgtttatatcattcccccgttcttcagacaaaaccttgtcctcaaggttgtggcattccttcaactgtttctaatcttcccatgaggcatcttctcgaggcaagccttcccactgcaccaacactatccgtctggaaccagcttcagaaggaactagctnggagtcaatgatggtcaagggagctactactggttcgtcactggtcatggtaggtaatggatccgcgtttgttgctcggga

SEQ ID NO: 201171 - DNA, 403 bp, Glycine max
  unsure (1)..(403): unsure at all n locations
tacgtccatgcggaatgctctattggctgaagcagctgatcaagatgatgaggcaaagaagccacactctgtgggaatggaagaagcacttgagaggatggaagaagtgttcaacaagtgcagtgaaggaaaggcctactttgggaggggatacaattggaattattgacattgcttttgggagcctttggagttggatgagagtgatagaagagatgaatgaaagaaaagtgttngatgaagcaaagaaccctgctttnttctttattttaggagattcggtttcttgaggacagttacaataaaatccctcaagtgggctcaatctcattgtttttgggccaggtagctcttgacagcagactaacttaaagaggatactgttgaacaaaaacaccatctt

SEQ ID NO: 201172 - DNA, 472 bp, Glycine max
  unsure (1)..(472): unsure at all n locations
tactcagcttccttataacaaagaanagagaaagatgaaagattgctgatatacaagtggtggggatgtctcctccacctctaggacctctcaatcactcataaagtcagctcacgctctcaggacaacttccttttccagctctgatctctgcagatcttcacacgacaaaatctctcaaattctctggaatttggacctctctctctagaactgaagacatgcacgagctcctcaagaaaaatggccaaactccctctctaaatctgattttaggcttaaataggtggctntgttcgtgatcgtgcgcttagcgcaactctgatccgctcagcgcacattagtgaatatcggcttagtgcatggttttctcgctcagcgaatggactgaagcggtgcgcttagcaggatgacccttcacttagtgaacatgcacatctcatccttcttccagattcttcctcgcgctcag

SEQ ID NO: 201173 - DNA, 465 bp, Glycine max
  unsure (1)..(465): unsure at all n locations
tcaagttcaagctcagattanagtccagaatacacacagctatcaaacatggggaagaaggcaagaaggtcgatctcatcatgaaatttagtgcaggcatctttgggttagtagccatttatggctatgataggaatggctcctatgagtgtctgaggggaccaaactagctagatcaactgtgacaaataaatgaggggtacgtatttggggccctgaatgggagaggtcagtttctatactctatattgaggggtccatttatactagcactggttcttctcttatctcaatacgctttatctgtatggtcatctatcactaattattaaaagcgtaatattcctaagttccaaaacaaagcaccgggtataaacctaagcctcaccgtaaaggaagtttaatggatagtagtctctttacgtgaactatacttaaaagacagaatntatatgtacactgtgt

SEQ ID NO: 201174 - DNA, 221 bp, Glycine max
tctatggagggtggatctttgagcttcaataagaacctttatggtgattttcagccatggagttgaagcagaagataaaggagaaaaggtgagaggaggcgccatccactagagaataagccgtggaagaagaagcttcaccaccaagagagtgtcttggataagaagcttagagaggaagctttaatggaggaagagaatgagagaggggggggaggggg

SEQ ID NO: 201175 - DNA, 467 bp, Glycine max
  unsure (1)..(467): unsure at all n locations
tcagatgcaagctcanagganaattataatcgtttagaaacaacaaattcttgaaaatgaaaacctataaatactagatgctttgaagaaatgagtaacgaacctacacgctatcattcaaattctttatgtagaaaactctttgtatattcttataaagtttgaaaagctctcaaaacatcttgaatactctaagacaaaaaactaaatgcttagatttcacatttgtttgtaagatgattaagatttaatcagttagcaaatcaaacaacatatcttcttatttgtatagaaccaacagtggcttggtaggacaaagaatattcggttgttaaagcttggcgataaactttgttgtgagagctaaaagtaacagtggacaatacttgtaacctttgtgaaattagtgaaacttgattgctaaccaaaaactgaacttagtctgaatggtagagacaaaccaatat

SEQ ID NO: 201176 - DNA, 457 bp, Glycine max
  unsure (1)..(457): unsure at all n locations
tctgaatcattaattgatcagtctccttatattttatgttttaaataaatnattagagtacatatcagtatctcttgttacttggcaatatataattctacttgaattgtattttaatatcttactctaactttaaaatagagatagcttcctcttagcttaaacttatattcattaattaaaaataggccaaatctaggggtagaagactacccaaataaaaagcttacaagcaatgaagcttgtaagaaaccgcagccaagtcatccctaagcaaatttaaactaatcaactccaccgactgaccaggcaccaacagtcaacctaatcaaatgtttgaacctactcagtaaaaaatntatcactaaaagggttcaatatttatcatcaaggtttgtacattnggtaaataactgagattcttaatcgtactgacagaaaattaaattattaattg

SEQ ID NO: 201177 - DNA, 452 bp, Glycine max
  unsure (1)..(452): unsure at all n locations
tgttcagaaacgtggcatttgtgcgcaatactcaatgcctggtacaccacaacaaaatggtgtatcagaaaggcgtaatagaattntaatggatatggtaaggagtatgttaatcaattcaactttacccgtatctttgtggatgtatgccttgaaaactaccatatattngttgaataggattcctagtaaggcatttccaaagacacctttagaactgtggacaaatatgatacctagtataaggcacctgcatgtttggggttgccagacagaaataaggatttataatccgcaagaaagaaaaatggatgcaagaacaatcagtggatatttcattggttatccagaaaagtcaaagaggcatatgttttactgaccttatcataatatgagaattttcgaaactggaaatgcaaggttcatttgaaatggtgaaatcagtgggagta

SEQ ID NO: 201178 - DNA, 492 bp, Glycine max
tgacactgtggagtgctacatctcctgacctacagatgatgcagatgggtctgtcactacctcatgcacttctctaatgaacatggcatcatgatctggcgctaaacagctgggagatggaagccatcatctcagttccaaattgtagcttccccttagaggtcatgtctacaacaggctaccaccactgcgagcgatctatcatactacctctgcatattactgagtccttcataaaaatattggagaagaagctgttctgagatcatgatgtgagggggcaactggcacataatctcttaaatctctcccaatactcatacaggctctctccactgaattgtctaatacctgagatatccttcctgatggctgaggacctggaagcacggaaaattattctaacaaactctcttaaggacacccagctcatgatggaccttgtagcaaagtaatacaaccagtcctatgcctctccctctaatgaatgag

SEQ ID NO: 201179 - DNA, 440 bp, Glycine max
  unsure (1)..(440): unsure at all n locations
taacaattaaaagtatcagcaacgttcaagtattctaatgtntgtctaaatttaaaaataagcaccattcaaaaggatggaatattccagtagtacaagtaaaaaacaggatcaacggtcatccataacaattgtattaatggtgctaatagttacacaaactatgattagaggaagctaataaatagcagcactatgattttagctaataaagttgagttgccagtacttttggttagattctccattgaacaaaataaagatgaaacataaatagcaggtttaccacaggaatgcaatcaatctcaacaaacactcttagactgagcttctgaaagaaatgcatcctttaacataattgattcaaaagaattgctggctaatgatgggcaacatcctataccaatgagaaatagaagcatcaggtcaatgtgataaat

SEQ ID NO: 201180 - DNA, 447 bp, Glycine max
  unsure (1)..(447): unsure at all n locations
cttatttcttaaagctggtttcacaaaatgtcctaatgagtatacactctntgttaaaagcgaagataaaggtaaaatgctcattttttgcttgtatgttgatgatcttactttttctggatattgcaatgtcttgtttaaagactttaagaaatccatgatggatgagtttgaaatgattgatcttggtatgatgcattactttcttggaatagaagtgaatcaaatagctggtggaatctttatttgtcaaaagaaatatgtgggagaagttttggacatgtttcagatgaaggattgcaatccagcaaacacaccatcagatgttagtttaaaacttcacaaggatcttgaaggaaagaagggtgacagcacactttacagacaaattgctggtagtttgatgtatttaactgcaacgagacccgacataatgtatttttgtag

SEQ ID NO: 201181 - DNA, 421 bp, Glycine max
  unsure (1)..(421): unsure at all n locations
tccatcaagtggtaattagagcacaagagcttcaagtatgttctccttaaacctccattaattntttgctttaccttctcttccattgttttttcttcatttttctccatgtatctcctcacatgtcttgttctaaatgttgttaacatgattctttagagtttgcaccgattaaacttgctatagaagttagatttgattttctatggttcaaatttcttgttcttgttcttgaaccatgaattgtgttgagtttaggatcctttgagttntgtcttgttattttttgtggctgaaacctaaaccataaaattcttacaaaaatattaaagtagaagaaaacctcaaaaatctagagtgacttgttcacctattgtagttntgtcatagaaatcatgtctagtcatgaaaacttgcacat

SEQ ID NO: 201182 - DNA, 441 bp, Glycine max
  unsure (1)..(441): unsure at all n locations
tgacttgaagctgaacctgtctccaccgagggctgatcggatactggattcgccgacacgatcggcgacggcgtctccgacgtcaccgccgagctcgtgcgtgtcttcggagctgaaccaagaggacaagagttactctaacagccctgaagccacttccatggttcttgtgggttgccctcgctgcctcatgtatgtgatgctctctgaggatgatccaaagtgccccaaatgcaaaagcaccgttttgcttgatttcctccatgacaccaaaaaccccaccataaggaggagttagagtaatagagttagggtcctctgtttgtagctccgttttcatctgttcctaatagtaggacatattatattagcttgcaatgcttangagataatcttcttttactggttttaacctatccccccctttatgagtagtgctat

SEQ ID NO: 201183 - DNA, 455 bp, Glycine max
  unsure (1)..(455): unsure at all n locations
ngcatnntttttctcaattcagtttaggaatcatcattatccatctggttaacacctctcttcatgatcctcatatcccctgagttgttataaaggttggagcacatatcttcaatgatcttgatgttagataagtggcctcagatatcttaagaatgggggttgaattaagatattacaaactttttaagattaaaaattctattttgattttaacccaaatcccaagattcctttcaaaatgaactcctaaagaattctgcaaattaatattattaaatagaagcaataagcaataataaataaaggagtttaagggaagagaaaatacaaactcaaatttttactggttcggccacacccttgtgcctgcgttcagtccccaagcaacccgcttgagagttccactatgttgcacaatccctttacaagttctgaaccacataaggacaacc

SEQ ID NO: 201184 - DNA, 256 bp, Glycine max
  unsure (1)..(256): unsure at all n locations
cttctttaccccccattacatccctcttcttgctggaaccagaggtngatctctatgccacacctcatggcgttgccactgcaagcaataacttcccttcccattcactttgaacatcagttatgcgaaggatcaaatctgatatgaagaatcaataccaagccttgccatcatcatattagaagagtctaatcctatgagacctgtgaaggatcttgtggtcgccgccgcactctaatataagtatttctctaca

SEQ ID NO: 201185 - DNA, 360 bp, Glycine max
tgaggctgcagcttaacctatcgccctacagtctttatattgttatccaacccaatccttgtgttcgactctcagccacttatgatagccaccgatgatcccattactgcttcccctaagctctctgtcctttcttcacgccgcatcccatgccttgcaaactccttggagtaccctcgcattgtggtcactaaaaccccgcgcgatgaaaggcgtgatagcttcgtctaatggcgctcctctcatggggtagccaaactgtcttatggcgagaacgggattatatataatacaaccccttgttcccatcaagggaacatattgacatccttcgcatgaagatagaatcttgattctttc

SEQ ID NO: 201186 - DNA, 355 bp, Glycine max
  unsure (1)..(355): unsure at all n locations
tcaacgcaacgacaaacgctaagaatcttaacaatacattcaaacatgggtcaaggaatcacaacgaacagtggtcctgggagcttatctgaatcaataagtccacttgatgttgaacattgtttagaaaatacattataattgcgtaactaattgtttttgtcttcagggcacattggcaacttactgttctatgttcattggacaatattggtgtnggttatgtccttacgtaagaacctgatgtaacatcaaggtgatataataggttacttgtaaattaaagtcaatattgtatccaatatagtggttaacatatggtgtgatatattattgtatggatttggactatgca

SEQ ID NO: 201187 - DNA, 378 bp, Glycine max
  unsure (1)..(378): unsure at all n locations
ttggatgcctgtgaagacaaatagttcattgattgtcattgccaattaggcaatagatcatcatgtatgtattatgaataataaacaagcaaatgctccttacaattttgtcaaataactctgctccattcacatactcaagtaccatataaaatttggttttgctagccaagacctgcataattacaggtacaaatcataatcagaacatcatagtttcatataatcaaaccgctttgtaaatgcaataatcactctattgttctacaatctgacgtttgaaactgttagagatgtgacaaatcattcacatgtcttacacctattagattaaacaattgngtctcaatattcttctactaaaaagctgaatataat

SEQ ID NO: 201188 - DNA, 321 bp, Glycine max
  unsure (1)..(321): unsure at all n locations
tttggcttttacatgccaacctcccttgagtggcatntgtattggttggtatccttggttgtccatcatagtacaatttgatatttgtattgcatcatgcatcatcatggtttgtgtgaaaaatagttataagttagaaaagtctctttagagacaaaaattctctattttaatcgattacttgtagaagcaaatgactctggtgttctgatgatgatcatgatgatttgatgcanatgatgcaaatgggctcttcaagtttaaattcaagactatgattcaagaatacaagccacaacatcaagatgatcactattattt

SEQ ID NO: 201189 - DNA, 224 bp, Glycine max
tcctaaaagcctaaacctttggtttattattttaccatggacacaacttccttataaccccaacacccctcagttttttaaactattccgtttccatacaagaacatgcattgcctttcgtggatgtacgcgcctttgaacgattggaatgaatatactaccgacatcttcttgttgtcgaccaatagtaccaatatcatatggctgatcagcataacccgcat

SEQ ID NO: 201190 - DNA, 329 bp, Glycine max
  unsure (1)..(329): unsure at all n locations
agcttcanatattagtatcatatcatggcttttatatatttcaaattcttcaacanaaacaaggatcattccctcgnatttttgtcttcctctagnttcataagaaaaccaattagccacaacattatatatgctaacaaggaaaattgaaagaccagagaaacttctgttaattattttatagctcttttgttcaaatgtcaaatattttaggtggagaagctagtttctcctcaagaaacactggggaagaagttcatcaagaaaacaagctgcatcaacaaccactaaaccacagtcatggctcaagttttggtgcttgcaacaat

SEQ ID NO: 201191 - DNA, 429 bp, Glycine max
  unsure (1)..(429): unsure at all n locations
tgaagaaactgtctacatgcatcagcccccatgtttngtcatgacagtaaccttgcttgtaaactgaacaatgctctctatgggctgaagcaagcaccttgtgcatggtttgaatagctttcagcaactctcatctctcttgggttcaaggctagcaagtgtgacccttccttatntgtatgtcatgtggaaacacaacttatgcgcttgtctatgtggatgacataatccgcactagaaataatagtgttctaattcagcaacttatttcatagctaaactctattttctctcttatacatcttggcaagttggactacttccttgtgattgaagtcaactataattccgcaggttctgtcatgctttctataccaaatacatctcaaattggcttggaagagtaaatatggtaaaagctaaaggaat

SEQ ID NO: 201192 - DNA, 293 bp, Glycine max
cttttcttctttacccccgattccatccctcttatcgctaggaaccagaggttgttttacaccgcacaccttatggtgtagacactgtaagcaataacttcccttgccattcactatgaacatcagttatgcaaaagatacaatttgatatgaagaatcaataccaagcattggcatcatcagatttgaagaatcaaatgctatgagacctgtgaaggacttcgtggccgccaccgcacatctatataagtatctctctacaggccaaatctttgaaaaatagagctcttaac

SEQ ID NO: 201193 - DNA, 417 bp, Glycine max
  unsure (1)..(417): unsure at all n locations
acggaattaatatcacttcctcttccataatggggaagttcacgatcaagaacgctcaaccatactggtatatgagattcacttaatattagtgagaaaaattgcttccgtgaagaaaatacaagccgaggcgctttcattacgcttgcgtgacgtttccatgggtgatttcgcgaaaattttcaaccgttcttcgacgatcgttgttcgttcttcatcgttcttcggtcttcatccggttagttaccgaaatcgaacttttcaattcattctatgtacccttattggccctcatttgttttcgcgtgtgtttattttcatgtcgtttactttgcgtatccccttttgacgtgctctantcatttatttaagtcattatctcgcctaatcaaaaatataatatatttccaccgatca

SEQ ID NO: 201194 - DNA, 393 bp, Glycine max
  unsure (1)..(393): unsure at all n locations
cgttatttctgcagtggtgtatatggttgtggcgctgggagaattgctgacaatgaaggagaatataagttacgggaaggttagggttaaaaatggtggttgattccctctatttaacggtaaaatggtccattcctacttatatgtttaagcaatctgtcatataaaatacgcaccaaaaccggaatctttcagataatgaattcccatgctatttttttntgagaaaccaataagtctattattgtcttataaaatatgagaaatacaaattcacctttagatgtgttgcttaataaaaagatatacttttaacttattattacattnactcattcatgtttgttatgcatgngattatatctagtgactttaatattataaacatattta

SEQ ID NO: 201195 - DNA, 414 bp, Glycine max
ggccgccatgaagttttccaactatgctctattgatcatatggcctcgaaataattaaaaagggggggggtgtgtgtaattaattatttaattgtacacttcgactacattacatacactattacgttccttaattgtgtacgtatgatctctaattagggcgttttacatacttacagattatgctaacctataaatataagtaaatgcgtaaaaattatagtgcacaaacgacaatttaaagatgtgtgtggtgaagattgaagacatgacacaatgaatgttatactggttcggccacaaaccgtgcctacgtgtagtccccaaccaaccaccggttcttgagatttctttaaccttgattaatccttaccagcaaagatcccaatggatgtccctcctttgttcttttgt

SEQ ID NO: 201196 - DNA, 346 bp, Glycine max
  unsure (1)..(346): unsure at all n locations
gctatgtctagatccctcttgnggtctanacttagaccaaacagattattgtaacaacatacttaaaaccaaaacttaatctgtagatccctcttgtaagactaagtttcaattctgcttcattcaagttctaaggcaacaataaatctcccaatgttaaaatcacctaactaggcacacaaatggttgatcaaaccaagagcatacaaaatttaagcactaaaaaagcattgaacacaagaaacaaaatcaattagatatgaaatataataaatcagctattcattagaaatccccaacaaggggtgttatccagctcttacagatgaaaccctataaataataa

SEQ ID NO: 201197 - DNA, 409 bp, Glycine max
tcgtctacagatccctcttgtatgactagatctgactatccaccattattttaacaacattatttaaacctaaacttaatccgcagatccctcttgtaagatgaagtttcgatcttgctgctatcaagttctaaggcaacagtacattttccaatgctaaagtcacctaactatgcacacaaagggattatcagaccataagcatacatggaagggagcattaaacacgaaaaacataattaattagatataagtatttacatcagttgttaattataaattcccaactagtgtgtttagcttgccattacatagaaacccttaaatttatgatattaatagcagagaatgatgagtccttacacaaaaatgggaattactccttctgttctcacatcgtacactcact

SEQ ID NO: 201198 - DNA, 304 bp, Glycine max
  unsure (1)..(304): unsure at all n locations
agcttgaggctgctgatctcttagttcctgtgagcttgtgggtnttngagagagggggaagagttctgggtgaagaaaacgttccccctccacccctttatattttcgtacaagggttgctcgcccaggcgagctaacctgtacttttttttttaggggtgcattaaccatgcctcccccctcttatgggttagcgttttgcctaacttgaacctacttaagtatgaattacgcgtcgattacttatttaaaacaaacaatagtaaaagaaactgcgaacgcaaatgatactgggctgccctgc

SEQ ID NO: 201199 - DNA, 368 bp, Glycine max
gttgggattgagaacttataacagcaccaggcctagtttgagcttctctctttctttacattttaatcacatttcgtttaaggagaaagaataattttaggttttgcaattccaatttttttactattcacgtagcaataaaatttcggtttctgcttcaatctacaatttcgtttctactgattaatggaaggctaagtctccaacattggtttctcttgaggatcaagcacaactctctttgaggtgttattatttctattgaattctgatcgatatttcctcttcaccaattactctatatttgttactattaatccatgcatgcttagtgcttgattaattgtctttgcgcttgaattacgttc

SEQ ID NO: 201200 - DNA, 391 bp, Glycine max
  unsure (1)..(391): unsure at all n locations
agcttgtgtgtttgaacgataagcttanatccaatctaaaatgagatctcataaattggcttcaacacaaagtgagcttgataaattgaagcaagaaaatgataaacttgtttcaagttataaagccaccggttgtgtttatgctagatctcttaatatggataattacaaatatttgctagatgagtttgaaaagtttaaaaatgatcactatgaagaatgcatgaagttgcaaattgagctttccaggcttaaagatctttttagaaaaatgaataaaggaaagagtgatctgaatcacttactcagtgtgcaaaagcatgctactgataagactgatttggggtataacaagcaaactaaccttcctaagaaaaccaagtttgcacca

SEQ ID NO: 201201 - DNA, 129 bp, Glycine max
ttataccttgctcttaaggcctatcactgttcctcgagcgccccgcggtccccacttggtatgtgcaggtcacgctagggttataccactttgggaatagaggagctggggtccggacagctctcccct

SEQ ID NO: 201202 - DNA, 248 bp, Glycine max
  unsure (1)..(248): unsure at all n locations
agcttaatgtgagaaagcgtggaanagtttgtcttcctactttgtctgtgaccacagagtggtacctatagatatgtcgcgggggtcaagagaccttgtggacgtcaggtggggtgctattgcccanaaccaagcttgaccaatcccgacccaacccgggcatatgtagtcagtgagaacctgtgacgtacctaaacaggcgagctcctggcagtcaaccaataaaagaacaaagtcacaaacaagga

SEQ ID NO: 201203 - DNA, 370 bp, Glycine max
ctgaattttctcactggtaatcaccacaaccttctggttatcgataacacagatatattttgaagggtcatgacttttgaatttgaatttccaaaattccattgctggtaattgattacaaacatctggtaatcgattataggttcaaaattcaaattcaaaaccctttgtgacaactatgtttcaaacttgtctactggtaattgattacattgcttggtaatcaattaccaaagccttgcatgtcttggaaacacttttgtttgaggcaaagcttgatcttaaagtaatcttgaagcaaggctttgtttattgaagcaatcttgtattaatacttgaagcaatgcgtatcccttgtagcaactgttcg

SEQ ID NO: 201204 - DNA, 436 bp, Glycine max
  unsure (1)..(436): unsure at all n locations
gatcttaagcgactgagctgcgctggacttgttatcttcctttgtggtgncacaagaatctggtggcggagaggatctcgagggtgttgtcatggttgcatacaaaaagaaaaataaatcaagccaagttaattatcccaacatacaagtgtgaaattctaatgaaagacagataataagaaattgcaaatgataatggacagcgtaaacaaaattggggttatataccacattcaagtagcaatatcttcccataaaccttcatcatgatcgatacgatttgcatatacatcatcctcctcattttcagcatttatggaaggcatttttgtgaaaacaccgacttgtcttaacatcaagggttgaagcataatatcggagggatccagttgtttccctgaaaacactgacatctcagtactggatctcaaataaa

SEQ ID NO: 201205 - DNA, 402 bp, Glycine max
ctttcctctatatgctttgatggttccgacccgtcccttataatgataaaagtatgaagccttcattccattatctgtgtgtgatgagtatttttccctccccaaatattaatttgaaaatgtcaacggtgaagatgtgagaaaatgaattgcaaatctagtttccaaaatgaacaaagatccaacggttaacgagtcccagatcataattttattgaaacaggtttgagtctctatgggaaaagagaaagctgtgatgaaaagtatatttctcttaccacagacattgtttcgcaaatttgaacggtgagaatgttcatgaatttgtttgcaaccccgttctcatatttcacgatgatccaacgggtaacgagtgcatgatcgtcattttactgatatatg

SEQ ID NO: 201206 - DNA, 286 bp, Glycine max
  unsure (1)..(286): unsure at all n locations
aatgactccaagcaaatcaatttcaatttcaagggatcatagtccataacataaagaattatattaaattaccattatttttaacagaggcatgaatagtgtatcccctttggaggagtctttggacaaggctgaagcccaagtgacctgaagcatccatcacgcatatcgngtgagtacttaatgtaaatgaaggagccatcgatagtttgtagttnttgatgcgatgactaatgaaaaanaatagtgttaaaaagaagatatgtgtgtgttgtgattttgtaaa

SEQ ID NO: 201207 - DNA, 341 bp, Glycine max
cttaatggatggcgcccactctcacctattatggtttgtcttccgctgcatctacatggtggaaaatcaccatttaaggaccccattgaaactcatatatccagcctccatagaaaccccacatgcaagcgtccatcaagtggtaatcagagcacaagagctccaagtaggtgctccttatacctccaattaattttcttacttgccttctctgtcattgatagttcttaattgttctccatgtatctcctcacatgtcttgatctatatgttggtaacatgattctttataagttccaccgattaaactcgctatagaagttagatatgaatttctattg

SEQ ID NO: 201208 - DNA, 191 bp, Glycine max
ctaaagagattctttatatatataaaaagtatattcttgatgccaaatactatattttgaaactcggattatacacaggttcttgactgaaacttctaggttagtaaaacactctattatgaacttcttggttactcacttatccagtctacattgcatgttacctacaaatattattacccgtctccgca

SEQ ID NO: 201209 - DNA, 386 bp, Glycine max
tattcattcaatgtatatgctccgttgccgcgtaaaaatattctgcatttttttttgtgggatcagacatattgcgttaaactatgtttagtaacatcaaataatttttttatatcatgctacgaagtattcattaattttattcatcattatttttggttgatcattatttctaagaaaagatttttcttgttattttttttatttacaggacttaaatcataaatttttctcaaaggaattaaagccgtaccatttagatgaaaagtttgagataaatatattgccgtatgcgttaaatatttattcaagaaatactaataattatgtgctctgggttaataatctttacgtaccctaaaaagaatccactatttactttttta

SEQ ID NO: 201210 - DNA, 458 bp, Glycine max
gggagaagatgcttcaatggaggaaaagaaagagggagcaaagagagaggggggagcacgaaattgaaggaataaaagatgtatagaagtggaactttgaagtatgtctcacaagactctcattcatcaaagttacaacaagtgttacacatgcttctatttatagactaagtagcttccttgagaagctttcttgagaaaacttccttgagaagcttctttgagaaaacttccttgagaagctagagcttagctacacacacccctctcataactaagctcacctccttgagaagcttccttaagaagattcctaaagaagctagagcttatctacacatacctctctaatagctaagctcacctccgtgagatgagaagctagagcttagctacacacccgctatattagctaagctcacccccatgacaataaacatgaaaataatataaaaaaa

SEQ ID NO: 201211 - DNA, 474 bp, Glycine max
  unsure (1)..(474): unsure at all n locations
agcttcaggtngctcaattgctccaggttgttgcatggtatggcaaaggtctgtatggtggcagcagaggagcacaaaccacaaacccttgcgacaggtacagatttctgattcaaggccagctgggttaccaagttgaccaacgcatccagtttgccttcaagcttcttagtttcagatgatgcagatgggtttgtagctacctcatgcactcctctaatgactatggcatcatttctggcactaaactactgggagttggaggccatcttctcaattaaatttctggcttcagcaggagtcatgtctccaagggctccaccactggcagcatctatcatacttctcttcatattactgagtccttcatanaaatattggagaagaangtgttctgaaatctgatggtggggcaactgcacatagttcttaaattctccatactcatacagctctctcactgagttgcaatac

SEQ ID NO: 201212 - DNA, 387 bp, Glycine max
actttgacggactataccaagctctatgaaccagggacggaaaagatctatatatatgcttgctaagggtagagagaggaagactatagatttggatcaagtaaagtgtgtttaggatgaaaaacgcaaagtcttattgcatgaaaaagatatcaaggaaaggtggaaggcgtatttccacaacttatttaatgatggatatggatatgactctagcaatctatacacaagataagatgaccggaactataagtactatcgtcggattcagaaacaggaagtaaaggaagcgttgaatagaatgagtaacggttatgcggtggggccagacaacatacctattgaagtgtggaaaactcttggagatagatgtcttgagtggctcac

SEQ ID NO: 201213 - DNA, 135 bp, Glycine max
ttaatagtgtaaaaaagaaagaagttggctgaagaaaagaaaagtttgtgatataaatgtttaaatatatggaaaaatttaaacttgagagttaaataagagtatatgatatgtcaaaaatctgaaacgaaaaga

SEQ ID NO: 201214 - DNA, 316 bp, Glycine max
  unsure (1)..(316): unsure at all n locations
ttctaatgtcttggttgaatnggtatgaacatagntcttctctcttctatttgtatgtgtaaaataactcactccaacagaagaagataaaagagtgaaantcaccttttccttctcaatttgaaccccttttatcagccaaattttaataggaaagaaaacttgatcccatgcattgattcatgaatttattgtgttcaacttggtctcatacaggagttcaatgaatntgttgtggctcacatctcagatgaaactacatgagtctttagttggtttaagtacattcagcacagaattggaccaataaaaaaca

SEQ ID NO: 201215 - DNA, 426 bp, Glycine max
gacactatgatactcagcttactctcatgccttctcacgctgaccacacaggaatcaatttcgtcaataaatatgatagaaggggcactttctcgagccatttcgaaaaggtttgaaaccagcttttcactttcacccatccactttgaaacaatgtctgatgaagaaacactgatgaagaattcaaaagttaaaaatgcttgcaagaacatgtccacttatggacctacattcataacaataccaaagaccttttttaatagatatcaagcgtatctcaaattctgaatagaaacataattattgtcaagaaaaggcagagaaaaatggatgaagtggaagaaaattattatcatgcacatatcatcttcaaaaggtatgcaccatatatcataaatctagaaatttagtggaatggtttaaatc

SEQ ID NO: 201216 - DNA, 373 bp, Glycine max
  unsure (1)..(373): unsure at all n locations
agcttgactggcgagttgattttagccttattttcactntanntattcgcaatccagttaagaatgagaaatcccatagagaaaacgtccaattgattttttcgctctattttactaaaagatatttttttgattattatattattatgttacctcttttttgatttccaacgtagttacggcacgaccgaacggtcaaaattcattttaacagaaattaacggatgatacaattcaaacgatcgtgggaaatttatgttatttttagattaggcgagaaatgacttaaatatatgactaaagcacgtcaaaagggggtatgtgaagttaatgaaaaccagaataatattacatgaaacataatgtggaccac

SEQ ID NO: 201217 - DNA, 449 bp, Glycine max
tattctaagtcgcgattgattagatggatattcccgcttcatgaatttgatttggtcatcaaggaaaaaaaaggatctgaaaatgtggtatctgatcacctatccagattggtgaatgaggatgtcacctcacaggaagcttaaataagagaaaagttcccagacgaatcttttgtctttattgaagggagaccctattttgctgacatggctaattttaatgcagccgatgtcattcctaaagacctcaatgggcaatagagaaaaagatttttctctgatgcgcaacattatgtgtgggatgaccctcacttgttcaatatgggtgcatataatctccttacgagatgtgtgacgagtgatgatgcatatatcagccaatgtcttaccatcagatttttttggcaacattttcaagacgtcatcatcatgtctataatgtgacaatg

SEQ ID NO: 201218 - DNA, 268 bp, Glycine max
  unsure (1)..(268): unsure at all n locations
agctgggatgtatataatctactagagggcttggaactcattanncnncggcatctcggaagcagagactatgaaagaaaaagtaacatatgtagatgaaaaatattctttttcaaatgaataaaccataacaggcaccaggaaacttaaatatcctttacattatatatatagagctctaaaataaaatagataaaaaagagaagttgctgaccttgggaatggagccaatgttgcgaactcctttgtttctccaacctagtttaag

SEQ ID NO: 201219 - DNA, 344 bp, Glycine max
aatatggttatgatattttagaatatgacttacaagagatcattctattgtggcaaatgaaagctatcaaccttcacgaatgaatagtgtgcctaatatcaaaaagaatactatttctatttgctattttgtaaatatggaaaaatgattttaacttgttctggtattggcatttgtattgcattaatattattttttctacctactataaaaaacgcttttcacattgaatgatttggatatttaacatcagctgtgaatcgatattgaaacgatcatcattaaaagtagctcaaccgatgttgaaattcactatatacattggtttttcccattaccggcgt

SEQ ID NO: 201220 - DNA, 502 bp, Glycine max
  unsure (1)..(502): unsure at all n locations
tctgagtcacctgaggcatgcaagcttctaatatgaagaacttacagaatttcagtattngnatnngacgaagcataaaaaccttatgattcaaatatagatcttaaacttctggcgaaaaacagaattgaaatgagtcaaaagtagtggaaatttctccttatataaaaaaaactaatcacaattattaaaggcaacccaaacttaagaattgaaaaatcctaatcccaagtaggcaaataagtcctaatccaacatagggataagatatctcaagactcaaacttctatatcttcaatanaaaatcctaatatccaaattacgataatccaagtgattgagttgattacttcaagttcagactcagttgacattaaatataacacgaacaataaaaataaaatgctagaaatttaagagaattcttataaaatcaaaactggaaaaggaantgttatatgttgaccggaaatcatcattctttaacttaccaaatcaaca

SEQ ID NO: 201221 - DNA, 405 bp, Glycine max
tatggatcttaataaaatatcaataattaccggaaacacattacgttagatgatcaagaggggttgtgataaaatctctggatccatgataagcagcaaaattgatgagtatgagaaactattggttttgtgtttttccttaaccaaatcactattttccttttggaaccttatgattctcgtcagatggagcgaaaaaaatataatttctgaatttggtgtattatggacaacaactttgctttaagtgttaacatgttttcgcttatcaagctcatattaatttctgatgatagtccattatgctcaccaaattagatcacttttacttgtcccataaatgtaaataactaatatatatgataatataatatgtacccacactattattaattatgaatataa

SEQ ID NO: 201222 - DNA, 275 bp, Glycine max
aaagaagagaagggaagttataaaattaaaaaagataaaaagaaaaggaggataaatggaaggaagggggaggagaaaaaaagggaaggaggaaaggaatgggagaagggaagataagaggaaggaaggaggagaaggggagaggaaggggggaggaggaggaaaatgggtagaaggaaggaaggagaagaaggggggatggaaggaaagtgagaaagatggaaggaggaagagaagaaaatagggtgggaaggtagataaagggagaagaggaa

SEQ ID NO: 201223 - DNA, 425 bp, Glycine max
  unsure (1)..(425): unsure at all n locations
atgcaagctgtaacccatggaagctcctaatatctcctacacttttggggtgggccaattctggatggacttgantttctcaaggtccacttggaccccatttctaccaactataaatcttaagaaaactatattatctacacaaaaggtacacttctctatattggcgtagagagtgtttttcctaagaactgaaagaacttgtcttggatgtcctaagtgctcatttaggctcttactgtacactaaaatatcatcaaattaaaaaactacaaatctacctataaaatcccttaagacatgatgcataagcctcataaaggtgctgggtgcattagtgagcccaaaaggcatcactagccattcatacaaaccaaactttttctgaaagcggtntccactcatcaccctctntcatctgattg

SEQ ID NO: 201224 - DNA, 456 bp, Glycine max
cgatatggcaatccaaacacaccttacagttgagtatattgatcccgtgctcataagccaaatgataatagttctataacacctttaccagaaatgctcttcgtgggttgaagtgtatttctggtgataccaatgttagtttctttcatttaacaatgtaatgataaccaagtagacacatgctacaaaaagatataacttatattttcttgtgaagctgaagactaaataatgacccataaacagaattaccaatttaagatattaataaaacataatagcatcaatgtttaaaaatcttcaaattgtagctgccaagaagcaaattagtttaagatattaataaaacaaaattaaaaagaaaatatgtaagattatacagtatatacttgaggaaaaaatatattatatgctgtcactgtcgtttacaaagtttgtgaatatatagatgaatac

SEQ ID NO: 201225 - DNA, 261 bp, Glycine max
taagatgctctctggggtacaagaagtgcctaaggaagtgcatgaacaagtttgtttctcgtgaagatcatcatcatcatcatgcagtgaaacacgtgccatgctccatggtgcctgtgtcagtgccaccaccaccaccaccccctgagattagttggtatcaccaagggaaattgaaagggtcacttgtgaggaagcaacaagggagtgaggaacttatggaagaagaaaaagaaaagcctttacctgtgccacccatgt

SEQ ID NO: 201226 - DNA, 365 bp, Glycine max
actaactttagacttaacaactggctgctagctgatatgacttcgtcgtcgccattcacgctttaatctgtgtatttaaagccttttatcaacaatgagaagtatgaagaaagtattatcttaatatttatcactatgttgctttttcactggccgatggtgaaaacaaatgtattagcaattaaacatgattggtttctagcgagtcaattctacacttttgttttatatatgtatctagctgttaactacatagcctggttctgcacttgttattggaaaataactcacctacctaaatacagttttctaacattatatgacatgtaccttcgtcattctatgttgacacttgacactcttgc

SEQ ID NO: 201227 - DNA, 320 bp, Glycine max
tgacttaaccctttatggtccagaagtatatcaaggtaccatctcctagtctccatgaagaattatcagagactaaatcaatctagggacaaatgcaacactagattaatgatctgacataagaagaagaaggcttacttgaatgaaagtgtctagcaaaaagtaatcgccccaagaaatcttattatatatgatgtttgaacacaactctagcatggatgccttgtaatggtcctcaagaaagtaagcccaactacctctttcaagggcaagcacaacttattttaggctacaatgactagcttcttatgatagatatc

SEQ ID NO: 201228 - DNA, 312 bp, Glycine max
  unsure (1)..(312): unsure at all n locations
actgagatgaagaagtgtagaagggtgaaacttcctgcttttttcgttgaccacagagtggtacctggagatatgtcgcgggggtcatgagaccttggggacgtcatgtggggtgctattgcccaaaaccaagcttgaccaatcccgacccaacccgggcatattcaatcagtgagaacctatgatgtacctaaacaagcgagctcttggcagtcaacagattaaagaaactaataccgcatatgcaggatgcttgtgtggtggctggccanctgtgaactttgattgatatgtgggttatggcctctggta

SEQ ID NO: 201229 - DNA, 419 bp, Glycine max
gtcttgagaaaacttccttgagaaacttctgtgagaaacttccttgagaagctagagcttatctacacacacccctctcataactaagctcacctccttgagaagcttccttgagaaaattcctaaagaagctagagcttagctacacacacctctctaatagctaagctcacctccttgagatgagaagctagagcttagctacacaccccctataatagctaagctcacccccatgacaaaatacatgaaaatacaaaaaagtccctactacaaagactactcaaaatgcctcgaaatacaaggctgaaaccctatactactagaatggccgaaatacaaggcctaaacaaaggtgaaatctattctaatatttacaaagataagcaggctcatacttagcccatgggctcgaaatc

SEQ ID NO: 201230 - DNA, 254 bp, Glycine max
aatgtaactccttcaatattttcaagtattctaaagttataacttttccaatagaattgaagttcttctgaaggtgataactcttctcaatggctcttgactagactagatgagtctataaaagcaaggctttgatatgcattttagacattcattctttagacaaaaaactcttgtcaattgatgtctgaatctctgtgaacttcttcttcttcctctccacaagctttccacagttttctggttttcaaacc

SEQ ID NO: 201231 - DNA, 327 bp, Glycine max
attaatataactgtcaaatacatgagatgattattcccgctgtcgacgaccactatgttttaataatattgtcccactgttaatactaactttccaaatgtttgccttcacaggaaatggccccgataaagcttgcctcaatgatgttcaggaatgacaatgcatccgaatgaactagttccgcaccggagtatgacattcaccgtcttatgagcgctgttcaccatcagcgcttctaggccatcaagggatggtcgtttctccgggaacgaggcgttcatctcatggacgactattatactgatttccaggaggaaatatggcgcc

SEQ ID NO: 201232 - DNA, 398 bp, Glycine max
  unsure (1)..(398): unsure at all n locations
gcttaccacaaagagttcttggttttaagcnananaggannctccatggataacaatattgagagagagagtgatgttatatccattggagcttgtttgcctaagatcttttttatcaatggtattcctttgctcttggaagattaatggccgtgaaatggagaaggatgagagataggagatgccactttcaggagatgatgagtctataataagctcaccaccataggaggccatggataagagcttggatgaagatggatatgaatggagggagaggaatataatagctcgaaattctgtgctcataaagagctctgtaatctgaagtttattttcaaatgaccaagctgactaatgccacacatagtcttatttatgcctaatgtccacaaatt

SEQ ID NO: 201233 - DNA, 349 bp, Glycine max
  unsure (1)..(349): unsure at all n locations
tctttgagaatacttncttgagatgctagagctagcttctcacacccatcttaaaacttagctcaccttcttgagaagcttacttgtaaagctagagcttagctacacacccatgtaaaatactagctcaccttcttgactaaatacatgaatatacaaaataaaaagtgcctactacaaaaactactcaaaatgccctgaaatacaatgctgtaaccctatactactagaatggccaatatacaaggccgcaaagaaggaaaaaatctattctaatatttacaaagaagagtggacccaaccttgacccatgggctcaaaaatctaccctaaagttcatgataaccct

SEQ ID NO: 201234 - DNA, 389 bp, Glycine max
  unsure (1)..(389): unsure at all n locations
atcatacagagagcacctcagttgcccgacacaatctaatcaattatgaaatgcattaattgatgatctcgatcctcagcgactttcttctactggaaatcggattaggtaactccgtttcagaacatgataatcaattaattngataaaacttgtcaatatttcaagagaaatgaagtttaatgcttgtcttaacactttataattgattactaaacttagcaattgattatacagtgttaaaccaattgtttctaagaaacttcaatacatttatctctctcatattgattaccattgggcatggataataaaactaagtctaatacgtctaacatgtctagtctaataacatataatacacatgccacatctttacaaacactgtt

SEQ ID NO: 201235 - DNA, 293 bp, Glycine max
ttttggtaccccaaatgctttgagtatgcatgtatgtaaatatatccaaagaaatgcatgtgatgtatgtatcaaatacaccttggaagtacatataaataatctatgttacggaggtgccttgattgtacatgggtgcacttattctaattgtaaaaatgtcctgtgcaagtgaacattcgtatagaagtatgtgcataagtttgctctaaatttacattgatgtttgtgtttattggaagagggtgtattccatttttgtttttaaaagaacattgtttggtaaaactaac

SEQ ID NO: 201236 - DNA, 360 bp, Glycine max
  unsure (1)..(360): unsure at all n locations
agctngcttctacaatctctccctattttatgatgacaaccctaaatcaaaaaacacatacacattctttttcctagtcaatcactcacttaattctccctattctccccctttatntttgagtttaagcttcacttgaaattaagttatttaattatatgagttcttgatttaatccctattatctctccccctttggcatcaacaaaaagccaaagtgcgtaaagcatacatgatttaaaaacatacacatagcatccattgtaaatcaatcataaaagattctaaactaatcatggagcangacatgaataaacccaatcaaaatataaaccacataggcatatacataattcataa

SEQ ID NO: 201237 - DNA, 430 bp, Glycine max
tttcaattcattctatgtacccgtggtgtccacatttggtttcatgtatttttattctcattttcatttactttttatacccccttttgacgtgcttaagccattttatttaagtcatttctcggttaacctaaaaataaaataaatttccaccgatcatttgaattgtattatccgttaactttggttgaaatgaattccgaccgatcggtcgtgccgcaaccacgttggaaatcaaaaaagaggtaaataataacatgataataataaaaataccttttagtgaaataaagcgaaaaatcaatcggacgttttctctttgggatttctcattcttgattgaattgattaaataactaaagtgaaactaaggctaatatcgactcgcctagtcaagctcgtccacaaaaataggattttgaaaagttat

SEQ ID NO: 201238 - DNA, 347 bp, Glycine max
  unsure (1)..(347): unsure at all n locations
agctngaaagctcanaagaagactcaaagtttcattggttggtaatgcaatgaagaagtcagcatgctcactggatgaagagaaaaaattcaagacatgatatgtaatcaacaaataaaggataagaagaatgttgcagacatgaacatctgcacaatgaacatgacatgaagaacaacattgtttcaacacttagaaaggatnttcatcaacaagatgagtntcatttgggcatngtatctcgagtttcaaaaatgcaattgatctattcttgatggctatggaaattntgcataaagagctttaaatntcatgaacaagttgtggtctaaatcaacttggatcat

SEQ ID NO: 201239 - DNA, 423 bp, Glycine max
tcatgatgatgaatcaagctgattcttatgatttgatgattacaaaatatgatgacaaaaagctcaagagaatgatttcaagattgagtcaacaattcaagaatcaagagaagtttgatttcaagattcaagagaagatgaatccaaaattcaagagaagaaaccaagaagacttcacaagggaagtattgaaaagatttttcaaaaaacaaacatagcacaattttgtttttcaaaagagtttttttttttcaaattttctaagttaccagagtttttactctctggtaattgattaccagtttcctgtaatcgattactagtgacaaagtttgatttcaaaagctgttaactgaatttgcaacgttccaattgatttcaaaatggtgtaatcgattacaagaatttgataatcgattacca

SEQ ID NO: 201240 - DNA, 420 bp, Glycine max
  unsure (1)..(420): unsure at all n locations
aataatatattattattattaatattataaaataaataagagaagtgtactgattcgactgaaataaaaanattataaaaaaaaaatataagtaaatttgagtaacttgtaaaaaataaaatattttttatttttaaaaaattgtaatgatattaattatattaatgtattaattaaattaaaattaatatttttgataaataatataagtataatgttattaatatattaaaatattaatagaatataagttatatataattataataatagaatgattaaattaatataataaaagaataatattatattttgtaataaaatttatttaatttaataattgttattattgattaaatataattaattttaagaatagtaaaaataaaattaaataaataattaataaatataaaatat

SEQ ID NO: 201241 - DNA, 253 bp, Glycine max
  unsure (1)..(253): unsure at all n locations
ctaaaatgaaaactgcaagtttacaatgactaaaaatgaaaaaaaaaacttattgaacaaaaaaaacacaaacttaagtgaactaaaattgaacaaaaagttttcaaaaatcaaaattaaaaaaaatgcaaacttacatacgaaaaanataattaagccattttttaatatgctgtttttcatatctttcttatattttcttatgaaaaagtttaggcaatttggtaatatcttctattctcaactttttttt

SEQ ID NO: 201242 - DNA, 398 bp, Glycine max
aaatctaagctgtaatttggaagcagttaaaactcttgtaaagctttatgttgtttctacttcaaaaccccttgaactacttcacattgatttatttggtccctctagaactatgagtttaggtggaaattactatggcttggtaactgtggatgattactcaaggtttacttggaccttgtttttgaaaaccaaaaatgaagcttttgatgcttttcgcaaacttgccgaggtgattcaaaatgaaaaaggtctcaacattgtttcagttagaagtgatcatggaggtgaatttcaaaatgagtcttttgaaaacttttgtgaagaaaatggaattcaccataatgtctcagccccaagaacacctcagcaaaatggtgttgtggagaggaaaaata

SEQ ID NO: 201243 - DNA, 330 bp, Glycine max
  unsure (1)..(330): unsure at all n locations
gcaagcttctctccacaattacattncatatattgactctcttactaggactanancanaacaaaaggcaagcattgagtcaccaactccaaaatatacttgttaagtacatgtacatccaaaaacaaggaaataaaatccttgtatggtaggaaaatacttcaagacctcactattctttgtaactaaatgccagcatgaggtaaagaaggcatgtgcactgtctaaaaccattgttatgcctctactcaaaagcttaagcttttataagagttggttctaaacaatggttattacacataaacaatcaatatacacaacatttcttat

SEQ ID NO: 201244 - DNA, 365 bp, Glycine max
ttataagaccaatctatcatcaacttaggtatttattcgtgagtacagatgattaaacaaccaacttgatatgtttacgggtaaaaagcatacgaaggtgagtatgaagaaataaagcactctaatgaacttttaacaaagagacataaatccaaagttcagagaattacgttacaacacatgtgaataacaacagcaacacataccaaattctttgcatacgatatgaacctttatccttgatgttaattccccatccgcagcatatatgaatcacatgtgccatgccaaatgagataaaccatatgacagcatgggtttaaccatccacaccagtgtaatcaactgactgaacatataatagt

SEQ ID NO: 201245 - DNA, 64 bp, Glycine max
  unsure (1)..(64): unsure at all n locations
ggcccccccccaccggggnncagaaaanaaaaatgtagaattaatggacatatgtaataaacaa

SEQ ID NO: 201246 - DNA, 347 bp, Glycine max
aaaaaaagggaagggtaaatgaatagaaaaaaaaaggagggaagaggaaagagggaaagggagaaaaaaaatatatgagtgagaagggtagagaagaaaggaagaagatggagaagtatagagaagggaggagagagatggaaagtgaaaagagaggaagaaagtgaatgggagggagaaggaaaaggggagagaaaggaggaatgtgaggggagaaggggagggtaaagaagggatagaaaggaaaggagaggaaagggtgatgggagggaagaaaaagaaatggaatgagggagaggaaaagtggataaaaaaggaggagaagagggaaggggagggaaaaaagg

SEQ ID NO: 201247 - DNA, 287 bp, Glycine max
aagaaagaaaggaaaaaaaaaaaaaattagaagtccattttaaaagaaagaagagaaaaaaaagaagaataaaataaagggatagaaagaaaaaaagatgagaaagagaagaaagaaagaaaaggaaaagagatgaaaaaaaaaaaaaaataggagatagtaagaaaagtaggaaagagaaaaaaagagagaaagaggaggaagaatagtagaaagaaggtagaagaagaaaagaaggagagaaggaagaaagagaagaaggaaagaaacggataaaagaatggaaa

SEQ ID NO: 201248 - DNA, 378 bp, Glycine max
  unsure (1)..(378): unsure at all n locations
aatattctggttcaganaaagttgaaaatattcattttaaaaatattttaaaaaaaatattcttattaaatttttttctttttaagacaaaatagttttttaaaaacataaaacaaacacgcccaaaattntcttgtcaaaactgccttgtccttccggttcactcgctttattgtataattaattgaaaaaaaaagagttacatagggataatataaaatatatatatatatatataataacttattatatatgagaaatatgtggagtttaanataattcaaataataattataagtaagatataatataaaattatcttatatttatatataaacactaaatgttcattattttacatcattttttatccctcat

SEQ ID NO: 201249 - DNA, 454 bp, Glycine max
  unsure (1)..(454): unsure at all n locations
tgtacccaaagaacccataanactacctattgtggaaaatacaatcgcctacatacatgatgagctaatggtatggcatggttatggtacgagaaaaataaaaataaagtttctgtccttaacgtaaactatgtgaagccccctcctagtcccacttaaagaatccgaatgaagccatacacgtaggtacaaaatgaaatattaatgtacaaatgcactcgctgcgccaatctattgtcagtgtcactcacgtagccaccttntatatatactaccatcttctcttttgtattttttgattcgcaagcatctgatgacaatcaatgtgacattatatccctatggctatgggaactcaagtatttatctctttcaaatattagacatgtattatatgtgaaagagagaaacataactttatagaatagataatttcttgttactttatatggat

SEQ ID NO: 201250 - DNA, 338 bp, Glycine max
  unsure (1)..(338): unsure at all n locations
gctttaactgagttacaatgtccaatttatttcaaattggtgtaatcgatngcaatgtttggtaatcgattaccactgtgtttgaacgttgaaattcaaattcaaatgtgaagagtcacatcctttcacaaaaatgctgtgtgtaaccgatacaaaaatttggtaatcgattaccagtgataagtgttgaacacaaatcaaaagatgtaactcttccaatggctttcaagtttttctaaagggtacaactcttctaatggttttttgacccacatgaagagtctataaggcaagtccttaacttgcatttcaagacataattacaatcttacatcttt

SEQ ID NO: 201251 - DNA, 374 bp, Glycine max
tgtgcaaaccctcaattcaatggctcttctgggcttgaaaggaggaatttacaatgaggaaatttggagcaaactctcacctcacacaagtctataacatcaatctaaacttgctcaaactggatttacacctaaatttccaccgaatcaaaatttgactcctctacacccaattgtgccctacaaatggctcttggttcaatttggtcatttgattttctctctagactatcctaacctttctcacatgtcctaaatgacatttcaagctattattaactcactttaacctacatttaccacagaattcagacttatcctgtcaactctcaaaatatcactctttttgcactcataacatcacattctcactt

SEQ ID NO: 201252 - DNA, 297 bp, Glycine max
gaattcatattgtaatagctgttgtaaatagtttggccacggaaacgatacatcctctggtaatcgattaccacagagtaaatttgttgaaaaaaaaacttttcacttaaatttctaggccaaactttttgctacttcaatttgaaactcccttcctatttaatatatcctttctaagacactagagactgtctttgatcatccatctttgaatatctttattttctttgccgtgaataaagctatgagacgcatgtgaacctttggcatcatcaaacattcactcgacatttgtta

SEQ ID NO: 201253 - DNA, 230 bp, Glycine max
ttaacaaaaagctcatagatcaagaacaactcaagtgaatcaaagaacctctcaagtgaatccagaacaacgtcaagcagtccagaatcaagaagacatcaagactcaagaagaaagtctacactctagaactaagaatcaagattcaagattcaagatctcaagaatcaacatcaagattcaagactcaagattcaagaatcaagatcaagattcaagactccagattc

SEQ ID NO: 201254 - DNA, 296 bp, Glycine max
tgctgcccagactttgttaaccgttggatcgtctcaaaatatggtctggagctttctagaacacttatccaagatctgaccattgggatcttcttgtagacgactggagtgcgcgcgaagcttccgtatccaagagccttaatcacttatgcgtgttgagccttgtaatcctatttgctttggaaaaacgtcaattcttctccttacttctgccaatccatttccaacattccaagctctttctccattgcccactgtcaccatgtgccaccacaataccgcattgttctccattg

SEQ ID NO: 201255 - DNA, 383 bp, Glycine max
  unsure (1)..(383): unsure at all n locations
ccttaatatcaattgtaacatctaacatggttgtagtaagcttgaaggtattaagntctttacgccgaattaacagaaaataatgcttgtatgtaaacaagtgactttgagaattaatatgtttacctgattagggaaataagccgccttcatccgtttgttaacttaatctattaatgacattaatgtggtattaataggcccatattaaatttttattctcatgaataccccccggctgtgtctcagatatgcgaagaaaaaataacttaagtgaatatttgatcatactaataacctgtagtgctctgttagtgttacaaggaggaatattaaatttctctcccacaatctatagcagtgctatttaaatgcctcctatt

SEQ ID NO: 201256 - DNA, 395 bp, Glycine max
  unsure (1)..(395): unsure at all n locations
gatccttaagtcacctgcggctgcagcttacctaacaaaatttcatncctctgtaatcacaagnnncatatctttttatccgcgagaatcgaaaaaaatatcagtagatttataacacctcattcactcttattcaatgaagggaattacaccttcttgacaatcacacattccatataagtgctctccaccatgctttaacgttcctcccttgcaagtcgagagaattttgccaaaaatgatccttcaatgaatttgggagggcaatatggatttcgatacatattatttccatttaatactctctttgtcatataattgtaaccatttccatttattctcataatttaaatatgtaattcaataatctttgagtgcgtgtgtttttaaatgat

SEQ ID NO: 201257 - DNA, 431 bp, Glycine max
tcatgatgaatcaagaatgactcagagaattcttctgcatgacaaacagctcacagatcaagaacaattcatgattacaaagatgatgatctcaagaatcaaagaatgatttcaagattgaatcaagaacacttctaggttcaagaggaaatttgattttaagaattaagtttcaagattcaagcttccaagaattaagatcaagattcattcaagaatcaagagaagacttaatcaagataagtattaaaaagttgttttcataaactgagtagcacatgatattttctcataaccttttaccacagagtttttactctctggtaatcgattaccagattattgtaatcgattaccagtagcaaaataattgtcaaaaagcgttcaactgaattgacaatgttccaatggatttcaatatgttctaatcg

SEQ ID NO: 201258 - DNA, 279 bp, Glycine max
  unsure (1)..(279): unsure at all n locations
catactcaagngctatggcagcctcatgtatgccatggtctgcaccaaacctgaacttgcttatgtctgtagcatggttaataggntcttaaaccaacctcagaaggaacattggaaggctgtgaaaaaaattttcagatatcttaaagggacttcagatgtaggtttgatctatggatctcacccagattgctgcctcactggctattctgatgcagatcttgctgctgatcttgtaagaaaaggtattaacagggttgcttacacccttgtggctgc

SEQ ID NO: 201259 - DNA, 437 bp, Glycine max
  unsure (1)..(437): unsure at all n locations
cggacacatagaaactaagcttatacaattaatacagaacctatatcctaatgcacatcctatcatagtngtgngatcccgtgtactctatcatgaggatcttcatagtcatccacatatccatctgctcccccgaacacaaaattcaagatcatcacaggatccaaacacaaacagcaaatcgagagtgagttatcactttcctaacttctaaagagatacaaggacacatatagctcagctgatgcaattcacttatgcaatgtcacattatgtgatgactgtgtgattcaaaatgtactatgtaattatcgatgaaaccttgtaatatttgattcacattaagaagattacacactccgacatgacatagtacacttatattgctgtatgcattataagcgtttgcgcagtatgctatactatagcaattgatt

SEQ ID NO: 201260 - DNA, 343 bp, Glycine max
  unsure (1)..(343): unsure at all n locations
agctagtgcatccaataccctgatgaggttgttcatatgnncnnaaacggactgatccatttgcttccaaagtttcatggccatgcaggtgaagacccacacaagcatttgaaagaactccatattgtctgctccaccatgaaaccaccagatgtccaggaggatcacatatttctgaaggcctttcctcattctttagagggagtggcaaaggactggctatattaccttgctccaaggtccatcactagctgggatgacctcaagaaagtgttcttagaaaaaaatttccctgcttccaggaccacgaccatcatataagatatttaggaatatggaactc

SEQ ID NO: 201261 - DNA, 412 bp, Glycine max
cttatgaatccatcataattctccctatatatcaccatatcaaacttttaaaaaaagtttcaaaacatttttttttaaatttggaaactttcttgttatcatgacacatccttgacatgatgagcacaatgtataatccgaaatcaaaacctaattcagataaactaataaatcaaaagcatcattattaaaatacccaaatacaaagatcacatcatgattgaaaaaaaaaacgttaatcctttcttaatactttgattccttataatcaaacaacgagggcttactctaataccaacttgtggaatatctttaatccttatttcataattctgtattctttataaggaagccaagattcaaaagtatacaacctataacaatttaaaaaggtcctgggatctacatcatg

SEQ ID NO: 201262 - DNA, 397 bp, Glycine max
cagcagccattatatcattatttgctacagcactgctcatatctaataggatcttaacctttacacaacagagtatttgaccggttgagtaccaccagaatagtgcaaagcctgatttgtgatgaattccaaaacacgcttcaagtatgctttaactgacttaacggaatgctcattatgaccttcaatgaacaagtagatgttgcgtccccaggtcctgggattttgccaggtgggaaatactgtcccctagtggtaatggcagctccactccattcagatatagggcccaaagattacttgtgtgtaaccttccagcgagcattctgggtgaaatcatttatttacaactcagcactataatgctatggtaatgcttctgatcagattttatata

SEQ ID NO: 201263 - DNA, 458 bp, Glycine max
  unsure (1)..(458): unsure at all n locations
tagaaggcaccagcangcatgcaagcttcttcacatagaccgtttttgcttttctctttttatgctnaaaaacaacacattaggcataggcaaaagatcaataggagttagtgggttaaaaccataaacaacttcaaaaggagaacaattagtggtgctatgaacagctctattgtaagcaaattcaacatggggtaaacaagcttcccaagtttttaagttcttcctcaaaactgtcctaagcaatagtcccaaagtcctattaacaacttccgtttgcccatcggtttgtgggtgacaagtggttgaaaataacaatttagtgcccaacttgctccacanagttttccaatattgacttatgaacttagagtccctatcactaacaatgctccttggcaaaccatggagtctcacaatctccttgataaacatatcagccacatgggaagcatcat

SEQ ID NO: 201264 - DNA, 391 bp, Glycine max
cttagatactaagcttcgtttaatttcagcgtctcaatatattacggacttcttcagacatccgactaaaaagttattgtcgtttgaattagctcggaggttcaaaattcaatgtcgaacgtctcaatatatatctggactcaatcttacatccgagcaaaaagttattgtcgtgtgaattatctcagagcctcaaaattcaatatcgatcgtctcgatatattaccggtgctaatcaaacatctgaataaaaaaagtattgtcgtgtgaatttgctgaaagcttcaactttcaatttcaagcgtctcgatttattacaggactcaatcctacatcccagtaataaagttatcgtcgtttgaatgtggtcagagacttaacattcaattta

SEQ ID NO: 201265 - DNA, 303 bp, Glycine max
ctttgagcacaatgaggtcctgtaatagtgattttccaccatggagatgcagcggaagacaaaggagaagaggtgagaggaggcgccatccattatggaataagccatggaagaaggagcttcaccaccaatatgagccttggataagaagcttggaaggatgcttctatggaagaaaaagaaagagggagagaaagagagaggggggagcccgcaattgaaggaataaaagaaggagagaagtggaactttgaagtatgtctcacaagactctcattcattaaagttacaacaagtggtaca

SEQ ID NO: 201266 - DNA, 415 bp, Glycine max
  unsure (1)..(415): unsure at all n locations
tactaagcttaattgacccttgaaatggaagaatcaccaaagggtttttctgacanaatagaagatatntttcttatcttttcagggactactcacatgctctatttggagtttagtagtgtcctctagaccctatataagacagatagatcaagtgagcacaaaatccaaaaattagctataattctcaattaagctcaatcatttgcctaagaccaaaactgagttaagatgataaaataaggaccaaagagatgtcaattgagctaagaagattagaaaaatactaaactacaaatgctcaatcaattatctcttattggtttacctcttcaccttcttccataaacttttgcatctaaataatcccactactgctcttcttctaaagttgattgtctacgacttctagatc

SEQ ID NO: 201267 - DNA, 173 bp, Glycine max
taaaaaagcaatggatggatgctttttgttgtagcctcattattaggagcttaaattctttcttttaagatccctatgcttgtctaaaatttcctgtttgcacaagacaataaatgcagacaacattatgacttgaataggaaaaaatcatgggatactaatttggctgacat

SEQ ID NO: 201268 - DNA, 431 bp, Glycine max
tctatacttattattatgccccgccgcctctttttcttatacaaaatagtgtactgcgatagtgttgcatgttcctcctatgaaactataaatttatcatcgtcggttacacacaaatatggttttggtgagcatgaagtgactgctatgctaggatttattttctcacttacctgtgtctaaatgcaatctgcactcaaccatagatatgacaatgggacacaaatcacggtatatgagaaattgattatacaagctattcgaatgggcaatcaactggtgatcatgccatacacacacatatttttacctgatgttggaaagagtaataaacggattctgttatacaaggcatattgatggtgtcatgttctactccccaactgacttgattaccaaatccaggttatggtctgaaccattatatcaca

SEQ ID NO: 201269 - DNA, 355 bp, Glycine max
  unsure (1)..(355): unsure at all n locations
tctatattctacttactacttaaatggccccaaagttacagatagataaacaaaacgacacagctttcctgcattttcagttgcttcaaatcagggcaccgacaaagaaccaaaatctactcattgtcattacctgccgctttagaagaaagttgataccaaacgccaaatccctaattggccacttcccaagtgtctccgaataagtgaacctgagagtttctaacaatgtagaaattgtctccaaccatgtngcaggggcttggattaaccgatgagaaacacagccaatacctaatggcgtatcagctggcgaatcactcccattntcttcaccatcttcatcaattacatc

SEQ ID NO: 201270 - DNA, 352 bp, Glycine max
ttggactcatacctcaagtttcatgacttaaaagacaattaggaatcctaaaacttaataattaaaattaagtttaacattgaacaatgaaagaaagtttgaatttcacttaataatagagaaattaataagtattttagtcatccaataatttcttagagaaattaagaattcttgcttagagaaattaataacaccttatgtaacagtcgtaactttcaataagttattaagaaattaataaattaataaataagttaaaaaaaataattattaggtcataaatgttcactatataagtcaaatgttaatctagagcagcttgttagaaaacacatttcctttcttcttt

SEQ ID NO: 201271 - DNA, 260 bp, Glycine max
  unsure (1)..(260): unsure at all n locations
catggcttattccctaaggatggcgcctactctcacctcttttcctttgttttccgctgcatctccatggtggaaagtcaccattaaaggacctcattgaagctcaaagatccagcgtccataaaagcttcacangcaagcttccatcaacatcgctgcgctaagcccaacatcttcactgtaagttgcaccttgagcagtgggcttagagtggatgatgcgctaagcgccccttcctctatgtgaaaatatattatagc

SEQ ID NO: 201272 - DNA, 368 bp, Glycine max
gctgtgggttcttgttgtatgggacattatagccttctcggtgtattcccagcttttaaataatagctggtagcttgcagataatgttagagataaactatagcttatagataaaagctagtagataattgtatcttgtagataatgtgtgactttgtagataattagcttcctgcccattgataaagagattcaaatttatttaaacatcaataggttagagatatcctatcagttaaggagcccaacttctaaaggttgagtgtctatgctcctattctatggctgatgtggaaggttgacatatgtcttggggtgccatgtaaagtgtcacatgtattttgtggaccctggacaatacattagtg

SEQ ID NO: 201273 - DNA, 334 bp, Glycine max
  unsure (1)..(334): unsure at all n locations
tagcacgagctgcactgtcattgcactagccaattttcacattgtcttttttnttacnagctacatcaagacacgagtgttggttccacttattcgtgaacatgtttaagatgaatgtgtgtatttagggcatagtcaacttaccaacgccattgtgatttcaaaacaaatataaaataatccttgctaatgttacatttactctcagaacaagttcattacggctcttctaggacaaagatgatgattagaaccttatgaatcatatggcattaacattagagcacctttactttatagcattattgctttaccactcttcacccgacagcca

SEQ ID NO: 201274 - DNA, 404 bp, Glycine max
tatcaatagttatattaaaatcgtccgggttccatttataactttcacgtatcaatttcgcttggcatttgcttgtatattgatgtaagttgcttttatgctttgtgcaccgtgctttgcatatgcacgggagctactctagtttattaaaaaagagactattcaatataagttatgtacatgactttgttattttctctccacgctgaatactaatcctctctctactctttcactcctgctaataagcaatatttattacacgcatataggagactatgtaatatgttacgtacacatgactactttttgttttccacccgtaaaagcaggcttaattatgttcttccaatattgaattacgatgttttgtttgagcacccattatatctgctagctgtgat

SEQ ID NO: 201275 - DNA, 397 bp, Glycine max
  unsure (1)..(397): unsure at all n locations
tataaactgtgggaanngaaaaatgcgatatacataagttgactcaaatcgtaaacnacacttcacttacatggacgtgtatttatcatataacatactcatatacagatgtgtatgacatttattatattgcgaacacccacatctgatacttgtgaatatcaagatgaatgagtactttaaaatttattttctttataatcttgaatcctcaaatataattatgtatacttaccaaatttatgtgtgtttttaactacaacttaattgacaaattgtatataatatccccaaacataactttctggtacaacttggggttttgagcatcgatcatatgatcaaagggctcaaatgtcacatatgttgtgggcagaaaaataagcataagatatac

SEQ ID NO: 201276 - DNA, 358 bp, Glycine max
  unsure (1)..(358): unsure at all n locations
agctngtcattctccatggtgagaagcgctctgcgagctcttcccggagaananaatcgacctcgcagtcgccgcgagcgcgcccgaagttcaagccagtacccaatattcctatcagcctaaattttatntttgggaataattaactaatgtggtttttttttcagcctaatcttttttaccagagtaaaaaacctctcagagatgttgacacgtagagtcaatgccattgtacttaatggtcaatgacgtccgagactaacattgtaattttntataaaataaaagacttaatttataaattaaaatcggaattaaaaagtataactttacctaataattaatcatgaaaaagtta

SEQ ID NO: 201277 - DNA, 411 bp, Glycine max
  unsure (1)..(411): unsure at all n locations
aacacagaanttgagatgaaagatctatggtcagtcttcacgcattctccgacatagatattcatagggatagagcaataggtgaactattcttgtcccaaagcaaatacctcaagaaaatggtggaaaggtttatgatgcatcaaagcaaacctgttatcacaccacttggccatcatacaaagctatctgttattcaagcaccatatacagctaaagaaaggtctaaaatgaatcaaacaccctatgccagtggtgttggaagcataatgtatggaatggtttgcagcatacctgacttggctcatgttgtaagtattataagcagattcatgggagatcctgacagtgcacactgtgaagctattaaagtgacaactaagtatctaaatggatctttgaaagctggat

SEQ ID NO: 201278 - DNA, 440 bp, Glycine max
  unsure (1)..(440): unsure at all n locations
cttgtacatagagataacattacaaacaaatgacgatcttgaaatgatcttcagacctaaaccttcaatttccatgtctttcattgtaatgtaagttnttcataattagtaagtttattttgctttatcccaatagattgaagggtttctctatatagcaaaaaacctgacaactttggatattatatcatacaacgccctgtctaccaaggaatatatacattgccttaatcacatttcggcattggctctcccaaagaaatggaaatgagatggaacacatttggattttgtctaagaatttatatttgcttgatctttcttgggggaaatcaagaatgttggtgcattaataatgaaggtgattctcttggactactctcttaactttccatttggataataacattcatttcctcgtatactgattntattttggt

SEQ ID NO: 201279 - DNA, 251 bp, Glycine max
  unsure (1)..(251): unsure at all n locations
agtactcctaacctccattaattttcagctttaccttctccttcattgttgattcttcatttntcttcatgcatnctctcacatgtcttgtgttgaatgttcgtaacatgatgttttaaaatttctaccgattaaacttgctataaatgctagtattgattttctatggttcaaatttcttattcttgttcttgaaccatgaattgtgttgagtttaggttcttttgaggtttggtatagggtgagcttac

SEQ ID NO: 201280 - DNA, 383 bp, Glycine max
  unsure (1)..(383): unsure at all n locations
actttcaattcattctatgtacctgtggtggtcccacttctgtttcatgtatttntattcttggtttcatttactttttatacccccttttgacatgcttaagccatttatttaagtcatttctcgcttaatctaaaaataaaataaatctccaccgatcgtgtgaattgtatcatcgttaatttcggttaaaatgaattccgaccgttcggtcgtgccgtaaccacgttggaaataaaaaaaagaggtgaaataataatataataataaaaaataccttttagtaaaataaagcgaaaaatcaatcggacgttgtctctttgggatttctcattcttaattgattgactaataactaaaatgaaactaaggctaaaatctac

SEQ ID NO: 201281 - DNA, 260 bp, Glycine max
  unsure (1)..(260): unsure at all n locations
agcttgtactntagaaagtttcataaccttccttcaggtccaccantctcccataatcagcaacctccaccatggcaccatctcaagcgcccccttcattgcaccttcagagccctctccgacagtacgacgacgtcatctccctatggttcggctcccgcctcgtcgtcgtctcctcccaaacactactccaagaatgtttcaccaaaaacgactttgtcttacccaccacccccactttctctctggaaacacatatt

SEQ ID NO: 201282 - DNA, 334 bp, Glycine max
tttaaattgcttcattaacacgttggatttacccttatgccccaattttagctgaatctggatattgacctgccatcctatgcatgagtctaagcttctttggcatatgtttgagaaagaattgggaaataattaagtttacaatttatcctcactgtatgtgctataacaatatgtaacaatgatatattgactggaattttgagcaggaaaaactaattacttctaactttaagcttgacataaaaatgtggagcacaaagaaacattattagaaccttttgataacgcaaaaacatattgagatatcataatggacaaattttgtcatcat

SEQ ID NO: 201283 - DNA, 256 bp, Glycine max
attaataatgaattcaaccccgcttcttaattattccgaggccacttgatccaacatgtgaaaggtaatgcacacatcttgtagtattgctccacattttgtgcatgaagccacctcctttgttaagcttaggggcaggtacggactggtgatatgcccatgatcgattgatcatcaaccctcgttcggtaaagacattaaacagcgctcctataggcagcctacaatctctaaatttactttaaaaaccttgcta

SEQ ID NO: 201284 - DNA, 431 bp, Glycine max
  unsure (1)..(431): unsure at all n locations
antctcatgttgctcctatatttaataccaagtccttattcatttttcttctcaagattggacgctgaaagagtatctgccaatgactgatattgtggctatcgtccatagccttttagtttatgtatttgtgcttgtatctcatagagatagatgaacttgtagcttaatcatgaaaggttaatgcataaaatttatactgtagtaacattaaaaccttatggattctattgtgtggtatagaccaatgtgacttggacttatcaatctccccctttgtgatgatgtcaaacaatatatatgttgatacaaaaaaggatatgatgaatagattaagatcaaggtatcagaacaatctataatgtactattgcacaccaattactctttgtttgtgtatctaaggatataaatntgatatacaacaaaact

SEQ ID NO: 201285 - DNA, 446 bp, Glycine max
  unsure (1)..(446): unsure at all n locations
agctgtgagccaattcaaactacaataactttntactcggatgtctgattgagccggtcatatatcgagacgctcgaaattgaatgttgaagctctgaaccaattcaaacgacaataactttttactcggatgtctgattgaggcccgtaatatatcgagacgctcgaaattgaatgttgaagctctgagccaattcaaacgacaataactttttactcggatgtctgattgaggcccgtaatatatcgagacgctcgaattgaatgtggagctctgagccaatcaaacgacaataacttttactcggatgctgattgggcccgcaaatattacacgctcaaatgatgttgagctctagcaattcaacgacatacttttactggatgttgatgaggccgtatatatcaacctcaaatgatgtgagcttgaccatcaacacatactt

SEQ ID NO: 201286 - DNA, 442 bp, Glycine max
tctagaaggagatcaacttgatgttctatgcttcccgaatgtggcagtccatgaagaatctccttggaaaagacatctttaaattcctgcaataatggttgaacactatgagaaacattaatagttaaccgatttaaattatcactctctctcttttgtgtatcactcatttcctcgaggtgtatcacctattctttctcatattcctttgtggagcctcactattttctgtctcttgttctctcttttctctcattctgatttggtcatcacacacttctctacgggatagaggtttaagagtaaacaatggaaattggtcaacaaacgttgatttgtgtagtcacgcgtcataaataacgttgaaatcatccattgatatatacccaccttttcaccactctgccatattaagaacaaaatttgcagtaataaaaaatta

SEQ ID NO: 201287 - DNA, 322 bp, Glycine max
  unsure (1)..(322): unsure at all n locations
gctttgaatgctctattcattggagttgtctataatatntcagactgatcaacacatgcacagtggccaaagatgcatgggagatcctgaaaaccactcatgaaggaaccttcaaagtgaagatgtccagattgcaactcttggctacaaaattcgaaaatctgaagatgaaggaggaagaatgtattcatgacttccacatgaacattcttgaaatcgccaatgcttgcactgccttgggagagagaatgacagatgaanagctggtgagaaagatcctcagatccttgcctaagagatttgacatgaaagtcactgccat

SEQ ID NO: 201288 - DNA, 340 bp, Glycine max
  unsure (1)..(340): unsure at all n locations
ggactggatgtangcacgggttgttgccgaaccagtataaattcttgtgtttgtcttcttcttccctacactccttaatttccgctgtgcactttaattatcgcttttacttttggttaagtttctatttctgtcctttactttcttaactttgtagtaaaagcctaattggatctagtaacattaagaaggataagtttttttttaattagtaaaggttcactaataattaattcaacccccccccttcttaattattccgaggtcacttgatccaacattgactcatcatatagaggccttaatataataaataggccaacttcattcaacattttaa

SEQ ID NO: 201289 - DNA, 262 bp, Glycine max
  unsure (1)..(262): unsure at all n locations
agctngcacaagtaactaattctgtntttttcaaaangactcactaactaactaacactaatatatagagtgaatccttagaaggaatggatgggccttgattaggcccatctaatctacctaattaactaattacacaaaacaatgtccaaacttgcagcccaattattcaagtacaaaagctttgaattccaagctcaatttgaccatcataatggtagaaatggaaaaatcttatttgtaacaaaaattaatatcattt

SEQ ID NO: 201290 - DNA, 371 bp, Glycine max
cattcggaacttaaaactaagcttagcttatgacttagattacaaaccctatcttattctagctaaaagttatgagtgtctacacatataagataatagagagttttcaatccaatctcatctaaaataagctataaagttttccataacaacctacaaacattaagaatgagcaaacctaacattgaagttaagagctatataaacatatttaaacaaaatacatgaaaataggttagtacaatctaccccaagcatacaaaatctactccaattccagggagcacaatgcagaggagaagggtagagagccttttccaagagattttacagtaaaaggtacccaagacacaaacattattaatcaaaat

SEQ ID NO: 201291 - DNA, 252 bp, Glycine max
  unsure (1)..(252): unsure at all n locations
cacacactctctacctcctatgcttatgtgtgcactatatgttattaatataattcataattttattgtgtgcaatgtatttatcatttacatatattatatacatacaagagtgtatatcgtttaatatgcgatttaacacttcattaataaaggagtgtgtaatgtattcttggactatctaaccccgtataaatatcaaaaagngtgattgatattaatatatatcccatttcgctaatactgctacta

SEQ ID NO: 201292 - DNA, 399 bp, Glycine max
gtaattatatttcatgaattattttaaggatctaccgtttaactaaacatgcctatcgctccctaataattgatccgccgaaaactacgtggggttacctatattgacaatgtgggtcgtaaacttctaattcactccctttattggcagattactatcatctcctttataactatatgatatattaactgctctgcatgtcaacatattgtgcaaataatgttcaatgaaaatcatacacaccatccaggcaatcctataatcttgcatcatggcatttataagtgtattatcgacttattatgacaaccatacgccgttaaatcagcgttctataaattaatcactcccatcttatgtgtgaccaataaatttacagtgactagctggatacctatc

SEQ ID NO: 201293 - DNA, 269 bp, Glycine max
atgatgattccacttctaagaagattatttttataattcctccgaaatggttatttgcataactgaaattgctaaaattaaagtggagattttttttattacatgaagtatcttttgcgagactaccctgaaattaacaataccttttgaaatccttttcactacttttttattaaaggttgaactaaacttgttaaaaacaaatcatattcctgggagcgtggtttgcatggacttatttactgtgatggattatcagtttttcaaaa

SEQ ID NO: 201294 - DNA, 177 bp, Glycine max
aatttatcttttatctaaatacgtgtatatattattatcttttatcttatacttttaattctaaaattatactttattatcttcaatattttactattatatttattgtaaaataactatctctagcttgtaaattgggtttgcattagtctaaatacaaacatagagcctgtgaat

SEQ ID NO: 201295 - DNA, 334 bp, Glycine max
ttcccagccatttcttcgccgaagacgtgttctgagttgtcgtgtctatctcaggctcattcacttccatgtcagtgttatcatcaatgtgatcatttgtctcttctggtcttgtgtagaatccttcataattgcttgaatcttcagatggcgcatatgctgcaaaaccagtagcaatagtacctcttaaaaggaattccatctcaggtaagaatttgaggccttgctttctaaactctgctacttccagatcctcctataaaataaacaataggaattataatatatatttggcatgacaatacacacgataaaatcaatctcatataatata

SEQ ID NO: 201296 - DNA, 397 bp, Glycine max
  unsure (1)..(397): unsure at all n locations
ccctgtgtctcttaatctgtgaaaggaccgcagattagttcatccgngaacgctcggtcataggtaatttgccctgtccgtctaaaatctagtttccttccatgattgaacaatgcttgaacacattgtaatcgcttgcatatgctaccctattccacctatttgtgtgcctttgtgttagccttgtttaacttaattatcaccttagttcaattgaaaatagattgatgatcaaacctattttaagtgtgtgggggctttaagatggtctgaagaaattcttgtgtgatattaaggcagcagctacagtcaactaaagttcactttgtgcctcttagttgaacaaatgttgtaccttccttttgctctatatgaacatttcataatttacacttac

SEQ ID NO: 201297 - DNA, 337 bp, Glycine max
  unsure (1)..(337): unsure at all n locations
tcaggnntcgcctccgccagtttagacataatcttcgttaaagcagtaatttcagatgttagagtgtatctactaagtaagctaagatataaatcaaactgaaatctcctctaaaaagatatgtttaactcttatagttatatatacacttgtttttcctctaacatctaaatttaaatcaaaattcaagcctaagacaacagtttagaagctatactcaatatcacacaactcttctaacaatatacgccgtgtcagagtggtggcataattcaagtaagagtgaagggtgaaaactgaatgctagattgattatatgtcttacaaatatcaaata

SEQ ID NO: 201298 - DNA, 417 bp, Glycine max
  unsure (1)..(417): unsure at all n locations
nntattttttccacgtttcatgttctgatatattctccttctcacaaaattttggaaattttattatgttttgattctcgttcatttttcatccacattcaaccccctttatacggtcacctttactaacaaactcatgtacctatcctcaagcgcacgttctgataacaagatggttgaactctgtgatgaatggcaaactttatagataggatatggtgctctcatttttgtatcaccaaaccgatttctctattcagaaaaatacaccatctattcagagcgagcaatggtctggaagatcaaaactgccttcacgttcatgtatgtgtcgcttcgcgctcgatatgcaatggctggagatatgttcgtaatatttaatttccgttatttgatcagaatatgtcttataaaatg

SEQ ID NO: 201299 - DNA, 428 bp, Glycine max
  unsure (1)..(428): unsure at all n locations
aattaaaatttttaatgatggaaacanttatattaaatataaaaaagagaaattgaattgatacgtgcaatcggaacttanatactaagttgacgtttaatgaaattattggataagcaactctcttttacatcataaaagataattgtagtgtattacatattacttatgatagattaacatatatttacttatctagagatatgttaaactgattagttaggataatgattagttatatcaaacgaacagtgatatatattataagaacacacatcaatacattgttatacatggaaataaataatgtatattttatttcaaactacataagttctttgcctaaaacgttatgagttacatacataactacacatagtatttatgtacaacacatgtacaaagatacatataatgtagaagatgat

SEQ ID NO: 201300 - DNA, 298 bp, Glycine max
  unsure (1)..(298): unsure at all n locations
atagattaaaagccttgaaaacaaagagtttcaaccttagacttgataagaaatatccaagtgttcttggaaaaaaacatcaataaaggatacataatatntataaccagcatatgaagtccaatgagaaggtccccacaaatatgtgaaaataagctccaaaggagagttaacataaacaaaagtgtgagatggtaatctatgagactctcccatacaactagatgaacaaaaacctgagaaatctttatttgatggagaaatgttacaatgattgaagactatgttcattacatga

SEQ ID NO: 201301 - DNA, 346 bp, Glycine max
tgtctcatcgtctatgcgagactgaaccaccatgttttctatcatagccaagtaccaagaagagttgggtctatccacggtccactagcatataatcgcggacgaatatgcccaagtatatgcggaataagaggctagaagaatggtgatcgactctttacaccatgaagcaaccatgtggatggatcggtttgctcttaccttgaacgggagtcaagaacttccccgattggtatccaatgccaatgcaatggcagacacctactccacccccgaagagatcatgggcttctcggctattgtcagcatatgatagacttaatggcccacataattagaaatcgct

SEQ ID NO: 201302 - DNA, 317 bp, Glycine max
  unsure (1)..(317): unsure at all n locations
tgaagaacgtcgaagaacggttgaaacctttgcgaaattcttcacggaaaacgttacgaaaacgtttcggaagcgcctcggcttatattttcttcacggaaacaatttttccaagcaaattccaaagagagagaagtgcctaaggggctgaaccctnttcttcttcacttcctcccctatttatagcaaaataggggagatgcttgccgcccagctcgcccaggcgagccaggttgcttcctccagaagcaacagccttctggagggcccaagtgggcatgggtgctatttgccccccatttttactagacaccccc

SEQ ID NO: 201303 - DNA, 363 bp, Glycine max
  unsure (1)..(363): unsure at all n locations
atgtttggatgactaaacatacccattctgttttanggttttgtgatgatgtttgtgatgttgtatgctgaaaaactgctcatggaaaactgttagagatgaaatgtagagttaacctatggttggaaagtgagaatgtgatgttatgagtggaaaaagagtgaggctttgagagttggaaggttaagtctgaattctgtggtaaatggaggttaaagtgagttaatactagctcgaaatgtcattttggacttatgaaaaagcttggactgtgctatggagataaacaaatgaccatagtgtaccaatagccatttctatggcaatattgggtgttgacagtaaaatctgattcggtggaat

SEQ ID NO: 201304 - DNA, 260 bp, Glycine max
  unsure (1)..(260): unsure at all n locations
gactagcggcggtcgggcgatggtgcacnaacaagtttccacatccacaatgcgcgcataaacccaccattccctgttgcccacctcctactgagctcacgtactcccacgtagcccatatcctcgtttctctcaacaccgggtccccatcaattctcccaagcttccacaacatccatgcaaaacaacattcaaacagcacaagctatcacagccaagcaaaacagagcataggcagaaaactctggccaaacaccaac

SEQ ID NO: 201305 - DNA, 381 bp, Glycine max
  unsure (1)..(381): unsure at all n locations
actgtagaatggctagacatgatacatccagggcttggtttggttcaaagataaaanggatgccccacattatttccatgacacaaatgcataaatgatgatttggaaactttatgcaaaattggtcatgcatgcacctatgtggacactcaagtgtcaaatttttatggtcatgtgatgctaaagctcatgattcatttcctctattttaaatcaacccaatgtgtccaaaatatgttcttttatccatttgtgcattcatccgagtccatttctggcgtgcgggaaaatattcacaacgttcacccttcatgtgtatacacacattttttgtcaaaaattgggtatgaattgtttccaagaaaagttggaagtcatctc

SEQ ID NO: 201306 - DNA, 364 bp, Glycine max
catctggattcttgataggaattatcttctatatcggccacaccttcttctattaaaaaagattttatgcttatagctttaatgataaactttgttggtctctattggaccctttatgaacttctttaaaaatctgacataatccattcttatgtataaaaaatgtacagggagggaataagtcaacggtgtatgtgatgacccataacaaactcaaaaggactgattgtggtctataaacccctgtgttgaaatttaatgagaaatatcatccatgaatatggtgctttagaaacacttaaaggggataaaaatattatttcaccacacaaaaaatttcactctaaaatgccatagataacta

SEQ ID NO: 201307 - DNA, 382 bp, Glycine max
  unsure (1)..(382): unsure at all n locations
atggagacatgactaagatttatagaacgacgccatgatccgcagagaatcaataagccgaatgaggattcgccacanagatttagcttcgttgataagaatcaatttggtttttagaagaaaaaaacccccaaagaagaggctaaagctctctctaagcacaagcttaatttcaattaccaaaagttgttacaaatgaagaggtgttgagtatttataaagccagcaattgaaggtaattatgcttactcatatcctcattaacgcacaatatatgccattttacatcatgcatttaccccctacaacataaaatgcaatgtttcaaaaattcccacagaatgtgtctgctaatcgggacattcgcggtaaccacaatttc

SEQ ID NO: 201308 - DNA, 371 bp, Glycine max
  unsure (1)..(371): unsure at all n locations
cctttcaagattccttatgtatatatctcgtctcttcttcccatatatgattatttctcaatttatacttcctcattggaatatttatctttacagcccttaaaatagagtgcatgctacattgtccactaatataaggagcacaaaaatgaatcctctttttctattaaccaggaccatgatcaaaatctaacatgatctataacccctgtgacatcagtccatccattgttaaaaatgatattatttttctgaatcttcttcacttgtatggattatacgcttatacatccatccgaatcttctctgcttgtatggattctacatgacagctacagagaggctcttggtntatcactacttgtcaaatg

SEQ ID NO: 201309 - DNA, 473 bp, Glycine max
  unsure (1)..(473): unsure at all n locations
acacctaaatactaagcttctttgctggatattgcctcaggacttggtgatgctacgttggtaaagaggcttatgatctgcctttacttcctttatcaaatggcaatgttgcatctttttcagaagcatcaaaaggagtctcttatttcattggtgatgaatntgaatataagctgatgcagccagtttctgatagagtaattgatcagaacattcctcccaatatattgaacagactcactggtattgcgatgtcctcaaagaccaatgttattctttgtagtattcaccattgtgctcaactattccctgcatttatgtcagctgactggaaatataggagtaaagtggtctgggaccctgaatcttgtcaaaagccaacgtcatcatggtttctgctattctggcaatatctatgaaagcagactgatatattaccactatttagtgaatggccaattttaccttccaca

SEQ ID NO: 201310 - DNA, 481 bp, Glycine max
  unsure (1)..(481): unsure at all n locations
tacgtgacacttatatactcaactgctctaattacataatgttgttccattggacgatgttgtatgccattttagttttaagagtaacattccttggtaaaactaactttccaaatgtgtgccttcgcatgaaatggccccgatgaagcttgcctcttataggtccatgaatgataatgcggccgaagggactagttccgctcctgagtatgacagtcaccgctttatgagcgctgtacactatcatcgcttcgaggccatcaaaggatggtcgtttctccgggagcgacgcgtccagctcatggacgacgagtatactgatttctatgaggagataaggcgccggcggtggacatcactggttacccccatgtgtcaagtcgatccagaaatattccttgagttttatgcacatgctcggccacataggaatgttngcgtgacatgatgtcctgtgtaatgtgtcagtggatctcgtttg

SEQ ID NO: 201311 - DNA, 233 bp, Glycine max
ggggaaagaggaaagagaaaagaaggaggagagaaagagggaaaaaagatggatgagatgaggaggaatggaagaagaagtagtgagaggaaaggaagggagaagaaggaggagggaaaataagaagtagatgaaggaaagaaaaaggaggaatagataaagatagggagtgagaggaaaagatatgtgaaagaaaagagaggggaaggaggattgaggaaggaggaaggagg

SEQ ID NO: 201312 - DNA, 456 bp, Glycine max
  unsure (1)..(456): unsure at all n locations
tgtgaaaatattntctatgatgcgtatgaaacctccatccagttctatcgaaaaaccttgtttaaactccaactagtttatcaagattggttgttcctgctacaaagttagctaaatattttgatagcttctcaacattttcttttaaaaccctgttttcattttcaagttgagtgtcatcaaaatagatatccaacttagtataagtctactctatttatatttttcaaatcatagagttagaacaagcttttgataatctactcaatgattcttatattgtaactcaaaaatgtgctcactaaaaaaaggataatttgccttgataatgccacgcttgttgcactcatagcatctaacttgcttggagctttctcactgtaggaattctctcttgaagaagtttcttcttggcccctttctgtttctatcaatctttgtagtcactttgtcaaa

SEQ ID NO: 201313 - DNA, 336 bp, Glycine max
atcttctagtcatgtttccaattcaacattaaatactgaaagcagaggaaggactacccagaagggtcagaatggtcgagccaaatcaaagtcaagagggaaaggtcagacaaaattttgaagtgacattatctgctggaattgtgacaagagaggtcactttaccaatcaatgcaaggcgccaaagaagaacaagactcacaaaaacaagaagcgagatgatgatgaatccgcaaatacagcaactgatgaaattgatgatgcattaatttgcagcttcgatagtcctgttgattcatggattatggactcaagtgcgttgtccacaccactctc

SEQ ID NO: 201314 - DNA, 385 bp, Glycine max
tgagaagggtggtcgtgctttaattattgtcatgtataccctacgtgtgatcttgtggaaaatatgaagctttgggaggaacttttgagacaaaaaggatcatacaatgacaacatttggtgtatggtgggtgactttaatgttgtaaggagtttggaggaaaagaggggtattgtatggcataaggtatggtgctcaatggagacggaggaattcaacactgtcttatatacaatggagcttgtggacatcccaatgattggtagaaagtttacatggtacaaaacgggtgggctagcaaggagtatattggatagaatggttgtcttgtcgagttggcttgacttatggccgtcatcctcacaatttatccttaatatggata

SEQ ID NO: 201315 - DNA, 323 bp, Glycine max
  unsure (1)..(323): unsure at all n locations
gacttactaactntctagctttntcattctaaggagtggattcactcttgtcttggatggttaggaatgaacgtttctacctttatttatactacttcacctccacaaaattaattctctagaatacttcacacattctaggagtttctatactcttctactcccttccatatcctttcatactctntcataaagtttcagaagattccacacatctccaaaatatttcaagaggttttcacattctttcacaagcctttagagagttctacactactctagagttctcaaaacattctagaaaattctacactnttctaaaa

SEQ ID NO: 201316 - DNA, 359 bp, Glycine max
tgttcatggtgaagcaaaggatttgtcccacttctcaacctactatgggttttaatgtccttggatagtgagataaatggcttggcttttgttatggttccaagtggtattgaaggtgaggttttttggaatagttcatatgggttttcttttggattgtatgagaaggaatttaaggttattggtgttcagtttagtgcttatagtatgaatgggggttctggtagttgtattgagtacattaatgttggtagttctgttcctgtttaaacaatcaatgcctcctctgtcattatgggtcttaaaagtgaggggaaattgcatgcttggattgactatgatgcgagttcaaaacgctt

SEQ ID NO: 201317 - DNA, 353 bp, Glycine max
ggatcttagcactgggctgcagctgtctaaaccttttagttatggggacaaaaatactgcaaactatgaaatgtatttagtaaaattacttataatttaatgtggtaaacagctttaaatagttaaaagttaagaataaaattgattatttaaaaaatatcaatattaataattttaggataaaagaaaaattaaaaataaattaaagtactttcaatcctttgataacgttaaaagataactatgaatttgttgtcacacaacattttctataaaaataaactataattgtgtgaatatttataaaactattagctgacttttgaaataagaacatcgtactatgtattaac

SEQ ID NO: 201318 - DNA, 399 bp, Glycine max
tattgcttgcgaatttttgtatatcacacactcaaaattcttcaagcctttgctgacacaatatgacattcaaataggacgaatgacatctaaatagctccacctattaatattcccttaagattgtttaaagacagaaaagagagagagagagagaattgtggagggagggaccaagtatagaaaccacgtatacaaatctttattgctgtttcttggaaggaataacaactcatagaatgcaatgaatatggcaaattgccaatatcaatatatgcaatgctacgtccatgtccatcatacatataagggacaaataaccattataatctaagaattaatatagccaatatgtacgcggctttctcaccataataccattagctaaaccacttcctt

SEQ ID NO: 201319 - DNA, 268 bp, Glycine max
gaatgatgtctctgttcaaaatcaaccgacatagttattcatgatgtatataatcgaatttcgaaagacacaccaaacatatccttgcatgataacttttgattttggggtgtatcccgctgggaagattttcaagattgtggagtgtcacaaatgcccttaaaaaagtgatcaacacattatgattttaattagttaatagtaaaatgattgctgctagtttaaaaagattatgaaatttgtgtttgttttagtcgacacaatccca

SEQ ID NO: 201320 - DNA, 399 bp, Glycine max
  unsure (1)..(399): unsure at all n locations
acttggcgaggtgtccatatcttatgcccatagcggcggctttccggatccgaggtatagcttacangctcaatttatttatatgagcaagatgaccaaaaggtgatatataattctcacgaacgtaaagggagataataattctttgttgatggctttttataacccaaaattaactctgctatgatcaggatgacatttctctgcataaataatgctactggtgtcacatccatcacctaccagaaaaacgatgctggtgtgatttgttgagcctttatgtgaaagtcacgtctcagtacttctactgtcaaattatgtcgttattgtcacaatggaataataaacagattagcatagtttacatatctcatgggagcaataccatgttcaattgat

SEQ ID NO: 201321 - DNA, 430 bp, Glycine max
agcttatccgccctcctattaatagggcttttattgagaagtactgcatgcccaggcaggcacagggccaggcaccacagcagcccgaggatggccagcagcaggcagctgcagacgcaccaccaccatctccaaagtccacctctactcacctgcggaggttggaacgctgtatacaacatgtggctgaccaataggcagccaatcataggggtcaggtacagctgaatgagagcttttatcagtacaccctacatcagtagggccaggatcccagcccttacacatgacctactcctgagcagttcgaagtcgcagtggcatggcctggagattggcccgatttttagacaaggccagggcctgcagggacctccgaagatggagacggacctcaggaagacaatgacttggccaatgtgatggattt

SEQ ID NO: 201322 - DNA, 465 bp, Glycine max
  unsure (1)..(465): unsure at all n locations
actaagcttgaaaggatgctntatggagganaagaaagagagaagttggagcacgaatatgatggaataaaagagggagagaagtagaactttaaagtgtgtctcataagactttcattcatcaaagttacaacaagtgttacacatgcttctatttatagactaggtagcttccttgagaaactttcttgagaaaacttccttgagaagcttctttgagaaaacttccttgagaagctagagcttagctacacacacccctctaataactaagctcacctccttgagaagcttccttgagaagattcctaaagaagctagagcttagctacacacacatctctaatagctaagctcacccncattccaaanatacatgaaaatacaagaaaaaggtccctactacatagacctagaacctatactactagaantgggcaaatacaggcctagaactcgtgcatg

SEQ ID NO: 201323 - DNA, 423 bp, Glycine max
agctggtcatcataccatggcataaagtgtacttctgtcagtcattcaaactaagaacgttgtaagatccctgagttttgaatgttccagcgacacttgggtagtgtgacaagtatgttgagataatgaaaagtgatgccttaagatgcatatcgtccctgatgtcaccccattcatggagattgtgaataccatcttcgactttttcaaaggtgccaaagtacgtactcaggccaccgtatatcagggacgattcacctcagtaagtgacagagccaccttatgatggaagggtctcagagcatatgataactgcacttctctttccagtacccgtcttgggagacaaggaggcgacagaggatacttttgatcatgctttggaggatagcgtagcgacaataacaatagttggtgggggac

SEQ ID NO: 201324 - DNA, 450 bp, Glycine max
  unsure (1)..(450): unsure at all n locations
atatgatggcttattgtctcataatgattattgttggctgaaagatcatgcttgggtgaaattgaggaaagcccttntgaaactaagcctgatgcttctgtatgtaatgtcaatgatgataatgatcagagaatcattaacttggatgatgacaactttgacaatttcaccctaagccaacttaaagcaagttgcaaaacaaggaagcgaaaacactcacaaggtctcaactcctctaanataaacatgaaagttgaagattcatcaatcctggaggactacagagaggagcaaatggcagcagatgattctgatttcctggagactatcagtagctggaaaactaaactatcaaagaatatgaaggcgaagattagaaagtgctttatagaaccaatctctactcataccanagatatcatgctagttgtcaaatctgaacctgaagag

SEQ ID NO: 201325 - DNA, 430 bp, Glycine max
agcttagaaaggtctactcaaacggatgtatggtaattttatagtaaatcaagaatgcacaaagtagaaaatgctaacattactcaagttggcttccatctcaaagtactgtaaacccttctgaataaatgtaacaagagcacctgacggcaccaaatttccattaatggagcatttgttaataccagcttcataaccaaaagtaaaagcagcatgcgtgaaacctgcagtagtgatgtagcaaaagtaaccagtaaagcaattcatatgaaagctatatagcgatttcataaatatcaaaagcttcatatatatggaaagcatgacttttattgtccagtaaacaatatatgttataaactccacctcatgaagttcttcaaattctgatgaatgccctagactatatgattcctctaagacaacaaca

SEQ ID NO: 201326 - DNA, 448 bp, Glycine max
  unsure (1)..(448): unsure at all n locations
acggcaagactgctattcatgagngtaatttctctaccttcacagttaagataatctaagatctcttataactatcagaaggagaaatggtctcttaatgagctcatttcatactgtgtgaaaaaagagggaaggctgaagcaagaaaggaataaaagtgctcatgttgtgagtacctctaaagacaagggctaaagaaaaagaaccgaggagcccaagaatgaagctgctaagggtccagctcaaaagaaacaaaatcaaggtgacaattgtttcttttgtagtaagactggatatgtaaagaagaaatataccaaatatcatgcttggcgtccaaagaaggatatgtttcttactttggtctgttctgagatcaatttagcttcagtacctagaaacacttggtggttagattctggtgccactactaacatcagtgtttcaatgc

SEQ ID NO: 201327 - DNA, 439 bp, Glycine max
ttaagcgacgcggctgcagctggacattaacctgaatcctagtcctatttggtttagacaaaatatctgctggctgatcactggagttaatgaactcagcgacaatttctttagacagtaatttctcccgaatgaagtgacaatcaatctcaatgtgcttagtcctctcatggaagacggtgtttgaagcaatgtgaagagcagcttgattatcacaatatagcttcatttgcatcactttgcaaaaattcaactcttcaagaatttgcttaacccacataagttcacacgtaaccacagtcatagatctatattcagcctctgcactagatcgagcaacaacagattgcgttcttgctttccaagaaataacattctctccaatggagacacaatatccggatgtggatctcctatccataggacaaccagcccaatc

SEQ ID NO: 201328 - DNA, 466 bp, Glycine max
  unsure (1)..(466): unsure at all n locations
gctgaggatctatataacaacaccaaggttntagtttatttatatggttaactgaggagagaaaattttagggttttgcattnttcagttttgtgttactgttcacgcgcattgttcacgtagcaatcattatttcgttttctgcttaaattgcaatttcgttttctgcttctgcctttgaattcgttttcatttctgctgattaatggaaggctgagtttccagtgttgttttctcttgaggatcaagcacaactctctttgaggttttgttatcactattgaattctgatncaattttccccttcaccaattgctctatatttgttgctattaattcatgcatgcttaatgcttgattaattgtctctgtgcttaatttacgttcatgcttaatgatcagtttcattcatgtttaatggacatgtgagagggattaattggtgtatgtgttgcttaatcacata

SEQ ID NO: 201329 - DNA, 415 bp, Glycine max
agcttgatatataaaagctatagggggtttatgtatattgtttccctagtctaccgggaaggcagatcttcactgcacataccaatcttatttttaccatgacctaaccatgtgtcacaatcacatccttctagccgacaagcagaaaaatgtatctaaagatggaaggaaaatgaccacaacaattatatcggctaataaacaggccgtctgaaaaaaagaatgcagacataaatggcacataaacactccatcgagcaaaaggaacaaggacgtgttctctccccattcattcctctaaaaacaccagcacatgagataaagggaaagacagttcagcttttctttcataacttgggcatgtttatataatgcaaacaatatctatcttcacttgcagcacttgcaacacctc

SEQ ID NO: 201330 - DNA, 327 bp, Glycine max
ttcgagcatatggatataattcggaactcaattggacatccgagtaaaaatttattgtagttagaatttgtttagagatattgttattaaattcgagtgtctcgatatattacaggactcaattggacatgtgagttaaaagttattgttgttagaatttgctatgagctattatttcaattttgagcatctttatatagtacgggactcaataggacatccaaataaaaagttatttgctgttgaatttgctacaagctctcatattcaactttgagcgtcttgaatattttggactacattggaatgcgagtaaaagttattgtg

SEQ ID NO: 201331 - DNA, 421 bp, Glycine max
  unsure (1)..(421): unsure at all n locations
agcttgctaacccatggaagctccttatatcnttcacactttttagggtgggccattcttggatggccttgattttctcatggtccacttggaccccatttctaccaactaaaaacctaagaagactatattatctacacaaaaggtacacttctctatatttgcatagagggtgtttatcctaaggactgaaagaacttgcctgagatgtcctaagtgatcatctaggctcctactgtacactaaaatatcatcaaaataaacaactacaaatctacctatgaaatcccttaagacataatgcataagcctcataaaggtgcttggtgcattagtgagcccaaaaggcatcactagccattcatacaaaccaaacttggtcttgaaagccggtttccactcatcaccctttttcatcctg

SEQ ID NO: 201332 - DNA, 427 bp, Glycine max
  unsure (1)..(427): unsure at all n locations
agcnttaaacttgcaacagaggagtttatcttgtttataagattcgccttcaaactcttagaggtgactttgagcgtttgtttatggaggagtccgagtcaatttctgattatttttctcgagtattggccgtagtcaatcaacttaaaagaaatggtgaagatgttgatgaggtgaaggtcattgaaaaaatacttcgaactttaaatccaagttttgacttcattgttaccaacattgaagaaaacaaggatttaaagaccatgactattgagcaactcatgggttccttacaagcatacgaagaaaaacaaaaagagaaatattaaacaaaaggaggctacggagcaactactacaactcatcgtaaaggaagcaaactatgcatattacaagagccaaagatgacgaggtcgcggccaagatc

SEQ ID NO: 201333 - DNA, 404 bp, Glycine max
  unsure (1)..(404): unsure at all n locations
ctccttttgaagntgtttatggttttaacccactaactcctcttgatcttttgcctatgcctaatgtttctgtttttaagcataaagaaggtcaagcaaaggcggactatgtgaagaagcttcatgagagagtcaaagatcaaattgagaggaaaaataaaagctatgctaaacaagccaacaaagggagaaagaaggttatcttcgaacccggagattgggtttgggtgcacatgagaaaagaaaggtttccggaacaaaggatatcaaagcttcaaccaaggtgagatggaccatttcaagtgcttgaaagaatcaatgacaatgcttacaaagttgagctgcccggtgagtataatgttagttccaccttcaatgtctcttgattatttctttttgatgca

SEQ ID NO: 201334 - DNA, 428 bp, Glycine max
  unsure (1)..(428): unsure at all n locations
ttaagcacctgcaggctgcagcttgaatcggacatccggtgatttgtttgattattngaatttctcaagatcttccgttgttcaatttcgagcttctcgacatattatgcacccgaatcggatatccttgtgaaaagttatgactatttgaattttccgagagtttccgatgtttaatttcgagcgtatcgatatattataagcttgaatcggacatccgtgtgaaaatttatgaccatttgaatttctcaagagcttccgttgttcaatttcgagcttctcgatatgtgatttgcctgaatcggacatccgtgtgaaaagttataccacttgaatttctcaagagcttccgttgttcagatttgagcgtctcgatatgtgaattgcctgaatcggacatccgtgcggaaagtatgaccatttgaatt

SEQ ID NO: 201335 - DNA, 454 bp, Glycine max
  unsure (1)..(454): unsure at all n locations
aacaaaaggcatgcgaagtgggtggaattcctatattctattccttatgttatcaaacataaaaagggaaaaggtaatattgtagccgatgctctatctcggcgtcatgcattactttctatgcttgaaacaaaattgattggtcttgaatgtttgaaaagcatgtatgaaaatgatgaaacttttggagaaatttttaaaaattgtgaaaaattttcagaaaatggtttctttagacatgaaggctttcttttcaaagaaaacaaattgtgtgtgcctaaatgttctactagaaatttgcttgtttgtgaagcacatgaaggaggtttaatggggcattctgtggtccaaaagactctagaaacattacaagaacatntttattggcctcatatgaaaaaggatgtgcatgaaatttgtgaacattgcattgtatgtaaaaaggcaaagtcta

SEQ ID NO: 201336 - DNA, 437 bp, Glycine max
ggaccttaagtcacctgaggcatgaagcttacaacaagcttcatcctttatttatttttaagcaccaaggtaccaaccgaggaggttaactacatgggaggacaacaacgatcgtataataactgtaaacaaagaggtgtccaaaacatacatggatactacaaccgagcatgagacaacaaacttcaacaaagagaaaatttgtgggaccacacctgaaagttggtagaagccttgaccaaattcaccgaagtggtcatcgccaaccacaaaaacaccaaagccacgatcaaatacatgtaaaatcacatagggaaatttgtcatacaattgcaaaccatttaaattgcttttctcaaccacctgaggaaacccaaagccattggaatgtaatatctcaccatataggggatgtggagatgaaaaaaaaaacggta

SEQ ID NO: 201337 - DNA, 421 bp, Glycine max
agcttgtacttggtttagacatgatttaacttgatgtaggacttgtaggattcaatttgggcaaaattggatgtgggaaagtgtgatttcgaaaatctgcactttatgcagaattttgctgtcaaataggtgcatcagaattttggctttgtgcacaaaatgcttgtgtatggctggttgtggaaagggtagtatatattgggttctggacattttgtagcagatcccaacggtcaaaatgtagacttatacactagggacttccagtaaaattttcgagtcgatccaacggtgaacgaattggaacgaaggaaatgttactggggtctttaagtaaggaaagctgtgattttggtttgtgtattgggcagagttttctgcctctgccctgttttcttggctgtgttagttcatgacgatt

SEQ ID NO: 201338 - DNA, 456 bp, Glycine max
  unsure (1)..(456): unsure at all n locations
aggatgctntaatggaggagaagaaagatataattcttgagcacgaaattgaaggaataaaagagggaaagaagtggaactttgaagcgcatctcataagactttcattcatccaaagttacaacaagtgttacacatgcttctatttatagactaggtagcttccttgagaagctttcttaagaaaacttccttgagaagcttctttgagaaaacttccttgagaagctagagtttagctacacacacccatctaaaaactaagctcacctccttgagaagcttccttgagaggctagagcttagctacacacccctataatagctaagctcacccccatgacaaaaaaacatganaatacaaaaaaaatcctactacaaagactactcaaaatgccctgaaatacaaggctaaaaccctatactactagaatggccanatacaagggccaaaga

SEQ ID NO: 201339 - DNA, 412 bp, Glycine max
  unsure (1)..(412): unsure at all n locations
actatgttacataaattttttgacttttttgcatnanngagaaaagacaatacttgtatcctcgaacaaatgttcactcttttaatcagttagctagttacgttgcatggcgcacattgattgaggggaagtgcagctattgacatttgtgaaactacggacacatgtactcttaatgcagaagtccggataattatgtaatatggttggattctacttagaaggatttgggcaagagttaatttgggctttgtttatatatatgttggtagatatatggttgatggcgttaaaaattataaatattagtaattgttttcgccagggttagctctcctttagttagctagccagcgttgcatgtaagaaataattaactaccttgtgattaatttagcttaactttaacaaa

SEQ ID NO: 201340 - DNA, 404 bp, Glycine max
  unsure (1)..(404): unsure at all n locations
ggacttctccaccaaggtagatctttaagctttggccactaaccaaccagttgctgtctttggattggtcctctatctctgttgcttcataaggcttaacatatttaatagtaaaaggaccactccatctcaattttaattttttggaaactactttaatcttgagttgtagagcaatatttcttgtccgagtttgaattctttgtggaggatctttctgccatggtacctcttggttctttctttgtaaagcttggatgattcatatgtgttgaggcgcatctcttcaggttcctatagttgtaccttcctcttctcttcagatggtgtagactcanagttgaggaacttcatggcccaatgagcctttgttctaacttcactggtgggtgcatgctttttct

SEQ ID NO: 201341 - DNA, 426 bp, Glycine max
agcttatggcctcgaaaaattaaagggcgttggttgtgttcctctctaaaagctcgtggaatagatagaagatttcataatgtgatgcctgaaatggacttccaagtcatccttgtattgaacattaattttaggttattaattggaatatgaaagttattgtagagacattttacctcaccatgtttagagaagcgttattctttttggtaaacttcggccatggcccatgaggtttgctctttattaggtcacctcattggctcattctctcgcttcctcttttatggggttttcctccttaattaagaagtctgattttttttctttgcacttttacaccattcattattagaagaaaaaaaatactacactattgatccatgattattgatttatctaaaatagacgaagttgacatgtttg

SEQ ID NO: 201342 - DNA, 406 bp, Glycine max
  unsure (1)..(406): unsure at all n locations
gcgggttcactgtccaccagannnnnggtggagctgtggggattgaaatcagtggattcagtgaggaagaggttccactttcaaaattgcttgaactgnnncctgaagagggacttgaagttgttaattgtctttcaaccaaagtcaatggcagattactccacagtttgcagtgtgaggtacgtagtcctgcagggattctagtcttgccattatgttatattttcccttcaattattgatgaaatgggttctctacaggttgacaatnnncncantntacatctatctgagctgagaaggaaagtttccgatgtcattccatcacttcgttgntctgcgtaactttgtggactggaaattaacacataacacatatatctgccctttctaacttggtcgtaatt

SEQ ID NO: 201343 - DNA, 423 bp, Glycine max
agcttcgaggcactgagtcacaaatctcttctctttttcctccttttcctcttcttctgagttctttcttcttttccttattctctctaacttttttcttttctttctttcttttctctttctctctctaactctcctttctcttttttattaaattagtggtatatgtggcttattgggccttggttccttatttgggtcatattatcatattctcattaattcctaatataaggtgactattattaataatatctaagagtatcttttaattcattaaatataatagttatttcataaaatatgcctcttaattatttatttctaaggctcataaatttggaatggtagaaaaaaatatccttagttaaagtcaacaatagaagaacacggcactgggagaaacataactaattcactaaa

SEQ ID NO: 201344 - DNA, 452 bp, Glycine max
gtacagatctgggcatacataatacttctaattactgatgcatacggaattgcttccatttgcttctattccagatcatttctaggacattgtgcgagaactaaattgtctcctttctgaattggaacggaagatgttgagcacttttccatcctaaatctctctagtaccttattgatatatgatttatgagacaagcctaacaatccttgttatctatttcgaaatatttctatccctatcaaatagcttgcctcacccatatccttcatttcaaagttactggaaagaaactttttagtctcatgaagaagaccaagatcattagttgcaagcaatatatcatcaacatacagaattagaaacataaccttactcccactgaccttcagatatatacatcgatcaacagtattttccttaaatccaaagaagacaatggtatcattaaa

SEQ ID NO: 201345 - DNA, 431 bp, Glycine max
  unsure (1)..(431): unsure at all n locations
agcttatcttcaataataaaaggcttgtgttctatatcttgaatgngcagcgaaattattagatagaatacactgatttagaagattgtgaaaagtacttgtgattctgtgtaactaactgataagatgaagccaagcacatgacaacctatttacatttacgtctgcaggggctagcttgctttacacagtatatgggacctccctgcatatatgcatgttctgcatttttcaaatttagttttgccactttgtgcaattgaattgagttcaaacaaattacccatgtgagctcttggtctcttatgcttaatatttgggaccactttcatgtgccaacttgcagcgatggctcactcttttttctatcttgagaatctgaaattggctacacatacagcttttctcattgtcacttgtggccatcaaat

SEQ ID NO: 201346 - DNA, 453 bp, Glycine max
  unsure (1)..(453): unsure at all n locations
tgtggtacccatcacatgtggtactaggtgtcggtcgggcgatggtgcacaacaagttttccacatccacaaatcgcacataaacccaccatcccctgttgcccacctccaactgagctcacgtactcccacgtagcccatatcctcgtttctctcaacactgggtctccatcaatcctcccaagcttctccaacatccaggtaattcaacatccaaatcatcacaaactaacaaaccaagcaaaacagggcaaaggcagaaaactctgcccaaaactcaaaccaaaatcacagctttttctcacttaaagaccccagtaacatttccttcgtcccaatttgttaaccgttggatcgactcgaacattntactggaagtctctaatacataagtctacattttgaccgttgggatctactagcatacatccagaactcattctgtactactct

SEQ ID NO: 201347 - DNA, 417 bp, Glycine max
  unsure (1)..(417): unsure at all n locations
agcttaaatctattattaaagatggnggattgataattttgantccgcncngatgaaaaatgatgtcttgacttaaaaattataactttctacagttttgaatcattatgaccgattagatcgcgtggcaattgattaaaatgaactccgactcttgattttggattctgggttgattgtaatcaattactgataactgcgtaatttgagttaaattgatagtcatttttggctaataataattgtaatttcttcactttattggtatctttaatgagataatgaagaaattaatatatttgctatttttatcagcagaattcaaaagaagaacaattcaagtgctttaaaggaaaattgatgcaaaaacgacaagaaaaagccttgaagaaaagttcaagaaattggacagcttgc

SEQ ID NO: 201348 - DNA, 464 bp, Glycine max
  unsure (1)..(464): unsure at all n locations
ccacttacataaccagtatattagcacacttgttattcctttaaaatnngaaaattgaagtgaaacgctcagaatgtagcaaatcaatgcaaattcaagatatttaagaagttaatttccaagcactgcattcaactttcatcttttgcaatgattgaaagtcaagcatttttcacaatccgaataaaatctgtcaaagcaaaactcatcttcccgagcggagaatcatactcagtatctggnttctcaaaaattttctcaatataaatatatgtgcaaatagagctataacatatcctctaatataagaacagaaatactataactattggtaacacatggctagaatgctaacttgttaaagaaacttccaggacttcagtagcaaaatattcttgtatttctccaattcataatgcatatttgagttgcatcattggtaggattcaataaaaacttccatg

SEQ ID NO: 201349 - DNA, 427 bp, Glycine max
  unsure (1)..(427): unsure at all n locations
agcttcatctgcagatctctcatgtaagtttattcctatactaaacaacattattgtaacagcataattaaaaccaaaacataacccacagatccctcatgtaagattaagtttcgatcttgcttcaatcaagttctaaggcaacagtacatttcccaatgctaaaatcacctaactgtgcacacaagtgggtgatcataccaaaagcatacaaacattaagcattaaaggaagcatacaattagatattaggtatttacatcagctgttcattagaaatccccaactagggtgtttagccagccattacaaagtgtcgcaacctacctttcggcaggagggcgacgcaagactcacgggtgcatcttccaaggaagganaatgcacggagtctccaccaacgtttatttgaggaaaacttcggaaa

SEQ ID NO: 201350 - DNA, 391 bp, Glycine max
cttagcgccactaccttgctttatctacttccaaagacttcaaaacagaatgatgttggcacttagcacatcctttctcgctaagcccaacttgatagcttatcttacataatgaatctggggcttattgcaggatggtgcgcttatcgcatctataataacttttcacagagaagaagtggcgcttagcgcatcatccacactaagcccactgcttaaggtgcaacttatagtgaagatgttgggctaagcgcatcaatgtgcgcttagctgaaccattcagccagtcaatcaagggtctttgcgcttagcacaagcaagctcggcttatcacgtgaagagatggtggttctttctctcatgtcttcttttcgccatcacatgaacttta

SEQ ID NO: 201351 - DNA, 362 bp, Glycine max
  unsure (1)..(362): unsure at all n locations
aacaacatccaccaaggagcatcaactcgaacttgacaagtatctgcatcatcaaaacaatgaagttaatcaaaacccaactccaaaaggcataaagttgtaggatatacaattaaactcgcatacacaagctagacaagactgacaaatattatcaagagctagcaatatactctcactcacgtgtgtgcgatgagttgagacagaaaagaaaatggtcccatatgacagcataatcaagagctacatacccttaattatacatcagagggacaaaaagagtaagaggaggggaataattatctgcttcttttgcttgacacaaaatgactnttctctatgggagcttcaagtgagtctcc

SEQ ID NO: 201352 - DNA, 453 bp, Glycine max
  unsure (1)..(453): unsure at all n locations
aacgggaactcacttgaaatgagatttctgttatttttcattnngnnncatggaaataaatattaagttattttgaacgtgtcttttacacacaccctaccacctagtccatgttataaactcatatcatgcctccggtgttgccttgaaattactttactttccctgtctatatcccaatttaattcatatagggtaacagcacagatgcactccacttgtaaaggattcaataatctatcactcccaagtcctaaacttcccctttaacctataaaagagataattagtaataaataagcatacggaagatcctcactctctgttgcattcttcaatatacagcagagataccaaaaggtagatgagagtgtgaccaacaaatgcagtaaaagatgagggttaagcattgcattatagacctctgtacaaacatccttcacattattacct

SEQ ID NO: 201353 - DNA, 437 bp, Glycine max
tccggaccttaagcaccgcagctgcagctcttcatgtcgcaaccccttctttgttttgtagatgacgaaaacatcgaggaagatgtggtattgttatcgattttagataccagagtacaaataataataagtagtttgcgattcttatactcgtgttatttgcacaactacttttttttagctttgattaatctttttaacaggctgaggaacttcagaatcagatggaacaagactatgacatagggtgagcttaattgccatttacctgtgttagttgaggcatgttttaagtctccaacatgctatacatttcctgcttaactgtaattgttgacttatgttgcaaaccatgcaatcttggtattttgtaatctcgatgcttgaatcttaatgaattgtatacttgctagcgccaaaaaagaacaagatattcc

SEQ ID NO: 201354 - DNA, 408 bp, Glycine max
  unsure (1)..(408): unsure at all n locations
taatactattactttaatttgggctatatatagatagtagaggctgtagagcttcatttgtctagctacaacggcaatatcaacgaggtcgaaggattacgtcacattcgcttgtgatgccaatgtttgtcgtacgtgtatacgaactcgtaccattcactgtgatctagttaactgaataaactagatcgcccttgtatagttgcatgtttgatatcacgttcaaactctacattatgaagggttggactaaaaaattatatttattaacatttatatattttggcgtacgtctgcatgtgtttgggacacactttcaaacacacatatatgcaatttctcttcttttagtttattanactgtacttacaaaggaaatcaactcgtgaagtctaaaactacattaac

SEQ ID NO: 201355 - DNA, 427 bp, Glycine max
  unsure (1)..(427): unsure at all n locations
agcttgaccccggttgaagagacatttancttctatcttgtgcctagggaaggtcatgttactcaattggggaatcaactacccaaggatgacagcatctgaatacaagtcatccgagaacatgtcaacttattttgctagtccataatagacatgcccggtatcacccaagcttccattgtcttaggttggccatatgtgaagatgcctagcccattgcctanaggaagagaaagatggatgaaaggaggtgtcgagcagtgcggcaagaagtggccaagttgatggttgccaggtttaataagccaaacgagaagtggaggatgtgcaacaactagactgatttgaatcgagcgtgccccaaggacgcacatccacacttgaacatcgaccaactggtcgatgaagtggccggacacagagtgtt

SEQ ID NO: 201356 - DNA, 413 bp, Glycine max
  unsure (1)..(413): unsure at all n locations
accacaaagtggtacctgtagatatgtcgcgggggtcatgagaccttggggacatcatgtggggtgctatttcccaaaaccaagcttgaccaatcccgacccaacccggtcatagtcagtcagtgaaaacctgtgatgtacctaaacaggcgagctcctggcagtcaaacgataaaagaacaaagaccacaaagcaaggaggcttgtgtggtggctggccagctatggatcttgagtgatatttggaatatggcctctggtaatcgattaccaagggtgtgtaattgantacaaggcttataaatgaagacaagaagttaagatggcctatggtaatcgattaccaacggtgtgaaatcgattaccaggcctaaatatggatcacgaaagtgagacggcttctggtactcgat

SEQ ID NO: 201357 - DNA, 421 bp, Glycine max
  unsure (1)..(421): unsure at all n locations
agcttgcttctcccatggtgagagctaaattctgttttccagnttcagagaagaagataaagcatgaaaacatggtttaaaaacatagaaggttggaagatataaagtataattaggcatattaattacctgaagttctgccgtgtcaaaaatgcattggcgtccattatgaaaaatagctacaagtttattgtgtatgttcaacgtcctattcctacaaaaatcttacagaaaatgagaagaattagcaaataacgtaagaagaatcccacttgcttaattcctgagatatacaaatgaagggaatcgtatcgaaaatactgaaaagaaagagttcatattgcttgcattgaacgatagggatgaggagacgaagactgatgacgaagatccaaatagcagtttcgcttcatatattaat

SEQ ID NO: 201358 - DNA, 462 bp, Glycine max
  unsure (1)..(462): unsure at all n locations
catggtgaaagcgaaacagattaagtttatgattgttcttatttagccanggacgaggtatgcaatttatccattgatgagacaacttcggagaatgctagctcttcttaagttagtaaaggttgaagtaaaccatacccaatggagaatgagtgggaaaaaacacatttctgtttatagggcaaaaggaagatgccaacctcttggtttccagcttgaaagaaagcttattgttatgagaaactgcagataatagaaggatcttgtaaattcttctttagaattgttatgtacttaggcatattctttgatgaaaattgcatgcgaggtttcccgataataatatgggaggaaggcatacgtttattttccggctaatcgttaagattattcttaatgcgtgcatacaaatacgggttgaagtggatgaacggaaccagtgatgattatccacttcattta

SEQ ID NO: 201359 - DNA, 424 bp, Glycine max
  unsure (1)..(424): unsure at all n locations
agcntttaaaaagagagaggatcgtaatcnttgtatagnagcaancgtacaaaagtgttgtttttcttcacaacatagtaaaaattgacggcagaagaaagatccgttgaccgtagaaatacccagtgcgtatacggtatacagtatctctgcacttactgtcctctctctctctctctacttcattttttcagcacagtcacacacacacaacaataacctctttctctgtttctctcttttgtgcaccgaaacctcacccaccccttactcttactctctctattgttctttctttcaacaagtttcttacttcctttcccaatagaaagaaaaacaaggaaaataaactctacctcgaatggccaacactcaccggcgccgatgaagatctacggcgactccacccgcccgctgcgcccat

SEQ ID NO: 201360 - DNA, 434 bp, Glycine max
taagcacagactatgatgctgcctccttttctctttatgttctggcattaagcaaagattaggcttcgtatcttgccgtctttattgtggtttttataatttatttaattatgttctttatcagttctttattgtggtcttaatttttttattaagttttttattgtggtatttttttttgttgagtactttttttgttgagttctttatggtggcctgttgtttttgttgtgggctttgtcgtattgattcagccatattcttacaagaacgctatcatgaagtaatactatgacttttttttttcttttggattaattgaatgaacattacatgagtatcccatgatggatagaatcttggtggcaacctcgctgagatctactggactatttgaatgtgctacctagcatacctttactttatctaaaaaa

SEQ ID NO: 201361 - DNA, 419 bp, Glycine max
agcttgcttatggagcttctatggttgtcgtatctttgaggttcaatgaggtcctttaatggtgtgtttccaccatggagatgcagcggaagacaaaggagaagaggtgagaggaggcgccatccactagggaataagccatggaagaaggagcttcaccaccaagatgagccttggataacaagcttggagaggatgcttcaatggaggaaaagaatgagagagagaaaaagagagaggggggagcacgaaattgaaggaagaaaaagagacagaagttgaactttgagttgtgtttcacaagactctcactcatcaaagttacaacaagtgttacacactcttctatttatagactaggtagcttccttgagaagatatcttgagaaaacttccttgagaagcttctttgagaaaac

SEQ ID NO: 201362 - DNA, 260 bp, Glycine max
tgtatgctgatgacaactacccaacatcgtatgcctatcatactcgatgatgcccgaatcaaaggctggagggtgacgggtgaaaatagcactgatgcggtcctcctcgttcactaaatgttatgtagcggagaagaaactgtctgagcaaccagtctttgcctatgaacataagaacatcttgtattcatggaaaataaggcatgatatgtcttataaaatgatatttagacgctctattctttgctgctcatactaac

SEQ ID NO: 201363 - DNA, 424 bp, Glycine max
  unsure (1)..(424): unsure at all n locations
agctggaggtacattgctgtttatccttgttgtgacagntatcagattggtataactaactgccattcagttacagagaatgtttttttttttttatcaacaaaaatcaatatatatatataaataatttggagtaccagaggtactaaatttacatagtcagggaatgccatacaaatggttcccgaaacagacaaaaacagtctgaataggaactagactatggctacatttgaaatctgcatctgctactatcctatttgttctatcctctgctaatacaggaaaccctgtctaaggttacttgaccattggttaaaatggattgtgaagtctttctctaagctcctaagccaagtccaaagtaagaatgttgcttatcaaacaatttgttagcattggaaaacagttttctatttttgag

SEQ ID NO: 201364 - DNA, 423 bp, Glycine max
  unsure (1)..(423): unsure at all n locations
ctgatgtctcatcttgttgattttttttgnncncaaggtgatatttctttttttattaaaaaaaangttgattctctctatttgcatccataattacaatgttcccatatacatctaatgaatcaatgatcacctatataaaaaagacaaaacaaagatagatgaccacaagccatatacgtatatatgttattaaacgaatagaaacccaaaactcttaagcattcgccttgaaacattacctcaaatcttatgatgtatgtgtgtgtaacaaactttgcgttattttcatatacccgcatataactggttaagtacgtataaaattggcatcagtgaaagataaaaattggctcgcaaatatatatataaacctggctaattaatattcaactctacctgagcccacaaattatctgtggt

SEQ ID NO: 201365 - DNA, 430 bp, Glycine max
agctttgaggtgtttctttattgtgggcgtgcctgtattataaatgtgtcgcccttgttgtgatctttattacttatacccccatgaccagaatttagagtaacaacctatttgtatctgaaattggaaggcattaattacattattttttaaaattaaaaaatgttaaataactctaccaaatattaatttctaaatttaattattcattatcattttaatttctaaacataagttaatattattacttaagtggtaacttttttcaatgtttgaactaatgtaattgtcaattctcattttcaaaagacttttttttaacttcctccgatttaggaactaatgtaatagccccctctaatttcaagagtaaaagtagttgtttactccgagataaattcctcactccctgatccgcattcagtgcatt

SEQ ID NO: 201366 - DNA, 468 bp, Glycine max
  unsure (1)..(468): unsure at all n locations
gatcaaataagntggatatataatattgttgactataattaaatattataatnnntagaaaatatgcaattaaaataattttagaaaaatgactcatgttttttttatatatgtaatttatcaattaccacgaaacaaagttatcaagtgaaagagcaattttaccaattataatagagttcaggactaaatctcgacttggccttttcgacatatcaacactaactcttgtaatgacttctctcacactaagttcagaagtcattattaccttgacatgacaaaggacactagcatgcattaccgacttagatagcaaacaattggcgtaagcctaatgtnttgtcatgtcattcacatgcatctttaatcgcgtaacaattnttccagcacatattgactatntaaagtcaaactcaacaattgggtatgatatctcattnttttcccacttcactcacactctta

SEQ ID NO: 201367 - DNA, 421 bp, Glycine max
agcttctcgcatccgcacatggaaagacttgattattgtctttattaggcaatattagtataataccaacatggctcctgacagaacccagctgtagaatatgagcaagcaggagcacgagtcttttaaagaatatgcccaatgatggagagatttggcagcgcaagtggcccctcccatggtcgagagggagatgatcacgatgatagtagatacactgctagtattctactatgagaagttggtgggttatatgtccgctagcttcgcggatttggggttcgcgggagagagaattgaagtaggcttgaagagagggaagtttgattatgtctctcccgccggcaccagatataggaggactataacagctggggcaaagagaaaggaaggggacgcccacgccgtcaccttgacacct

SEQ ID NO: 201368 - DNA, 454 bp, Glycine max
  unsure (1)..(454): unsure at all n locations
ttaaaaacgttcagtaactgctggtaatcgattaccatatatgtgtaatcgatttcacattgcaaattttgaattcaaattttaatagctgttgtaaatcaattttggccactggtaatcgattaccagagagtaaatctcttgaaaaagacttttttaacttaaatttcttggccaaaccttttgctacttcaattggaattcccttcctatttaatgtaatcttcctaatactctaaagactgtcttgatcatccatcttgaatatctttgatttctttgtcttgaataaaactttgagaaacatgtaatcctttggcatcatcaaaacatcagcttgatcctttgtctacacacaccttttctggttnttcgacattntcctcaaatacacgttggtggcgactcctcgcattnttctttctttgaagacgcacccgtgagccccgcgtcg

SEQ ID NO: 201369 - DNA, 427 bp, Glycine max
agcttctatggataatgtcaaagctgaattgctacttttataagctatgagacggcttcaggcttgagaattaactttgccaagagccactttggggcaattggccaatctgaagaatggtattgttctgctgctgattatcttaattgagacatgcttcaattccccttctgctacttagggttgcctataggcattaatccgagaagaaagatggtgtgggagcctatcattataaggtttgaggctaggttgaacaagtggaatcaaaggaacatctctatggctggaagaatcacccttatcaatgttgttataacagcacttcccttgttttacttgtctttttacagggctccctcaacagtcattaatagattaaatgctattcaaagacactttttgtggagtggaaattctgaaagaa

SEQ ID NO: 201370 - DNA, 455 bp, Glycine max
  unsure (1)..(455): unsure at all n locations
aattaaaagtacatacttaacttttgattgatattggttatgnggaataaacttgcaaattttttaatagagaaacgaaatgtctcaatttaaaaattagagaactaaaatcatggatttgaaaaaataaggaaacanaattatattctagcctattttttatgtttccaacataatattttccataacaaaattaagattctactacaagagaaaattatgaggatttaaaggagatgagaacaaagtatgagccaggaaaagataatgcagccaaaaccaaagcacacacacaattagcaatagccaatagaaccatccagcatagtaaggaacaacccataatatccacacaatctgtcatgtgcatacaatanatggtaagattctgataacacttacattaattaacataaactcatataagcaaacgtactgtaccttaatctcatatg

SEQ ID NO: 201371 - DNA, 434 bp, Glycine max
agcttgattgataagtcaaggaggattagccactattaaaggtttctttgataagaatcaaaaggttctaatccaagaaccaagagagtcagtcctctccaattgtaataatttcaaatttcaatatctaggttcttatttcattcataaaaatgtgagatatatatagaagatgttgttgtcctaaggcatacaaaaaatgctaaccataagaactcttaatgaaaataattatttcaagttaatgacttattaattatcctgcaatccactcaagagacacacaaaaacacactaacagtcactcctaggtaggacttatttaagtattattctcatgcagtccacacaatataaaacaaagaaaattaccaaatgttttggacttatgtgctaaaacaaactagtgtgacccaaacattttattacaactt

SEQ ID NO: 201372 - DNA, 478 bp, Glycine max
  unsure (1)..(478): unsure at all n locations
gaccttgaaactaccttgacaacttctgctgngcccacacgactttttattttgtacttnttgcattccactgcatatttgcatccacttgcacatctctcaagtgcactaatcttactagaatgaagtcttagtcagatcgatagttgtgctcgagtccctgtgaactatcacacaattgttgattgttggacgatgtacaatagtgatagggtggatgatagtgttggttgtttagtctagtactcttgtcttttgaataggtcgtccaatcttctataatctggtggagcgtccagttacatagaagggagtgtccagctcgatggttcattggcataagttntggtatgattgttttttgttggaactattttcngttagacaattatgtgtaaccttatttgtaaggagctctatattctatgattaaagagttggagagagatttgaaccatctaattggtaaatatgttat

SEQ ID NO: 201373 - DNA, 429 bp, Glycine max
agcttctaaactttatacaagaatgaagctctgttacctcttgttagacaagtggcctcaaatatctacagaaggggggggggttgaattaagatatcacaatcttttctaaattaaaaattctattttgattttaacccaaatcccaagatttctttcaaaaatgaactcctaaataattatgcaaattaatcttactaaatagaaacaataagcaataaacaataaaagagtttaagggaagaaagattgcaaactctgatttatactggtccggccacacccttgtgcctacgtccagtctccaaacaacccgcttgagagtttcactatcttgcaaaagccctttacaagttctaaaccacacaaggacaacccttcctttgtgtttagatatctttacaacaagagaccctcggtctctcaatc

SEQ ID NO: 201374 - DNA, 456 bp, Glycine max
gaggtccaggaatgacaaggcagcagaatgttctattttctctccggagtatgatagtcaccgctttatgagcgcggtacaccagcagcgcttcgaagccatcaaggggtggtcgtttctccgggagcgacgcgtccagctcagggacgacgagtatactgatttccaggaggaaatatggcgcctgcggtgggcaccactggttactcccatggccaagtttgatccagaaatagtccttgagttttatgccaatgcttggccaacagaggagggcgtgcgtgacatgagatcctgcgttaggggtcagtggatcccgttcgatgccgacgctatcggccagctcctgtgatatccgttggtgttagaagagggccaggagtgccagtattgccaaaggaggaaccggtctgatgggttcgatgaggaggccatcgcccaattgctatgtatacc

SEQ ID NO: 201375 - DNA, 342 bp, Glycine max
  unsure (1)..(342): unsure at all n locations
cactcgtcaatagccgcgcactgggaattggagtgagcagcacaagaacgatcgcaacgatcgcaagaaacaagccggacaaacaaaccaagaaatgctccatttcccgagggtgaaaatgacacctgtgctgcagcgagacaaagaagggggagggagcctcagaaagaacagngcataactatatatagcagcgtcgaagctaacgaattgaaactctctacgccaccaagaagcgtaaccggcacagcagcagatatagctccataaagaacgacctgcaaaaaccttgacttcctctaccaccatgaggactatacgaaaacacatactctcggaaac

SEQ ID NO: 201376 - DNA, 399 bp, Glycine max
  unsure (1)..(399): unsure at all n locations
agctntgcggatttggtcttcgccggcatatggatcgaagcgggtctgaaaaagaggcaaatttgatcatcctactttgatgagtgagaaagttggtgcaaatgaagaggatgagaatggggaaggaacccatgtcgtggctgccattcctacatggccaaacttcccacgagcccaacaaggtcatcgcttagccaatatcagcccttctcattacccaccacccagtcatccacaaagtttgctggccgcacatcccatgctaagtgcaaaccaaaacaccaaccaagaaatgaatttggtagtgaaaaagcctattgaattcaccccaattccggtgtcctatgctgacttgctcccatatctgctcgataattcaatggttgctataaccctagc

SEQ ID NO: 201377 - DNA, 444 bp, Glycine max
  unsure (1)..(444): unsure at all n locations
ctggcgatggtgttgggcatctattgtgactntcctatgctgcctctacatacataaaatagccccaccatcccaattttgcaaaaatcatattcatatatcattggggcatttcaccgagcacttggtgggcgcacatttggacacaaattgcaagagaatggggacaatgtggcatgccccattgcttcagaatacaacataggcctaaggccttctcattcaaatccttaactcaagaaatcaagcatggattcagatgcaaattgcttcatgaattttgcaaaaaatgagcaactaaagcaccaaaacacatcaatggagtgccaaataaccaagggaaattgcacttacttgtggggagtgaattaaagcgtgaaaagggaagcaaaaactcaacaatggaagcttggaggctcgtgttctcatagttaccgtgagctt

SEQ ID NO: 201378 - DNA, 341 bp, Glycine max
taatgctaggtaacaaatcgaatactctgcgcctcaacattggtattcatacctaactgacattattaatgtatacagctatacttgcgacggttatatgctcgtccatctttcttagaatggacagattactgcactgttcacaacaaacctgagcaaagtgattgatgttaattactacccatatgaaaatgcaaaaccgtctaactcgcggcacagaccaatcggtatcggagtacagggcctagctgatactatcatactcctcggcatgtgattcgattcaccacaagtaaatatacttcaacggcttctgtattaattcccttcatatccactca

SEQ ID NO: 201379 - DNA, 422 bp, Glycine max
  unsure (1)..(422): unsure at all n locations
agctngaaacctgtttggtctgcatttgtttatgtattcaatgattctgcgaagtacagatatcttcggcttgatgtggatggcaatcttcggttgtattcgtgggttgaaagtttaggatcgtggagatcagtctggcaagctgttgagaatcagtgcaaggtctttgcaacttgccgtcaacttggtgtctgtgtgttcaacgcctcaggttctgctgaatgcaaatgcccgtttgaggtaactgggggtaacgaatgtttggttccatatgaggaggagtgtgaatctggcttcaatatgatagcatataacaacacatatctatatgcattctaccctcctgataattcttttatcacaagtactctgcagcaatgtgaacagttgtgcctgaatgacactcaatgtactgtaacaac

SEQ ID NO: 201380 - DNA, 446 bp, Glycine max
  unsure (1)..(446): unsure at all n locations
gagaggatgattcaatggaggacaagagagtatgtttttcacttaattgaagaaggaaaagggggagagaagttgaactttgagttgtgtctcacaagactctctcattcatcanagttacagcaagtgttacacatgcttctatttatagactaggtagcttccttgagaagctttcttgagaaaacttccttgagaagcttctttcagaaaacttccttgagaagctagagcttagctacacacacccctctaataactaagctcacctccttgagaagcttccgtgagacacttccttgagaagcttccttgagaagattcctagagaagctagagcttagctacacacacctctctaatagctaagcgcacctctttaagatgagaagctagagcttagctacacaccccttataatatctaagcttaccccatgataaata

SEQ ID NO: 201381 - DNA, 423 bp, Glycine max
  unsure (1)..(423): unsure at all n locations
agcttagtttaagttagtctaaacctatgttggctgtctaaattgggcctagtccaacaagagggatctgaggacaaagcttggattgattcactcgaactagggatcgaggtttagtaatttaggctacaacatagaacacgaaagcatgattgattagagaaacatctttatatacatcagctggtctattagaaagacccaacatctttacctgctgctgtcaatttacttgcatttttactgttttaatctagacttagtttaattttgttctaaatcatgaattatcaatgtttctttcaacaatgccttatttctngaatttaccctgtctaaggctagttccctgagttcgatactcgaattcatccattttaatgttaaatacttgacgattcagtgcgtcttccgaaacaccgg

SEQ ID NO: 201382 - DNA, 460 bp, Glycine max
atagaataatcaataaatgtaaagtatctgttgttgaaaaagcataacaagactttccgtgattggtttaaagatacaatatttgcagatgaaaatgtttcagaaacattaagaaagctagcagatgggcttaaaagaaatgttataacttggcaaggatacgacataaacaagtattcattttacacaaaagcacaagacaacaaaagtacaatgcagaacagcggggtcaccctaagggttgaatctcaacacttcgcaagtatgcatgacgcctatccttgtgtagcttccatcccttactttgggttcattgatgaaatttgggagcttaactatgtgaaatttactgtatgtgttttcaaatgtaaatgggttgacaacaacactggtatgtgcaccgatgatataggatctacgttggtagacctaaagaaacttggttaccacaatgaccctt

SEQ ID NO: 201383 - DNA, 404 bp, Glycine max
agctgaaaggagaactcacttctttgtctcttaacgcctacattccgaagagtccgtcagggcctctccctcctgaatcaggtccaacccttaaaatcattttatgcacgcagacattgttcatgaattatataatactcacgacctcacacttatatttcaaacatatttaacaaggtgtgctatagttcaacccttgaggatcctaactaggaatcctacatttttcctttaacactgcacataaaacttttctcgagggaaacactggtccggttatctgataactcgtaactcactagacaagtcatatcaatacacgtcttaatcacacactcatttacaaccatatctcatgtgtacaattttacaattcatcgatttactaattacaaggtatactt

SEQ ID NO: 201384 - DNA, 439 bp, Glycine max
  unsure (1)..(439): unsure at all n locations
tgacaagngggctcggaaaagtaataataataactattatctataccattnttatggcattatgaatgacagaatgaagtggcataaagtgcttcgagagttcacttgcatgtggaaaattttcaaaaagaaaaagacttaagttaaaaggataatgcaaccagattaatacttccaaagaaaagaatgttttgtaatgacatttttagataatttaaatatttttatttggctatattagtataaatcatctctaatccatatactttttaatattatgctcttttttcattatcttttgatatactctattttaataacttgaattcaatatgattttgtttatcaactatttgtggatttgtacattacttatacaaaattttataagtctctttttttagttagtacttcactacgttttaaataattaattagg

SEQ ID NO: 201385 - DNA, 401 bp, Glycine max
  unsure (1)..(401): unsure at all n locations
agcttgcaatgatccgcgatgtttttgtttcttcatggctactaaaaccttggattccttaattgtcacaacaatctgctcaaatttgggatctaacgagcatagtatcttctccataattcttacatcttctaacttctcaccatttctttttagttgatttgaaacatcaagaattcttgaaaaataatcggaaatggactcggactctttcatatgtaaggattcaaactcacctcttagagtttggagacacancctttttaccttgtcttctcctttgagagaggtttgaagcttatcacatgcctccttagcagatgttgcatcagaaatcttcttagacgcataatcatctaatgcttgatagataatgaagagagtttttctgttcttctttc

SEQ ID NO: 201386 - DNA, 303 bp, Glycine max
ctcaagttataaatgttctttgggtagattctcgacatcttttcgtaggttttgtaagctcttaatagaataaatgagttagatagaagccattgataagattttctaagagattcatggacggcaaaaattacctcatcttgttgatttgattcagactcgttagaagatgtatctaccatcaggcatatattggattcttcatcagatgaggtgttatttatgtccttcttgggactcataagaccctttttttctttagtcttgaagaatgtcttcttatcttgactcttcttccattct

SEQ ID NO: 201387 - DNA, 343 bp, Glycine max
ttaaagtggaggggatttttgttgttttttgggtaattgggcttacactcacaaaaaagccttaccatgtaccatggagcatttgtacgtgtaatgaaatattcagtatgcgggcaagactaaagctgatctgaacttggaaacttttatgtgctttaaagattgttatttttattaatttggtggaaacataaatagctctatggatcagatgttgacgctatgaatctttaggaattgagtttcctatgcaacaattgggggtcaaactaaaataaattttgtcttatacaatgcgctaataatctcttataaaatctgagctggtatagaatctaatctt

SEQ ID NO: 201388 - DNA, 429 bp, Glycine max
  unsure (1)..(429): unsure at all n locations
agcttgctcatagcaaatcgtactgcatattactgtttattacaccatnggcgatacccaaccaccctttgaatatctaggttaattttgtcagactgaaatgaaggaaaacagcacaattaaatcacaatagttgacatacttggtgaaaaaatcagccatataaaacattgaaaagagattgacacctgagctgtgtatgaaaccagtgcaaaacggagagcatcaacaccacattcatcaataccatttggaaagtccttcttctgaccctctatagcaatggctagttctttggggtccaggttaccagcctctaacctcttatgtagaccttcaagtgatatcccatttatcacttcaatgggatcaacaacattccctaaggacttggacatcttgcgtccatgtgcatcacgaaccatggga

SEQ ID NO: 201389 - DNA, 353 bp, Glycine max
  unsure (1)..(353): unsure at all n locations
cccccacttacacaaaaaggtgggtttttttgattgtgcanaaaagaacttgattatcactggtaaactaactattgtcaaaataaattttctttaaattgaactaataactaatctatatttaatgtaatcctaaaaaaccttagagggtggaattcttgtttgattagcgggttgctctggatgttacattgtgtctctagagaaacagaaagcctctatttcatatttggccattttttcttaagcccaagaccaccattggaaatattgtcatcgtgaggaaagctttttgttgggatgaaatctgtcctgatgttgtcaaacaccactcctctattattttcttattt

SEQ ID NO: 201390 - DNA, 433 bp, Glycine max
  unsure (1)..(433): unsure at all n locations
agcttattcctaattcttatttactactatatcttataatctttttnanaacatccatgggtattcataagtttacaaaaaatccatgagtacctgtgggtttgcaggctgatgctggtggattttaaacatgtggggtgggtagggggctactacatgcatccttggactagagttaccttgtctattttgtaactctgccttttggaggacttttgaggtgtctctatgaaccatatgaatgtcttgttccacattcctttctgatgtcctatattgtgaaaaaagaggatggaactaaaaaaccaagaggggggctgaattggtttctaaatcaaatcaaacttaaaaaataagagtaaaaaaaacttcttttccacggatcgtatcacaaacttttgataaactaatatttaatcaatcatccttaaca

SEQ ID NO: 201391 - DNA, 427 bp, Glycine max
  unsure (1)..(427): unsure at all n locations
taacatcttgacattgtgatagattgttttgtccaaatataagtcctagaagaagaaggatactaaatagatttgccaagaatataaacttttaatgtcaaacaaagaacctttcacttcttttacttactcaatgatccaggtgccatgttcactctgcaaatcaatcaagaagaaggcaccatccttatagttaattcgagcatgacttgaagaaaccttaaaaataaaaattgttgattatgctaatgatgtgaatcacaacaagtgtgggaccgtgtttcattcaggtaatgataaatttgtgttgcctgtggtgaagaaattgtaaatgaactacctgaactatcttgcattggtgcactcctgctattacaanaacatataagaaaataggctaaaagtgaaattagattatcttatgata

SEQ ID NO: 201392 - DNA, 426 bp, Glycine max
agcttgaacgagtttagggaagggaagattgttcgtcttgcttatctcgctagcaccgagtttggatcaggtaggaaactgttataatcccttgaacctaagcgagagttatgagtcaagtataccatagtggggaagatctcgttgaagaaaaaatagcttagatccgaaggtaggtaaatcatgtattctcgagaatcgcatgtggactaagattggtagagtgttgaagtctcgaaacatataccttttttcttgaatcgtcacatgtttgagaaaaagtcggtcatgtggttaatcatgtttccttgtatctgcttgttcgtctcacattgtcataagtgtctcctatgatattacccaattccaaatagtatgtcattcatattctattattgttgagatgtcactgtcgcgagataactt

SEQ ID NO: 201393 - DNA, 422 bp, Glycine max
  unsure (1)..(422): unsure at all n locations
atgaggagcacccacctgcacattaagcaacaacctcgtgtaatctaactcaccaccacctggtggaaagtaactcaatctcccaatagataaatcattttttctagggtgccactcttgagcatcataataattaaacataaaagcctcaagaaactgacaaaaggtgagcttacggccctttggatatttaatattagcttccatccatgcaagaaatgtagttttcatttcgtcgttccatgccaatacattgtctattctatttgtatctctcanagtaacacctctgtgtctaagaaaacgaanattcaatctttgcatagctgaccatctcacatgaatataaaanaatacgctaactacattcacaaggagataaatatatatagtccatatattggttaaattcatcaacacat

SEQ ID NO: 201394 - DNA, 320 bp, Glycine max
aatacccataattcagctacaaaagccgtgtatataccaatgttgatacagaagctacctaaaacattttatatatcttaaacaaatcagatatcttataagttatgaactgatcagaagtgtaaagtttaaaggttaattgattaaatcgaaatatttggcgagattaactaataaatcccactgcagctgctacttactatgaaaaaggaacttgtgccattattatgccattacacagattccaatgacgcctaaattaaactacttgagtggtacttcctcaacaaaatgactcacttatccttattgatgtatcc

SEQ ID NO: 201395 - DNA, 423 bp, Glycine max
agcttaagaataagggtcataatctttttttttcttgaagggaattcaataaataggcctcctattttcaatggagtgggttatcattactgaaaaacccgtatgcaaatttttatataggcaatagatttaaatgtatgggatgcaatagaagtagggccttatattcccaccatggttgctggaaatacaacaatagaaaagcctagggaagattggagtgaggaataaagaggattagtacaatataacttaaaagccaaaaatataattacatctgccttaggaatggatgaatactttagggtatcaaattgtaaaagtgcataggatatgtgggataccctacaagtaacacatgaaggcagaatagatgttaaaagatctaggataaacacattaactcatgcatatgaactattt

SEQ ID NO: 201396 - DNA, 420 bp, Glycine max
  unsure (1)..(420): unsure at all n locations
taaataggtggctttggtcatgctcgtgcgcttaacgcaactttgatccgctcagcgcacattaatgaattttggcttaacgcgtgccttctttgctcaacggatggactgaagcggtacgcttagtgagatgaagcggtgcgctcaatgaacatgtacaacttaacttctttcagattcttcctcgcgcttagccaatgagtgttgcacttagcagatgctcgctaagccagcaaattggcttaacgagaaagtgaaaaacaacacttcaaagcttacctaattaacttgaaattgagaganaatgattattaaacacacaaaataaaattaataagttattattacctaatcttaactaagagaacttataacactacaaaataaccataaattggaggagtgtgatacaatttacac

SEQ ID NO: 201397 - DNA, 430 bp, Glycine max
  unsure (1)..(430): unsure at all n locations
agcttcacaaagtaaatcatctttgtatttcattcttggtagacctcttacaagtttatgtttctctagctttgagattaacctcaagctagcataaccgagtttttcatgtcacccagtgatattctttgacagacaacaagcaagatgcattttgatatgatatctcacctaatctaatcctataaagattacattttctcttagcagaaaaaaggaaagacctatcattgttttggataatacattcatccttgttaaaggaaacaccatattcattgtcacataattcacttatgctcagcagattgtgttttaatccttcaacaaataaaatgttatcgatatgtggatatagaggtatacctatcttacccactccattattagccctnttttattccctctgaaagttacagttccaccatgc

SEQ ID NO: 201398 - DNA, 395 bp, Glycine max
  unsure (1)..(395): unsure at all n locations
catggagctacatcaaagagaagataataatttattattaattggnagctaattatgttatatatattntttgtagtaagaactaaaaggtcattaaactacaaattatagagactaaaaatatcactttcaaactatagggactaaaagaaaattaaaatacaaactataaggactaaaaagaacacttttaaactacactaaaagagaatgataatgtaaactatagggactaaaaaaaccacttttaaactaaaaggactaaaaaagtaagaatcatgaaactatagagaccaaatgagtaatttaacctttctaaaaaaatgcattcctaaaaaccttttccactttccttgagcggtgccaaccttttttnttaaaagataaagctagga

SEQ ID NO: 201399 - DNA, 429 bp, Glycine max
  unsure (1)..(429): unsure at all n locations
agcttagaaatcaagtgatcatcaatttctttcttatggggagngaacgcaatatatcatgcatatacattacttgtatcttgatttcaggaactaaattgtcatcataaaaaagggggagattgtagaagcaaagcctttgtctttgatgttttgatgatgatcgtgatgatttgatgaaaatgcgcttctcaagtttaattcaagacaatgattcaagaatacaagatacaacatcaagaagatctctagtattttaggaagggaattcctaattgaaattgcaaaaggtttggcaaagaaatttaagttaaaaagtctttttcaagagatttactctttggtaatcgattaccagtggccaaaaatggtttactacagctattaaaatttgaattcaaatnttagactgtgtaatcgattacacaa

SEQ ID NO: 201400 - DNA, 280 bp, Glycine max
gctgccgccagctcgccaggcgagctgcgctcgtccttttatctattttgctcccaccagaagcaatatccttctggatgaatcttctggagggcccacatgggcctggatgttatttgaacccccattatagctaagtacatctctcatgctattttaggtgactcttttttcttatagttactaaaacctaccaagtttgtaacagatctagttttctttccgtactgttaccgatctctgcggaatacaaaatcatcctcttttctacttcggattg

SEQ ID NO: 201401 - DNA, 426 bp, Glycine max
  unsure (1)..(426): unsure at all n locations
agcttgtagacgttggatcttcttcatctttggaatcccttgcttcttaaagnttgatagcaacggaatgaagaaggagaaggatgattggagacgccacttcaaggagaaaatgagtctagaagaaactcaccaccataggaagccatgaataagagcttgaaggtaagagaagatgaatggaaggagagggagagaaggagcacaaaattttgtgcctcaaaagaagtctgaactttgatcatttgctaaaactcaataacaattgatgcctaaattgagattataattatacattattcacctccccaagaaagaaaaaaagggataataacaaagaagaaacaagataaactcgtacaatataataaactataaagaaagacacttaatatacaaccagaagaatattataagacaattatg

SEQ ID NO: 201402 - DNA, 378 bp, Glycine max
  unsure (1)..(378): unsure at all n locations
tcctctaatcacttttctcataaaacagttctttcgaggtactatcatctncagactcattctccgccgcatcagcttctagtccgctcaatcaagtctccttacacttcttgttaaccagcttctttaacctccttcaccgaacaaccaccactgcccaagagtgacaatgacgtcttcatcatctttctcttttaaccctccatcattttttatgaaaaaggggagaagttaaatttgatatatgtaaggcctctatggaaccatatatacataggggttgtttgctgacactggtctattatcatcactattatatatcatgctgcttggtcatatattccttaacagctaagtgtggatagggagttaccactt

SEQ ID NO: 201403 - DNA, 420 bp, Glycine max
agctttagttttagagtgattatggggactttgtgatggatgaggaattgaggattatacaggcatgccaaattgtttgaggacaactattaaaaaatgttgataaatggagtttgacaatctgtaaaggttgaaatgtattgtgtattcttggaaattcaaatgaagctggtttgataggacaaaaatagttagtaaatatgatttttagcttcttaaaaattctcataactagcatatttactgaaaattgataagaaggtgaacattgagaattttgttgttgcttgggaggaaaagggaagatgtgagaaactaacattaggctaaatattaagctgaacaaatgctatagctgtgaataaaaataatgctattaattagttctttacttcaatatcttctgttctatgcttaccc

SEQ ID NO: 201404 - DNA, 250 bp, Glycine max
atatacctaagatttacttgtttttattcttacgcgcatactttcttaatctgttttagtcattaccgtccaaaattatatagagtgactaagatagattaaagaaatgtattgtagagatcaaaacgagctaaaaatgtatgagtatggactaacataatagtttctaagaacagggaagtagtgaggtaacacatacaagattatgcatgtatgaccaaatgaagctttattacctaaccctttactg

SEQ ID NO: 201405 - DNA, 425 bp, Glycine max
  unsure (1)..(425): unsure at all n locations
agcttntatgcaacgaactagaccagacttctatgtccttcataggacacaaaacaaccaactaccaatgggccctgaattcgacaacaattagctacgtataacataaacattctttacagacatttcataaattttacttactaattcaagtaaactcctaggtagacctctctttaggattccttaacccatgtttcaatgtaatgttgacattcagcacgtctatcctttgcattgtgtatggactgaggctcaagaaatccatacattgagtcatgacccaagcttgaactccactcatccataaacctattttgaacatttcaaatgaaatgtcataatcatgtctatcataacgaatatcaattattactcaatgatatggaatttacttacatcatccacaaatatagtataactat

SEQ ID NO: 201406 - DNA, 412 bp, Glycine max
  unsure (1)..(412): unsure at all n locations
gccacttaaaagcaagaaaccagaaggcaaaaggttatttttttttttatgccaaagtacatatatcaaanaagagtttaagtanaggggtagacatcaaaagttacacacaacttaaggatcactataggatgaattgctaaagacaatagtgatgatgatagatgtgtctacacaatcgagaagcacacaccaaaagttgtaaagacaaatgtcatgcaacaatgcattgtctcgatgaagctctcttgatccaatcggtctatttgaaagagaagagaaagctaagttctactttgcaagacaaccatgaagaagaaaagtagtctttcacaatntgcaacgatcaagaaaatatcaatgccattatgcggaagactcacttttatgaagaagtagcagcctcatgata

SEQ ID NO: 201407 - DNA, 429 bp, Glycine max
  unsure (1)..(429): unsure at all n locations
agcnttggggcctagagaccattagagagttcttctgtttgtgtttaaggaggatcgaggttactattcatgtagccaggctgagagtatcctagggttttcattctcagctgtggttcgtattactattcatgtgaggttactgttcacgtactaatttccactttcattgtctgcttcaatttccagttttgttatctacttcaaattccatttcgtttctgctgttaatggaaggctgaatctttagtgttgttttctcttgaggattaagcatagctctctttgaggttttgttcttaatattaaattctaatcagtttctcccctttaccaattattctgcattgctgctgatattaatccatgcatgcttaatgtttgattaattgcctttgtgcttaattaacgttcatgcttaatggacat

SEQ ID NO: 201408 - DNA, 458 bp, Glycine max
  unsure (1)..(458): unsure at all n locations
ctataccaacatgacaattagcggcttcattatatttttatcaaaaacnatcataaggcataaacctagtaaaactacccatcatatctcccaaaacccaatacccatgaaaatttatgtgacaagaagtctacccaaacctgaaatgtgaagtcccaaaatggagaggtgcgcttcatgactccgaaaatggcttcctttcgcgattnggagcagaaatggtgtgcaaaggttggagctttgttggagcttcaatggtgaggaagaagaaagtaatatcaacatgagaaagagagggacaaaagcttctgaaattttgggctgagtgaggagagaagaacgtggctttagtttaaaaggctcttctcttttttttcttaaaagatgtgtcacatgtcttcttttgagtggagcanaaagggtccactttttctcttgatgtgactcatactcatcca

SEQ ID NO: 201409 - DNA, 428 bp, Glycine max
agctcggtcgcttttggtgagtatgagttctttatttctgacaggagaagttcatctacaaacattgagagacttttcttggacactattaactttctgcaatatgcacagaaaaactcgagaagttggtaacaaattcctagcaaatttcctcaatggatgttatccctactttctctttaatgcattccttacaaatcctaccttatatgttccctcacacatcgcaacattttgtgcaacactaagctatttcttctgtttactctttagcacctaacatttagtaccatacagtatcacatgtcttatgacttgaataaaatcttccttttatttaatgaacatagcatcatttggacatttgaacacaaggaaaatgctatcaaataaatctgttgtcataagcagctgaataaaaattattg

SEQ ID NO: 201410 - DNA, 431 bp, Glycine max
  unsure (1)..(431): unsure at all n locations
tgatgaggacaactgtggaggagaagatgttcttttttttccctgnnggctgcaataatgtaagcattagcatattgcagtatgcggatgacacgatcttttttggggaagctactatggaaaatgtaaaagctataaaagctatccaaaggacttttgaattggtttctgcgttaaaaatcaattttgctaagagctgtttcagcgcttttggcacaactgatcagtggaagcaaatagcagctaattatatgaattgcagcttgctagctcttccttttgtttatcatggcatacccataggggccaatccgaggcgggatcatttgtgggagtccattatccaaaaatgtgagagataactagttaggtggaagcagagatatatatcctttggggtgagagtgacacttatccaatcggtgcttaca

SEQ ID NO: 201411 - DNA, 423 bp, Glycine max
agcttcaagaaaatgatggccttagtatatttcttatttccagaagggaattctatcaatagacctccaatctttaatggagagggttaccactactggaaaacccgaatgcaaatttttattgaggcaatagatctaaatatttgggaagccatagaaatagggccttatatacccaccacagtagaaagagttacaatagatggtagttcatcaagtgaaagcataactatagaaaaaactagagatagatggtctgaagaggatagaaaacgagtacaatacatcttataagccaaaaacataataacatctgccctaggaatggatgaatatttcagggtttcaaattgtaagagtgctaaggaaatgtgggacactcttcgattaacacatgaaggaactacagatgttaaaagatct

SEQ ID NO: 201412 - DNA, 409 bp, Glycine max
  unsure (1)..(409): unsure at all n locations
tgaagcttcctttacccctttntcttctccaagctatgctaagcacaccaagctacgggatccatgagtctagcagcccacaagcctccattgttggatttttgctctcccttatgcgattttgttcacttcctacaagtaagtgcactatcccttgattctttggctctccatcgatgtattttagtgctctaactatctatgtttggcacatttcgcgaggcaattcatgtttgatatgttgaattatggggttgcatggatggccatgagcctatctatgattctgagatgaatgggcatgacacattatccctattccccatttttattcagtgctaaacatgcgcccaccaagagatcagtgaaatgcctcaattcaagaagacagagatcacgataatgatcc

SEQ ID NO: 201413 - DNA, 438 bp, Glycine max
  unsure (1)..(438): unsure at all n locations
agtcacctgcggcatgcagcttatggagtaggttacctttttttttattggtggggaattgacatacagggcccattcccacaaacacttaggcaagtaacatatcttgtggnggctgctgactacttcacaaagtggttataagctcaaacatcggccaaaatagcagcttcaaatatggagaacattgctttcagacaaatcatatgcgggtatggagtcccagatgtgatagtcatagataatgagacgatgtttgctaacaatagatttcaagaattcctagatgacttaaaaatcaaacaacactttacatttgtggaatgtccataaattaatggtcaggttgaagcaccaaataatataattctcataggaataacaaggagattgcaacatgcaaaaaggggtgggtagaataggttcctcatgttttat

SEQ ID NO: 201414 - DNA, 434 bp, Glycine max
  unsure (1)..(434): unsure at all n locations
taagcctattatcttcaaatacttttgtttctcttttggacagagtacccttcacagtcatttccatcaaatttttatcccaagaaaattaggagctctgatctatgtggaggtcctctacacatattggaaaagccattcattgaggtatatgattgcttattggttttcatgttgcataaaattgtttaaattgtttgatcttatcatgttactaactttaatttttttcacgcctgagtttgtatgctttacnactttcaggctcattctttntattagtcttattatttgagctaagtgtatataaaaagtttatagtgtgatattaaattataacctcatctgaaaacaatttacataatttggatggaattgttgtaataaatctcttatctgtgttttgaaagattgagcattgattacatgatatt

SEQ ID NO: 201415 - DNA, 425 bp, Glycine max
  unsure (1)..(425): unsure at all n locations
agctttgaagaacaaggtaatgaatcttttttcataaatgntatttattcttcctataaaaatctttctatttttttcttgtaaagttcaaaaagttctaaaaaaactttgaacatattgagataaaaagactaaatgctaattgtaaatccatctttgagacaatcacaaaattagtcaatgtgcaaactcaaacaataaatcttttcttatttgtttagagccaacaatagtttggtaggacaaaaaatactaagcattgatctagcttggggtagagcttgatttgtagagctagaagtggtcatgacataatacttgtaacttgtgggaagttagtggaacttgatggtttaccaagaactagatgtagtcttagtggtagagataaatcactataatttcccaagtttgatctctacttg

SEQ ID NO: 201416 - DNA, 269 bp, Glycine max
tgaatggttcgttcagtctgaccatctgtttgaggatgataagctgaactaagctttagctttgtccccaaggcttcatgtagacttgtccaaaatcgcgaagtgaacctcggatccctgtcggatacaatactagaaggaattccatgcaaccttaccacttccttgatgtacaactccactagcttctccattctatacttcatattcaccggaataaaatgagcagatttggtgagtcgatctactatgacccacacagcatcatg

SEQ ID NO: 201417 - DNA, 427 bp, Glycine max
  unsure (1)..(427): unsure at all n locations
agctngcaatcaaagatattgtatatatttttattatctttccatacagcaacacaaatttgtgttatttgtacgcttaaatctggtagattgcctattcaacttgaaatgtcaaatttctatcttacatcttttatttggacaatatctaacaaaagatgcaacaaagaagtttactaaaccttatatcagagatgggcatcaattctttatatattgcttgtctggcacaccacaaattcttttttgatttgttttgtccatagattacactttatatagttctcgttcgctctagttaaaatcagtattatacttgcgtaagccatcaattaacttaaaaatgacaattgaaatgtacaacacatgattttaggaaagcagtgatagctgaaaaaatgaagtatgtgggaatgattgcacttat

SEQ ID NO: 201418 - DNA, 416 bp, Glycine max
tcaattcagctggtgctttctccctcactcttgtgttttctcatcatttctgccatagcccactctagtgttgatgctgaagtatcagttccagcagcaaatatgtcctggtgaaacaaataaaatatctctatataaagtttggtaaaatgaaaagagaaattgcatttatataacaaaatcgggcaacttttttaatagaaaaggagatgagaagaaaaggaagaaaaatgtaagataaagtaattagtacaaatgagaggattaaagagattaatgttataaaaagagatgttagtgagaaaaaacgtacttcagaaacaggaaatataataagaagtttgaggcatttacttaccaatatcaaagctttgatgttggtagtcgtcatttggatgtcgagagtgtcatctttg

SEQ ID NO: 201419 - DNA, 425 bp, Glycine max
agcttgtaggttgaagaggtgagatctattattggttatggtgaatgtgttttgagagatttataacttaatacaattatagagagtaagcttgaatatgagagctttacaacttaagataattacaaagagtaagaagtgccctaagtgcaattctaacctgagagaaattgcggtaagcgtgaaaagttgtgcttaatgccaaaagtggactccatcttaacgagacacgctcgtcaagcgagatctgcagattataaatatgtttttcagcctgaaaaatacaatttcacgcctctctctctcaaaactctgtccaaccaccctagaaacttcttctccaccacccacgaccaccggtggccaccacgagctgccattgtttgccgctaaaccaccacactgagaggaacattttaatcgga

SEQ ID NO: 201420 - DNA, 464 bp, Glycine max
  unsure (1)..(464): unsure at all n locations
tgcaactctgggcaatttctttaaaactagtcacttaatatgttgtgactttngaaaaaatcttcagaaacaagtcacttgaagaattatgacttttggaaatgtatttttcgaaatcaatcactggtaatcgattaccattaaggtgtaatcgattccacatcaacagatgtgactcttcattttgaattttgaaaattaaaacgtttagaagctctggtaatcgattacatgtattgtgtaatcgattacacaagtttaaaatgatttaaaactgtttaaacataagttgtaactcttgaaatttgaaatcttaacattntaaaacactgataatcgattactaccttctggtaatcaattactagaaagaaaaactctttggtaatgatnttgtgaaaacttcttgtgctactcaatggtttgaaaaacatctttagtacttatcttgattgagtcttctc

SEQ ID NO: 201421 - DNA, 420 bp, Glycine max
  unsure (1)..(420): unsure at all n locations
agcttctcaagcaagcttctatcatactcttccactagggtataagcacaaatatccttgtaactataaccaataaacacgcattactcaaatctaaattcaagtttatgtttattacatggcttgaggaatggataataggtagggccaaaggttctaatttcttggtaagcaggtctttgatgaaacaatgttttaattggagtgttgttattcaaagtgggaacaaggagtctatttattagatatgtgacaatttggaacgcctctcccccaaattttagagttcgcttcagttatgtgtttgtgttttctttttgttttctttntgcttagccattttgctcatgagtatacagacaactaaagcaatgaatgatgccgaaactattaagatatttggtaaaaggattgtacttt

SEQ ID NO: 201422 - DNA, 464 bp, Glycine max
  unsure (1)..(464): unsure at all n locations
tataaggcaaatatgggtgtccttgggattcatgatcatataaggcatattcatatttggcaagggtcctgtcatcattatttcagcgagaaactaggcctggagtgagttgggcggaaggagagagatatataggaaagaaagaatagaaagaaaagaaagaaaagaaagtgagatacgtaatggatgatatgtgagagaaaaggaataaataaattggattggattggtaatgacttgtctattttcacatttatatatgatctagcatgtgcttgacgtatgaatgcaattaaacatatatatactatataaatatatcatattgcatatataatataattgtctaaagcaaataacatacgcatgancgatggtttgattattctcacaatattcanaaagtatacatcattagatagagtatcaagtggcggtcatcttgatatttaacatacctataa

SEQ ID NO: 201423 - DNA, 423 bp, Glycine max
  unsure (1)..(423): unsure at all n locations
agcttatcaccttgaggacaaaggtgcnttcttaagagcaaagggatgttatgaataagcaatacacaacacaggcaagggaaaaatgctaccaaacagagaagagacaaacacttacccgagaatcaaaaaggcagagcactaggccacaatacctgaggtacttcataaccaattctgacaaagaacgttcagctggcacattagtattggtcaggaggaatatcctgtttgctagaaagaaagcatctttctgttaggatatttccaaattttgttattgctagcaccattgtaggacctgcagaaggaattagccttagcatttggtgcctataaatgaacaataaatgtaatagaaatgtaagcataaataaaatctccttctcttatcttgttttctggaggatttcctgcgcctcg

SEQ ID NO: 201424 - DNA, 358 bp, Glycine max
  unsure (1)..(358): unsure at all n locations
atcagctccatcatacttgctaaangactgcatgaggttcattggagatggagtgctattgcagtccttcatatgagacttcttgaagagtttccttgcatacttcttttggtgaatgaggatgccaccatgatcttgcttcacctacattccgcaaaagaaactcattaatgccagatcttgcatttcagatgctttaaacatctcagctctaaactcctatatgaggttctcatcactacctgtcacaagtcaatcatcaacatagacagcaataatgattaaatctgcatctaccgatttcacatataattgacgactcacttggacttttgactaattctagatcttgaagatg

SEQ ID NO: 201425 - DNA, 430 bp, Glycine max
  unsure (1)..(430): unsure at all n locations
agctntntatgcaacgaactaaaccagactttttgtctttcataggacacaaaacaaccaactaccaatgggccctgaattcgacaacaattagctacgtataacataaacattctttacagacatttcataaattttacttactaattcaagtaaactcctaggtagacctctctttaggattccttaacccatgtttcaatgtaatgttgacattcagcacgtctatcctttgcattgtgtatggactgaggctcaagaaatccatacattgagtcatgacccaagcttgaactccactcatccataaacctattttgaacatttcaaatgaaatgtcataatcatgtctatcataacgaatatcaattattactcaatgatatggaatttacttacatcatccacaaatatagtataactatgttca

SEQ ID NO: 201426 - DNA, 215 bp, Glycine max
  unsure (1)..(215): unsure at all n locations
ggtccaacttcaaaagcaagaaaccagaaggcaaaaggactatcatgagttttatgccaaagtacatatatcaaaaaagagtttaagtaaaggggtagacatcaaaagttacacacaacttaaggatcactatangatgaatggctaagacaatagtgatgatgatagatgtgtctacacaatcgagaagcacacacccaaaggtggtaagacaa

SEQ ID NO: 201427 - DNA, 428 bp, Glycine max
agcttcttatggggtccatatagtatgtttgtttctttttcacctatatggagggtggtaatgagagagtatgtgtttgaaaagcaatcgaacagtgtaggtcattgtaaaatatacaagggaaactagactggctcacctccccactttcccccaagaaataaattgccgatgatatcatttaccaaatcctcagtggcaatgtttatatattcctctaagttccttgatcctaaagccttctatttttttggaagagtaggggacttgctaaatgatggggcaattgaatttatcagccaaaacacttcaaaattctgccactaacttgtagcataagttgtcatcttacaaatataaagaattgcttgttccacaaacttgtattaattgctagatctgtttcatgtaagcattgatttttgata

SEQ ID NO: 201428 - DNA, 456 bp, Glycine max
  unsure (1)..(456): unsure at all n locations
ntgcaactccattcctgattnntttttttttatatataattatgattatgtgaacaaaataataaatggatgagtatttcttttttaaaattaatctggcatgggcagatgtgcctctcatttgaaaattgccactaagctcattgttgtcaaaatcgcctcccacacataggattgtgtggtccaatgcgttttgacctcccaagtgacttgtattcccaccagaaagcattctatggttcacttgtgttggatcattgctccaagtcgtggaatcataggattactgcactccaaaaatcagtttgcaaaagtgaacgatctgggttggctcatacaatcctttagaaagaaagctttntttttggttgattccctaaattgtgtagtgtttgtgcaaccctcaactctcctccgctgtcattctttgacactcttctctggttcttctctaac

SEQ ID NO: 201429 - DNA, 432 bp, Glycine max
ccaagcaccgcagctgcagcttaatgactctatattggaacattgcttgtatcttcatgggacatgggatacgggttaaataaattcgttcctggttgggttgccttgaacaataccttgttaagcagcagaattagtttagctaatgtatgataataggctttgagggcaccaaaatctgtagaaaaagtaatcttgctacaatggtttattcagccgagaactcctcatgaagaatgcatttcagccctttattcaaaaattttccaaaaatctaaggcagtttgattcttgaacctgaggcatacttttcatgctagcgcctgaatctggaacttgtcactgattaacagttgaaagattttgatgcttttattcccatgtaataattttgtctacctcccattgtcacacatgcttttggattgacac

SEQ ID NO: 201430 - DNA, 435 bp, Glycine max
ctaagcttggttgaacccaccatgatggatgatcacgttccagtttttttcttatgagttacaatagattgtgacattcagtatgtcaagatacatcatctaatcgctagtattggatatgaatgggaacatgtggaaaattcgagtttattgctgtcagaatcaaagcagggagaataaggttgttaaaaaaacaaaaatagcgctatttactgaccacttatattgtatgttgtgactagagaccacttactagtgacttcagggttgattacatgacttactggttttcttggagtttcaaaaattatactaatatgtacagctggctaaatgacctgaccctatgggttgggctgggccagaacgctgcaaatatggtcacgatgggctctcacaaaggtggcccaaatagaatatgagccatttatctta

SEQ ID NO: 201431 - DNA, 248 bp, Glycine max
  unsure (1)..(248): unsure at all n locations
ctgcagcagcagctccnagagaaaaatagcgtttgttattctaatgaangacctctgaccttgtacatataaacttatgtataagctaatttaaaccttgcgggaacaatttatggagagttaccttctccttttctttgactcttataagcgcttaatgataagtttatcctaaccggacccaaacatagatcttttattttattttacttttttatggggggggaagggggactatctttcctctt

SEQ ID NO: 201432 - DNA, 360 bp, Glycine max
cttatgccctaagaatagaggactgtgttggatgtaacaggtgctaatccatttgaccgaccacattcttaagtgttaaaagttatttatggcatgaaacaacttgaagcataggtctaggttattgatatacaatacatgttcttgattacaaatgttgatgtatacatttttttctctatgataatacacatggtttaacaagaataaaaataacccttaataatattctcatttaagaataacttctgaaaccagtcttattccaatatgataattcagatttatcatataaaagtatatcatctttactagaatgacaggatataacttgtcaccttccctagatacaacataaag

SEQ ID NO: 201433 - DNA, 421 bp, Glycine max
  unsure (1)..(421): unsure at all n locations
agcttttgagtgaaaggatgtgactcttcttattttattttgaattncaacgttcaagggcactggtaattgattaccaaaacattgtaatcgattacagctttttgaaaataattggaacgttgtaaattcagtttgaaaactttttcaaactcattttgctactgttaatcgattacaacaatatggtaatcgattaccagagagtaaaaactctttggtaaaaggttttgtcaaaaactcatgtgctattcaaagttttgaaaaaactttttaatacttatcttgattgagtcttctctttattcttgaatcttgatcttgattcttgagatcttgaaccttgaatcttgattcttgtctctagactttcttcttgagtcttgaattcttcttgattcttatcttgaactcttgaatt

SEQ ID NO: 201434 - DNA, 446 bp, Glycine max
  unsure (1)..(446): unsure at all n locations
agtgcctatacggagtgctcctgttactcatttgttgttgagatttctataataataataataacaaataaaataagatgatagaaattattttcttttcataagtaaatcagatattattatataatttttagtttatttgttttcagttatatgagctagtaattacaattatttttctatanatggatgtacagaaataaatgggtgtacaatagttatgctttccgttcaaatatgttggaaatattccttcatcattggctgtgcagtagttacaggttctgctttaatactattcaaatattattttatgcaatgatatgtgttaataattgcaaatattacttcatagaggctgtgcaacaattacggggtccgctttacaaatatacatatatatacatatttggtaattcatgtaactgtgctatgtatgagatata

SEQ ID NO: 201435 - DNA, 409 bp, Glycine max
  unsure (1)..(409): unsure at all n locations
agctntaagaatcgggtatctcttttttctttttgagaggcacgaataaccagagggatgtttaatatacaagggaacacagaaataatgaaatacattgacagacaagaagaagtagtgttgaacacataacctctcaaatgcaagaataaagccccaggcatctggatggagttgggaagggaaaattctaagaaaattcaaaaccctgatttggaaatcactaaggggtaacatcttttaagcatggcgtcatctggagttctatattagtggtcatatccctgtcacaaacaaaatggggattaaatttgtcaccagaatctggaatgccctgaaatattgataattgaaaatatatgtttgatgttcttcttggggtatttgagtactcgattaatttggatga

SEQ ID NO: 201436 - DNA, 413 bp, Glycine max
  unsure (1)..(413): unsure at all n locations
ttcaccccataattcccccagatttgggcanattttcttttatccaaatttccttttatgaatgatgctctcctacaacctaagacaatgtagaaggagataaactgtataggctcaaggttcaatcaaacaatcatactttcaactcaaaatgggtgcaagggataaatcaatcatgcacaaggtaagctntttagctaagtggctatcttcaatcaaaacatggccttcatcctcttcaaactcatgtattcattccatactcagagatttatgcaaaaaccattacttattgctagtcgttctctcacaattaaagatcacactctcatcgggttgcggctaatgcattccttcacaatcaaccctgacaaccanctaacatntntagtcataatcctaattcccatgtc

SEQ ID NO: 201437 - DNA, 428 bp, Glycine max
agcttacaaatatgttttaaatccaagcctatatgataaatcaaatcaaatctagataagataagataagataagatctagatgaaataatatctagatgagatcaaatctaaataatatctagataagataagatctaattttatagaataaattagtctgccctcttcaagtccaagctcaattctggattcaagcccaagcccaattctggattcaagcccaatgcttcattaattcctgaaattagattaaaaacatcaaattagctgaatgggcccaaataataaaactgcctaattaattgacaattaagaccaatcaataattaaaatggtgcaaaaagggtttagaaaatagaagaaaatgatggcacatcaaaaccccccataccttagcctttgcactcctgggcaaaatgaaacaaa

SEQ ID NO: 201438 - DNA, 401 bp, Glycine max
  unsure (1)..(401): unsure at all n locations
tagctatgactntgtacatgcacccaattagagatatatgcctgtagtcatttaaagattgaggatgatttgttttagggataagagccatgaaagaagcattgctgcctctagggaaacacccacggaagtggaattcatccacaaatctcctgaattcagctttcaaaaccttccaaaaggccttaataaaattgaaattaaatccatcgggccccgggcatttatctccaccacaactccacacagcctctttaatttcttggtcagaaaaaggggcagtgagctcctctctttgattctggtcaattgatcggaagaaaactctatcaagagtaggtctaaactgcttgtcttcagtaaatctatgtaggaagaatttatgaacttcctccttgact

SEQ ID NO: 201439 - DNA, 428 bp, Glycine max
agctttacagcagagtttagtaatgtcctctcttctctataattaaaataacttaatgccgttaacctagggaattaaaaaaaattaatggctgagtgtaactgaaattgtggcaaccaaaagtcacccccaacagccaacaagtcagccaccatttggtctcccaaaaggttgatgcctaggttgccaattgggcccttattacaacttgaactaaacctactaaagcccttttagttgattaacccaaaacatatttttggtcagccaactttacaaggattgggccattatttagacaaactaaacactctaaaattgagacaaagtggtgtcatttagtcctcctccatttgggccatgatacaactcacaaccttggacttttctccttgaaacttgggcttgtatgcaaatagtatggacag

SEQ ID NO: 201440 - DNA, 387 bp, Glycine max
gcgtctcaatatattattggcctgaatcagacatccgaatgctaagttatggctgtttaaatgctgcctgtgcttccatgtgcaagtatgagcatctcgatatattatgcgcctgagtcgggcatctgagtgaaaagtgtatgccatatgagttagccgagagcttcgctgttcgacttctagcgtctcgacatattattggcctgaatcggacatcccagtcaaaagttatggcaggctaaactttccatgtgcctccatgtttaattttgagcatctcgatatattatgcacctgaatcggacatctgagtgaaaagttatgccatatgagatagctgagagctttcgctgtcattttccacgactcgatatttattgggctgaa

SEQ ID NO: 201441 - DNA, 419 bp, Glycine max
agctttctccctctccctcacgttgctttttctttcttcttcatcctccattgaaactccattaaagctccaacctttggtgcccatttctgctccaaatcgcgaaaggaaggcattttcggagtcgtgaagcgcatctctacgtgtgggacctcgaaatttcaggtttgggtagacttctttctcacttgattttcgtgggtattgggtttttgggagatatgatgggtagttctgctaggtttctgcttcatgatagttatttgtgaagaaatttgttgaaagcatgttgaacttgccatgtttggatgagttaagcttacccattcagttttagggtttttatgatgatgcttgtgatgtttatgtgctgaaatcgcttatggaaaactgttagagatgaagggtagagttaacct

SEQ ID NO: 201442 - DNA, 432 bp, Glycine max
  unsure (1)..(432): unsure at all n locations
gactgatattgatttctttagatgcacattatgtgttcatttccttcaactgagaaccccattggttggtccatacaaacattctcctctaaatctccattcagaaagacgattttcacatctatttgatgtagctccaagtcataatgggctactaatgtcatgataatcctgaaagaatcctttcgtaagaccagtaaaatgtctctttataatcaatgtcatctttctaagtaaattccttagcaacaagtctagtcttgtaacattcaaggttgccatgagagtcacgtttagtcttgaagacccacttacaaccaactctcttacaaccctttggtaattctacaaggtcctaaacaccattatgttccatggaatttatctcttctttcatggcatntgaccacttctcaanattatcacaattta

SEQ ID NO: 201443 - DNA, 421 bp, Glycine max
agcttggatcaactcatattactttttagtattttactttgttcaaaaaattagacaagcgctaaatattgaaatttctgatatttatgaaccacaagcagacattgttacagcttctttgtcaacatgtaattggactttgcaactatccaatcaatcatagttataaattagtaatcatatcacaaattatagatgaaaattacttatccattcatttaaagattaaccattggttaaaagaaaaacttatacgatatcaattaattacatatataatatctatatctagaactataatgatctaattgtctaattgacaagattacaaacgtctcgtttaatatctttccgtcaagattaccttagcttaggttatatatatttcgcaacgacttcgttgacattaatggtgaagtag

SEQ ID NO: 201444 - DNA, 178 bp, Glycine max
ttgtagccaaaggactaccttgaataattccttgtattttttttggcctagtaagaagtgtttgttttgaagctcattcaagccttaagtgaaaaaccatgatatcaccttacccttgaggaattttggagctttggaattgttatgcgaatatatgtgtgcgagggggggggggggg

SEQ ID NO: 201445 - DNA, 420 bp, Glycine max
  unsure (1)..(420): unsure at all n locations
agcttgtcaggtctgagtagtacataaatctcccaatctctgaagttgactataggaactttatataaaaaatattcccaagccctcaagtttaactttgttatctactagctgagtttgagtgatactcatcaggattgtagttaagtccatgagtgtcatctttagctaagtttttaacttagtcacaaagggaattgaatggttagtgtcgagaccaaatggttaagaatttgaagcgacatcttatcaactattatgtttgtttaaacacttttaatgctttcacacattttcaagagagacatgatgactacgtcctttgaagttcaaaacgccattgggattcccaagcgtcacatctttcctaactcgtgatctatctnctcaagggaggatttgacggtctgaatgggtgca

SEQ ID NO: 201446 - DNA, 446 bp, Glycine max
  unsure (1)..(446): unsure at all n locations
ntntataaaattttgtttgtcctgacttctccttttaatgagaagagaaatcagaanaacactaggccaaatgctacccaactgggtagattactagaaatggtttggtgtttttttttttgataaatttgtcatcaagttcttttatcaaaaaagaactaaacaaaacaaaaaaagggactaaattatttatgatttatattcaggtttttcgtctcttagatgctactttaggaattcgcatcactgtaagtaatcttcttgaccatcatagtgctagggttcaagatagagcaaaaacattgtttgacggctggaaaggagttggaaatggtgatactgaatctcatgaagtggagtttgctaaggttgacaatgcaagtgacacgaatgtcagcaaggaaagccagccatctactttgaatgaagatggaaatgataatgat

SEQ ID NO: 201447 - DNA, 431 bp, Glycine max
  unsure (1)..(431): unsure at all n locations
agctntgagtataagtacttgtacatctatatatatataaaggggatttactttnttgttttaaatagtgatacagtccaaaactacatattttatcatcataaacgacgcaggagagaagggagacacccggaccttatcaagtacttgttagtattagactatggttagcgggacacaatttgtaatttttaaagttaaacatgctaatctctttccttgtggcaaatcatcttatcttatctttttttcgcatctagtttaaattaaggatgcaacgtgcgggatgacatataaaggcccagacacgtcataaagtagctagctgcctgcattggctttggtcactgtaatattntaaggaatcaaattggtagcatcatcgatatgctgttgtagagataagaacgattcgcgaagaaaaatatttt

SEQ ID NO: 201448 - DNA, 457 bp, Glycine max
  unsure (1)..(457): unsure at all n locations
tcatgctctaatcccattggagcaccatgtcacattgtctctacctttntctttatttctctttttggggttcctaagattatggagcaactaacaacttccttctttatagtcttcttcgtatgcctaactaccattgtctagtatataaggtaccaactaccataccatcatatttaactacttgtcacagaattaggaatagaaattttaggtgataggagcaggagaaggcatttgccacctaccctacaaagcatcaatggtcctatcttctttacaggactgacgtattcactcaatccaaccgtgaaaaattaggtggcacatcagatacacataaaaaacgtacccaattataacaactacaagagagttgaacaactaataatttgttaatttgtttcagcaaagcccgtgaaacaatcatatcacttcatttattcaggcatcatgc

SEQ ID NO: 201449 - DNA, 431 bp, Glycine max
agcttctacaataaaaaatgcacctgtcatattctataatttagcacatttgtttgtttttctgccggggtatttatactattagactccttctgctgatgcatgtatacacacattactaacgtgtctagcttttattggatacaagaatatcttccatgtttcaaccttccctgttaaaaaaatatatacctgtcaacctgaaaattttcttgggcaggcttttggaaagcaatcaactcactgacaagattccacctacccttggactagttcagagtctggaggtggtgtaagtgtctatattaatcctcaaacaagttcgtgattttttgctgctcttggcattaatatactattgtgtgtgtaggcgcttagatggtaattcattaaatggacctgtgcctccaaacatcaacaatcttactcat

SEQ ID NO: 201450 - DNA, 459 bp, Glycine max
ttaggatggttaatttatgaaaagggcgttatacaagtgtttcttatatctaaatataaaatatatatgcaaataatagacattgaagtttttaattaaattgttgccttcttgaacaagtacataaacaaatgagtagcacggagtacaaattaagtaatctacatatatacagattaatgtagaacagagacaatggaagttaatggtgcaactgtctatagtttttaagcaaaattacaaacttacaggaccagtaattcctcttatcaattgcggcgtgagagtctggagaatagattgtgcaagagactgagtagaaacttctgcaacaactgtcttcaaagctatgctagcaatgtcgcgatgctgatccttcccatttagcaattggtcacatagtttactggtcatttccacaacccttacctcactcacctttctcactaacggagcaag

SEQ ID NO: 201451 - DNA, 412 bp, Glycine max
gcagcaagcaagcaaaagaacaaaacgccgaaacattttctattgcatgcgaataggaagcatcaacaagaaccacgccaaggctaccgcgccagcaaccaatagggcaaaacacaccaaaagaggacgacgagggacggctcaaacccccacaaagggaaacacaacaccctcaaaccgagcgcacacaaccaccacgacatggaaaggagaacccaagattccaagtcacaaaaagccaaaaaccattattcacaaaacaatgacccactcccagaacacatcctataaatcaaagaaaaacatgcaaagacgtacatacacacagaaatgacccaaaatatcaaactacacaaccgacgaaactaacacaactacaaaggaacacaactaacacaacaaacaaaccgac

SEQ ID NO: 201452 - DNA, 464 bp, Glycine max
ggcataagtgaaatcaggggcagctatctcccagagagttctcttatgatgtggagggtgagccatgctctcagtatgaatattagtagtggaatgctcaaaatcagaatactcagaatcaccctcaacaaaatgctcagaatggtcaaaatgctcaaaatgcacagaatgaccaagatgcacactatatctaactaatctatgacaggttctatctatttcaggatcaaagggttataaatcacctggattgcccctagtcatgaactatatgtagcaaataatgtgtttctcaacaagcacctaacaagggggtaaaactacagctatactcaaacgatatcaaaatgagctgaaatattgtgaggaacacccttaaatcatgataagatagcacataaaatttcaaattctaactattgaaactacctaagcaaagttataataatatgaaataatacttg

SEQ ID NO: 201453 - DNA, 424 bp, Glycine max
agctttaacaaatttttccttgagggggatttattcatgtttctttaacatattcaacaaacattagccatggtgaacaagcaatttcaaacttcttagggcaatcatcgaactgatgctcaaaacgacaatcaaccaaactctctcaggcatccatgacatattcccatgcattttttgaccaattagagatttacattttgtcttgagattcttgttgatatgaaacgtacacaacaagttagcacactcatggaatacaattttcactacattcatcaatgctaggtctctgtcggtcacaataagtccaaggagggcatcacgtcttagaaaaagacctcgaaaccattctagagcccataccacattattaacacgttcaccctccaaatatgcaaaaccaacagagactgtcatcccc

SEQ ID NO: 201454 - DNA, 473 bp, Glycine max
  unsure (1)..(473): unsure at all n locations
tatgaatctaagctttgtgaagaggtgaacaganaaagaacttagaagatntttcagttcttcactcgctaagcgcgcctctcgcgctaagcaccaagtcttcacgcactaagcgagcccttgctcgcgctaagcgcttagacccctgattagttgttggatggtagcactaagcgtgcctcgctgtgctaagcccaattatctctctggaatctgaatttctcgaattgggcttagcgaggtgatgcgctaagcgtaattccctctctgttttggaaacctttggaatagcgctaagcgctaagcgcaagccatcactgcatggaggagcatgtttatgcgctaagcccagattgcaggaccaatttgagctgcaggaagcgttaagcgcaggtcctcctgctaagcctaanaacctctctggaatttgaaatttgtgaattgggcttagcgcgagaggtcacactaagcgc

SEQ ID NO: 201455 - DNA, 404 bp, Glycine max
agcttctagttatagtcatactaagactttttttttatttgaatctttagatatttcagcatgttacattatttcaagctctggtatccttggtctgccgcttcctagttgcttaacctcattgttgtgtataagattgtaccacgctttttacttggtaagattataacatacttttttggtacaactgagacttgattgtgaatgtaatgcaatttctgtagtgatattgataatgagggcatattatagtaggagggccgctgtaacatgtttgtccgagtacttgtaataataatattgagttattttctctttaatcaacatgtattaagcattcgtcttgaagacctttagggaaatcatagtgaaatatagttataaaagctgctatcctataaacc

SEQ ID NO: 201456 - DNA, 463 bp, Glycine max
ttatacaagaatgaagcgctgaaccacttgtatacttgtggcctcagatatcttaagaaggggggttgaattaagatattgcacactatttccccaattataatgcaattctaatttcaatgcaaggtacaagttcccttaaaaatgaactcttcaataatgattcaaataaaacaatctgaatataaatgcacagcaataataaataaaagagtttacgggaagagaaagtgcaaactcagatttatactggttcagcaacacccttgtgcctacgtccagttcccaagcaacccgcttgagagtttcactatcttgtaaaatccatttacaagttctgaacacacaaggacaatcctttctttgtgttcagatttctttacaacaagagaccctctgtctctcaatcccttgtgagaatttagaaagaagagaagaatagatctctcttgacagagataga

SEQ ID NO: 201457 - DNA, 449 bp, Glycine max
  unsure (1)..(449): unsure at all n locations
ntattcaagacaaagaaattaaagatattcaagattgattatcttgacagtctctagagtcttagaaagggtatattaaataggaagggaattccaattgaagtagcaaaaggtttggccaagaaatttaagttaaaaagtctttttcaaacaaatttactctctggtaatcgattaccagaggatgtaatcgattaccagtgggcaaaactgatttacaacagctattaaaatttgaattcaaaatttgcactgtgtaatcgattacacatatatggtaatcgattaccagcagtttctgaacgttttaattcaaattttaaagcttgtaatcgatcacacatatactgtaatcgattaccagagtagaatttcagaaaatattctcaacagtcacatctttttatgtgattcttgaatgctatcaacgcctatatatatgtgattga

SEQ ID NO: 201458 - DNA, 431 bp, Glycine max
  unsure (1)..(431): unsure at all n locations
agctntgatgatatggtcttcaccgtctatttgatcttagtaagcctaaaaagaggcaaatctgatcatcatactttgatagatgcaaaaaaaactatggcaaatgaagaggttgagaatgagggacaagcccatgctgtgactgccattcttatacgaccaagtttcccaccaacccaacaatgtcattactcagccaataacaaaccttcttcttacccaccgcccagttatccacaaaggccatccctaaaatcaaccacaaagcctacctaccgcacttccaatgacaaacaccacatttagcataaaacaaaacaccaaccaagaaatgaattttgcagcgagaaagccttagaattcaccccaattccagtgtcctatgttgactagctcccatatctacttgataattcaatggtagccataac

SEQ ID NO: 201459 - DNA, 477 bp, Glycine max
  unsure (1)..(477): unsure at all n locations
gcattacgngacctatgaatctcagcttctcaggaggtgagcttagttnttatatgggtgtgtgtatcatttctctagcttctcaaggaagttttctcaaagaagcttctcaagaaagttttcttaagaaagcttctcaaggaagctacctagtctataaatagaagcatgtgtaacacttgttgtaactttgatgaatgagagtcttgtgagacatacttcanagttccacttctctacctcttttattccttcaatttcgtgctcccccctctctctttctctccctctttcttttcctccattgaagcatcctctccaagcttcttatccaaggctcatcttggtggtgaagctccttcttccatggcttattccctagtggatagcgcctcctctcacctcttctcctttgtcttctgctgcatctccatggtggaaaatcaccattaaaggacctcattgaagatcaaagat

SEQ ID NO: 201460 - DNA, 447 bp, Glycine max
  unsure (1)..(447): unsure at all n locations
ggatccttaagcaccgcggctgcagcttgagtagtattcgaggtttttttctctctttcaaagnttcaacaacatcaatggaagcgacccgaagagcttcatttctaaaatcatgaataatttgggttaaaaagatgcaactatagacttgagcattcaataactaagaaaatacatgaagtttgattcatattattattgaacccacctttgcataagtaaagcaatatcagcagcctcgggcttttgctcttctttctgcttaccataaatttgacatgtcaaaacataagtgaacttaagatctgcctgggcacgtgcctcaggggataattcaaagccatgtgtatcagatacttcctcacaacctattgcagcctccaaatctatattatgggaagaaaaaaattacatacatagtaacatactaacgtaggggaaaccatg

SEQ ID NO: 201461 - DNA, 379 bp, Glycine max
  unsure (1)..(379): unsure at all n locations
atganatgcctcctcaacattcattggcctttttattatttccttcttgaaatatcccttactgcatgttgcttaanaaagttgtcatctaaactttcccactactgcctctaaatctaaataattttcgtttgagtaatgaaagatcatgcattgatctgtaaccttgtctgttataaatgtggcgatcaatagaaaagaacaaaacttacggatagtttcttaggtgtttttaatgcggtttgtgaatcaaaattagagtttcacttcagtaatttatgttgatttttaacataagcctttattatgtagattaccgagaagacacttcaattcttattggagaacaatactataagcacctatgaaattgcatatg

SEQ ID NO: 201462 - DNA, 408 bp, Glycine max
agcttataagggaaccactatcattttttattattaactcagaaggttcacaacttgtgatgatgtatatacctgctaaagtatccagagggacccattattgccaagagttgccctggattagcataaagtatcacaacttgtgatttgctagctgccattaattttttgtaccatacccgaaggacatcacagtgactctggaaatattacagttaatataagcaattgattttattaaaatattatacttaataaaatatagatatattaaaaaattataatatttttatataatgcatatataaattggggagaataagaatggttagaaagagttagttggctatcatcaacaattaatctaatacgtaactacagcaattcttctcacctttgctagactta

SEQ ID NO: 201463 - DNA, 454 bp, Glycine max
  unsure (1)..(454): unsure at all n locations
tacgagaatgccaagttatacaaagaagaagttcctatgattcttgataattaagaaggacttcatggctgggcaaaaagtgttattgaataattctaggcttggactcatgagtggtaagttgaggtctaagtagatcggtccttttgttgttactaattcttttccttatggtacagttgagatcaatagcgactccacaaacaagagcttcaaggtcaatggacaccgacttaagccattcctcacaaacccttctttagtggacatagtggtggaagagacttccttaatccaccctacttttcctccaccatgacttanggagttcttcttttcctatctccttctttgctnttatcacacttgtctgattctatttgatggtttaattgcttctaatattttaattggtgtacatcgaggacaatgtgctgttaagtatggggggagt

SEQ ID NO: 201464 - DNA, 442 bp, Glycine max
  unsure (1)..(442): unsure at all n locations
ttgagccanattcctgactcaccataaaccttgttcttggtgagaatgtcaatccttaccgtcggaagcgaaaagaatagaaggaacgtttccactcacagagaaagcaaaaaagaaaagaaggaaaattcccaatcaaagagtgggagaaagcaaanagaaaagaaagaaaattcccaatcaaagaatgggagaaagtaaaaaaggaagaagaagaaggaaagaaagctcctgatcagggatcaaaagaaaacagaagaaatgtgcagaaaggtctttggaccggacaatatctgaacaatacagaattgtcaccaaatgaacaaaaagaaggaaaggaaaccacgacctanaatggtcttcttcctttgattaccaaccaaaatcccatgcgctagcgacttttttcgcncgcactaaacaaaaaaaaacagaaaagaaa

SEQ ID NO: 201465 - DNA, 414 bp, Glycine max
agcttagagtgtttggtttgttgtgtgatttatcccaaaatcaaggtggcaccttgaaaaagctggaagcaacttagtgttgctttgccttcaatgtagaaaatcataactgattttggcaaaagtgaaagcattaatagattgctgattagtgtaaatttgttttcaatataaaaaaaaagtgagagggatcaaacaggccgcaagttgttcttttcttcccacaatcagccataaacaaagctgaaaaccgatgactgtccttcgatgatgatttcacaacaacaattcaactcactatcaaacttgcaactctaggtactaaagcatacaattaatctaagtttaagaaacacttgctgaaatgtaatagtggaacaaagagctgaccacaataaactccacggaaacaga

SEQ ID NO: 201466 - DNA, 458 bp, Glycine max
  unsure (1)..(458): unsure at all n locations
ntccaactacttgttaactatagccctaatgtgaacattatgctttctccgtacagaacaaaaccatactacaatattctttcgtggacacaacaccagaagttgccaatgtgccttgaagtcaacaaaataaaattgaccatcaaataaatgcaaacacattgataacaaccacatcaattgacttactgattcaagaaaggtcctaagtagacttgtcgatgtgattccttaacccacgtttcaatgtactgttcacattcttaacacgtgtcctttgcacaacatatagactagggctcaagcaaaccataaactggagcaaaaactaagcttgtagtccaatcattcataaaccttntttaaagatgataaacaatattgttagccaaatatagagtggagaattaattatgacttacaataacatatataatttacttacatcatncacaact

SEQ ID NO: 201467 - DNA, 418 bp, Glycine max
agcttcacacaatctatctttctctattttatatacccaaaaatctatcaatttttcaatccattgtattcatgccactgtttgttaacaaacaaataatactcaaacctattacatgtgggtacctattaaagatatttattttttatttgtgtggatgcgaattcttttgttatccctacttagtatccaaaattggtagtgagccttttgtgtatgatgtatctctccgtccattataatgtttctttccacttacatatctctcaaaaaagataagggttatagataccaatttattgcatatattctaaagagaaaaataataatctacaggaagaattgctatatatttattaaaaaaactctatgtaaaaagcataaacatataagttatatccgcttaatttacgcataa

SEQ ID NO: 201468 - DNA, 433 bp, Glycine max
  unsure (1)..(433): unsure at all n locations
agcnttgaaaagtgttgtttttcaccttctctctaagccaatctggtgggctattcatctttttcattcctttctccctttcccgaaaagaattcgccaaggactaaccgcctgaattctttttgtgtctctcttctcccttttccaaaagaacgaaggactaaccgcctgaattgttttgtgtctcccttctcccttttcaaagaattcaaaatgacacagtctgagaattcttttgattcttccctttcccataaacaaaagatttcaaagaactaaccgcttgaaatatcttttgtttccccttcacaaagtttgaaaggactaagtgcctgagaactttgtcttaacacattggaggatacatcctttgtggtataaggagagggtacatctacttgggttgttgtaactgagaacaagagagggtaca

SEQ ID NO: 201469 - DNA, 484 bp, Glycine max
  unsure (1)..(484): unsure at all n locations
tgacactataaaactaagctttagccaatggacttaccttgatttaattcctttgatatgccctttgagccttgtttccctttccttgttttgaagctcactacaagccttaagtgaaaaaccatgatatcaccatatccttaaggaattttggagctttggaattgttttgggaataagtgtggggtttttttatttcattggataacatgttttgttggccatgcttcatgatatattttgagccatacttgatgtacattgcatattggttaaatgttggacatgctgaatgagatgttgtttctcaaaggctactgagtaaaaaaaaaaattcagaaaagaaaaagaaaagcagtaaagttgagtgaataagatcttaaatgacaaaagaatgatgaggctcttggttctactctttatgnnttaaatttaatcttacttctttttattttcttatttntcttaatatgcacttattccc

SEQ ID NO: 201470 - DNA, 435 bp, Glycine max
agcttgtgaagcatggcgaccacattggtctggtgatgctgatttgtctttgtttgaggtgtcaaagggcatataaaagcttgtggttaatctaaaagaacatagatgttcttgtagaaagtgagagttaactggaattctatgcactcacttaataacatgcatgtggatcaatggtgtcgaaccaatcaaatctgaataccaaagttgaacaccaataaactcttctttcattaacataaccactcggcaattacaatgtgtagactaaaaaaaaccaacttatcatcattactttcatcctaaactattacataatcaaaacaccaacaagcaaattaccaccatgaaatcatattcccctgctacataataaaaacaccaataagcaaacactgacccaagaaaaaaccaatccaatgcttaaaatttttt

SEQ ID NO: 201471 - DNA, 469 bp, Glycine max
  unsure (1)..(469): unsure at all n locations
tcaagaccacaagcaatttcctttaactgttcagagggtaaccgaagcaggcttccaaagcttacataaagaactgaatttggtttcttagaattcaaccaattcaagcatttttcctcatcaatagtgggtagcttccctctctcggttttatcttctgcagttctgttgcaaagggacactggtcctataatccacgccttcttcccccacttgtttttcacttgctcagcataagcaggttccaagtcatggaagctgttgacaaaagttccgaaactcttctcctctagctgcctcaccctatcaggaaactgagaaggagttctcagaanaaccggaagctgagacctcgtcatttcgatcctgtcgggtagattggggacaacaaaaggctctgagtctgaaccgagactctcaagggcaacatgtcttacgttgtcgtggacgcagcgtgcgaagcacccat

SEQ ID NO: 201472 - DNA, 425 bp, Glycine max
agcttggaagattccgcttcgattgaaggtgttcttcttttgtggggtttcaacaaagaacaacggtagtccgtggtggccaccggtggttgtgggtggtggagaaaaagcttgggatgttagggaagggttttggaagacagaaggagaaaggaatggttgttttccaaggctacacgaaaaataacgtttacgacactcaagtgcttctgctctccagaaaagaagtgtttctcacgcaccaaaagacatatcgcagatcgcaacggtaagatcatgaaaatctgtcctttgaacctccagaccaaatttcgagaagatccaatggttatcgaatgcaggagggtgcttttaccaagacagcttcaagcagcttccttgagaatcttttctcgagaggcttctatgagaagcttccttgagag

SEQ ID NO: 201473 - DNA, 473 bp, Glycine max
  unsure (1)..(473): unsure at all n locations
ngaagggtaactagatgccttggttaacctggtaacccatctggtcatgaataaaaaatctgcacctgtcgccagactctgtggtttatgctcctctatcgaccaccacacagaccttttcccttctatgcaagaatctgaagcaattgaacagcctgaagcttatgctgcaaacatctacaacatacctcctcaacctcaacagcaaaatcagtcacaacagaataattatgacctctccagcaacaggtacaatcccgggtggaggaatcatcccaaccttagatggtcgaatccttcacaacaacagcaccaacaacaacaacaaccttattttcagaatgcttctagcccaagtagaccatacgctcctccaccaatccagcagcaatagccccagaaacagcaaacagttgaggctcctccgcaaccttcccttgaagaacttgtgaggcatgactatgcaaaacatg

SEQ ID NO: 201474 - DNA, 429 bp, Glycine max
agcttcttatccaaggcaattcttgggggtgattctccttcttccttggcttattccctagtggatggtgcctcccctatcctcttctcctttgccttccgctgcatctccatggtgaaaaatcaccattgaaggacctcatcgaagctcaaagatccagcctccatagaagctccacaagcaagcttccatcaagtggtaatcagagcacaagagcttcaagtaggtgctccttaaacctccattaattttttttctttaccttctcttccattgttgtttcttcatttttctccatgtatctcctcacatgtcttggtctaaatgttgttaacatgattctttagagtttccaccgattaaacttgctatagaaactagatttgattttctatggttcaaatttcttgttcttgttcttgaaccatg

SEQ ID NO: 201475 - DNA, 456 bp, Glycine max
  unsure (1)..(456): unsure at all n locations
aaactaagcttntggtttggtgttgcctanaaaatatacaacgtaggtctgttatgtttttccgtgcgagctcaaccgagggttcgttccgaccgacactggcatgttgttcttctcatttaggaggataagaaaacgttcgcccaccccggcaaaaacaaaaaaaaaacattattcacggaaattaatcgataaaatgattgctgacgtcagcatcgagagatgaccgatcgaggtctaaaaaagaagaatcaccggatgacaccgatcaaacatttcctaatcgacatctttcaaatttcattcaggaattgaatagaanactcaatagccgacatcggtcgtgaaatggccatgactgatattcttcagccgacattgcgcaattntttaaaaaaaaaaacgctcgctggccgataatggtttttcttacagcaggggaagttttcttgtttc

SEQ ID NO: 201476 - DNA, 421 bp, Glycine max
agcttctgtgagataactttcttttatgtctttttgagaaaaattccttgagaagctagagcttagctactacacacccctctcataactaagctcacctccttgagaagcttccttaagaagattcctaaagaagctagagcttagctacacatacctctctaatagataagctcacctccgtgagatgagaagctagagcttacctacacaccccctataatagctaggttcacccccatgacaaaatacatgaaaatacaaaaaaaaatccctactacaaagactactcaaaatgcctcgaaatacaaggctaaaaccctatactactagaatggccaaaatacaaggcccaaacgaaggagaaacctattcaaatatttacaaagataagcgagctcatacttagcccatgggctcg

SEQ ID NO: 201477 - DNA, 425 bp, Glycine max
  unsure (1)..(425): unsure at all n locations
ntctgagttntctggtttccaaactatgttctttcactgtatacaaaagtgtgctattcatctttttcattctctactcccattaccaaaaagaattcgccaaggactaaccgcatgaattctttttgtgtctctcttctcccttttcccaaagaacaaaggactaaccgcctgagattctttgtgtctcccttctcccttttcaaagaattcaaaatgacatagtctgagaattcttttgattcttccctttcccttaaacaaaagatttcaaaggactaaccgcctgagaactttgtcttaacacattggagggtacatcctttgtgatacaagtagagggtacatctacttgggttgttgtaactgagaacaagagagggtacatctcttgtggatcaattcaagtggagggtacattcact

SEQ ID NO: 201478 - DNA, 430 bp, Glycine max
  unsure (1)..(430): unsure at all n locations
agcttgctaaaccatggaagctccttttatctcccacattnttgggggagggccattcttggatggccttgattttcttagggtccacttggaccccatttttaccaactacaaacccaaagaaatacacaaaaggtacacttctctatatttgcatagagggtgtttttcctaaggactgaatgaacttgcctgagatgtcctaagtgatcatctaggctcctgctgtacactaaaatatcatcaaaataaaaaactacaaatctacctatgaaatcccttaagacatgatgcataagcctcataaaggtgcttggtgcattagtgagcccaaaaggcatcactagccattcatacaaaccaaacttggtcttgaaagcagattgccactcatcaccctttttcatcctgattaggagataaccacttt

SEQ ID NO: 201479 - DNA, 424 bp, Glycine max
agcttgcggactataccttcgaccgatctctgccgtgtttctggctaggcccggattcaaggcgggttgcagcaccggctccgcttccctaactgtactggaggcggttgcggtggctttatcctctatggttttctggagttttaacatgacctccgagatggaagccatttgatcttttaaggccgatagatcggccttcatctgttcctgcatgccctcttcattatccatttttctggatcgagtgttataggggtgccttggtgttttcttagttatgatgaaattcctaaagaaataaacaacggtgagtatgccaccaaaacatgagtatgcaaatggatgatcggaacactcggatccaccccaagatttttagataacgtaatgagtccagaacttctcattttataaaaagaac

SEQ ID NO: 201480 - DNA, 473 bp, Glycine max
  unsure (1)..(473): unsure at all n locations
aagcntgccnanataaagaatggaaaatgggagatntgaatcatgtgagatgtattaaggaataaggatgaagtatggaaagntttggtcacaaatcaagatataaaaaagagatctaagagttattttaatatttttataagcattttgatgatggactgggattgactttgtaatagggaaggactagtaatgtaggaggacaaacagaatttggcttaccaccgtagaattcagattggagtggtaaaataggtccttaagaggatgatggatggatagtggtgaaatgattggtctagatggtattcctattgaggtttggaagtgtgtatgaatctcgagttaagaatattttaagaatcttggataagactactattgaggtttggaagtgtgtacgaatctcgagttaagaatattntaagaatcttggataagactactatgggtcttgatgctcattttaataa

SEQ ID NO: 201481 - DNA, 421 bp, Glycine max
  unsure (1)..(421): unsure at all n locations
agcttggacaaggtaggtaatagcataattttctcttcacatntattgctgccgtactcaatagccagctttatcttgctgtatttagtagattgttactgtataaaattgtagcctacattgctactctggcctctattctggagccatttgttcttctattttaacactagtctgtttaacatgcaattgctcaactgacaaacatcaaaggaagatttatttagtgaaaaaatttcatttttattttactatttaatagatcattttaaaaagtttcaaggtggtactctgtaggcaaagcgaacagagagccagaaaagtagaataaaaaaatgctagtagaatttaatttaatagtgaagaatataggacgggatggccctgatttagtagtcttatatgtagactagcctacagc

SEQ ID NO: 201482 - DNA, 407 bp, Glycine max
  unsure (1)..(407): unsure at all n locations
ttagggtggttgtgtcacaaaatgaaatntatatattttattgttaggangncccgcatcgcctgcatcagttcttaggatgcaacttatatatttgttggacaacttcacttaatgtcaattggttctaagatgaaatttaacctggtatcaaagcctatagtccatcttgatcatttgcctattctggcacgcatctgtggagaggggtgttaggaagtcccacattatatgtctcaattcccagcgtgcaacttatatatctgttggacaacttcacttaatgctaattggttttaaaatgaaatctaacagacacttaatatgggtgaaacaacagcaggctaatttgtattttacccaataatatttttttctctcattggatccttctaattgtgagatgc

SEQ ID NO: 201483 - DNA, 418 bp, Glycine max
agcttgcacaaattcatcccaagtgtttattatctgtatgcattcatctcgtctttggtgtgcaacatcaaacaggttctgttgaatattatcaagcaacttttttatttccacaaccaaatcagcactagcaatgtctatctttgctccattatcacgtcgaacagcacgaacctatgcaaaatccaaagagatttatttgatgttcactgaaaaactaacagtgtggaagcaaaatgacaaatacgagaattgatgcatcactaggacaaagttaatgacctgcttatttgctaaatcctttggcccaatttcaattcttagaggaacacctttcattctccaattagaatacttccatccaggagaataattatctctagaatctgactcagcgcgaatacctgcttcattcaat

SEQ ID NO: 201484 - DNA, 467 bp, Glycine max
ttccagtacaaactgaggttataaaggtcatatttatgtttttatatataaaaatagtttatataatggaaacagaagtacctaataaaagtagttaatgtataaaaaaatattattaatgtttaattatgttatgtattgcctttgtcatcttatagctggcacaaatagcacaactcactgctttgttagtgataataattaacttaatttgtttatgcatataattgaaatttaaaaggaatctacagaattatattataatatgtctccttttagagataattggatttatcacagtacagtgaatagtgtagtagctaattaaaacgtgcattgactggtattcatcttatggttttagaatttagattgaatcaaattctatggttccccgcaacagatgacaattgagtttgaatcactagctagacagagaaagatcgaatatatatatcacacgtttc

SEQ ID NO: 201485 - DNA, 397 bp, Glycine max
agcttctagccaaatggacttaccttgatttatttcctttgatagccccttagagcctattttcccctttctttgttttgaagctcattacaaaccttaagtgaaaaaccatgatatcaccttacccttaaggaattttggagctttgaaattgttttgggaataagctaggaataagtgtgggggggtatgtttcattggaagataagatatgatttttggccatgcttgatgtgtgtgtatatatatatatatatatatatatatatatattgcctagttatttctttaatcttcaatttcgcactgttcaataaaaaaataaaaaaatgaaaaatgaaaaaaaatataaaaaaaaaatcagttgttgcaaattctgcacattcgcactattcaa

SEQ ID NO: 201486 - DNA, 423 bp, Glycine max
  unsure (1)..(423): unsure at all n locations
tgccacccagctcgcccaggcgagctatgttgctttctctataaggcggngccttctggaagaacttcctggaaggcccaagtgggcctggttgctatttgcaccccctatttactaaatacacccctacctttttttgctgattctttttccgtaacgttatggaactttacgaatttcgtaacgatacttgttttcctttcgtaatgttatggaaccttacggattacgtaatcatccctttttttggctttcggaatgttacggaacctcacggattgtgtaacaatgcttccttttgatttccggcatgtaacggaatttcacggatcgtgcagcaatgctctcttttgacttctggcacgttatggaacttcatgtatcgtgcaacaatgggtgccaagtacctcgaagttgtccaac

SEQ ID NO: 201487 - DNA, 419 bp, Glycine max
  unsure (1)..(419): unsure at all n locations
agcttgttgccccatgaggaatgccttgttcttagatagcatgaaaaagcccttcgataatatgtatgtatgtaaatatgtagcatgaaaatgccttgcaaaatatgaatatatatagcatgaaaattccttgcataatatgaatatatatagcatgaagtgccttacaaagtgttggatgggtagcgtaaaagtgtttttcaaaatatgtgtatttgtgagtaggtagcaaaagaagtgttccaaaaaaatgtgtgtatatatataggatgtagcacgaaaaggtttgtcaaaaaaatatgtacatggatgtgtgtcgtaaagtgcttttcaccaaatttttatgtgtgcaaatgcatatgtgtcataaaatagcatggccctaatatgattattntataaagtgcatgttgacactc

SEQ ID NO: 201488 - DNA, 462 bp, Glycine max
  unsure (1)..(462): unsure at all n locations
tcacacaatggttcatcacttttctgatggaagctcaatatattngncttagcctggtttctttcttcctcttggaagaaacagtctaaaaacttgtttccaatgtcactccaagtgataaggctctgagatggatgagtattgagtcacttcaaggcattatctcctatgacggaaaaatggaaaaccatcatatagagattctcctcttcagtttgggtcacccctgttgtaccacattgatcataaaatgtggccagatggttgtatgggtcttcattagctaagctaggaaatgcatgttgggcaaggaaagtgattaggcctaactntagcctttgttgtgtggttgttgctccttggtctagcaatgttgaagtatactcgtgaaccattatcagtgtcatggtccgcaagagttctcctaacaagtgatgcttcttctacttnctcatatgtact

SEQ ID NO: 201489 - DNA, 419 bp, Glycine max
agcttgtgaaatcaatggaatctatgattttgtttgacacaagtcgttcaattctgttcttagaaatgtgacctaagcgcttatgccataatgctcctaagtttgtattatcaattctatgcttagtaccatgcaattctgcattaaaggattcaccataggaagctacagtatcaagcaaatatacattatcattaaccaagagtgaaccagttccaacaatatctgaattaaaagacaacctgaacacattgtttccaaatgaacacaaataacccaatttatccaaataagaaactaaaaccaaattccgtctaaatgacggtacaacaaaagtgtctttcaaatctaaataaaaaccagtacataataataatctaaagtaccctatagcttccacttccatcgatttaccatct

SEQ ID NO: 201490 - DNA, 260 bp, Glycine max
ctagaagtgcgagagggctttttatgtttttacagaaccgatagcgccactatggagcaaacatctcaaatataaaattgaacagtttaaatgaaatttggaacaggttaagctgaactgatataatgactaatggtatttaaactaatgtttaaagagaaatctagaaagtgcaggaccctaaatactttagatcctgtaactgtattaaatattaaatctaaccctgaaccactttataattcttattgaagtgagtt

SEQ ID NO: 201491 - DNA, 350 bp, Glycine max
gtggagcataaacatgagataatattttttagcaactctgttttacctttcaaaaaaatgcaactttatttgatactctttatttctttctttctatatcatatggattactatgtctattattctatttctctttatcttctaagattgcatatagcaatagggatattaaatataacattttctattttctggggcctatgttttgaatctcattggacttggatgggcaaagatttatagcttataaaaagaaaaagatcatatggttcaaatgtatgggttaatgcattatcacgtctccctatctttttcttttcattctcttgtcattggataaagattaacat

SEQ ID NO: 201492 - DNA, 362 bp, Glycine max
  unsure (1)..(362): unsure at all n locations
acattgggtattgggggtctacaatggaagacaaaactttggtttatatcattacatatattctggcaccaagatctagcaatcatgctcaagtcaccgatgacgactngcatatcatatatgggccaaaattaggtattcaaatgatttgggtactattgattgttgaaaagtcgtcgactagtggattataaattgtcatatgcaattttgacctcaagattcattgattatttcaatatcgatgtttctaatgggattgtagactttaccaaagcctctaatgagaaaactgataggcatctcaagaagcttggcatgtcatatgttgatcatgagtgggtcatggaaggacaacaacc

SEQ ID NO: 201493 - DNA, 319 bp, Glycine max
cgagcgcacgcacaaaaagaggagagaacgaaacatatggtaaggaacagagacaacaagggacaaaacagaagaggagagaacggcacaaacacacaaagagagaagaaacaacagggagggaggacacgacaggcaaagcaagaaaaaacccaacaaaaagggaagtcaaggcaacaactgcaagacagggggacatcttggcgatagcgaagaagcaaaccacgggaaaaaaaaaaaaaaggaggcacacaacgtgcacacgacgaaaaccgcgaaagacaacacgacgccggaacggcaacaacaaaaactaaag

SEQ ID NO: 201494 - DNA, 395 bp, Glycine max
  unsure (1)..(395): unsure at all n locations
tactagctactttttntgttttaggnaaacatcaaacagctttttatttgagaaacgatcagggttaatacaacgcttacttagttttaaagcgaactttaagatttaaaatggggtttaagatgcgatttcctacattttttttaaaaaaaattataatttagtttagacctaatttttttgcctcaaacttagtcattgttgcttttggtctcccaaatttatttattttttagtccctcaatattaaaaaatattgantttagttgcttgtaactgattttttgtgatttggatgcacaatttttgatgattttgttagcttcttattttaagagcatggctttcagaaaaagttatgtaaaattctcataatagaacgatcgccttatttt

SEQ ID NO: 201495 - DNA, 412 bp, Glycine max
  unsure (1)..(412): unsure at all n locations
aatatctactctgtgatgcattctatctacttttttgngggtgtcaaagnactctatattgtatgttcttctttatttntttcaatgaaaggtaaaggatatctataatagtatgacatgtgagattctggagcctattttgactaaattgaccttgacatcactaagtttaagagttcaatatgaacaataaaaatagggagaaaattttagtatgtgagggctttaattatattctgctgtcaaataattacacaaaaagacacaattattatccttgttaagataaatataccatcaattttaattatatatatatatatatataaattcaacttctaaaatatggataaaaagagaaatatgtctttagtttgtaggaaaatattaaaattatattatatttttatta

SEQ ID NO: 201496 - DNA, 66 bp, Glycine max
ccttaaggaaagagggagcacacgcgtatgacaagagcggccaaggacgccgcacaaaggaaaaaa

SEQ ID NO: 201497 - DNA, 359 bp, Glycine max
tggtggcacccagatgcagtaaagttatgcaatgcatgtcatctggtgttttttatagacagtacctacaaaacaaacaggtacagactcccactacttgactttgttggagtgacaccaacggcgatgacattctctgctgggtttgcatatctggaggctgagcgtgttaataatattgtatgggctttggaacgatttcgaggcctatttttaagacacgatcgcctccctcttgttattgtcactgacagagacctatcactgatgaatgcagtgaaaactgtgtttcccgagtctactaatttgttgcgcaggtttcatatctataagaatgtgaacgcgaagtgcaaatcttt

SEQ ID NO: 201498 - DNA, 366 bp, Glycine max
attcaagatctaaatcaggactggactgtctgttctcgaacatgtttcttttttgcaaatctctcttccaaagagcgaaactaagaaatgcccctgcaatatgaaataaaacaatgggagataaaacagtcaagtatttaccctgaatatcattacctacaacataaaacatcttagatatgaatatactttatattaattgataatcaattactatttgaaaaaacattctcttgtcgctctgtcttatctgatatgaatattatcacttcttgttgatgaacgttgagatttaattagactaaggatgtgcctggatgcgatgcattcgtattgattttatgatgctaagccctcccagcctac

SEQ ID NO: 201499 - DNA, 366 bp, Glycine max
  unsure (1)..(366): unsure at all n locations
agagcggcgcaagagccaaacaagacctatatacaacaataacaaancacaaaggcaacatacttttatgataaccaccaacaaaagagatatcatttgaaggacacttcgtgcagcatgttgagactcgtcaaacaacatattatgagactgttcaaacaaatgacatgaacccatagtacgatgtggaaaaaatgcctattgacactgttcaaacaacatataatgagactgttcacaaaaaaagcaacaatgcatattgagacttgttaaacaacatttaatgagaaaaagctctggaaaacatttatcccctaaaatatactccaaatatcaaaaagcccgctttgtaagtaaacttaactg

SEQ ID NO: 201500 - DNA, 425 bp, Glycine max
gcgacctgctgcatgcaagctggcgtctctactatcatatgaagattttctctttttttcggggcagaggcaaccagatagagaatttctgatttctggctcgctctaccatatctaaatctcgtgcaagttaggttctgtacactagaatatggaagaagaaaaatgaaagaggaagataagattataaaccatctcttctcttgttcggttacttggcaagtgaaacaagggaataaaatgctcgaatattttaatctaagagtgtcttatgtaattatgaaatgattttaataaaaagatgtgcaatgtaattgtcgttaggctttaaattatattaaagtcattgagaattgtaaaataatcttctttttctcactattttggtaatagattagccaacaaattaagctatagatataaac

SEQ ID NO: 201501 - DNA, 328 bp, Glycine max
  unsure (1)..(328): unsure at all n locations
cggagnangcaggcgtgtgggacaatgtgggtggagtcacacagaatgccgcagcagctttatgttcagtttgctgaattggaagatgggaaccggtttgaatgtgtagggcatggtgagtttattgtcatcatgatccgcggaacggacaacgccttgctgtttgatatatgcaggaagaggtggcacgggattccaccttgtccttacattgcacatgatggatttgagttgcatggtttcgcatatgagcctatgcttgccacccctgtcactggcctccttgatcaattggcactgcccttccagagtttcaatgcttagatta

SEQ ID NO: 201502 - DNA, 376 bp, Glycine max
tctatacacacgcgcattagaaactctttctctttatttcaacatggtctataaaacctctattccttttcaaagatttctttttccctttttaaacatacactcgctgtttatacaaaaactttctttatatacactcattgctcacacacaagaattgtttttcacacaagtctttcatacactttttatatacagaaactcttttcttttctttatatacagatatgacatttgttcacaacgcccctttctttttctatttgggtgttatcatgatgtttgttcgttttaagacgactttcctaaatgaaaactctagacgcttccggaattggaactaacattatcaacaatgacgaagtaggcacctacg

SEQ ID NO: 201503 - DNA, 418 bp, Glycine max
  unsure (1)..(418): unsure at all n locations
gctggccagcccaattccaagaaatataagaacagagaggtattgtgctatcgtgacaggcatgcttaatgcacagcaaaacacaaaaattntaagtgtctgatacacagcactctcttagcgcatagttgcgcttagagagttcaacagataatatgagcacgcttagcgcgacaggctgcgcttagcgtgttcatctggaaatccagatgttcatcggaaacgatgaactcgcttagtgcaacaaggcacttagcgcgctcatcgcgatttccataaaaacagaggctttctcagcccctcagttaggcccctattaggccatctaaccctaatcaatacaagcacattgcaaccaggataaaaccctaactctactctaactaacaactaacctaatagaactaagtattaaaag

SEQ ID NO: 201504 - DNA, 377 bp, Glycine max
taggatgaagcttaggttaagttagtcttaacctaggaaagctgtctaaattaagcctaagtcaacaagagggatctgaggacgaagcttggattgattcagtctaactagggatcgaggtttagtaatttaggctacaacatagaatacaaaagcttgattgattaagaaacatttttatatacatcaagttggtttattagaaagacccaacatctttacttactactgtcaattttacttacttgcacttttactgtttttagcctagacttagtttaattctattctaaatcatcaattatcaatgtttctttcaacgatgccttattttttaatttaaccctgtctaagactagttccctgagtttgatact

SEQ ID NO: 201505 - DNA, 357 bp, Glycine max
  unsure (1)..(357): unsure at all n locations
tctacctttacatttcaaagactatcaaagtctttcttgtcttgcagagacttcaatgtcttctgcctttacatttcaaagactatcaaagactttttccttgtagagattttaatgtcctctgtcagccgtntacatttcaaatattgtcaatgtcttttatcatgcagagaattcaatgtcttccacctttacatttcaaagactatcaaattcttttgtcatgcaaggagtttaatgcgttttgcctttacattttaaagactatcaaagtcttttgtcatgcagggacttcaatgtcttcttcctttgcatttgaaacacatacaaagtcttttatcttgcagagacttcagt

SEQ ID NO: 201506 - DNA, 375 bp, Glycine max
gtggaaaagttgtctgtaaaggttgtaagtatcggaagttcttctctcaaacgtaaggcaaggtattgcttttataaactcttcaagtatggtcaagaaaaccattggaagagttataacctttaaaacaacctgataatcattggaagaagttacatctctttgattttttgacaaaacctcgtcactggtaatcgattaccatatccttgtaatcgattacacaaagctattcatgaaaggatgtgactcttcacaattgaatttgaattccaacgttcagatgcactggtaatcgattagcaatatcttgtaatcgattacaccaaattgaaataaattggaacatgtaaattcaattaaaagcttttgaaa

SEQ ID NO: 201507 - DNA, 368 bp, Glycine max
attatgtcgctctaggattaaatggagaagaagaaagcaagatactatagatctcatgatgggaaatatttgggaagaagatctatcaatagtgaaaatggggttatggattcttcacaaatagattccaacaacatggacggatgagaccttctctagatggagttcatttcaagtgcattggtgatgatgataatgccgctctttgtgaaatatatagtgaggaagaaataaaacaagacgtgtgggagtgtgatggagatagaagcccgaggccaaatgagtttaattttaactttattagaacatgttgagattctctgaacgggaaattgttttctatgatgcccgagttttgggagaatgga

SEQ ID NO: 201508 - DNA, 359 bp, Glycine max
  unsure (1)..(359): unsure at all n locations
acaaagaacaagccctacaagctcaaacaagcacaaagnncgacaagcaaggagaccaacccaaaaagaacaaaggaaagcggcgcgaagaaaagcggagaaagaccgaagacccaaaacgcggngaatcaggaacaccctacacaaaagctgtgcaaaaccaagaagccaacgcacagggaaaaagaaacggggcgacaaaaagaaggtgcagagtcacaacagcaagaacaccggccaatcggcagccgaaaatacatccaggaaaggcccacacgagaaaggcgaagaaaaaaggggggcccaagaggagaacacagaagaggagcactacctgcggaagggaaccaccacaaaag

SEQ ID NO: 201509 - DNA, 316 bp, Glycine max
  unsure (1)..(316): unsure at all n locations
taatctctttgagtgttcaaacgcctcanaattggagggcttaccattatccatttacctttttcaagttagagttcacactatatggggtggtggtggtggtgattggtgtggctatggaagaggctaattgaattgaagtcgatgatgtgccacatgttgggtgctatatgttctatccgatgacatgtgtctatagtgcatctgggggcgatgtgggggaccatattcaactttttatgttggtaaacgtttcatagaagaattgagccatggtgcgtatcattaaaaatttggctatggaactatatagata

SEQ ID NO: 201510 - DNA, 168 bp, Glycine max
gcagcagccggcaacacagaaggaaaacttttttaacaacacacaggacggcacgcacggaccaagcgagaggcgaaaatgcacaacgagacagcacacacacacacccaagccaaaactccacagcacaacacagaacacccccaccacacccaaaccaggagcaca

SEQ ID NO: 201511 - DNA, 363 bp, Glycine max
taaaacgcctatgcttcaatgaaattttatttgtggcggccgagaaccatattgttaactttaatcaaattgtgaatcaaaattgggatactttatcaccagaaattacaaatgatagatgcatgacaaaggtttattgttacacatttatagatatgaaaacccaaagactatgtttttaaaaggaaggattactacatatgtttaaccatttaataaattacattaacaagttatagggtttgagatattttatttttattcataacctagtgattttttttacagcaacctcatgataaaatagactactaacataagtaatttaaataaaaaaattcacataatattttaacaatacta

SEQ ID NO: 201512 - DNA, 368 bp, Glycine max
  unsure (1)..(368): unsure at all n locations
atgatcacagaaacattacggaagcggctcggccttgattnttcttcttttttctccttcttctcactaatttcagtgaaatatgcttactaaggatgttgaaccccttcccctcagccccctacgcctatttataacaaaatggggggaggaggttgcaacatagctcgcccaggtgagctggttgcttcctccagaagcaacttgctcgcccaggcgagctggttgcttcatcttgaagctttctaatgggcctaaatgggcccaggggctgaggaatgccccaaattgaccattttgcccccttttgagtattttgctcatttccttctcgcagaaccctatggattgtgcatcaattggtgtta

SEQ ID NO: 201513 - DNA, 415 bp, Glycine max
caagtcacctgcggcatgaagctctagagaaactgttgaagctgcctcggttattttgcttccagccttctttaaccggaggatcttctctaaatatggttcgcaacttcacaagacagtttaccatgatttaaccgttgggatctttgaggaaatatctggagtgtgctagaagctttcgttctcgagagcatctcttatttaaacatttcagcctttgtcttcttgtagctaggaaaaaagacatttcttcttctttctttcttccacatccatttctaaatgtccaagtactttctccatcacccacattcaccattagtcaccacaaaccatcattgttcttcattgaaaacccactccgagaggaacccttcaccgaagcataatttccaacttggcttgcgtgttctgt

SEQ ID NO: 201514 - DNA, 378 bp, Glycine max
atccttctggccttggtaggattggcaatcacaggattaaaactttcttaatgggaagagtttgtgagaattgttttgaagaactcaagatgaaagtgcactgcaccaaatttgtacttgtgattcagaatttcaaccaagtctgataaaagttgttggaaataaaagtattatgatgtagcaacacaaacaacgtgaagggtgacttattttatattgggatgcaaacaagaaatgattttctaattttgcacaatgatgatggtcattttgaaaagttctgctatgaaggggtggttagtggtgtctatggtggtctaatctagttagggatattaatatttataacactttttcataaatattggttaccaaaca

SEQ ID NO: 201515 - DNA, 412 bp, Glycine max
tcctccaatagatccgaggcatgcatatagtttgatttattccaggaaggtcagcaagtgtccacccaatggccattttatggcctctcaaaacatgcagcaacttatcctctaactcaagtgaaaggctgctaatatgatgattatgagcttttgagcatcatctaaataggcatatttaaggtgctcaagtagtggttttagctccaaggagaatggctaaatggtggaaggcaagggaaggttgatggctggtggaaaagaaataggaggatcaaaacctgcacctgcatcacaattagagtgaattatagaggaaatctctgcacaaatatagcagcagactcatcaaaatcatcacacgcatagtcaaaagaaccaagatcaaagtcataaaaatcaaaaagataaa

SEQ ID NO: 201516 - DNA, 421 bp, Glycine max
  unsure (1)..(421): unsure at all n locations
agccttgtgtaattgattacactgatttggttatttatttctagngattgtntctgaataaaatcaaatgatctaactcttcaaatagtgttttactttttcaaattggtttttaagtttttctaaaagtcataactcttctaatggttgtcttgaccagacatgaagagtctataaaagcaaggctttgttttgcatttaaaaagtcattcaacaatcttttacaagccttgaatctctttgaacttcttcttcttctttgtaccaaaagctttctgaagttttctggttttctaaaccttgaaaatttgtgctattcatctttttattctcttcttcctttgccaaaaagaattcgccaaggactaatcacctaaattcttttgtgcctctcttctcccttttccaaaagaacaaagga

SEQ ID NO: 201517 - DNA, 370 bp, Glycine max
  unsure (1)..(370): unsure at all n locations
tcaacagtccagcacggaagcacgacagcgatgacgacgaccaccatgatgcgagtagctcagcgagagtcattttgggggtgagtagcttgaacaaggcagagtgagtgagtaaacagagtcgcgagattcatttttgggggttgttgcacgataccgtttcgggttttcgtaaacccgtggactcgacgcagactcgcgagtctaccaaaacttgtccaagtctacgtaaaattggacgagtctactccgatttcgattttgcttccgatttaacttgccaacccttagtagaatcataaaatcgtacgattttacgatttaaattgcgattntaacaaccatggctcggaggccgatgatgacatac

SEQ ID NO: 201518 - DNA, 374 bp, Glycine max
tgaaagctccaacaggcttcttttggttgggatgtgtgctctatcatgcaagaatgcatggtcactagcagctatattatcaatcaattccatggctccttcaagggtcttcaattttattcttccccgtatagaaccatctaaaagctgctcgaattgggccttaacctgcaatgaaaatattgcgctggattggttctgaaaatccatgagtaggcgtctttcttaataacccacgaaatctttccaaagcctcactcaaggacttgtctggaaattgatgaaaggatgagatggaagcttttccttcagcagtcttggactctgggaagtatttcttcaagaatttttcaaccacttcatcccaagtctta

SEQ ID NO: 201519 - DNA, 429 bp, Glycine max
  unsure (1)..(429): unsure at all n locations
ctaactctccacaggctnntgatgtgctccttaacacatgtttatctttgtatcttggctaatcgaatcgtgctcataatccttctttggatcttagtccactcggtctcatttatagaaaccaacctttcatcttctaatgtctgatcaagacctaactgcatcaaaatgtattgaatagtactctgtcaaatcataaaatttatttttccatcanacaatggtatctcgaacctttgtgtgctctcgatcatagctttgataccactgttgggtaatcaacgctctcacaaacaaaaattactcacacccacaaaggaccgtgagaacacaataaagattacaccatatgaaaaataataacaaacacaagaacataacatggttcggcacctcttgcctatgttcacagaaccatctcaaaagtat

SEQ ID NO: 201520 - DNA, 359 bp, Glycine max
tcaacaccccaggaaccacctcaccttggttttattactaccactgaggttgtaaaagcccagtctaagcatcaaaaagcctagtctaagacttagcattcctagacgcattcattctaaatatgggtatgactattgagggaaaccttagaaagcccaggttaaacccaaaactagaatagggcaaacgggttcggggtcgtgggccactcgtgaaacccgcaacctacacaatatataggctttatttttaggatcccattaataagtgggctttttagccggtcccgcttaactcgtgagataaatgagctatactagcagaccccacaagtatttcaacctttactaaaaaaaca

SEQ ID NO: 201521 - DNA, 372 bp, Glycine max
aaaaattaattctagctttaagaggagatagagataaaagcatacgagagagtagagggaagtgtacccgtcagcaaaaaaaattaattttacttaggtaacatctactgcaagctattcagcaaaaataaaataaaatctattgtaagcttaattgtcatatgacttgagtaaaaatgttttgaaagataagacgagtatacatttataaaaaaagaattaatgttatttaattttattaatctcaaataaaaaatataattattttttaaaaaaatattaaaatttgatatcataaacaaaataaatcattaaaaataaaaataaataaaaaaatattttaaataacataaaataaaataaaataattta

SEQ ID NO: 201522 - DNA, 372 bp, Glycine max
tgatggaaaatcatgacatgcaaagtcaagagatgtgataacagatggaagaacaaaatgaacaaattcgtcaacaaaatgagcaaaaatgcaacatatattacaacactggaatattcagtctatcatgctagcccctagtcgatcgactaccacaatagatataactagtatcatgttgacgatgctcaggttgatcgttctcatgacatgtcaaaggaccattgactcctggttattatttattttagttcgattatgtcatgttagttatgaatttgaactttgtaaattttgacattacattatattaaactttgaaaacattgaaatcgcactatatcaatctataaattagaactttgttattgt

SEQ ID NO: 201523 - DNA, 369 bp, Glycine max
ataaaggtagtgttgccatgttttcaaagcccgtactaaggcatacaactccttatcataagttgaatagttaagggtaggaccacttaacttttcactaaaataagcaattggatgaccttcttgcaacaacacagccccaatcccaacatttgaagcatcacactcaatttcaaaagatttttgaaagtttggctacacaagtatggggacattagttagcttttgcttaagaatattgaaagcttcttcttgtttctctccccattcgaaaccaacatttttcttgagcacttcattgagaggtgctgccaatgttctaaaatccttcacaaatcgtctataaaaacttgctaagccatgaaaact

SEQ ID NO: 201524 - DNA, 369 bp, Glycine max
aaacccatatgattacaatcatatggacatattacacacatgacaagtataattcgtttttttataccgctctaatatatcctcatttgttaccatttctccacacagtttaagttgagaattaattttcaatattgcaaagatatacttatgatttgaatactcgtaaacacacttgaatccgattttttttttttttaaagggaaagcaaatgaatctgattatgtatgtatgggtttttttctttctctgacgaaacatatatctcttttaaacacttcaaaacaagatttagaattttcattgtaagatattcaatctctaacgcctctttaaggaggtgacattttttttattactttaggctt

SEQ ID NO: 201525 - DNA, 319 bp, Glycine max
  unsure (1)..(319): unsure at all n locations
aacaatgggaaaaatanaaacaaccacggatcaagcctcggaaatgctgcaaataaccataacaggccccctcctatacaacgccatagcgagcaatacagaacaagatctgacacccaaaaacaaaaagaggcttgcaacaacctacacaaccaaaagcgacgaagagaagacatacagtgccgcgcccaaagcgtggaaaaaagtctaaccctccgcaccaatgcgcagaaaaacaacccagaccggccaccctgagacatgatgaaaccccacacaaagacgaaaaagcaaccatactaccaaagcggataaaaca

SEQ ID NO: 201526 - DNA, 370 bp, Glycine max
attgcatgtcttatgcttcctttgaaaaaccttatagaaagagactttgtgaatgttatcctttcatgaaatgcatgttattttcgtaacctacactgaaccctggtcacattggcgtggtcggaatttccaaatgatgttcctttgtaaaacctgaaatgctcccagctctttcatgtagtgatgtgggtgtttgacccagagcactgttactagctttgttttctgaaatccatactaagtctccttcattttggcatggtagaggcttgcgtggaatcaacgaacaaggaagaaaaggaatcttcaagtgacacgacgaggaattcgcggggtagctcacgataggtgaggggaagttattataaaa

SEQ ID NO: 201527 - DNA, 361 bp, Glycine max
gaaatagagagcggatatagagattaaaaagcactcaattacttacggggttgagagcgctgtgttgattgaagctctcttctagcagtgcagattgttctttggtgagtctgatcttctttctagcattggatccatttacgacttctgtccttactcttgaagaaaccctctcttctgcctctacctctatgtcttcacagctaatacctttctccctcttaacgaccctcccagatgagaaagacgatacaccgctgtgaggtgatgtctgtcgagacaactcaagagggtcctcacaataaacgatatttctaagcacttgcttggtcacgtggtaactctcaccggacaggcccaa

SEQ ID NO: 201528 - DNA, 409 bp, Glycine max
  unsure (1)..(409): unsure at all n locations
ctactgttaaatgactggctcgatcatgaggtgatcntttggagnaatactnnngactcgngcaccctagacttagcaaaactgatgctgctattttatccactccacaagtgagttaaattttaatcggcattggttttctttcatagatgcacttgtgttgcttttgtctaatttattttggtttggttgtttgcttgttttaactttaatcatgtgaaactaatgattgaaacagagacaattaaggtttttcattgttcacggattaaacctggcatccgaatcttgtaaagtgatcttaatagaatcatgtgtaactctgcttatatgatcaaatcttataatgaaagtccattgtgaagttgcaagttattggtgatccttctgtatcactccagaaatgtgt

SEQ ID NO: 201529 - DNA, 358 bp, Glycine max
tttttgcagaaaattaaagactaattaattaatgtaatttgtaaaaaaaattaataatgataattcgagagttttaaatgaaaaattaatgacaaatccaaatttattttctttaaaatatttaaataactaaaaaatacaattaaacctaaaccaaacgttaaaattaactataaggatgtgaccgttgatatttaaagggatcaatatcacaattaaacatagtatctcttcccgcaacaaaattattgatattgctgaatcatacatttgctcttgtccgtctaaattttatggaaacaatgtctctttttttttgctaattttatggaaataatatgtcaacatatctatacaa

SEQ ID NO: 201530 - DNA, 341 bp, Glycine max
  unsure (1)..(341): unsure at all n locations
tcaactccatttacttctgctcgttcctttaatgatgacttcagttatttcacacctttttgttgtctgactatgtgcctgatcggaacacataatttgttggcacttactattatggattacgactaaaggtgtaaggatgtggaataagaattttggttatttaattattaattgatcagaaacggcttttagttaaccccggcccctaagtttgaaaaattggtattctgtatgtttatacgtatcanagtttccaggcttaacctaatattcaaataattggataataaagtaatgggtaaggaaaaggacctttaacaaatgtatatttttttgtg

SEQ ID NO: 201531 - DNA, 440 bp, Glycine max
gtcacctgcggcatgcaacgctaataaatctatatatgatgtagagcaagtctccctttattggaccttaagttacatgggctaaatccctcatttggttttgatgaaaaccccatggatcaatgcatataccacaaggtaagtgggagtaaaatatattttcttattttatatgtagatgatattttacttacagccaatgatcaagttttgctacataaggtgaaacaattttctccaagaattttgacgtgaaggatatgggtgatgcatcttatgttatcggcattaagattcatagagattgtagaagcaatcttcatgatgatgaatcaagtagttttgatgatgacaaaaagcccaaaagaatgatgtcaagattgagtcaacaagttcaagatcaagattgatttcaagatctaagaaaagacatcaacaag

SEQ ID NO: 201532 - DNA, 375 bp, Glycine max
  unsure (1)..(375): unsure at all n locations
tatgtggtgaaaatccaaagagaattgacagtcacttcaacacaagtttgggcctttatttcaactaacaaaatgctaataaaaccactcaacaaaggtggcaccctctactcttcttggaacatggtgcaattgacaatccaaagcttcgccacttgtaacttgggcctaaattcaaatagcatggttaacacttgttaaagagtttccttggccttctttgttctagcccttggcataggtcctccaagtccttctaaaggttccttgcccttggttattgccatgtcctcatcaaaaggggcccaatgagcgataaggccttattctattcaccaggaccttagaagtgactntgaacaacacattacaaag

SEQ ID NO: 201533 - DNA, 443 bp, Glycine max
  unsure (1)..(443): unsure at all n locations
ctcagaggcacctgaggctgcaagctatatctatcgccagcattcacaagggtgtttcgatgatgatcttgnatatagcatgtacaagcaagcctataggataatggttagtttgaaggaagatgagtatccaattgaagaaggaaagtggcttggcatgtctgcatggaaccgagcagcagtgccagtaaggttgggtcagattgaagtggggaagaaatggatgactgtgggattaacatttgcaaagctcgttccaggcatggaagcttacaaggcatgcatggaagaagtcctaggcaatttgaagaaagaactttgatatgcatgaatctcaaatccggtttctagaagttacaaaattcatacatgtactggaaagaagtcagaatgtgtagaacacatctgatgttgaatttccattggtaatgctcaacatggaa

SEQ ID NO: 201534 - DNA, 316 bp, Glycine max
gctataaattcttattgtaatttgaaacatctacccttccaccacataaaaaagaataaaattcaattgtatttggggctatgtgttttgttatgtttattgtttctggaaattacactcattttgaaaaaattgtaacgtacaaaatttatagcttgctctgaacttgtaacagctactttggcacccatgtttcacatgcttggtttttttgttttttgattgcttgtgcctgataccttgtgagatcaaaataacactgcactctctacttattctttctattattaaatattgcttataattatggcacgag

SEQ ID NO: 201535 - DNA, 417 bp, Glycine max
  unsure (1)..(417): unsure at all n locations
agcttaaactggcgcagatgacatatattatatgtagcttttttagaaatcctaatgactcaattaaaaaaaacataattaagaatttaattaaatatgacgagcaatttttgaaacttagagagaaaacagaaaccaaaatatcttattaaaaaaatattctcatataatntttagtttaaggtgttttatgttttataaaaaaacataatagtcaaatttggaaaactgaataattaaaaatgatagttgtataacgattatttacacatcggtaatctggtttacatttgagacataaatttaaaatattcaaaattaattgatatttttgtttataacatgataaatagaaacatcatcaataataattttgttgacaacttattttcaattgagtaatgttaaatcctcttg

SEQ ID NO: 201536 - DNA, 344 bp, Glycine max
tactaagcttcccttcttctcttcttcttcgtctgatgcggagtcttctttttcttcttcttcctcttcgtcgcggatgctcatcttcttctacggtcattggccagacgcaattctgttctacttcaagggaagtcgttctcattatcattttcggcttgcatgcgcattgttgtggtgggtggtggatgacgataatggtatctagattcgcactttgtccatgactgtgcctgaaaatgacattatttgtaactgatggacatagagactggctatcagactgaccgatacggatcagaaatccatacgacatgtttttgtacacattcaactctatattt

SEQ ID NO: 201537 - DNA, 426 bp, Glycine max
  unsure (1)..(426): unsure at all n locations
ctgcagcttgaagagtgaaactgtatgcatactaaatttatttttttttatcttgagctcagactatctaggactccaggttcatgcaggtatgcaagctntgtcatatcatccactccacttggtgggacttctgtatctttatgataaatactggaagctttaacaacaacctgcaaatttcaagacaaacaagagcaatgcaaaaattcacaaatcgaaacattagaaagtttcaaatttgaagttaacttaaaaatgtatttatagtataccaaatacaccaaataaaagtacagacatcgtgcaaaacaagaacaagtattttcaaactttcaataagacacatatctttattatgatatgcttcaaaggttcccaccggtcattcatgttcaagatatcaatgtactcgaagtaaaacca

SEQ ID NO: 201538 - DNA, 426 bp, Glycine max
  unsure (1)..(426): unsure at all n locations
ctaactntacagctcatttccactcatcatttggttgcaatgctgttgtttgtctcttanacttgtcaaattcagtagcaagttcttcaccaagacttctcccaatatgaaatgacttatgtgcctccgagaactctttggctgtgacaaatctataaggctgatctttgtgtgcccagtactgctcctgatctttccttgatgtaacctataacataataattaatggtcaaaattaagcgtataaaaccctcttttacctgtgcagacagattaaattatttgagacaagagatagggaaacttacttcttgcaaaaagtctgccacacctttcctctggggacatttaaaacccattaattcgaaaaattcaagcacgtgttcacgaggaccctgatacacaatgtgactatcagagagtaga

SEQ ID NO: 201539 - DNA, 405 bp, Glycine max
  unsure (1)..(405): unsure at all n locations
gctgaacaccaatgcacgatatgatggaggttggagtgggggttttatactacgaatgaatataaatctggtgggagaaacgatggtttatgtgttgaagtgggtgacgtttgaaggacacgtacaacacggtaactgtcttattactctgtcagggctgccgtaaaaatgaatacctgacgcacgccaagaaagagtataggggtgtttgatggatgtgaccaacgcgaaccagaatccaagaaatgatgctccagaatctttttttttttggttgctgttgagttagaaatggtggttgtgttgtgatggtggtaacagcgaaggtgacatgnttaattataacaatgcaatgtgtgggcaacgttgtgaacaggggaaggcgtggtttgaattgaatcgatg

SEQ ID NO: 201540 - DNA, 381 bp, Glycine max
  unsure (1)..(381): unsure at all n locations
ccaacacatgccgataagagaagggtcgccttagaaaggaaagaaagaagcctagcccatttacaagggtggagaccacagatggaaagggtccctatctgtgacattagcaagagctttgttagcgcgaggtggatgcatgagaatcaggttgttgtgctagataaagaaacaaccaagagcagccaagctgggtgcagccgtgctccccgggtttggaatcgaagaattggcgaatcatggagcgacccaagatttcggtatgaaatccaatgtaatccagtagtttgaaccctattgctgggcctacgctataaagtctgcttctnttattgagcatacctattctttaaatgttcccgcaattataaatatacaacc

SEQ ID NO: 201541 - DNA, 400 bp, Glycine max
ctaattcattatggaacttagattcattgttggatgaactcattctttaatgaaatttcattctaagtatgttgcaacaatgcggtttcgtgtcatgtccattgtgcagatcttgatgtttgcaacatttttcttatcatttggtcgatgattacttcttatggctagaagttttaatcttcatccagtgaggatgttgacttattcattgcagtgcacaaccaatgacactttgagtcttcttttgagctttcaagcttatcatcctttctgagtgacttatgatagccttgaatttacttctattgtagttctttgcaaaacttgtcttttctaaatacacttagcaaactcatcaataaacataaactcagaaggcttatgatttgtaataagtaaa

SEQ ID NO: 201542 - DNA, 442 bp, Glycine max
aagcacctgggctgcagctgtggttcccttatattagttgtaaagaattattattctgatgatgaataatttctgctgcatgcttgtaggggttcatgattcatattggacgcatgcatgcgatgtggataaaatgaacagaatactgagagagaagtttgtagaactctacgagaccccagtgctggaaaatgtatggtttaaatagttgttagcatccaatgctattcctagtattataattatatttgtgatgaaactgatttcattagtggaaatggccccaacctgaatgattttagatttgtctgcaaatgaattacagatgtttctttggggagtgtgcattgttttctgggattaggatggtacttccttcattggctataaaaatcggaaaactaagccactgttatttgacaagacgtggaatcttattttt

SEQ ID NO: 201543 - DNA, 353 bp, Glycine max
tgaaaacctttattatacctttaaagttagtgagaaggctaaacgaaaaattatggaactttgaaaaactaaatccttaattgaaggcgtaggtgacaaccatagtgaattactaaacaagattggtagtttacttaaggtcattccagataccccccaagcctcggaaaatacttccaaaatggtaacaagaagtacctccaaattaattaatgttattaatgaagatagtgaccaaaactcagataacacaactgagatacaatcagtgtcagaaaagaatataaatccaattaattccaaacactggaaaacaccctccaaattatattatcaacgtccgactgcccctg

SEQ ID NO: 201544 - DNA, 361 bp, Glycine max
aaacgcttcctggccttcattaaccgctggatcgtctcgaaatgtggtctgcaacttcacaaaacacgcttccatgatctgaccgttgggatctttgagaagatgtctggagtgcgctacaagcctcttaatgaagcttctggaggaagcctcttaatgaagcttctagagaaaactacatgaagctgcctcggtagaaacgctgcccagccttcgttaagtgttggatcctctcgaaatttggttttcaacttcacaagacactttaccatgatttaaccgttgggatctttgataacatatctggagtgtgtcagaagcttccgttcccgagagcatctcttatttaagcattcaccct

SEQ ID NO: 201545 - DNA, 365 bp, Glycine max
agcactgcaggctgcgctcctttaaaacagcgtgagcatttcgtacttttcaaaaccgagaaaagcattttgttgaatagttggagaatctgtttcaatttcagcgtctcgaatatacggaactcatctgacatacgagataaatgttaatgccgttgaattggcaaagcttttgtttccaattcgatcgtctcattaaagagactcaacggacatctgagaaaagatatgttttaaaattgctacaactttgtcttaattctagcatctcgatatattacaacactaatggaatccgataaagttttgtagcgatatttaaagcattgtttaatttgactcttgcatttagggacacatcgcat

SEQ ID NO: 201546 - DNA, 369 bp, Glycine max
  unsure (1)..(369): unsure at all n locations
tatatcgaggcgctcgcaattggaaacagaagctcgtagcaaattcaaaccccattaaattttaactcagatgtacgattaagtcccgtaatataacgagaagcttgatattgaaaacaaaagctctgagcaaattctaacgactaannnnnttttctcggatgtctgattcagccccgtaatatatcgagctgctcgtagnngaaaacggaagcttcgagaaaattaaaatgacaataactttctactcggatgtccgattgtgtcccgtactatatcgcgaagctcgacattgaaaacagaatctctgagcaaattcaaacgacaataaccttttactccgatgtccgattgtgttccgtagtatat

SEQ ID NO: 201547 - DNA, 436 bp, Glycine max
  unsure (1)..(436): unsure at all n locations
taagtcacctgcggctgcaagctgagatccagatgttgaagtggaactttccttgtattggnagtcatgacgacagngatgtggccctcttaatagcgactttcctccttctaattgatcgacgagatgatgtgccacatggtgtggcgcgcatggatctcgttattgtatgcaacggagacgacgttcctctgctccacgatgagttcttcgatgtcgacagcggcaaggaacacatcaacattaataaagcttcgatttggaccattaatgatattttacttcccctccaacagggtcacaaggtttgattaggaacacataaagttgaacctcaatctgaaggaacccaggaaaaaggtgaccaagactcaatcaacaatatttagttttatacacactacatcatttctttttataatgctggatgaagttg

SEQ ID NO: 201548 - DNA, 419 bp, Glycine max
cagtctttcgcaaggactcgagtgtgtgcgctgctggtttattgtatatgatccacaagtctctacctgaatctctaagaaagagtgtaaagaagtgtgacctcgcaaaatccaagaagagcatagaatggattccacacaactttacttttcgatatctcatacctaaggagcttgtaaaataattgcttggtagcccttttttcttactatgggagacaatctacttcaagttttaaacaacagttcacaacttcaattgtagttgcattagtccgatttgtctgcaattttccaatcgagacaaaactgctactacaattgctactgcagtttaaaaccttgatgtgcgttgcttgctctatgatgtattatctctttgtacaaagctgacacgggagcagcaacagaaaaatcta

SEQ ID NO: 201549 - DNA, 325 bp, Glycine max
tgtggaaaacgtcacacaaaccgtaagaaactggtcatgaataatatttcacattcgggagatgtatctacctttgaggaaggtattaacacctctcacgtttgtcccaaaggacaacagccttaaatttggattgtgtgacatattgtacctaaacttttatttcttttttattttagaggtcgacaaaagcggggctcttgctcctacgtacccttcatcgaagaggaaataagacctacgtagttctttcaaaagggcgaatcacgcgattcttttttacttggaatgtggtcctcttaacgtgttggaccctaagacgatc

SEQ ID NO: 201550 - DNA, 204 bp, Glycine max
taggatatcactattggagcggctatcgcatcatctacacacatatctatgtctgcggcataacactcaactgttattaaatgatattaactcattcggggtgtacatttactatatatctttgtgaattaactatcctgcatttctctcgcatacgagaaagctgacgattcttatcctcttgaaaaaccgacatccctttct

SEQ ID NO: 201551 - DNA, 317 bp, Glycine max
actgagcgtgagccagcaataccagagcagcatcaccacccaggcatgcgccgaccaagctaaggaacagacagccgcgaaacaccgggatcaccatcaacaaaactacccacgcggcgagagatcacccacggatacacaatatcaccaccaacccccgcaccaatgaaataagataggaggtgcggtgcatacgaagagtgacgtgccaacccaccagccggtagacagacaacacaacaaacaccaccccccacaacaagaaaagaagaaggagccccacaccaatggcccccacactaaaaaagacaccagac

SEQ ID NO: 201552 - DNA, 346 bp, Glycine max
agctgaaccagtgatcgtacgtcttcagaggcagtctgatgcaaggcattcagatgactattctcttaataagactctccgcgcccaacttagagtatgctcctttgctaatgatatttgtccttgtttatttttgtttttctttggctgttccattctcatccttgagcatattgtttctttttgtacataatattttcatccagctctaaagaaaagaaatattcgttaatgcttttccattttctcacggtcaaaagagaagagttgctcaagaataaaatgcttccagaaaagaggccttggcataagacttctttcagctactgaacaagattctgccacg

SEQ ID NO: 201553 - DNA, 442 bp, Glycine max
  unsure (1)..(442): unsure at all n locations
ttgagtcacctgaggcatgtcaagctgtgcatccaataccctgatgaggatgttccttatgttcttaaaactggactgatacatttgcttccaaagtttcatggccttgcaggtgaagacccgcacaaacatttgaaagaatttcacattgtctgctccaccatgaaacccccagatgtccaagaggatcacatatttatgaaggctnttcctcattcattagagggagttggcaagactggttgtattaccttgctccaaggtccattacgagctgggatgaccttaagagagtattcttagaaaaaattttccctgcttccaggaccacagccatcaggaaggatatctcatgtattagacaactcagtggagagagcctgtatgagtactgggagagatttaaaatactatgtgccagttgcccccaccatcagatttc

SEQ ID NO: 201554 - DNA, 413 bp, Glycine max
  unsure (1)..(413): unsure at all n locations
cctagaatggcattcgggcactcattntatatccttcatgctgnccctatatatataaaaacagtcccacaatcccaagcttacaaaaccatgctcatatgtcattgaggcatttcaccgagcacttggtgggcgcatgtttaggcatgaatagcaagcgagtgggggcaatgtggcatgccccattgcttcaggatgcaccctaggcctaaggccatcccctacaacccctcaattcaaaccaatcaagcatggaaacaaatcaaaattgccccacaaacttgagcacattcccacaatttagagcaccaaaagaagaccaaaacacaccaatggaaagctagaaagctcaaggatgagatacttacttgttggagtgagtaggagtaccaaaaatgaaagcaaaatacaac

SEQ ID NO: 201555 - DNA, 357 bp, Glycine max
tcccaacgcaaatctccgctataataaacctttcctcactggcacgggaggaactccccagggcaaactaaagtatattggcattcattctacacaattagaaaccgcaaacatggtcagacattaggaaataacaaaaaccacctcaaaagcgcgaagacaatgacattgtcaaaaaccgcgaagacacaatcaaaaaccaaaaacattgtcatctataaaaacagagcatcataaacgaaaataataaacgatcataaacctccctacgaagcgcgaagacaatgccgcagatgaaacccctcgaacatgtaaaaccccaaattaaaccaccaaaacaatgcaaacgaattgaac

SEQ ID NO: 201556 - DNA, 426 bp, Glycine max
  unsure (1)..(426): unsure at all n locations
ctgtctanattacattgatgttggtatgggaggaggttacatgccatttnttctttatgagtaatgtcccactaaaactaactttccaaatgtttgccttcgcaggaatggcaccgaggaagcttgcctcaaagaggtccaggaaagacaaggcggccgaaggaactagttccgccccggagtacgacagtcaccgctttaggagcgttgtacaccagcagcgtttcgaagccatcaagggatggtcgtttctccgagagcgacgcgtccagctcagggaggacgagtatactgatttccaggaggaaatagggcgccggcggtgggcaccactggttactcccatggccaagtttgatccagaaatagtccttgagttttacgccaatgcttggccaacagaggaaggcgtgcgtgacatgagat

SEQ ID NO: 201557 - DNA, 355 bp, Glycine max
  unsure (1)..(355): unsure at all n locations
aaacccggatatcgataatgataaatnaacttggtgcttacatatggcaactaaaagaggaaaaataatcagtcgaggaagcatgatcttattcgtggaaatcatgaaaggaacctctaaatcatgaaaggagatatatgcaaagccaagatgcatcacctttgatgttaataccaagaatgcattgaaccgatgaactcagtcttaaagagggctgaattatgatatcctttaaatattttgcaaacctgaaactttgatagctttctgagcttctttctcgagttacaaaacaaaatagttacaaatatattcacagatggttatcaagtttataaagaccaccttcttatta

SEQ ID NO: 201558 - DNA, 301 bp, Glycine max
atgaacatttgacggaggactttttttttatcgaatcttatcaacttagcccgatgatggaagtaaacataaaataactgtgaagcatgattacaacatcatcttaaaagccgaaccaatttttaacaacatcaaaagccttttttttttgctacaaacaagcctgggattacgctttaaatcgagtcattgattaatacacatcttagccacgctcaatttgtggtcaaaatcttgtactacgctttggtatatcaaagaaaattcctgcttggactattgaaagccctgcacagatttt

SEQ ID NO: 201559 - DNA, 302 bp, Glycine max
gcggagatgacggaacagctggtgaaccacaagcggaagctcccttcggagaggaagccatggaaaaacagagcggtgggaacgattccgcaaatcacaaaaaaacaatgggaaaggctggaagaaacacgaacgccaagcagacacaaacccgaatgaagaatgtaaggggcgagagaagcaacggacgaacatgctctgaggagaacgcgctacaaatggtaaaagatacgtcagggcacggacagaatgcagtagctgctataaaacccctagcagacaaacgacccagctagcccccc

SEQ ID NO: 201560 - DNA, 313 bp, Glycine max
  unsure (1)..(313): unsure at all n locations
taatgccgcatctacgaaggganccttggtcatttcccaatgagcaatgatcaaccaaatgttcataacagatagtaataaaacagtaacgaattggggggtttgtttgtctttgaaattaaacaccgagtaaaattgaattagaaaatatcataattaaaacatgtggctttcccttgattaacaagcaagtcttttatcctaggttgggaaaaattatcctttatcagttcaaccacttattccaaccctaaattaaattactaagcgaaatttaacataaggcattcattttgtgataaagcaacacata

SEQ ID NO: 201561 - DNA, 115 bp, Glycine max
gccgaaaagcaccgcaagacccagggcaggagcggaaaacgcggggcaaaccagccgcaagcaggcacctcagaacgcaccaaaaagaaccgagaaaacagccccaggcagaaag

SEQ ID NO: 201562 - DNA, 166 bp, Glycine max
atgcctatctttgtttctctatctcttgaaggacatcagagggcactgcataccctatttctccgggattgtacttgtggcatgcaactttgttaccgcttcacatattgcgtctttgtgcccatactgatcccttacgtttaaaactcaggagaggcttgtccac

SEQ ID NO: 201563 - DNA, 352 bp, Glycine max
gactaaaaagataattaaattgattacttcattgaattaatcaactaccttgtagatttaattgattacatgcggttataactattttctctataaataatcagcttgtgttctcttcaaaaaagaacgaaataagcttctgagtgagccaagatcatgtgttgttattagttaaaggaaaaagagaaaaaaagtggttaaaaatagtaactcacaacttcaaatctcttgattgtgaagatcttttgtgataagtgagttgtataactttcttgagctcaagaataacacctcttcaatcaagtaaggtttcgcgaaaaggattgattacgttgcgtctatctttactctt

SEQ ID NO: 201564 - DNA, 337 bp, Glycine max
ttcattggagaagcttctatggcaaatgtcacacctatgaaggttactctcaggagtcttaagcctgtgttccggattgagaattaattttgctaacagcaaactttgagctgtaggtcaatctgaggagtggtgtcttcatgctgcaaactactcaattgtgctttgctccaatatcctttctgctatttaggaatcccgattggtgtcaatcccaaaagaaacgtggcgtggtatcctatacttacgacattcgaggataggccgatccggtggaagatgggtccggctgacctaatcctgttctcggaagacgcttgcgctgaggatgggattc

SEQ ID NO: 201565 - DNA, 426 bp, Glycine max
  unsure (1)..(426): unsure at all n locations
ctaagctccttgggttgacaagctnggtgtttcaacatgctgacctctctcttatgtcacaagcattgggttcgaacaagcttcattggttttcttgcaggcattccattggcacgaaagcagtctttgatcgtgtttgtactcgcaatcacaaggtaagttttgctcgccccaccctcgcaatcttcaccattatgttaacttcccttagttataagttcccttaaactgagattttaacttcccttagttggtcgcaacctgcatttgatctatttacgaaagttgttgttttgactgtttgaaggttcagataccttgaaactagggtcacgcccttcaatttgcactatattagaggtgagttatgtacaagcaagcttcatgatgatgaattacgttgattcaagaagttctgataatgac

SEQ ID NO: 201566 - DNA, 423 bp, Glycine max
ctgcagctgatcctgaatctgattcttgaatcattcttctcttgaatcttgaagtgttcttcaacttttcctcttgagtcttgaatttgttcttgatgtcttcttgtcataccctaatttcgtccggggattattatttaatgatatacaacctatgattggccgcttcgagacacttggcgtcctttgttgcacaatgaatgaagtcccgagacggtcatatatcaaaaggaagcagacttgcgcaatccgtgaaattccgtaatgtggcggaaattgaaaagaggtgtttttgcccaatccgtaagtttccgtaacttcttcgaaagctaaaaaagagtaaatacataatccgtaaggattcgtaaccttgcggaagataaataagtatcgttacgaaattcgtgaagtttcgtaacgtta

SEQ ID NO: 201567 - DNA, 403 bp, Glycine max
agtcacctgcggcagcaagcttggaggatgatgggacccggcgcgataaaatatgttatgggctacgtgggagtacgtgagctcatttggaggtgggcaacaggggatggtgggtttatgcgcgcattgtggatgtggaataacttgttgtgcaccattgtcctaccgccatctattaccacatgtgatgggtacctcattatcctacaagcttgagatgaagaagtgtgtaatggcgaaacttttctgttttaattgatgaccacatagtggtacctgtagatatgtcgcgggggctatgaaaccttcgggacgtcaggtggggtgctattgcccaatacctagcttgaccaatctccgcccaacccggtcatattcggtcagtgagaaccttgtatgttcc

SEQ ID NO: 201568 - DNA, 325 bp, Glycine max
taatctaattttacgagaattttaagcaattgggcttgaatctggaatagggcttgaacttgaagagagcacacaattttattttatcaaatcttatcttatctagattttatttcatcccatcttatcttatcttgtccagattttatttcatccaatcttatcttatcttgtccagattctattttatttcgtttatgggcttggacttaaaacagatttgtaagctttggcgctgagaacctatataacagcacccacggtttagttttacggagttttctaagaggagaataattctacgatttagaattccagttttact

SEQ ID NO: 201569 - DNA, 309 bp, Glycine max
aaccactaacaccgactgtcgaccaaccaacaccaggacgcagtaagcaccaccagggaacaaacgggcgttgaaagaccaaagacactaaaagcaaagctaggcaagacgaaaaggcggccgaatctatcctcccaaaatatgagcgaaaagggcatgaaaaaaaggaaaacgggagataaataactatcgggcccaaaaacttattaaacactaacccgacaacgctgggccagaaagatcgagtacaacgcgaaggaaacaagggggccccaaagccaccaccactcgtagaaaagggcaccaaca

SEQ ID NO: 201570 - DNA, 409 bp, Glycine max
atatatgttacaaaacaacagaagcatatattgtaatctattctatatacagaaatacttaaacaaacctgccaattatgagttttgcggctttttgcaaattccgcccatgtttctggatcaaggccatacttgactgtaggattagatatttgctgaccttcattgtcagcaaagacaaattttgaagtcaatgaagacttaaattgcctccatcttgctgcaactgttgacatcaccttttttttttgcattttcaccttcagggatatcaaatttgtgttgcacaacaaaaggagttatgtaacattatgtaaatgaatcctttaaaagtaacataacaacaaaatcatgaatacaagtgtatttagaattacttaccaaaatatctttccatattaagctcttt

SEQ ID NO: 201571 - DNA, 413 bp, Glycine max
  unsure (1)..(413): unsure at all n locations
ngcnttaccatgctgagctaagcccagattttcttgcgtttttatcctcaagagcctgcagaaggtcagccagtgttgaacctcctgcagaagatatcaaacgatgccgatgcatcaataaatgagagcaacttatccatcataaaagcgtgttgttgttggcaaaactaaccatgcggagttattccttctgtacttgtaattagaggacctttttgacagccattacaactatacgcgttcaaagaacagacaggcgttccactatattacttggacagaaaataaccaagtgattgagcaaaatcaacaggtttaagaatcctcaaaccaggaacatattctgaaagattaccaatactccctggcctcctttaattaccaccagaggccttcggagaggacaccacaca

SEQ ID NO: 201572 - DNA, 393 bp, Glycine max
  unsure (1)..(393): unsure at all n locations
cagcttaacataagaccctgctgagcaattccgcgagctgttattgttctcgtcttcgatcaacattntcaggagcatgtggcatgctcagcagttccaaggtgcaagcaggagcaagctcttcaagagattcttcaatctagaaaccatgacaagcatcctcagggtgtgttccatgcctatatacagacgtatgtgataattaaacaggaaagaagtgatggtcatgtttgtttgatatttttaaagatagcccttttttttttttttaaaatcttttttgaagcaaacagccaaatcgggactattttaccaaataagttaacccctttctaaaaacagtaattgcccagaaaggagtggaaaggggccccccatgaggaaaatgctttg

SEQ ID NO: 201573 - DNA, 385 bp, Glycine max
acaaccatcttttttttttcaatttgggggcctgtggcgttgcaatttgctcaatatcttccaagataattaatcatttttttttttgtgcgtgtgtatatgtaatgtgtaatataagcagagaaccatacatatgcacttcaagaactttggatatggtatgtgaccctgtaatattttaatgcgttttttgacggcaaattatgcggatgtttgatttacatttagaaatgttatgtcatgtgtttcatgcgaatccaacaaaattcaacgaataaaaacaaagtaaaaattctgatttgctgaaaaaattattttactcaaacataattttgcaatgaataaccaaacatgatatcggctaaatattgcattttacatcatc

SEQ ID NO: 201574 - DNA, 263 bp, Glycine max
  unsure (1)..(263): unsure at all n locations
atttctgttttaaccatcgattatcaatgttgttccaacaatgccttacttctgaataaaactctatctaagaagcaagttccctgagttcgatactcggatcattntcgtttaaatttaaatacttgacgacccagtgtgctttcggggtttcatttccttgaattaattgttgaaatagagaaaaggaacctatggaaaatgacaatggacgtgttttggctgccacgtagggaagtattagattgacactctgccttttt

SEQ ID NO: 201575 - DNA, 409 bp, Glycine max
aagcacctgggctgcagcttgcaagctctatatggattgaaacaagctctcatatcttgttatgaaaggctaagctcattcctagtctataatggattcactacaggaataacggacactacactattcagaaaggccgagaaaggaaaacttcttattgttcaaatctatatagatgacataattcttggtgcaacctcaaaaaggatgggcaaggattattcttaactctggaaagtgaaattgaaatgagtatgatgggtgagctaaatttattccaagggctttaaattatttagaaagaagattggatactcatccaccaagataattacacaccggacctattgaacaggttcagaatggatgaagccatacctatggctacccttatgcatccttccacaat

SEQ ID NO: 201576 - DNA, 429 bp, Glycine max
  unsure (1)..(429): unsure at all n locations
ctcagcttgaatcantacacacatactgtaatcgattaccagagcagattttttgattatattctcaacagtcacatctttgtatttggttcttgaatggctgtcaaaggcctatatatatgtgacttgagacacgaatttgcaaagagttttttagaacaaaaaggtcttatcctctttaaaagcaaaatcgtttcatcctcttaaaaattccttggccaaaacacttatgattcaataaggaattatttgagtgctcaaatggttcaatctatctctttcaagagagattacttcttctcttcttctttattctgaaaaagaattaagagaccgagggtctcttgttgtaaagaaatctgaacacaaaggaagggttgtccttgtgtggttcagatcttgtaataggcttttacaagatagtggaac

SEQ ID NO: 201577 - DNA, 345 bp, Glycine max
caggagagagcacacacgaaatccaagggccagaaccagcaagaagacagacatggacaacgaacggcctaacgatccggcagaaaagtacaagacaatcgacgaatcgaacaaagggcgaaaagcatcgggaaccaacactaacgacagagcacaaaaaacggaagcgccgaaaagaaacaaccctcggcaaccggaaaagagcacgcctaaaagcaagcaccaaccaccagcaagcaaagggaaaacaaccaaaacaaggcgcacctcccaaagatgagagcaaaaggagcaagcccaaccccagcaatggcttttcgcaaaacagctaacacaaaacgaccc

SEQ ID NO: 201578 - DNA, 363 bp, Glycine max
ccttccttcgaatatatactcaaaacttatattagagacttcgggaaaactaatctcatgtcacatgaatgtaaataaaaagatatatgcgatatcagcattcagcaatcatttgatctttaaatacaaaaggtgttaataaaaataattgtgttaataaaagattaactctcgttccgacttccgacgctttctgaactcaaccatgcctataattataaatctcccactaaagaaatgtacgacacagctaagtcagtatcagtagtactacactttttctttttctcgtgatggacatgctcatcatggacgaccctgatttcctcgatttttccgatcacagcattacaaccacccttt

SEQ ID NO: 201579 - DNA, 331 bp, Glycine max
agggtagcatttcttggtaaaaactaactttccaaatgtttgccttcgcaggaatggccccgaggaagcttgcctcaaagaggtccatgaaggacaaggcggccgaaggaactagttccgctccggagtacgacagtcaccgctttaggagcgctgtacaccagcagcacttcgaggccatcaagggatggtcgtttctccgggagcgacgcgtccagctcacggacgacgagtatactgatttccaagaggaaataaggcgccggcggtggacatcactggttactcccatgggcaagttcgatccacaaagagatccttgagtttatgc

SEQ ID NO: 201580 - DNA, 423 bp, Glycine max
  unsure (1)..(423): unsure at all n locations
agcttagtaagaggtgcgacaatggatgcgtactcttnatcgattttgcgatagaagccagtgaggtcgaggaatgcgcggagttctttggtcgtcttgggtgtcggccaccgtattacagcctgaatcttcgaaggttctggcgtgacccctttatcggagacgacgtggcctatatattccaagctccgttgagcaaacaaacacttggaacgtttaggacaaactcaccctgctgaagggcctgaaagatggtctcgaggtgatgtaagtgggatgacaaggagctgctgtagatgaggatgtcatcgaagaacaccgtgacaaattgcctcaagaacggacgaagaagcgtgttcatggccgactggaacatagatggtgcgttgcacagcccagagggcatcaccaaatattcgaagt

SEQ ID NO: 201581 - DNA, 360 bp, Glycine max
  unsure (1)..(360): unsure at all n locations
ggctaatgaatcatgcttccggaatgcacttgtattgataattattttaaccaccattattatggatctttaattctccgatgagctagatcatagaaaatctgatgcgcctctatccaatgcttacaactctgcatgcgtctatactctaatatgcgattacgtagcctggactagttggatcatgtggtgtttgtcaaacacactgtgatagtttcatttttttaatcattataactaacttggatttacgaatatctaattattttttatctttctgcgagactttgggttttcttctctcattcgtggactaatcanactaaagttgaaagatattcactaattaaacaacttata

SEQ ID NO: 201582 - DNA, 360 bp, Glycine max
aaattcgacataagtctatgtagacaaatttcttaataaacatgataatttatataggagaaggaaaaacagaagataaaataaattaagtttttttttcataagtaaaaactaacttatatacacttcaaattttttcaaaaaaaaaaaaaactaacccatgcaatacacgggatagaaagagaacttgagagttttatttaaactctaatttattatttaattttaaaaatgagtatagacatctattaaaaaatatgacaatttttacttgattttttttactatgactaaatgctcaaatgtttatgtgtagaagtaaaattttacgagcacatctaaattcttgctacatctttt

SEQ ID NO: 201583 - DNA, 407 bp, Glycine max
  unsure (1)..(407): unsure at all n locations
tctaatcgaccgcagcatgcagctcgtggcggtgttgagtcgatattatctctgttggaacctgtacttatatcaatcgagtgacggtgttggnccatgtttataacgactgtcgaacccttgtcaataatccctgacttctaaatatataatcggtagcttatatatgacgttacacacaatcatttgaattatagataaaggtagaagatcatcataccctatataatacgccccgcgtatgatcatttaattcttgtcaatacataatatccacatatttattggaaacatagcctagagtcagacataacttatctgttgcggagcccaactgctaaggtccacgctgtctccctcctgcagcacgaataacatggatcctctacccttgctctcttattgcc

SEQ ID NO: 201584 - DNA, 407 bp, Glycine max
  unsure (1)..(407): unsure at all n locations
atataaatataaaaaatctccttactgcaatantaaaatatgggatgaagtaatttgatttaagtaattattaattatataactattaatttacatattgattcaagttaatatttaatttaatatatcaatggaaatcttaaattaaatcggtacaaagaaaaaaaagggtaaaaaatttaatttgaattcatatcaacttattaataaaaaaaaatattcatcaatttttcacatgatattaatttattagtaaaaattattttttttacaataaatagtggcttttttagaaaaaatgattgaatatagtaataatgcttggcttacgatttagaaattgagtaagggtgtttataaaaatgatagagttcctgttctatcttaaaaaattcttagcttttcct

SEQ ID NO: 201585 - DNA, 378 bp, Glycine max
tttccacttatagaccaaaacggactaactcgacaggctacacaaactgcgcgagcgacataagctacagaatattgactactgatcttactacgaaaaaaaaaatatccacatacggaaagacgctacacataaaagcaggacttactaaaactttcccccaatgaggcctacattatagtgggtgaaggcacccccaaccaagttagaaggaacggatatcttttctataataacgaacccctattttatttgcatacaaacgcagccttatgtaacaaccacaaataaagaaataaatacatatatatagcacggctttggtgagaatatcaaaataactaacaacaatcattggacaaaaaaaccgcgataaca

SEQ ID NO: 201586 - DNA, 346 bp, Glycine max
tatatttaatttatgaatagtaatattactaacaaaataaaaggaaaattaaatggctcaaagattaacgtttgtaattttgagaaactatttaatgactctttttagggattaaactttgtcaacgactgaattgagtgagtgttgattctctttttagggattaaactatgtcaacttaacccgttagcaatagattaaaatataatgaaaaagttaaaattttcagctagcccaccaaatagttatttgttaagttttttttattattcctgaatgtatagtttttttgttaagtatatattttcacaaaaatggctggtttgagatcctctcctttatataa

SEQ ID NO: 201587 - DNA, 409 bp, Glycine max
  unsure (1)..(409): unsure at all n locations
tatcctaccaagccactgttggtctactattattttatatatttgncattggttggctcaatgactagttcttaatcatcttacaaacgaatttacattctaagcacttggtcttttctctcaatatgttcaaggtgttttgagaattatgaactttacaagaatatactaagagctttttaaaaaaaataattagaatgttagtgcaaggttcacaacccatttcttcaaagcttttggtatttataggtcttcctcttcaagtaactattatcactaaatggatataattttcacttgagcttgtgtctgaaacttgtggttgttggagcattcaatgcttgcattaaatacacgttctcttcatgctggaaaaccactctcttaagctntcatgttgagcacttcg

SEQ ID NO: 201588 - DNA, 407 bp, Glycine max
  unsure (1)..(407): unsure at all n locations
ctgcagctgaataganggctaggagcctatagctatgttanctactcgtaatagccactccactttcctctcctctgaaatcatgtttactaacattttcttatcatttttactcaaatgagtgttgtattgattaactcgccaatatcttctcttgttgaggccacatggaatcttatacatgtgtgtattatcgaattaatttttgatccattaagtttaattacatggcctattagatttgaaactaaagaacgatgaatcgtgttccatccatttaattatatgattcattcaattcaatctaaacctttctttattttaacaaagtgaatgaattggattggatttacatggatggactaatggatcccggattaatatattattttctcacccctactaat

SEQ ID NO: 201589 - DNA, 354 bp, Glycine max
  unsure (1)..(354): unsure at all n locations
atatattattctttaattaaaattgaagttatactttntaatacaatatttattatgcagattatgaaaaataaaccattaattctaattgaagaacaatactagaagtatctaaaaaaactacatcatgccctcaaaataaaataaaaaacaaaataaaaactacattaagttttaatagaagaacaatactagaagtatctaaaagaactacattgaataatagagcgtaaaatatatcacccaaaagggtaaaatcaacacaataaaacctaacattagatacctaacacactgtaacacagataatagagagggccaaattatttgataaatatatcaaataaataactc

SEQ ID NO: 201590 - DNA, 303 bp, Glycine max
  unsure (1)..(303): unsure at all n locations
aaccaaccaccggaagcaaaaaaagacgagaagggaaaccccccaacaacgaaaaacagaaggaaaacgcacaaagaaagcaaaaaaagaacggaagggacagngccaaacaaagaaaaagagagagaaaagcgcaccgaaagcaaacaacgaaggaagggaaancccaaccaaaaaaaagaaaagggaaagcccccaaccaaagagcgcgagaaagcaaaaacaaaagaaaggaaccccccaaccaaagaacgcggaaaagcaaaaacggaagaagacaagggaaagaaagcccccgacagg

SEQ ID NO: 201591 - DNA, 374 bp, Glycine max
acacaatggaaggtcttccaataacaacaaagggagaccacactgctcttccagaaaagatttttttttgccttgttctcattgccaaagaaccaaccatgttgaagaagattgtttgtacaaggataaacctctttttcactataatttttgcaataaatgtggccacagtaaaaagcattgccgatttaaaaaaaatcagcttgagcagcaaccataacaacaagcaaaattgatagaggaagatagcattgaagatgagcacttatttatggtatcacaagatttcaattcacatggattaaatacttgactcattgatagttggtgcaccactcatatgaccaaatgtctttcaatttttttctctattg

SEQ ID NO: 201592 - DNA, 445 bp, Glycine max
  unsure (1)..(445): unsure at all n locations
ctctaagcgactgcggcatgcaagcttcaacattcaantgtgagcgtctcgtaattttactgtactcaatcagacatccgagctaaaatntattgtcgtttggattggctcagagattcaacattcaatttcgagcgtctcgatatattacgggcctcaatcagacatccgagtaaaaagttattgtcgtttgaattggctcagagcttcaacattcaatttcgagcgtctcgatatataccggactcaatcagacatccgagtaaaaagttattgtcgtttgaattggctcaaagcttcaacattcaattgtgagcgtctcgtaatatgacgggactcaatcagacatccgagtaaaaagttattgtcgttcggattggctcagagattcaacattcaatttcgagcgtctcaatatattacgggactcattcagacatccgag

SEQ ID NO: 201593 - DNA, 424 bp, Glycine max
  unsure (1)..(424): unsure at all n locations
tactcagcttgagccattcnacgacaaaactgttactcggatggttgatatattttgtgatataacgagacgctcgaaattgaatgttgaagctctgagctaattcaaacgacaataactttttactcggatgtctgattgagtcctgtcatatatcgagacgctcgaaattgaatgttgaagctctgagccaattcaaacgacaataactttttactcggatgtttgattgagactcgtaatatatcgagacgctcgaaattgaatgtttaagctttgagccaattcaaacgacaataactttttactcggatgtttgatatagtcctgtaatataacgagacgctcgaaattgaatgttgaagctctgagccaattcaaacgacaataactttttactcggatgtctgattgagtcccgtca

SEQ ID NO: 201594 - DNA, 425 bp, Glycine max
ctgcagctgcagctgattagtagctattacaactattttgtttgtttataaaatatctcttacattattctttaactttatcaatttaatatgtaataaacattttaatatgaaactaatcaacaaacagatatatgtgcttaacgtgtggtatttggagttcaattttttttaatcacacaaatatatacgaatgagttagcctactcaagaactgttttgtaaaatttacaaaagttgaaatcgaccaatttatataataattaactccaatcagaatttcaaatttttttattcaattaagcagataaccttgatcaacgagttaaaaatgacatgatataggctgcatataatatgtggctgcaggttgtcatgatgtgtctaagtttgctcggatttttgtttttgttctctcgagcact

SEQ ID NO: 201595 - DNA, 150 bp, Glycine max
attctcagcttggctcaaatcctacaactatctcattaacgacaccacatgatataggtggcttatgatgctaaaaatctccacatatactggagttggcccctattgatttaggacaatgcagacatgacatttggaaagaactactct

SEQ ID NO: 201596 - DNA, 444 bp, Glycine max
  unsure (1)..(444): unsure at all n locations
tcagagtcacctgcggcatgcaagcttgtggcatggtgttgaacacaatacgccatatctttttgttgtttnatccataccttcttctttgtgtagggatgcttaacaaccaaactgtgcccttcatcattaaacttcagctggtctcgcttactcatcaactcattaattttctttgacaagcatttctcatattgatttgctagggtgagtgagtaaagatattcccccaccaatcccacccactttctgcatccaagcctctctcagttagctcttcactcctgcgcttcagcctttgttcttggatacaactttttatctccaaaacttccttttcctttctaattttggccatttcttttcttattgcttcaattctatcttgcatttctttcattttagaagagcacttcctatctccatttccttctttatccttac

SEQ ID NO: 201597 - DNA, 250 bp, Glycine max
ccaatgagataagaggaaaagggcttgagtgttacaacttattctcaagtcacaagtgtcacatgctttttatgactggtgcttcttgaaacttttgaaaactctgaaagttttgaaacttctgaaactaacttactccccccactatactactcacctctggaacttcttgaagatctaaaagctgagctactccacccccttatagctactaccctgcaaagactgaattaaaagtctatacaaactc

SEQ ID NO: 201598 - DNA, 346 bp, Glycine max
ttagttgctgaaggtttggtgaagaaactagaagtcatggttcaaggtcattctctcaaattacctgtgtacctcctaccaattgctgtgctgatttggtacttggagccacttggcttactacattgggtcctcatgtttctgattatagccagcttaccttgaagttctacaaggacaatcaatttgtcatattgcgtggtgaccaacctaaattatcgggccctgctgaatttaaccaactgaggagaatgaatcatacacatgctatagctgaagtttttactttgcagtataagcaacaggatgtgcctgaggataaatggcttgaattacctaaagatat

SEQ ID NO: 201599 - DNA, 424 bp, Glycine max
caagcttgagccaaaagcctgacgcagcatatacctttacttatggagagaaagtcaatccttacccttggaagcaaaaaagaagagaaggaaaacttccaatcaaaggaaaaaagagaaggataatccccaatcaaagaacaagctaacaacggagagaaggaaaatccccaatcaaaggaaaaaaggaagcaaggaaattcccaatctaatagtgcagaacgacacacgagaagagagaacattcccaaccgaagaatgggagaaagtaacaaagggaaggaaagaaagttcctgattaaagaaacagatgaaatgtgcataatggtcttttgaccagacaatatctgaacaatacaaaattgtcaccaaatgaacaaaaagaaggaagggaaaccacgacctaaagtgatcttctcccttt

SEQ ID NO: 201600 - DNA, 405 bp, Glycine max
tatatgcatgttttcattaatgcaattagtatctcatttttaataaccaatcatatatgattgctttgagtacactcaatttagaaaacattacaaaaaacaagtgtatgacttatgtaaatgaatgtagcaaaatcaaatatataaatagaaaattacattagatgatgttaattaattctccttcatcatgatcattatggttagcatgaacatcgttagcttcttcttctccgacaatgtttggagtgatttgtgtggacaaaggactaacataggtgtccatgtatgcatcatcatcttctacattaacaccaattgttttgccctgtagaaccacgaaccacctttcatcacaagggtcttgcacataaaatacttgtctaccttgttctgccatgatga

SEQ ID NO: 201601 - DNA, 306 bp, Glycine max
aacagcaagtgcagctttgaattcctccactgccacacgtagtttacccttactagcattatcttcagcctttcacatagaaaccaaaagacaaccaaccatttcaacacccaacagagagaaagaaaatagactttagatgtaatgtaaaaataaatttccacaatagatccaggcttacactgttactcttttttagcagatttttcaatccagaatatgcctttttcagttcactatgctctggatctacgcggagacctttctgaaaatgcctgaatatatatgttcgcatataagatagat

SEQ ID NO: 201602 - DNA, 393 bp, Glycine max
gaggaatttcttctatatacgcgctcgattcccagataaagcaagcattcattgacatgtaaagtaatttattatttctatcctgagaattatagtgattcattgtcacttccatctatctccataaaaatagtaatagtttctgtcaatgttaaagaagaatctcatcccaatgtatctcctaaaacacatttagccaaaagcaataggaagttttgaagtaaaaaatgtaaagagagagagagagaggacctgagagagagaggacctgagaaagagagagaagtctagaacatgatccgtggaagtgactgtgacagcgaggatgatcgacgctagtgaacggaaggaaatgtttagagcgagttgacctccgtcactgctcctcccgta

SEQ ID NO: 201603 - DNA, 367 bp, Glycine max
gggagaccacaatgttctgtctataacccattttattccatctctaatcatgacagaagctttattttacaggtctgtttgagctcaaatatatattctgaattgtttcggctaaaaaatttgtttcatttttattttttattttttattttttatttttttgtctcataggaccatccatcaatcccattacacgtttcatgacaatttttttttacagagtttatagcgaaattcatgagctggtacaagaattcgtctgaaaaaggcaataaacagtagcacgtgcaatacaatgttggaccataaatatttggttgttcgtgagctgagctcaaccacacaatcttgtaagtgtcttgaatat

SEQ ID NO: 201604 - DNA, 251 bp, Glycine max
  unsure (1)..(251): unsure at all n locations
aaaaaaacccaaagaggcaaaccatcattttntaaagacagggcnacacaaacccaaaggattgatacaacgagtaaagggcccactgcattcacataagtgagaacgacccaccatagggccaccatagagaaaagattctcaggcctatgacagtcaagcaacgcgaacagaattaacccctaacccaacggggcacggaaaaatgaggcgaccgaccaagacataaaaaaaaagaatagggctaacac

SEQ ID NO: 201605 - DNA, 394 bp, Glycine max
  unsure (1)..(394): unsure at all n locations
gatgatggactaatcatatattgatgctgattctctggntntggttaacttaatagttgttgttttttgtgataacatttttgagttagggtacaggcaaaaaataatcatataaaaggtcacaacactctgttcgcttgatacgtgataaaattgtggttgctcaccatgatcactgcatgatgctattgccgcagctcagaatgtggctacatctacacaatttataacaccttaactgatatttttctatataaaatgcaatgacataaagaacatgtaacttatatagttcctcatgtaacaatggaaactaatatcttcaaaattgattaagatattaatttaaaaaactttaaacttttacaataaaagtatttaaaaattattaatt

SEQ ID NO: 201606 - DNA, 337 bp, Glycine max
ctaaaagtcttatgtgttttccatacaccaccttcctctttatcgaacatatacattctgttgtgcaatcacacctcttgcgatccttatgcactcttcgctgatagtggatgcttttgttcctttagtgactacccttaggttgatcaatcgttccaacctttcagctattgcttgccaagcctcataggacgttgacaacaaggaaaaatgtctacacttaatgcaccacacataaaatgagtaacattgacaattgaaaatatattgtaccactgcatgtgggtgtgccattgctactgcgggcaccaactgctgaagatgatctggttaataa

SEQ ID NO: 201607 - DNA, 427 bp, Glycine max
ctgcagctttatgatctgtgtgcacaataaagtctcggccatttattatgtctccagtgctgaatacaaagcacaagggccatcaattccttctcatagacagattttgccagattcccattagataaagctttactgaagaaagcaataggttgtctctgctgcattagaacaacacctatacctctaccagccgcatcacacttaacttcaaaaggttatataaaattttggaagaattagcacagggggagaagtcatgatcctctttatctcctcaaaggccttgacagcttctattccccaagaaaaattgtctttcttagtcaatccggagagagggtttgctattttaccataatcctggataaactttctataatacctggtgagacccaaaaaaccacgtacccacttcacattcttt

SEQ ID NO: 201608 - DNA, 370 bp, Glycine max
ttgattgaaagaaatttatattacgcttctaatgtagtcgaccactaaaaaaaaatataacagaaagtaatgcttaagccaatcaaatcaaatcatttagaatctcatcattactatcatgcatctcaaagagaaggagaatcaggcatcataatgtatagcacaacaaaacattaaaagaaaacatgccttctaaagccaaccaaggtaaaaatgtatttatatttgtgaactttttcaaaattataacacatatataaccatatataaaaacatggttgaacaatctgaccacatgcacaacacattccacacattatttctgaaaatgagtggtaagggaatataataaagcattggtattaaaact

SEQ ID NO: 201609 - DNA, 353 bp, Glycine max
acgacagaacacaagggaaggaggaacaaattgtacgaaccccaccaaaaagtgacccaaaacaaaacgccaacacccccccacaaacaacaaacggcaccaaaaagccagcggacgcccaaccagaaaccaacaacacgcgcacaaacacacaaaaaacacgagaaaaatgcaacccacgaccaccccaccccacacacccaccccagatacgaacgacgcacaccacaaggcgaaaaggaacccacaccacacacaaaacacccggcaaacccacagacacgcctacacaaaacaccacgcacacccaaaaaagccaacgaacacaccacggaacgagcaacacccaaaca

SEQ ID NO: 201610 - DNA, 343 bp, Glycine max
  unsure (1)..(343): unsure at all n locations
ataccttaagtgcgnctgatgactatcgttcgttgatcttttgatccttgctagacgacttatggtgttgaacgccagttatagtgcgaaacacatgatcatttattgctttgatcaagaatgcaaaaaataccacaaaaaaagggggcaaataggtcttttccttgggttttctggaccctagctagcacaggctagcctttggcttgcctgggccaccaaataacttcctggtgaagaaactaactcgcctggacgagcttcagctcgcttgggcaagctcattgcttcagctcgcttgggcgagctgcaactgcccctaagtgaccctttgcctataatt

SEQ ID NO: 201611 - DNA, 427 bp, Glycine max
  unsure (1)..(427): unsure at all n locations
acctgcggcatgcaagctctaaggaagctctcagagcatctcgctaaattgctctcctgccttcgcnaaccggtggatcttcttgatattaggactggatcatgtctggagtgataggaatgcttcctttctctcgagcacaagcacttgagtgtttcagactttgcttttcgtgtagccttggaaaaatgccatttccttctccttccttctttcagaaccatttcaacattccaagctttttctccatcacccacagccaccacgaaaccatcgtagttctccgttgaaaccccacaccaagaggaacccttcaattggagcagaatcttccaaacttgcctcgcggttttggttgaaaatgaagcccaatctgaccttcactattctcttcgaggtaaccatgaatctaatcttgtccctttgt

SEQ ID NO: 201612 - DNA, 382 bp, Glycine max
  unsure (1)..(382): unsure at all n locations
catcttttttttttttttatcatcngcnaatnctttgtcttgtttgaacttcttttcttctctttttttttatgagggattttgctatatacatgcatatccaaggtatcttgctacctaaacatacatatatatgttttgtaaggtatttttgctatatacatgcatatccaaggtatctttctacctaaacatacatatatattttgtgaagtattttttgtttacatacatgcatatctaaggtatctttctacctaaacatacatatatatattttgtgaagtgttntttgtttacatacatgcatatctaaggtaattttctacctaaacatacatatatnagtgtaaggtatgactaccttccgagcttgcgcttg

SEQ ID NO: 201613 - DNA, 362 bp, Glycine max
aaacacccaccgcagagaaagactatttttttctataagaacaccattacgagcatccgcacgataaacgacacacatgtcacaagtcataagcgcaagggaatgggacctgaaatcttcaacaaagaaatcgggcgagccgaacacagcaaaaaaaatctgtcgagagcaaagactgccaccaaacagactcagaacaatgcgcatgatgacacaccaaaccaaaacaccagcaccgcaaaagaaagctacatacccacacccaaaacaggaacgaagggaaagccacgccctccactcggctccatcatacaaacctaacatcaaacaaggccataagaggaggcccaaacccaacaaga

SEQ ID NO: 201614 - DNA, 292 bp, Glycine max
acataaaatactttatttgaggtgctaattggctgtatataaaagtataatgtatggactatactttaagcacattacacccttttttgtctccgtggtactcgcgagaatacacaagcatcgcattccttgtattgagaccgctggctcgaagccagttgtattggaactgtgaggccatattataatattggacttgcaagaaacttcttgagcaaattctgtacgtgaaaagatcaagaaaggctgtttttgtaccattataggggaacaaatagggattctgtactgt

SEQ ID NO: 201615 - DNA, 367 bp, Glycine max
ctattctaaagatacatctaattataacagatacttgatttgatttagtgatggctgcactttttgatagagaagtgtagaattatacttgttgattattaatggctaaagttgtaataaactctatatacatatttaaatttgtaacaaattacagagctgtaaacttaaaattcagagataaacttaacattcgatttctgtggtagttttaaataataggtataccagatttggggtttcaccaacgttaatgccattggtagtcacggttattgcgtttgagtgataatggagtggtgtagaagaaagacgaggaagacgaagacgccaacaggaagactttataaaatatttataaaaactt

SEQ ID NO: 201616 - DNA, 396 bp, Glycine max
  unsure (1)..(396): unsure at all n locations
tttagggttttatgatgatgctngngatgtttatgtgctgaaattgcttatggaaaactgttagagatgaagggtagagttaacctatggttagaaagtgagaatatggtgttatgagtggaaaaagagtgaggttttgagagttggaaggccaaatctggatttagtggtatttggaggttaaagtgagttaatcctagcttgaaatgtcatttacgacttatgagaaagtttgggctgtgctagagagaaaaacaaatgaccaaagtgaacaaagagccatttctagggtaaaattgggtgttgaggagtcaaattttggttccgagaaattttaggtgtaaatctagtttgaacaagtttatattgatgttatagacttgtgtgaggtgagag

SEQ ID NO: 201617 - DNA, 323 bp, Glycine max
  unsure (1)..(323): unsure at all n locations
gccgaagacctatgatttaagtaattatcaatcatctaactctcaatttacacctcgattcacgataaaatgtactttagtatatcgctggaaatcttctatttaacctggccagagacaaataagggctcaaaatgtaatttgaattcatatcaacttattcataaacacaaatgttcatcaatttttcacatgatattaactcattcgtaaaaagctattttattacagataaatagggctcttttacacacaatgattgaatataccaatcatgcttggcttacgatttanaaaatgagtaatgtttgttatataaatga

SEQ ID NO: 201618 - DNA, 424 bp, Glycine max
  unsure (1)..(424): unsure at all n locations
gctttttcctgaaccctggctcgcccagactagcctttggctcccttgggcccccaaatagcttaggggtgaagtaaccagctcacttgggtgagctaccatgacccctaatgccatcttttgctataaataggcgtgagggaggctgagtgaagggttccaaggtccaacattgtgagaaatccangagaagaagaagaaagaagagaaaaacgaggccgaggcactaccgaattatgaccgtaatcgacttctacatcgttcttcgtttgtcatccggttagttnttgttttaaggatttgaatgtgatttatgcacccttaggggtcctctttcttgttctgngcatcttcatctccttcttctatcatcagtaatctcattttctccttgtatagtgagttntaaccaatcattaatacc

SEQ ID NO: 201619 - DNA, 445 bp, Glycine max
  unsure (1)..(445): unsure at all n locations
ctgtagacgatgcagtatatntagtgtggacatggctcattaatctggacaaagatttcaaacttcacttcaaccaatggtcaactcatattagagagggattcttgttttaattttcagtatctcacagtaggagatgtagcagttctcacttattgtagccatactatggttcctcttcaaacttctgtagttttattgtgggaaccatgagtatggatctacctcttgtacgttttagtacctctggtacttctatcaatatataatactcttgctgatcaaaaaaaaaaaaaaattttcacctaaaaggagatagacaacttgacaagacaagacattttgttgtcttctactacaagataagcaggataactaataaagctataacagaaaaactatcaagagatacacatgattacaacacttcgcctcaaagctgagc

SEQ ID NO: 201620 - DNA, 337 bp, Glycine max
tacaacatagaacacagaagcatgattgattatagaaatattcttatatacatcaggtgggctgttagaaaaacccaacatctttacctattactgccgatgttaattactatccttttctactatttctagcctagactaaatacacttctgccctaaaccatcaattatcaatgtttctttcaacaatgccttatttatgaatttaaccctcgctaagactagatccatgagtttgatactcggattcatccattttaattttaaatacttgacgatctggtgtgctttcccgcgaaccggatttcccttgaacatatctgcataaagaaaaagt

SEQ ID NO: 201621 - DNA, 403 bp, Glycine max
atgctgaagcaatattctcaattatgcttaaatggggccttgaaccttctgctatcacataccagataattctttaaacatttgatcatgttactatatattcttttactctgcgcttttatttccctttaatattaaatttccttgcaccactaatgggggtggtggttgtggtacttttggtttcctgtgaatattttttaataaaattcaaatatgttctttgtctaccttcttattgaatttttggatttttccgatgaatgtgttcaatcttgccataaaatgctaaactgtaaaatatggcccaatgatagctattcactacaaacattccttcatctagtttatactcggagattgatgggctcaaaaggtataaatatttcgtcctataataaag

SEQ ID NO: 201622 - DNA, 330 bp, Glycine max
cgtttaagtatattgtaagagtcctatccttgactttgggacttggatgcacctctcatgcggagatgaatctttcctttacgggagaaaccggaactttacttctttgaaggagtagtctcataatatttgtcgaggggatattctactttcagaaagaaaaaaaaaatctcaaatgttggctaaaaatattttgcttaacccaatttttttaaccattgtaattttattatgaacactatttgcataatctattggtttaaacaaatattctacccacggtatttgaaaaatccctatgaggttaaattatttcttttattgaaatta

SEQ ID NO: 201623 - DNA, 352 bp, Glycine max
tcccatgaccaattgaatgccattaatcttgaatttgtgtcaaaaacatctatctgctgcttaaggaactgtatctgcccctactatctcatatcacaattctatatggacaattgctctaacaatatatgaattccttttccatgaattaattgttacactttttctgaggacgccaaacgtgatacatcagaccagcacctgatgtatacatattaatactcttatgtactaaagcgttaaacatacttatcttcctaagccttataatatatggggaaaactcgcttattctagcaaattggattgcaaatgtcgctactgtaattgtgtctcaatatgctcatttaac

SEQ ID NO: 201624 - DNA, 425 bp, Glycine max
  unsure (1)..(425): unsure at all n locations
agcttctaaactttatacaagaatgaagctctatataccacttgttgtacaagnggcctcaaatatcttaagaagggggggggattgaattaagatcttacaactcatttccccaattaaaaattctatctaactttctattcaagttataaattcccttaataatgaatttcttaaataatgattcaaaagaacaatttgaatatgaatataaaacaataataaataaaggagttcaagggaagagaaagtgcaaactcaaatttatactggttcggccacacccttgtgcctacgtccagtccccaagcaacccgcttgagagttccactatcttgtaaattccttttacaagttctaaacacacaaggacaatccttcctttgtgtttagaattctttcacaacaagaagaccctcggtctc

SEQ ID NO: 201625 - DNA, 392 bp, Glycine max
  unsure (1)..(392): unsure at all n locations
ttttcattcccttctccctttgccaaaaagaattcgccaaggactaaccgcctggattctttttgtgtctctcttctcccttttccaaaagaacaaatgactaaccacctgaattcttatgtgtctcacttctcccttgtcaaagaattcaaaacgacacagtctgagaattcttttgattctcccctttcccttatacaaaagttttcaaaggactaactgcctgagaattctttngtatccccattcacaaagtatcaaaggtttaaccgcctgagatctttgtcttaacacattggagggtacatcctttgcggtacaggtagaggatacatcaacttgggttgctgactgagaacaagagaaggtacatctcttgtggatcagttcta

SEQ ID NO: 201626 - DNA, 268 bp, Glycine max
ctccaatgcccctttgccaaaatactatataagggaactgggggagaggtttcccccgtccccctctgagttaatttggcagacatacgccatcccaactaatccccataatcttgctttcctaatatgaatctcctttgaatagctgcgagttctttaatgatcaactctggggctatatataaggaaaagtaaaaatgagtgaacactaccaagaacaaaattcagctgtgcaattctaccaccaaatgagatcttcttaccctta

SEQ ID NO: 201627 - DNA, 434 bp, Glycine max
agctttgttcaaaattatcttggtgatagtgcatccaggcaagggcttatgcaagggcaatgaaagctactcttttcttctcaagtgcaagccacaacataaatgtcaacaaaatcttcaagtttatcatggccaagctcttcaacttgccatggaaagtggaacgaaatctgacactatgagaacccacaattgacttttgaaatgtactttacattgatttgatatgtaaatagcaggacaaagaaaagaaaaaaaaaagaagagatccactcatattaattactcttttgttgtagagttcatcacttaagaacctaattcacatattttccttaggccattttaatcatgtaacaactagatcaaatcacattagaatgagagatcctatacatgtatgagactgtgcaattgatgataacttaaagaaa

SEQ ID NO: 201628 - DNA, 392 bp, Glycine max
  unsure (1)..(392): unsure at all n locations
gcaaactcgcccaagcgaaattatgctcgcctgtgcgagctgatccagctcaaattagcctatgcaaaattnggctcgcctgggcaaattcttctccaacaaattttactgcttcgatgaaaatatcatatctcatactatagatgttattttgaaaattccaatagtcaaaacgtgcaaaattagcttgcaagcctatagtccaagtgtgaaggcgatccaacagttaatgaattcaggatcattgttttagtactggaacaagtttagattaaaattgaaatctcataatatcaacctacgtcaataaaactccacatcaagcaaatcacacatggaaaattcacacaataccttaactcatccaaataatcaagaatcaataacacaag

SEQ ID NO: 201629 - DNA, 401 bp, Glycine max
agcttagaacaacgaccgattattctaacatctacgcaatgggatgttttttggaaggagataaacttcataatttcgtaattcaaaccttcttacaaccaatattattaccttcaagaatttttgaaagctattatagcatgaaccattcaacccaaataatttttattaaataagtttatgttttttttaataagaaattaaaggcctaatttttgcgggtaatataaaatggcgaggaagaaattaaaaggatgttactaagaaatttcaacccaaccactcttgaaaaacccttgaaccggagctctgataaccaaaatgatgtaaacccatttgcacaagggtagaagatagatctttaaagggttcttctcttttgtgttttatgaaatttattg

SEQ ID NO: 201630 - DNA, 434 bp, Glycine max
tatatatgcataacacaattatgacaaagcttattcgtgtgatgaatctgaaaatctatttcaatctcttataggtgaattgattaattactcataattaaattaaaattgtattatttatttacaagtttgctttgatgacaatcaacataactttttgttactttatattgtgacagatgagcaaaaataatctttgagacaattatgacagcagtgaataatgcttgcgatggcatgtttttcatctatggatatgttggtgttggaaagacttttatatataagaagacattatcttcggcatcgtgttcacatggtgatattgtcttaaccgcaacatcaagtgactagcatctttgttgttgctcaaagggataacaacacacatcaagtttgctatcccttgttctacatttgagaactcaacttgt

SEQ ID NO: 201631 - DNA, 349 bp, Glycine max
gccttggacttagatattttgggcttaagcaattatgggtcatgtctctaaagaattcttgtaaggcttggagtgtctacatatctcttatggtgggaatattccttagaatactctttggatctctagaagtgagaactctctagaattagtgtggctagaggtctccttagaatagagtaaatagagatgtaatcctacacatttgtatcaagcaaaaaaacaaagttctctcctccctaaagaattctcattcctatcatatgtctattcaaagtctccaatatttctaaacactttttctagacgataaagccttatttccacaaaggggtataaagtctcaaaa

SEQ ID NO: 201632 - DNA, 355 bp, Glycine max
accatagacagaaataatttcattcatgtaaagccttattcaccgattaggttgcttacaataataacaaattgtacttctttcacattagtgcatatgctgacacataaaggcttgtccgtttggccttattgagaaatattatggagatacactcagtgacagcaattttgtgcgtacgctactctgctgtcatatacaaacactaaaaagaatttggcaaaacaccttgaatagttaaaagatatgtctagctatctacatcggctcaggcctacactgatgaagaattcacacattctacatcaggtatttcaatgaccgatggcgcatgctcgcccccactctagatcat

SEQ ID NO: 201633 - DNA, 367 bp, Glycine max
  unsure (1)..(367): unsure at all n locations
cgatcatgcttaacgattgtatatgagtaatatgggtatgtgtcccttaatcacataatgaatgccttatgtcaaataccgcttaataattcaacttatggacggaccaaggggataaactcgataaggataaattctcgcaacctacgataagagacttgcttgcgaatcaaggggaagcaacgcatcttaattctgatattatctaattcaattttattcattgttcaatttacaaaaacaaataaccccccccccaatttgttactatgtcttacttatcagaatgaacatgtggattatcattgctcgttgggaaacgacctaagatcactccctaagtaccgcattntaatggttatttgat

SEQ ID NO: 201634 - DNA, 409 bp, Glycine max
cttgatggtgctgagaagaaatcacatgtttgtcatcattttaaagggggagaatgtgaatgtatgtatacatgattctgatgatgtcaaaagaagaattaaacaaggctcagtttgcttcaagattaatacaagattgtttcaacaaacaaagtcttgattcaagatttcttcaagatcaagccttgcctcacaatgaaaggtttcaagtcattcaaggcacatgtaatcgattaccaatggtttgaaagtgtgtaatcgattacacatcatatgtaatcgattaccagagactctgaatgttgggagattcaaatttaaatgaagggtcacaactggtcaagaaaaacaactgtgtaatcgattacactaattctgtattcgattaccagagaggattttcaaggaa

SEQ ID NO: 201635 - DNA, 420 bp, Glycine max
  unsure (1)..(420): unsure at all n locations
agcttcanacaatttgttgtaatcgattactttgaggttgcaatcgattaacatagagagtttttgcctctaaagaaatttttttaacttagaaaattttcttcacacgcactatgataatgcacaatgcaaaacatatatcaaatgtactaagatgcaacaacaaaaataacaaccaatacaaatgccactcaagggagttaggcatgtaaaagccaaaacttctccaaaaaaacttcttcaagctttagccttaagttgtaccatgttgctcatgttgttccccctatctctaatagtgaatccactatataggaagagcacatggctttggaagaggcaacaaatgaaggggattgactgaagggtccgattagaaatctttgattttcacaagaaaagggttgcattttttacaac

SEQ ID NO: 201636 - DNA, 431 bp, Glycine max
  unsure (1)..(431): unsure at all n locations
ggcctaaggagggaatccacggaggaaatgcttaccacctctaaagactgganagcggnttctaacgactcctctgcggcctccacataaggcatagaggatgggcagcttaccaagatgtcttcctcgcctgatacgatgaccagatgcccttccactacgaatttcaacttttggtggagtgtagagggaacaactcccaccgagtggatccacgggcgccccaacaggcagctgtaaggggggttaatgcccattatttggaaggtaacttgacaggtgtgagggcctatctgtacggagaggtcaatctctcccctaacctctcggcgggtgtcgttgaaggcacgaaacaccatggaacttggctttaggtgggaagcattgataggtaatttctccaaagtgctctcgggcatcacgtttaaact

SEQ ID NO: 201637 - DNA, 402 bp, Glycine max
ttcttttttactgaataatatttctgtcccccttcctgattcataatattggtctttgttttttcttttttgcgattttggacttcacatcttagaaaaatcataaggttgcatacctttatttcttttattttttaacttattaaattatttttttataataccttaaatgaatatgttaggtttaagattcaattgaactaaaaagaaataaaatgtatgtaacattaagaattaaatccacattacaaaatttctaaaatgtggggactctaatggcaaggaaaaaagaagaagaataaaatataaaatttaagaacaatcacaattgtatttttgtttgttatgttgaaccccgcttcctcacgtgggcttcattcccaatatatttccacatccctg

SEQ ID NO: 201638 - DNA, 452 bp, Glycine max
  unsure (1)..(452): unsure at all n locations
cttgcagatataaagggcanaagacccaacagaagttgacatatttgacaactatctaaatatcttaaacatgtgggtacaggcttaattgcttaaattccattcttgatagtgtgtatgaaaagggatttattatagtatttgtacccactctaataattttttctacttcgaaatagaatagcctgaaattgttggctaacaagtaattttctctttcttctgaaaatctgctaacaaatatctttgtacagaccaaacatataaagggcgaaagacaaatgaaattaacttcatatctttatacatacttagtatgtaaatgggaaaggtgaagaaaaggataataataagtaaatcttgattaacatcttatgagagttgttataaaaattataagttataatatatagctcttaaacaatttaaactatacaacaaatattcattta

SEQ ID NO: 201639 - DNA, 60 bp, Glycine max
atctctaagttatctataaatcgcatatgtcgtttatataacagcatcctctcagaacgg

SEQ ID NO: 201640 - DNA, 435 bp, Glycine max
gcatgcaagctgggggggtaaagtctcacgattgtttctttttgatgcaacattttttagccgcgactatacaagacatcttgcctaacacagtcagggtatctcttaatcgcctgggttttctcttccacgccatatgtagcaacaacgcagatcctacctaagttgaagagctggataatgaggccgcaattatactgcgccagctagagatgtattttccctctgccttctttgacatcatgattcacttgattgtgcatctcgtcagagaaatcaaatgttgtggtcctgtttatttgcggcggatgtacccgattgagcgatacatgaagatctaaaagggtatacaaaaatctttatcttcctgaagcatttattgttgagaggtacattgcagaaaaagccttgaatattgttcagaacacattctga

SEQ ID NO: 201641 - DNA, 454 bp, Glycine max
gacctatatatactcagcttaactgatggtaaagactggctttaaaactacatctcttatctctaacataccctctcaggcacgatggcaacagccctttatgaactaactaacccaaaagactaaacttaaatgttaagaaccttgggagaaccacacacaaaagctagctattgtatttggagagcccaagaccctaaaaaccccgcactagaatcccatattccaatgttggactccaagtcccataccttgcaattggatcctgaataatatttttcaaagtaaactcgaatcacttagtatatcttccatgttttgtttacaatttccacccccatgctactgaacattgtgtataaggaaatgatttatttatgacctaaattcgaatcataccatgagttgccttgaacatcgtcatttgccttcactccgatatcaacacattatg

SEQ ID NO: 201642 - DNA, 370 bp, Glycine max
taacacctctcattcttattactgttgcaatattgaagatgtaataattatcgaaaatgcaaaggccgccttattcaaaaccccaaccaattatgaaatcccctatctcccacttcacacctcggaacgcaccgttcttatagagagaggcgctttcacatcttcttatgctggggagaggaaatgtttcccatttttatgatactccggggaacatatatccagtggagatgaccgggtggggcctgttgctcaaaggattatagcacgaggctacaaaccacggtgtcaggggtatcaatccctcctcgtccactatcggacgaaaaagggaaggatattttcctctgggggttggaacatcatgatc

SEQ ID NO: 201643 - DNA, 399 bp, Glycine max
  unsure (1)..(399): unsure at all n locations
agctngaantgnggaagtgtagaaggaggatttttcctgcntttattcgcagaccacagagtggtacctagagatatgtcgcgggggtcaagagaccttggggacatcatgtggggtgctattgcccaaaaccaagcttgaccaatcccgacccaacccgggcatattcagtcagtgagaacctatgatgtacctaagcaggcgagctcctggcagtcaacagataaaaggaactaaaaccacaaagcaaggaggcttgtgtggtggctggccagctgtgaactttgattgatatatgggatatggcctctggtaatcgattaccaagggtgggtaatccattacaaggcttaaaaatgaagacaagaagctaagatggtctctggtaatcgaatacca

SEQ ID NO: 201644 - DNA, 440 bp, Glycine max
ttaacctcatcgtccctcacagtctttagatttgggagcctatccaatccttgtgttcggactctcagccacttatgatagtcgccgatgatcccattactgcttcccctaagctctctgtcctttcttcacgccgcatcccatgccttgcgaactccttggagtaccctcgcgttgtggtcactaaaaccccgtgcgatgaaaggcgtgatgctttcgtctaatggcgcttctctcatggggtagccaagctgtcttatggcgaggacgggattataattaatacaaccccttgttcccatcaagggaacatttggacatccttcgcatgaagatagaatcctgattcttccttccttctagcgagggaaccaattaacagacgcctccccatgctagccaaaaagtggtcccaattcgccttttctttatcgacgcac

SEQ ID NO: 201645 - DNA, 270 bp, Glycine max
  unsure (1)..(270): unsure at all n locations
ggcgccttgatgaacttgtgaagatccacgagaggatgaaggcaaaaaacctgctcgttggcccatcttcctacaaagtggatccctcagatgtgaggcaccaaaatgagaattatggtgaagccatgactgagcatgaaacacggtttgggaaagacacagagaaggcgcacaaatggaggttaaccttgactgacatgaccaactngaaaggagaacatgtgcaagaaggggaggcaaatgctaaatatatatacatgtcatttttct

SEQ ID NO: 201646 - DNA, 443 bp, Glycine max
  unsure (1)..(443): unsure at all n locations
tctatgctgagcaaggtggtcaggtaccaatccttgtactaaacttgtatatgctattttatagttntgtttgcttcaaaaaaaggtaacaattagtattcatttatttaagtagaaattcacttttggccactaaatactatcaagttgccgcaatatttttctataattntttaagtatcacgttcttctgcaatattttgtttaaatatttgtagtagcaattcagcatgctttcaatgctctttcctgctcataatgttcaacaacagtttttactaacagatgtatagtctatatcttacataaaatccagtaaaacaagaaacacattgaatgcgtgtaaaattctttgaatggtatatgtgtggttgtcaggtattctaatttcctcatctattttaagagtggccaaaagaatgcatagcattgtgctttcttat

SEQ ID NO: 201647 - DNA, 386 bp, Glycine max
  unsure (1)..(386): unsure at all n locations
agctttaacctcaccgaatatcacaggctttatattggngagccaatccagaccttgtgttcgaactcttaaccattatgatgccgccgatgatctcattactgcttcccctaggctatatgtcctttcttcacgccggatcccatgccttgcgaactcttggagaccctcgcgtggtggccactgaaacctcgcgcgatgaaaggtaagatgcattcaactgatggcactcctctcatgggaaattcttcgctgttcatatcacatacgccgacaaaacatgtcatacatggccaaattggcgacaacgcggctttccttgccatgataaaaggcaaggaaagcgtttatctctgctaggtccactatccatccataatcggaag

SEQ ID NO: 201648 - DNA, 416 bp, Glycine max
  unsure (1)..(416): unsure at all n locations
ntatcatgccttctcctctcggcggagagttcttcttctgttaatgcgagatagctgctggcagagatattgttgaccagctctccgaaaccttctaccgagatgtcttgggccacgtaggcctccttcaaaacttttactactagagcccgatgaggctcggagctcatgagtaactccaacagcgacaccctggccggggttttgctgagctgttctataaccttgaactcgctctgctgaattataccgaggaactcgctggcttcctctagcgacacctcctttttaccatactttttctccggaagacctttcgccggaatatctttattcgacagcgaggggtgcttcgtcatcttgttactccatcactattcctttccccttgacgttcgcgggttggactggtacgt

SEQ ID NO: 201649 - DNA, 412 bp, Glycine max
tgtccgcgacactctgcaatactcaatcttcgccaagatcttgcctgtgtagctgacgcgtcagctgctctagctctcttgcactggtgatacgatggctatcttcctctacttgatagaacctcgctttaagagaatgcatttgacttgatcccatgttctactaaagtgcacttatttgggtgcgaatttttactacaagatctatcatgggtggaatggatgaatgcatgaagatatgcttatgacacagatgcgatttatgaatacggtagcccgcgaaattgtctccttcttagatacaacgtcttggtgtaacacaatgcccgacgtatgtatttgagaacgtgacacggaccctccattggtttgccaaagagaagggatttattacaaaaccgtgcatgatgca

SEQ ID NO: 201650 - DNA, 387 bp, Glycine max
agcttccaaaatagcgagataacaagcttttctttttttagagagcactcttcagctaaatcctgtgaatgtgctctttatctattggtggtaaagccttttaagaggataaaagcgtaaacataacaagaaaatgtgtttgtataaattggcctattcttcaataattcaaacaaattcatcaacctatctagcacaagatggagttcaaagactttcttcttgtcattctactactattccaggtagacagaattaatatatcatttctttacaaaaacaaagatgatgagttaattgaattctcactataaaatttgttctttggtgtgtgccaattctcatttttaagctttcgcagaagcttcatcaatcactggagtagcc

SEQ ID NO: 201651 - DNA, 407 bp, Glycine max
atggggtacccatcacattgggtactacgtgtgtgtcgggcgatggtgcacaacaagggtgacacattcacaaatcgagcataaacccaccattcactgttgcccacgtacaactgagctcacgtactaacaagtatcccatatccataattctctcaacaccggggccctattaatcctcaccagctatggcaacatccaagctattcaacattcatacagcgcaaactatcacagccaagacaacatggctaaggcaaataactctgtccaaaacaccaaccataatcacagcttttctcacttagagaccacagcaacaaatgcttcggtgcagttctgtaaccggtggatcgacatgaaaattatactggaagtctctagttcacaagcctacattttgaccg

SEQ ID NO: 201652 - DNA, 387 bp, Glycine max
  unsure (1)..(387): unsure at all n locations
tgaccctgttattggccgtgacgaagagatttattggtttgtangantctatcacggaggactaagaacaacccggttctcattgtacaaccgggtgtgggaaaaactgctgttgtggaagggttggcacacacgatagttagaggggatgttccatacaaccttgcttatgtgaagcttattgcgtttgatatgggggcgttggaccagggtgccaagtatagacgcgagtttgaggagcggctaaaggctgttctgattgaagtggatgaggctgatgggaacgagatactcttcattgatgatatacctttggtccttggtgcttgctgaacagaatgctccatggatgctgcatatctatttaaacctatgcttgctcgcggt

SEQ ID NO: 201653 - DNA, 424 bp, Glycine max
agcttctcacattgaattcagcacctaatgtcttattagatgggaatcgggtatcttaacatataagatttcagatggactttaatcataatcccacagctgaccttttcacgagaactctacttaaccctttggataaatgatcggccaataaatatgcacatagaatcattaaattctagcatctcgtgactctataaccgagttcacagcaacagaatcattagattctagcacatagaatctatatgctttagaatgttcaactgatccaataaatatgcaatctatacctctttcacctatggttttccttttaggttctgtaaacctgactacagccctacatccccaaattgtgaaataactcatattacatagcctcaccccaaaatccttcacttatacccgcataggataacat

SEQ ID NO: 201654 - DNA, 432 bp, Glycine max
  unsure (1)..(432): unsure at all n locations
tngccattaaaaggcatnngggatatcaatttgctgattatcccaangaaaggaagtgactaaagtcagaatagttctaattgttataggtttcacaactggggaaaatgtttctttgaaatcaaaatcaggctgttgatggaagccttttgctacaagacgtgccttgtacttactgacagacccatctgaattatgcttgactctaaaaacccacttgcaaccaattggttgcctagtaggaggtttaggaaccagttcccatgtattgtttttgagtagtgcagccatttcttcatccatagcatctttccacttaggatctttaagtgctgttttgacagttttaggcacagcatgagttagaagcaaggttggttggagtctaggcttgacaattccaatttttgatctagttgccatatgatgaat

SEQ ID NO: 201655 - DNA, 400 bp, Glycine max
ttaagtcaccgcggctgcacttatggtaaatagattctttttttccttagagtcctctcacggggtggagggtgtgccatgttctcaaaatgttcaaaatcaaaatgcttaaaatcagaatgctcaaaattataatgctccaaatcaggatgttcaaaatcaccaataacatgaatgcacaagattcaccactaatggaatgctcaggatgatcaaaaggtataaaatgatgcctaactaatctatgaaatgtcctatctatctcaggatcaaagggttgtaagtcatatggattgcgtctagtcatacactacattcagcatgcacaactatttgccttgtcatgtaaataaaggtgcaggttttaactacagctacccttcaatgatatcccaatgac

SEQ ID NO: 201656 - DNA, 378 bp, Glycine max
tgatgaaggctctatagatttacgaccgctggatccttcaccgttatgtcatacgatgtcttgaaactgatgcaccatctaatgcttgaattaaatgtacatgccttttttcatgcatatgccatgcttgataggaagggtgttttgcacttgagccacaaagtcacctcttccatatagtaggtctgcactatcaaatcatgccttttgatgaagatcataactttcacactgaaaacttcatatattcttgatagaactttacaaatcccatgagaatggtctatgcgagagacaatcttagacacagattattagatgacgatcttaaatgcactccttaatgatatgctatagtgtcttatatggacgtatgtt

SEQ ID NO: 201657 - DNA, 411 bp, Glycine max
  unsure (1)..(411): unsure at all n locations
agctgcagcttatgcaggcttaatgttaacaaagttggactgtttcactttcttccttaatggcataaacctcatgtataatttccagattaattagcatatgaaatcttttagtcaattttatcgaaaaattgcaaagtatccttttcaagaaagggcaagaaaaaaaatatggatattgcaaagatatgaaaaaaaacaattgcctatggtaaacaacaactttacttttaagtatctactagagttttataggatcatttttaagagttttcaagttggtgttttaaactaattaaacattaacgacaataagtagaacaattatatcactcatcatnttaatggtgggtggggcattgatcttgataaaagcctaatcatccttacggatttagtttcttaatttcc

SEQ ID NO: 201658 - DNA, 436 bp, Glycine max
gaagaagaagaagatgttcaaagagattcatagattgtaaaggattgtaataattgttatgaatgaattataaaatgcaagtcaaggtcttgcttttatagactcttcatgtctggtcaagaaaaccattagaagagttataacctttagaaaaacttgaaaaccattggaagagttacatcttttgatttttattcaaaacttatcactggtaatcgattaccaaatcattgtaatcgattacacaaagcatttttgtgaaaggatgtgactcttcacaattgaatttgaatttcaacgttcaaacacactggtaatcgattaccaaaatcttgtaatcgattacaccattttgaaattaattggaacgttgtaaattcagtttgaaagcttttgaaaacaaactttgctactggtaatcgattaccagagagta

SEQ ID NO: 201659 - DNA, 348 bp, Glycine max
actccttcttcctttgcttattccctaagggatggggcctcccctctccacttctcacttgcacttcgctgcatctccatggagtaaaatcaccattgaagggacctattgaagctcaaaaatctagccttactagaagcttcacaagcagcctccatcaattagggtatgacacgaatcgataattgataactggtaatcaattactagagagtaatcactctggtaacttagaaaatttgagaaaattcttttgtagaacaaaactatgctatttgggttctgaaaaactcttttaatacttatcctatatgaagtcttgactgtgtgcttcttgattcttctcat

SEQ ID NO: 201660 - DNA, 444 bp, Glycine max
tatcaatgtgcaagtagtaacagcaggcatcaattgtgatttatgaatgcaagatggtgattatatatgggtattttggcacagttaaagggtggagaagacttgcaggcaccctaagaaggagaatatagataaatggagggtagccatattgctaggtagaggaaggccaaaactatgggcaaaaccattaaggatttgaaggtcaatggtttgtcaatagacatgatccactatagattatagaaaattatggagtcattttgtcaatgtagcaaacccacctagtagcaagaaaaaggcttgttgtattttggcacagttaaaaagctccggaatttttttagcaaaatatactctgttttaagaataaatgatttttaacagtttacagtaatagatgtgccacattctgaaatatgatgatcctcttcaattcaaatg

SEQ ID NO: 201661 - DNA, 444 bp, Glycine max
  unsure (1)..(444): unsure at all n locations
acctgagggatgcaagcttggtgcctcatgaggaangccttgcgcttatatagttattttaaacccttcaataatatgtatggatgtaaatatgtaacatgaaatgccttgcaaaatcttgaataaaatgctttgcaaaatatgaatatatatagcatgaaaatgccttgcataatatgaatatatatagcatgaagagccttacaaagtgttggatgggtagcgtaaaagtgtttttcaaaatatgtgttattgtgagtaggtagcaaaagaagccttccaaaaaatgtgtatatatataggatgtaacatgaaaagttttgcaaaaaatatgtacatggatatgtgtccgaaaatgctcctcacaaaatatttatgtgtgcgaatgtgtatgtgtcataaaataacacggcctcaatatgattatattataaagtgcatgtt

SEQ ID NO: 201662 - DNA, 428 bp, Glycine max
gtcctaatgcggagacagaggagggtatctacacatttttaatacccagagaagaaaggttttcagatgtcgggattacggaagagcagaccatggtaggagatcttcactatttgggtaatgttgaccctataggaagatgtcaagcattagatgagggtgattatagagggccacagctggcaatatcctctgaattgtgtaatacaggtgttgcccgtggagagcaagctggtcctgatgactgtaacataccacttgcttcttgtgatgccgatattgggccttcgaacatgggcctacctaatttcaatgattatgctgctgatatatcacaacaatatcccagcccaattaaaaagacgtctgaaacccctggaacatggaaggtttactctagaggtaggtggtgcaaaaagactatgatt

SEQ ID NO: 201663 - DNA, 247 bp, Glycine max
ttgccttcgggtttaatggaagacgatttaagacactgatccaagactttcaataggagttccactttattattaatgtacggattgtaatatcttattgatgaaaggtctccatttgatctaagaagatcaccacccaattaggttgatggtaataattacccgcacaatatttgaaaaagcccctatatgacctgccatattgcctgaaagacgtgaactcgtaactgcatctttgtgagttttt

SEQ ID NO: 201664 - DNA, 374 bp, Glycine max
actaagttcattaattatatcgaatactttggttcgacttggatcaaacgtgaaaagcgcttataagctcatccaaagcctcagccataaacactgtctcttggaagctcggatatgacgctgacaccaaaacaacatagtctagggatcaccaggagaacacacgccgtgcaaaaccttaatcaatctcttctgctatctctgcaatagtctgatagtagccatatatagccaaataacacatgtactcttccaagcatcggatactgctgacaacaacacttgtaacaactcaagctagccatcaagagaacacacaacctgttacaatctctttttcaacagcttgcaataactgataaagccgtgtctgc

SEQ ID NO: 201665 - DNA, 425 bp, Glycine max
  unsure (1)..(425): unsure at all n locations
agctnttatgtgcaagtaataaaaagttcttctagtgtatgccgggacgtaggcacatacattgtgtgttgaaccacgttaaactttgtgtctttttctttcttccctttatttctttctcttcttttattgctctatactaacaactggtatcaagagcttttggttactccacgagatttccttagtttaaaggaattagtgggagtcttctcagtttataggaggcagtgggagcaatggcattagaaaaggggaaggtgaagattgagaagttcgatggcagagattttagcttttggaagatgcagatagaggattatctatatcagaagaagctgtatcagcccttatcaggggttaagccagaagacatgaagcaagaaaaatggaacttgctagatcgataggctcttggcgtgatc

SEQ ID NO: 201666 - DNA, 441 bp, Glycine max
tcataggcacaataacatctgtgtatctttcccaagcctcttgtgaagagaatatggatctgtcaaatctgacttgggtaggtgtagagggtgcctttcttttcctagaatccatttgcaaaatataagacaaaacacacaagattagcatagctttattctcaagaaaacaaaaaaaattaaaactgaaaatagagctgggcacttagtgcagcaatctggtgattagccccttcacaaaattaatcaaaggctaagcgcaacaagcttgtgcttagcctaaaaactcagaaaatatttttctctgcagattatgcttagtgcagcaagctgggcttagcctaaacctacaattttaaagacagtaaaggatttgagcttagcgcagcaaggcgcgcttatctcagcccctctgaactcaactgaggcttagcgcgacaa

SEQ ID NO: 201667 - DNA, 416 bp, Glycine max
gcgttatttcggtacaatatttaatattatactaagataattctgagatttgtgtggcaacggtctaaatttctctttaaattaccaatatacccttaacccgtctaatatgtatgaattcaacttttattgataatatgtattttatctttcaattaatttaccattattttttatatgccaactttgacgaagcatcctacgtggataggtctatgtggaccacaagggccatttatacatatgacatgtgtaaaactatctacaagactttaaggttagatgtgaaaagttgtaaaccttcaaattaattatgaatgtgacagtcatgaccacgttagtctctaaatttagcattcatattagcccatgaatttgacaaagataaaaaataactcctaatttatatttaacct

SEQ ID NO: 201668 - DNA, 434 bp, Glycine max
  unsure (1)..(434): unsure at all n locations
tccatcaagtggtaatcagagcacaagagcttcaagtttgtgctccttaaacctccattaatttttnttctttaccttctcttccattgctgtttcttcatttttctccatgtatctcctcacatgtcttgttctaaatgtttctaacatgattctttagagtttccaccgattaaacttgctatagaagctagatttgattttctatggttcaaatttcttgttcttgttcttgaaccatgaattgcgttaagtttacgttcctttgagttttgtcttgttattttttgtggctgaaacctaaaccataaaattcttacaaaaatattaaagtagaataaaacctcaaaaatctagagtgacctgttcacctattgtagttttgtcatagaagtcatgtctagtcatgaaacttgtaacataagacttcttat

SEQ ID NO: 201669 - DNA, 409 bp, Glycine max
  unsure (1)..(409): unsure at all n locations
tcgtcccgngatccttaagtcacctgcggcatgcaagctgaggcgcgaccccaccattttatagttaacactggaatgtgtctactattattgtgatcgactctttctccgccactggaggtgccacttgagctgccaggtctcttcacctttgggcgtattctttgaaaaatttgtgtccttttttgaacatgttttgtaagtgcatcctatctggaaccatatcaaaattgtactgatactgcctaacgaaggcaaccattaggtccttccaagaatggactcgagaaggctccaagttagtgtaccaagtagcagctactccagtaagactttcttggaagagatgtatcaacagttcctcatcttttgcgtatgcccccatctttcgacaacacatctttagatg

SEQ ID NO: 201670 - DNA, 433 bp, Glycine max
  unsure (1)..(433): unsure at all n locations
tctcaatgtggttagatggaaattagatcatacgttaattcttcttaggcttaatgggggnggcgggattcattttaagaaaagatttcattttgaaaacctttagctacttgaacttgaactaaatgatgttgttgagtttggtttgtcttatccaaatagtcacaatttcctatccaaattgtctctaacatccactggaatgaattcatggggcaaccgaataagaaggaagtgttgtactgataatcaccaaatttactttaaattcacacataatttgaggcgattatctaacatttttggtacaataaaccttgttttacctcaaaatttggaattaacacttagaatatttagatcgctagtttctagaatttcttgatgttnttgtgaagttttgcatgaaatggagttagaattacaactaaag

SEQ ID NO: 201671 - DNA, 429 bp, Glycine max
  unsure (1)..(429): unsure at all n locations
agcttctccattagaatattggatatcttctatttaactttgancgaaggaagttcaaaattgtctttattgcagtagttttcagatgaatcttggttatggtacaaattcctaacaatattgtttattttacaggaaaacaatcagcaggctggatcttatcactgcccctactgagaatcggtttcaggtggatattgagaagaactgggtagagtcttgcaaggtaactgttcttttgaatgaacttgaaaatcttcgctcatctggctccaaaagcattgttttcagccagtggactgcttttctagacctcttgcagattccctttactcggtaagatatgttgctagttgaatcatatcattttctaggaaatataccattcttttgggagagaatctcagtgagtgtggattttcattgtgt

SEQ ID NO: 201672 - DNA, 440 bp, Glycine max
  unsure (1)..(440): unsure at all n locations
ntgtnnataaattattgagattaagttaaaatttagcattcttattacaaatatttatatactattttttatgaaaattataattttattcttatgaggctacaaccacttcaatcaagtaaatgagtagaccaagtaatactaaattcaatttctttaaataagatatcgagtttgagaatatgattgagaaaaaaaattcactaaagattgttagtcaacaaaatcggtgatacttcatatcaataatatagtctgaactcactaagctggtcatccgtgcttagtgagcacacttagattgatctgaaacttagagactttntgcattccaccagtggcttaagcccaatttcgcctctggaataaaattaggctaagcgagcctgtctcgctaaacctaaagcaatatagaattctgattgtttgttcatgtgcta

SEQ ID NO: 201673 - DNA, 339 bp, Glycine max
cgggactcaatccgacatccgagttataagttattgtcgtttgaattggctgagagcttcagcattaaatttcgagtgtctcgatatattctgggactcaatcggacatccgagtacaaagttattgtcgtttgaatatgctcacagcatcaatattcaatatcgagcgtgtcgatatattatggggctcaatcaaacatccgagataaaagttatggtcggttgaatttgctcagagcctcaacattcaattgttagcgtctcgatatattacgggactcaatcagacatccgactaataagttatcgtcgtttgagaatggcacagctttggattca

SEQ ID NO: 201674 - DNA, 386 bp, Glycine max
attgtttttctgctagggtacttcgtgcgagctcaaccgaagttgtatttcggccgacgccggcactttgtcggccatgaaaacattagcccacctcggcaaataaaaaacatgattcaccggtattgacagaaaataatgctggccttatttggccacgaaagatgaccgatcgaggtctaaaaaagaagcatgaccggattacgccgatcgaacgtttcctaatagatattctccaagcattattcagggattgaatggaaaatacaatatccgacatcggtagttaaatagccgtgactgatatttttcagccaacatctggcaactgtttttgaaacgctggccgataatatttctttacggtaaaggatgctttctatgtt

SEQ ID NO: 201675 - DNA, 350 bp, Glycine max
agcttgagatgaatgaatgttgataggtgtatcttcctgcttttattgttgaccacagagtggtacctggagatatgtcgcgggggtcaagaaaccttggggacgtcaggtggggtgctattgcccaaaaccaaacttgaccaatcccgacccaacccgggcatagtcggtcagtgagaacctgtgatgtacctaagcaggcgagctcctggcagtctacagataaaaggaaaacaagaccacaaagcaaggaggcttgtggtagctggccagctgtgaattatgtgtaatatgtggattatggcctctggtaatcgattaccaagggcgggtaatctattacaaggctt

SEQ ID NO: 201676 - DNA, 404 bp, Glycine max
  unsure (1)..(404): unsure at all n locations
tcngaagaaagtgatgaggtacaagccctaaaggcagatcttgaaagagcctgggtagtcgaagagaagttcatgtccatagccatcaaagtctgaaaagagtatgatgaactaagggatgtcaatatggccaccgatgaagccttggaatgagaaaccaagaaggcccgaaaggaagaacacgaccaaagcaaagttttgaggggctttatagggcagcaatagtgagctcaagctccgaagaggtgaaaggaatcatcacgggtcaaaggcatgatcttgaaggacgagctaaaggcttgccttaggacgaaaagaaatttgtcccaacagttaagcgagactgaagggaatatgtgggccatcatcgatgagtgcaaagagaagctaaatctagcagcgac

SEQ ID NO: 201677 - DNA, 358 bp, Glycine max
  unsure (1)..(358): unsure at all n locations
gcttgggctaattcagatgacaataaccttttgctcggatgtctgatngagtcccgnaatatatcgagacgctcgaaattgaatnctgaaccttagagctaattcaaacgacaataactttttactcggatgtctgattgagtcccgtaatctattgagacgctcgaaattgaattctgaaccttagagctaattcaaacgacaataactttttactccgatgtctgattgagtcccgtaatacatcgagacgctcgaaattgaatgttgaagctttcaggcaattctaacgacaataactctttactccgatgtctgattgagtcccgtaatacatcgagacgcttgaaattgaatt

SEQ ID NO: 201678 - DNA, 435 bp, Glycine max
  unsure (1)..(435): unsure at all n locations
ggacactataaaactcagcttaacaatcaatttcgagcgcctcgatattntacgggactctttcagacatcctagtaaaaagttattgtcgtttgaatttgctcagagcttcaacattcaatttcgagcgtctcgatatattacgggactcaatcagacatccgagtaaaaagttattgtcgttcgaaaatcctcaaagcttcggtattcaatttcgagcgtctcgatatattacgggactcaatcagacatccgagtaaaaagttattggcgtttgaattagctctgaggttcagaattccatttcaagcgtctcaatatattacgggactcaatcagacgtccgagcaaaaagttattggcggttgaattagcttagagcttcaaaattcaatttcgatcgtctcgatatattacgagactcaatcagacatc

SEQ ID NO: 201679 - DNA, 414 bp, Glycine max
agcttttaagtaagaacctttggcgttgatttacacgacattacacaaaaatggattaataagaactctagtgaataagaacaaacagaggacaaggaacaagggatttaagaaaagtgtttgtttttttccaaggagaataaaaccaaaggaagattgatagaacaataagaaaataagaccaatactcacactgttttttttttcaaattgtaaacaaaggtaaaactgcccatattttttttaatttctttttttcctcatttttttgcacgattttttcataatatatatataaagagaagacaaaaagatattgatcctagatagaattcagaaaagaaagatagacttaaagaaatagacaaaggaagatgaaacaataatataaagttaaacaaaagggaaagaaca

SEQ ID NO: 201680 - DNA, 446 bp, Glycine max
cttacaaatctatttaagtccaagcccataaataaaatataatctagacttgataagataagattggatgaaataaaatctggacgaaataaaatctagatgacataaaatctggataagataaaatttgataaaataaaattgtctgctctcttcaagtccaagcccaattccggattcaagcccaaaattcttataattctcctgaaattaaattaaaaacacaaaattagtcaagtaggcccaaatgataaaattgcataattaatttgacaatttaggctaatcagtaattaaaatggtgacaaaaagggttaagaaataggagaaaataatgacacatcaatgagtccctatgtacacaaatcatgaagattttgggtgcatgagtgattttacaaaaagagggttgcaccactcaacacattcatcataccacctatcat

SEQ ID NO: 201681 - DNA, 290 bp, Glycine max
tcctctctaagagcgaaggtcacctccttgagatgagaagctagagcttagctacacaccccttataatagctatactcacccccatgactaaaaacatgaaagttcaaaaaaagaggtcttactacaaaaactaatcaaaatgccccgaaatacaaggctaaaaccctatactactagaatggccaaaatacaatgcccaaacgaaggaaaaacctattctaatatttacaaaggagaggggatccaaccttgacccatgggctcaaaaatctaccctatggttcatga

SEQ ID NO: 201682 - DNA, 423 bp, Glycine max
  unsure (1)..(423): unsure at all n locations
tccatgaccnctaatgccatcttttgctataaatatgcgttatggatgttgattaaaggttccaaattgcgacgctaccaaattgcgactgttatcaacttctacatcattcttcggttggtgttctttgctcgtcatccggttagtctttgttttaaagatttgaatgcgatctatgcaccctttggggtcctctttcctgttctgtgcatcttcatcttcttctatcatcaagaagttcatttccttctttgaaagttagttttaatcgatcattaatattgcacattatctttaaaaaatattgaaggtttataagccaaagctaaataaaaccaactcatataacttcttcatttcatcaaatatcgcttgagatcgtttcaaggtccaatgtcttaaacgactctctcctctttttaa

SEQ ID NO: 201683 - DNA, 426 bp, Glycine max
gtcacctgcggcatgcaagctttgatggtgtagagaagaaatcacatgttttgtcatcttctaaaagggggagaacgtgaaatgttgtatatatgattttgaagatgtcaaagaaaaatctaacaagcctgcttcaaatgataagcatttgcttcaagaataattcaagattgcttcaacaaacaaaggcatgtttcaagattcattaaagaccaagccttgccttaaaacaaagtgctttcaagacattcaaggctcttgtaatcgattaccaggaagtgtaatcgattaccagaagacagggttgaaaaatagctgttgaaaaatgttttgaatttgaatcttcaacatgtaatcgattaccatatgtccgtaatcgattaccagcaacgaaactttggagattcacattcaaaggtattaccc

SEQ ID NO: 201684 - DNA, 415 bp, Glycine max
  unsure (1)..(415): unsure at all n locations
acgactggtaaaccttgtatatttttttttattggcngacaccttgaaggcctccttatctggttatgatggaagtaacaacgctgatcaccacgacttcactcaagtgttgcatccacacaagttgtatcatttgaaggatgcatatgatgtttatcaaggatgccaacggttactccttcattaaatgcctattgtatggggtctatttcacattaaattcaacttataggccaagtgtaacccaattctgatgtagtaattaaactattgcccatgttgtctcccaaaggaataaaggagggatttcatgtaattatttaactaagaactacgtgtttgtaattctggtttgtgataggctcacaataaataacataaaacaaattgccttatatattatatgacaatataa

SEQ ID NO: 201685 - DNA, 434 bp, Glycine max
  unsure (1)..(434): unsure at all n locations
agctngtagaatggccagacatgatacatattatggtttggtttggctcaaggataaaagggatgccccacattatttccatgacacaaatgcaaaaatgatgatttggaaattttatgcaaaactggtcatgcatgtgttagacaagtggcctcacatatcttaagaagggggggttgaattaagatattccaaacttttctcctaattaaaaatctatcttactttttacttaagttatgaattcccttaatgacaatcttcttaaatattaattcaaatgaagcaacttgaattatgaatattaagcactatttaataaaggagattaagggaagagaaaatgcnaactcagttttatactggttcggccacacccttgtgcctacgtccagtccccaagcaacccgcttgagagttccactaacttgtaa

SEQ ID NO: 201686 - DNA, 430 bp, Glycine max
  unsure (1)..(430): unsure at all n locations
ntgtgctcaatttccactggaagatgacatgcctttccatagacaaccggataaagagacattcctatgggtgctttgtaggcagtccgatgtgcctagagagcatcatcaagtctggtactccaatctttcctgcttggctgcacaatcttctctaaaattctcttgatttctcagttagaaatttctgcctgtccattggtctgggggtggtatggtgtggataccctgtgtaccaccccgtactttttaagcagggcatgcattgtcctgttgcaaaaatgggttccttgatcactaacaattgctttatgtactccaaacctgctaaacagattaaacctgacaaagtctgcgacaactntagcatcattagttctagtgagcttggcttcacccattttgaaacgaagtccactgctaggagaat

SEQ ID NO: 201687 - DNA, 327 bp, Glycine max
cgcgtgtatgatatccacttgacaaggttcgaagtaaacgagaccttcaatcctatatactcaactgtggcgtgacaacaaatgggccgttaacttgaatggccattattgtctatgcggaaggaattctgcgcttcactatccatgttcacactctaattgcagtattgtggttacctgagcatgaactactaccaatatatagatgttggttacaccaatgagcacatctttaagcatactccgcacagtggtggcctcatgggaatgaagcagcaattcctccttctgatgaggcatggacactaatccctgaccaaactacaa

SEQ ID NO: 201688 - DNA, 331 bp, Glycine max
ccatccgcccaaggaactgctctacttgcagaatggaccctataggccctatcatctgctcgctgtgcataataataacctgatgcaatcctaccccccaagggtattggatagaacactccacaagcctcgggcttgagctacctaataatgtccctaggttctcatgaaccttatggtagatttttgagcccatgggtcaaagttggatccactcttctttgtaaatattagaataagttttcccttccgttaagccttgaattttggccattctagaaaataaggttttagccttgttttttgacgcattttgagtagtctttgtagt

SEQ ID NO: 201689 - DNA, 406 bp, Glycine max
  unsure (1)..(406): unsure at all n locations
agcttgagatgaggaagtgtttaagggtgtttctttctgctnttattggcgaccacagagtggtacctggagatatgtcgcgggggtcatgagaccttggggacgtcaggtggggtgctattgcccaaaaccaagcttgaccaatcccgacccaacccgggcatagtcggtcagtgagaacctgtgatgtacctaagtaggcgagctcctggcagtcaacagataaaaggaaaacaagaccacaaagcaaggaggcttgtggtggctggccacctgtgaattttgtgtaatatgtgagatatggcctctggtaatcgattacaaagggtgggtaatcgattacaaggcttaaaaatgaagacacgaggctaagatggtctctggtaatcgattaccacggggtgta

SEQ ID NO: 201690 - DNA, 444 bp, Glycine max
ccttgaatgaaccattgatggccatgtaggatgtgccaaatgttgtcataagtacgtagttatgctcttgaatttttagccataaatgtaacaccctctaccctcacaaataacgaataaagggaaataaaatcatgcgaatttttttttaaatatattgactctaaattgatttcaaaagataaaggattcgcattcacttaatgaaaacatagtataaattgttcgaaaaaaacaacaaagttatcccaactcaaaacaaggtcatccatactgaatgaataatataaaaactaaacaaaaacataacacaactatatcgtttacggaaaatatagcatgcgaagtaaattctatgccccaatgtcacacttatcagagcatgtctctatcacagactaagtctctctggctctaacatggaattcatcatgtgatggctta

SEQ ID NO: 201691 - DNA, 238 bp, Glycine max
actttgcacctaccgctactaacggatgtcctgttggactctcttttaattaaaccggtgcctattgtttttaatacacatggtttaaccgtgactatattccacatttgatgaaatattgttttaaggttaatcatgtgatttgcggcacctatatatatatatatatacatacatatatatacatatatatagttatttatatatatcatttattactacactcccttatacacgt

SEQ ID NO: 201692 - DNA, 411 bp, Glycine max
ttatgcatgttatatatgctccaccatgagttagtgtgtttatattaaccacatgcttcatatgcttcactgtacattgtattatttcttcgaattactaaatatttgaatcttattatatatgaaataatgcctataaatagttattactactgccctcatgctctattcttgtatatagatctgattagatgtgtggtatcacacaattcttgaagaccattttccactctatcactacctttattggtttatctgttagaccgttagtgcatttactaatcatcattgatttattgattggtagcactttctgtcaggtatcaaacagttgcttatattgaaccgtctgcattcatctatcatgatggaaaggtcacatgatttatcttatgacttaaatttgactga

SEQ ID NO: 201693 - DNA, 410 bp, Glycine max
agcttggaattgcaattaggcaccctattttaatctcctatgtggcacctacatataagaaacagtcccactctcctcaatttacaaaatcatattcatatatcattggggcatttcaccgagcacttggtgggcgcatgtttggacataaattgcaagaggatgggggcaatgtggcatgccccattgcttcagaaaacaacacaggcctaaggccttctcacacaaatcctcaactcaacaaatcaagcatcaaagcaacccaaaactgcctcacaaatataagcacgttctcacaatttagagcaccaaaagatgaagaaaacacatcaatgggaagctaaaaactcaaggattgaatacttacttgttggagtgagtagaaacaccaaatatgaaagctaaatgca

SEQ ID NO: 201694 - DNA, 372 bp, Glycine max
tggagtacaaacctgagaccaactcattttatttcttaaaggacgccctctctagtcaaggtctgagagaccatacaagtttcctaacgatttctaattatgtgggccattaagtctatcatatgctgacaatagccgagaagcccatgaatatcttcgggggcggagtaggtgtctgccatcgccttggccttggctaacaatcggggaagttcttgactcccgttcaaggtaagagcaaatcggcccgtccacattgttgcctcttagggccatgaatcaattaccctctcccttgcttcgctttctgctgatatcttggcgtactcatcctttatcctttgatcatgagtcgccgcttgatttaacata

SEQ ID NO: 201695 - DNA, 346 bp, Glycine max
ggaccttgaaatcagctctgcgaccgcctgtgccggaaattcaattttttccttatacaacatttgaatctcaatcctgaagacaccttcaatgttgtcgtccctcttttttttgcataaaaaatcaatacaaagaacatggagaagtcctatgatgcctggcatgtgttttctgaaatatagtattatattcaacaacatacatggcagtggatacatggaataaaccttataaccggttgccccaatacaataaaacacaactcccatcttcggagccttggtaaaagcctgtccttatgggggggcttgaaaactataataacctgccttcaaaaaaatataa

SEQ ID NO: 201696 - DNA, 382 bp, Glycine max
  unsure (1)..(382): unsure at all n locations
agctgggtatgctttatctggtattttgttttttcatgncagacancccattgcatgacatcacatttaggctaaattatctattggttcccgacctgattagtgatttgccttgtacgtaataatcgtaagttttagttcctaaacaaacaaattaaatgcgctttagtccctagtaattgtcagacattaattacattctcagtgttaaaccattggtaaaatttccttgtaggatgagaaaaatcagatgcaaatgcaaaatattatagaactaatttgatatggattttagctttggctagatatacattcttaccccaaattatctgagttacgaatttattcctgttcctacaatttttgtatattatcaatttct

SEQ ID NO: 201697 - DNA, 423 bp, Glycine max
  unsure (1)..(423): unsure at all n locations
agcttgtacagtaaagcaatactttgggtgtattcactgntttggattgggattagctgttttggtttgggaccagctatttacttagctatttatttatttaaataaaacaagtaagaagaataatggaaggcaatcatcagatgggaatggtagattacttcacttatcccctttcccccctttctctctatataacactaaccattttcttctgttattgtgtgtgtatgtgacttgtcttttgatcttgtaggctatacttgattcaacaggttccttagctaagttttcctgtgaagtggaaataatagagtaggtgctcgacatccttttcacatgaaaataaaaaatctcatgcgaatatcccattttccgcctgaaattctttctcatgtatgtcactctgattaagtaatttta

SEQ ID NO: 201698 - DNA, 425 bp, Glycine max
ccgtctgcctggacaacgtaaatatgagattgagatgcccgttaaagcaccattgcctaggtaaccatgcgttgagcaccatgttcaattattttgtttttcagtgaaacaggtttatgatcccaacatggctggctcgtggtgcctaacacatggaactaagaatgtagtgtgaagtttcacgcttccccctttcttgttttggttttgtatacgaaaacgcatggatgatcaaacatgaaaacaaatggtatgcaattttgcagatcaaatagtttgttgaacgcatatgcatgatgatgccctgactcatgcaaaatgtgacgccggaatatgataacggacaaatgcacgatatgtccattatgatgttatgaagagatgcttatgccatgcatgatatgaatgcattttacggacactat

SEQ ID NO: 201699 - DNA, 420 bp, Glycine max
acaacattcaatattgactcttttcaacctcccgcccccttgttgcccatattcctttgatctctaagtacatcagccaatacacgttccatttccaaattccatgtaaaataacttcttgtttcctcattattttttcctaaaactcttcttttgtccgtcattttttcattaaatgactccattaaagttaatgtcactttatcaacctgcacataacaaatagtagatatgacctactttattcatttgactagtccactgcacaatcatagaaaatatttcaagcaaagttcttatgcaataacaaagtacataaaaagtctatcttcaatagaaaagtacaatagcaacaaagcacacaaagtttatcagcaatagcaaattacatttaaaaaataactatccctaagcaaagtt

SEQ ID NO: 201700 - DNA, 446 bp, Glycine max
  unsure (1)..(446): unsure at all n locations
tgtngagaggatgagcgaataggctgagttgattactattttttgcctgataatccttgcactgttacgagtatcaacatagattgtgcctttttaaactctctgatactcaagtttgattcttacacataaaaaatgagagcatttttaaaatacattaaatgttaatttttttataccttcaatttattgtgaagtctatgaatgagatattcactcattttctatgaaagtggatgcaaatattgggcaattagcaatataagtcaaactcattgtcttattgggtggaaaattatgtcttgaattatgaggagcgtcatntaatacaattgccacttaaatcatttaaatttataggtctttttggaataaaatgtaaatcgatgacattatttaataaaattaatcaacttanatactgttattggtcttgatgatttatc

SEQ ID NO: 201701 - DNA, 365 bp, Glycine max
actaactaggacccggaccatctagtgagaggtcttttaattttctggacccaccgctgtgcccatcctctggttcctcaggctacgaagtctcgccaaaggtctactttctatgacatctctcccacaggtatgggatactaatcattcaactgcctcatctccggagtttttctttagagtatttatacattgtgcaggcaccaaaaaaacatactcacttaaaagaaggcacccaaatcttaccttctggacaaacggggttttgtctttgttacatttgaaacataggtctgttgggattaaacaactttctcaaaacctcttttattaagcgtctggtaatcccttcttttcctggaaag

SEQ ID NO: 201702 - DNA, 299 bp, Glycine max
catgcaagcttgacgctgacaaggaaggcggagaatttatagcttaatcggcttaccacaaaaaggagaatatgagctgccactgccactgccacaaattgtggggactatcacaaactcaccaataggccccaccatgtagttcaaccttatcttagctccctgtgtgggatggacactaacccatctggctcttttgcccaacaggagaataaagctaccctaccttatttcactcctactcctacaatttccattgaatcaaaagagtaaagcatacaaaacagtgcatatactga

SEQ ID NO: 201703 - DNA, 439 bp, Glycine max
  unsure (1)..(439): unsure at all n locations
agcttccaccctccctatactttnataattcaattgnggttgatttgagccatcctgcgtgatatatgggcttaattggattttgtattaaacttgggtgaacatatggaaatcatttttacattgaaccattcacatatacagatcaaaaccccattctatgttatcttgtcaagactattgtttaaaatctttctattttcattgtgcttgaaaaattttggattatcttttttttcctattagttccaaatttttaaaaagtgtcagttgcaataatcaaataggtttaagtttgttgtaattttagggatttgatagaaaggggagaaaagtgcatggagtatattgatgtattatacccctagctatattatattaatcatctagggtatgaaatataactagtaaaagttcaactctttacactcctaatgta

SEQ ID NO: 201704 - DNA, 434 bp, Glycine max
  unsure (1)..(434): unsure at all n locations
tgcctcanagaggtccacgaaggacaaggcagccgaatgttctanttctgctccggagtatgacagtcaccgctataggagcgctgtacaccagcatcgcttcgaagccatcaatggatggtcgattcttcgggagcgacgcgttcatctcacggacgacgagtatactgatttccacgaggaaatacggcgccggcggtgggcatcactggttactcccatggccaagtttgatccacaaatagtccttgagttttatgccaatgcttggccaacagaggagggcgtgcgtgacatgagatcctgcgtaaggggtcagtggatcccgtttgatgccgacgctattggccaactcctaggatatccgttggtgttcgaagacggccaccaattgtagtatggcctgaagaagaaccggtctgatgggttctatt

SEQ ID NO: 201705 - DNA, 390 bp, Glycine max
  unsure (1)..(390): unsure at all n locations
agcttaagcagagaacaaaaangcncaaagttattggctttttgttcatatcaccacgattgtgcagagtgctgatcttatgaaccttaattcttctttctgattaaatgaagtgatatctaacatctatatgcttgattctatcatgataaacctgatccttggccaaacatatatcactgaggctatcacaatagatgttagcatattcttgattaattccgagatcatttatcacacctttcagccaaattccttcctttgcaacttcagtaagagccatatattctacctcataaattgagaggtcaatataaggggtaagtggtgtcttccaactcaccaatgcagccaccaagggtgtgaacataccctattagggaccctctt

SEQ ID NO: 201706 - DNA, 448 bp, Glycine max
  unsure (1)..(448): unsure at all n locations
aactaagctctggtggacatcttgacttgctgtccaatctgacatttactacattttctgccttcttctattntcagattgggaatgcctttaacagcaccttcgtcaatgattttcttcatgcctcttaagtgcagatgtccaaacctttgatgccatattctgacttcatcttctttggaggatagacatgtggaggagtaactgtgttcttgaggtgtacatatgtagcagttgtcctttgatctgctgcccttcattagaacttcacacttctcatttgtcactaagcattctgactttgtgaagtttacattgaatccttcatcacacagctgactgatgctgatcaagtttacagttcagcccttcaccaacagtactttgtccatactatgaagtccatcatggactatcttctccattccagtgatctttactttagaac

SEQ ID NO: 201707 - DNA, 391 bp, Glycine max
  unsure (1)..(391): unsure at all n locations
caagcttgaaacaaagagtatgttttntttatgatttgnccatnnataagnntattaataccctcattcaattcttcaacttgatcctaaagtttaatatggtagatataaatgttagaatggactaaaattattcttgaggtcctatatttctgtaaagaaattgtttcttttgatgattacacttaaactttgattagtttgcctacatgatgcctagaaaattcatatcctgttacaaagttgatcccttcaggtctaagagagtaaatgttattgtgtgtgtgtgcatattgagagaaagatgcaacaaagagaaagccttaccataaaggcgtgtcctacatatattaaaatggagagaaagatactgaaaggaataaanaacaaa

SEQ ID NO: 201708 - DNA, 137 bp, Glycine max
  unsure (1)..(137): unsure at all n locations
tngataccaaacattaaacataaatatacatgtttgaacttgtttacaaccataagccacacattcagaacaacaatggaagccaaaaatataaaattatcagacgtacctacctccatcattgctataaccttctt

SEQ ID NO: 201709 - DNA, 430 bp, Glycine max
agcttgagtgagccaccatatagtgagtcttatttgtaaacacatccttgtaaccctactatctttttgtatagtggaagaatctccatattagagaattataatcgggtgctcccattactacctttaattactaagtgtctatcttaacttcacgaagcgggaaagtctgagaagataaatagcttgggaagtctctatcctcaagcttgagtgagccaccatagagtgagtcaagtttgtaaacacatccttgtaaccctactatcactttgtataggggaagaatcttcatattggagaattataatcgtgtgttcccattactacatttaattactaagtgtctatcttaacttcacgaagcgggagagcctgatgtttcccaacaatatcaagacataaaaaggaattattagaagaatatgaa

SEQ ID NO: 201710 - DNA, 410 bp, Glycine max
  unsure (1)..(410): unsure at all n locations
tggagntttanatacaaaggatgatagagaataagcgtttattttgcatttgaattgtcacagctaaaggtttctttagcatattatttcccccgcagccctcttagcctccgatctgtttaaacctaacaagatagaaagtagagaattcttttgatacatcagatagaaaaagaaagtatagaagataatcggatgaggggaccttgtgagtaaaataatactatatctatttaacttaatattaatacaaccggatgtttgatgcttgttgcattgatgcattgaaatagagacaaaataaataagaaaaaaataaatattatcaataaaaaagagatagaatggaaacttagaattgaaaatttatgtggtttacatggataaaaataagaagagaaggagtgatc

SEQ ID NO: 201711 - DNA, 381 bp, Glycine max
  unsure (1)..(381): unsure at all n locations
agctatcatcaagaaagaattgatgtagttttattttgttttcnccacatangaaatggtggtttctatatgctaaactacactaaaaatgtttatatgttttcaagatacaaaatatatggttgagtgatatatttttatgagcaatttaaatgtacacgcattttaaataatgtaattttatcttaaaggcatttgtgtataatagtgagcaattggtgtcctgcactctttgggaagataattgcctgcaattcttagggtacttaaatgagttgaatggtgaagggccaataattattctgctaacctgatgcaatcctccctaggaagggaccaatcactataaccattaacaataggctccaagaaaattgggct

SEQ ID NO: 201712 - DNA, 304 bp, Glycine max
tatatctgttctcctgatgtggtatcggagttatcataaagatccatgcttgccctaatgactacatattgtacagacatgactgtcaagaaatgcacaaatgccctatgtgtgatgtatcaccgtacaaagtgaaggatgatgactagtatagtattgactaaagctcctagaaaggcccccccaacgaatgtgttggggtatcttacaatcataccaaggttcaagtcgtctgttgcttatggagactacgctaaatatcttacttggcttacaaatgggataaaccacgataatatgatcc

SEQ ID NO: 201713 - DNA, 317 bp, Glycine max
  unsure (1)..(317): unsure at all n locations
atttttgatgccactnngcagnncccatctggggaaaacccctccatgaaggaatcgagagacacaagaacaacacaatccttttgcctcattgttgaagaaagcggcaaagcatcccccactntgccagaggaacaaagactatggcaatgagggacatagaaaaatcaggcttatgccctgtggccagaaactcatgccacaaccaaaaggcagaggcgaacatctggccctcacaaaaaccacctaacaacggactgaatgtgagaataaccgggtaccacccctgccccaacatttgatgaacgcaaacgaaa

SEQ ID NO: 201714 - DNA, 432 bp, Glycine max
gacactatgatactcaacttcaactgtctacgccacagaatagattctaaatttttttttgggacaaaagggatgtcagagaacttgaatgatgatgctgctaagtatttaaattacaggttattggccatactcatatctactatctggagcctcaccgatatgtggcacaatccacaagcggttccgataccatagtgatctctataatccaagacatgtgagagataattggaaaaatggatgtaaaagctattatctttttggggaaggagaacactcataaagcttgtcctaaattctattcctatctatttttttcttttttttaaggctccaaataaaatattgcggcaattcgtgtggattagatacaattttgtggcgcaaagtgtaatgaaaaaaatataatgtgaaatgggatttgtgtcc

SEQ ID NO: 201715 - DNA, 428 bp, Glycine max
  unsure (1)..(428): unsure at all n locations
tcacctgctgcatgcaagcangaagcccttctatattatgtaacttttgttacncgagatcaccatcaacgtttttgatgtttatgatacttaattattgatgggtgctacgtgcaaattacaaagttgtccaagttgctcaaactgaaatagttttactacaacaatatctatttaaaaagacacttttctattgatgtgttacacatgactggatgatagtttaaaaactatgaagagaaatcaaggctaaactcgataagtttcatctgattcttgaagggatttttctaaagggctacacgagtatagaatactttcagtcacaaaaataaatgattctttgcatttactgagcatttttacatataatacattaatagctatgaaatctttttaaatggtatggtttattgtcaatgttttaa

SEQ ID NO: 201716 - DNA, 428 bp, Glycine max
  unsure (1)..(428): unsure at all n locations
tctcctttgctccgtataactgattgtagttcctgagtttgttggactatcttttagcattaaggtggaaatttgtaactgagctattatagagagggttggatgttcgcctattgtagataatatggtggaaaatagacttacgtggtttgggcatgttctgagaacaccggtagactctgttgcgatgatagtataccatatggatagtatgcgatcaattcgaggcttatgatgacccctaaagactatcagagaggttatcatgatagatcttcaacttaatgatttggatagatgtattgtacttgatttacattatggccgaagttgtttcatgtatccgaccttacctattggtataatgcgatgtngttgatggtgttgtctacggctgaaatttgaaaagaattctgatgataatttaa

SEQ ID NO: 201717 - DNA, 423 bp, Glycine max
  unsure (1)..(423): unsure at all n locations
agctgggntcgatgttcttacccgttgattatctaagaacgaggaagaacgaatgaagaacatcgaagaacggtcgaaaccttcgcgaaattcctcacggaaacgtttcggaagcgcctcggcttggattttcttcacggaaacaatttttccaagcaaattcgaaagtgagagaagtgcctaaggggctgaaccctttttcacttcacttctccccctatttatagaaaattgggggagaagcttgccacccagctcgcccaggcgagcagggttgcttcctccagaagcaacagccttctggaggaatcttctggagggcccaagtgggcctgattgctatttgcacccccatatttactaagtacacctccccctgcctttttttggtgattcttttttcgtaaaggtacggaaacttac

SEQ ID NO: 201718 - DNA, 428 bp, Glycine max
tggagaatacccgctaactagcatgatcagtatcctaatttgatgcaagagctcaatactgtgaccattcctttgaatctataacatcctaaaattataatatcattattattcatgttaattttagtataaattcttttattaaaataataatttatttaaattaaaagattaaaaaattattattattattattatttttggaccaaatacttgttatatttaaatttgtgatccttcaaaaagatttaaatcttatattgttttatcttgaaagaaaataaaatattagttattgttaatagctagttaaatctaaacaattggttaaaaaatataaaaaaaagattcgggcagccaaatctattaataatatacctgatgtgacacaatcttaattatacatctttatcttttttaatgatgaa

SEQ ID NO: 201719 - DNA, 414 bp, Glycine max
  unsure (1)..(414): unsure at all n locations
tgcaagcttatgtaatngaaccttataaatagcttattaatccctatttaatgggaagtaatgcaaagtaattattatttttgagatagatgaatcttaatgggatttctcttgattaatcctttgtctatgaagaaaaaaaaatcttgatattctttctggagttcttatttttgtaatggtgtgacatctatgtttaattaaactcccattgttgcctgatttctttgtagttggtgttcccttggacagcttcttttatcttggaggaccgaacattgcctcataaatttacaacaaggaatatgcaaatgctctgatgtgtggggaagaaaaatggaggaaaacattggtaaagtctttgaggccacctcactattggagcaggtaatttcctcatattcctcttacatt

SEQ ID NO: 201720 - DNA, 446 bp, Glycine max
  unsure (1)..(446): unsure at all n locations
tgtgtactgctgtattctactaacatatggagttggtcactgctntgtctgataataacaattggttgaccacaataacgctagaggcggtaaaggacaacgatctttcaaataagcctgttgtgtgcgaacaaacattattaactcaaatgaaccagggaagtgattgcataattcttatactaactaccttcaatgtacctaaacaaaatgatttccaaacacaaaaaaaaaaccaaaaaaaaccataaaatgcgtacctccgagggaacaagaagagcatctacgatagaaaccaccaatatttaacattcaccgaacagttactttcaacaaacttgcaaaaaccacaaaagcttacaaaaaccacccagcacacatgacgaaagtgaaagtgatacacaaaggaagcgtataaccggaagtaggggcaaaattgtcattaa

SEQ ID NO: 201721 - DNA, 346 bp, Glycine max
aatttagagggaaagatgaagtgttcaaagtattagtaatgctaaaagtttcaacgttttaaggtttatagtgggccttttcaaaagcaatcgttaagcccgctttccaaaattaactcaggaaaaagcgttataatgtttcgatataaaaacgttgtgtgttatacaataataataaaaacatgatatgtcatccatatgatgaacgctgtgagtgtgtgttaatgtcccttggacaatagatccttagatgcaacagaggacaacatatatagattaaatcattcattaacagagatcattccaagttgatttcttaacaaaatcaacccttctttatttaatg

SEQ ID NO: 201722 - DNA, 422 bp, Glycine max
ctatagcttgctgcatgttcttgctggagggcatatcgtacatcacttattatacttcttgaaatcatatgtatatcaaaacacagggaaacaataagtgttatgaaaaactaaacagtgcatcaaagattggtactagtttaagtattttattagctaagtatgaggcaggatacataataaatgcagtacagtatttcactagtaagatcaggtgccatgccatgtctattattgtattgcattccaagattatactattatagtgaatttgtggctgaatcctttcttgtgtatgcaggttcctcgtttgggtctgatgcattctgatgaaatggaggtgttgtttctgagttccagtattcctatgaagttgaatgcccctggaaacagttttttttttgttcttaattattttttaa

SEQ ID NO: 201723 - DNA, 427 bp, Glycine max
  unsure (1)..(427): unsure at all n locations
agcttagatntccttttagagggaatctatttcttcctaatatggagccaaacccagtcaccctcattaagaactagctcttttcttcctctattgcctttagttgaatacacctttgtttggttctctatttggttcttaaccctctcatgcaacttctttacaaactttgacctagattccccttctttatgaataaaagaagtgtccagtgggagaggaatgaggactaacggtgttagaggattaaacccatagacaacctcaaaagggaactgcttggtggttctatgaacccccctgttgtaggcaaattctacataaggaagatactcatcccaagacttatggtttcctttcagaagagcccttaaaatggtgtataaagacctattcactacctcagtttgcccatcnagttgtgaat

SEQ ID NO: 201724 - DNA, 443 bp, Glycine max
ctaagctggatgtcagaaagcgtggaagagtcagtcttcctactgattttgttttccttacagtggcacctggagatatgtcgcgggggtcatgagaccttggggacgtcaggtggagtgctatttcccaaaaccaagcttgaccaatcccgacccaacccaggcatattcagtcagtgagaacatgtgatgtacctaaacaggcgagctcctagcagtcaaccaataaaagaacaaagtccacaaagcaaggaggcttgtgtggcggctggccagctatgaatcttgagtggtatctgaaatttggcctctggtaatcgattactaatgatgtgtaatcgattaccaggcttaaaaatggagacaggatgttaagatggcctctggtaatcgattaccaagggtgtgtaatcgattacagggctataaaatggagagaggat

SEQ ID NO: 201725 - DNA, 422 bp, Glycine max
  unsure (1)..(422): unsure at all n locations
agctntgaagagaagcagccagtatggtttcaaagtgttttttgaaaaggcctatgaatctgtatcttgatcttttgtggactacatgttgataagggtaggtttctgtcctaaatggagacaatggattgctgcctgcctccaatcagtaaccatttcaatcttagttaatggaagccctacaaaggaatttgcccccactataggtttgaggcaaggggacccttaanctcctttgctttttaatatagtgggtgaaggtctcactggtatgatgagagaggcccttctaaaaaacctttataaaagatattctggtgggaaacaaaaagagcctattaatatcctccaatttgctgatgatacaagactttgttggtgaggcctcttgggagaatgttcttgtcttgtaggccatgctc

SEQ ID NO: 201726 - DNA, 437 bp, Glycine max
  unsure (1)..(437): unsure at all n locations
tcaggagcntggggaacgctacagaaccctgtccaaacatgctcatttttttattgccgtncactcgctgagggtgactgggtctgcgcgtgtcactgtttcggcgatgatgatcttcgctactacgacgctgtcgtcgactgggttagtcgccacgcgccactttctcttgtcgtttacttgcgtcattatgaacttttttcttaacaccaaaagttaagcttttttattatttgagtatataactttgttcttgaaagtctgtgtgaatataatttagtttccgaatctattactttcactgcaaattagtccttctactgcgaagttaatcaagttgactatgattgtatagtcataaactttgaagggccaaatcagtataggttcattaggttgctacttctatgttttgagatggaattgtctatttactc

SEQ ID NO: 201727 - DNA, 431 bp, Glycine max
  unsure (1)..(431): unsure at all n locations
agcttgctcagccttggctagtnttggttgtttctcttctggactngacatcgaccttttcaaactcattgacccaaaaatcagcaatcccccaattccttgcatggaagcaggtgattgaatgcatgaaggcgcaaggaccatcttcgctcaacatatcatggtcaaattggctgagcatggaggattgaaagagagcataggggttgaagtccttaccctaaagagagttaactccatccttcacagaaaggaagccaagatgactctcgattaggtaaggagccacaactgacaccagctccaccctaggctttttaattggagcctcgtgatgagaaggacccacatttgtcctcttaacaacatttggactaatgggaagagggagaggtaccccctcttcttccaccaaacatgtgtcttaactt

SEQ ID NO: 201728 - DNA, 437 bp, Glycine max
tattggttgatagcacctctgaacctattttagaatattttagtcgaaagaagaaaaatgcatttcaaatttatcaggtacatcatcacctccggtagtgtacaatgagttatagtgcacttcactccaaaagcttagccatagctctataaattaaaacataatcataatcacataacaactcataaagccgggagtttccagtgagaactaaaagctaaggatgaaaacaaatcttgtgctctggcttttcatgatataatcgttaaaataccaaatcattattcatccaatagctaagctacttgaaagttcaagaatgattttattataaggggaatgtgtattgccacacctatttaaatattttttattatttaagatacacttctcttttattaatcaatctaataatctataacaatgatataaaattc

SEQ ID NO: 201729 - DNA, 422 bp, Glycine max
  unsure (1)..(422): unsure at all n locations
agcttcctcggggccatttcttgttggngatatctatatcgcaaagcggaatcaaaaaatgcgaaaaaggatgaccctatggctgcaaattccccaatcccgtgggtatggcttttgaaaggggggaaaaaatgttcttgaatgtaacaacgccccccctttcgtcattattataatttggtgcaggggtggctcgcccagactaactaacctgcactttattttttttttttttgggggggggaacattaaccatgtccccctccttctcatggattagcatattgcctaacttgaacttacttaggtaataatcaggcgtctgatacttaaactattattacccattctctttgtaaaaccaactaatcatgaaagcaatctgcatatactatagttctgtgctccttcaccacattcct

SEQ ID NO: 201730 - DNA, 438 bp, Glycine max
  unsure (1)..(438): unsure at all n locations
tgcttgtggggcttctatgaaagctggatctatgagctttttgtcgtcctttaatggngaatatactccatggagatgcaacggaagacaaacgagaagatgtgagaggaggtgccatccactaaggaataagccatggaaaaaggagctttaccacctagatgagccttggattataagctcgtaaggatgcttcattggatgaagagatatagggagagaaagagagatgtggggagcacgaaattgaacgaataaaagatggagagaagctgaactttgaattatgtctcacaagacttttatacatcaaagttataacaagtgttacacatgcttctatttatagactacgtagctttcttgcgaagctttcttgagaaaacttccttgagaagcttctttgagaaaactttcttgtgaagctatagcttatct

SEQ ID NO: 201731 - DNA, 392 bp, Glycine max
  unsure (1)..(392): unsure at all n locations
agcttaacagcgaaantaatttatatgttctgtcactcnnnaaacatgaaggaatttgatgccgaaagtttattatcaactaagtaaaaaacctaacacaaagccacggttactaaatataaataaggtcagaggcaacatgcatcactcttatctttaacaattgactcattgtctaaactctaaaatgtatgttggtgagggtgtacagataagtcgctgctctcctgcaattgtagtggacactctcactaaaccacatccctaaagaggggaaaatgggaccccgccatgattctgctggggttgaatgatcagaacatcctcatggcttatcatcacagctatttgttcataatgatggaatagagaaataagttctattacttaac

SEQ ID NO: 201732 - DNA, 413 bp, Glycine max
  unsure (1)..(413): unsure at all n locations
ctgtcattcaatagtaaccggaaataaatattcatgtgatgattaananancngacacgaaagaatgttggtgctgtatcaaccttatgacccactatagaatgcatccaaaataccaactactaactggagtttcaaaatgtacaagcgaacccgtaagaccaattaagaaaaggttggccatgacctggaagagattttcatttcaggtcatggtactatatattattattcagattgaaacaaagcaacctaattaagtgcacatgttatttgttaattgcaaacctaccgacgtacccttacaaatttacaactctgataagttttattaacctacttaccagttcaagtgacaccaacttacatcgtacaccataaattcctttcctcaacaacattattatcccctg

SEQ ID NO: 201733 - DNA, 409 bp, Glycine max
  unsure (1)..(409): unsure at all n locations
agcttgtagaatggctagacatgatacatgttctggtttggntgggttcaaggataaaagggatgccccacattatttccatgacacaaatgcaaaaatgatgatttggaaactttatgcaaaactggtcatgcatgcacctatgtggacactcaagtgtcaaatttttatggtcatgtgatgctagggctcaggattcgtttcctctattttaaatcaacccaatgtttccaaaatatgttcttttatcaatttgtgcattcattcgagtccatttcgggcgtccgggaaaattttcacagcgttcacccttcaagtgtatacacactgttttttttcaaaaactagctatgatcagcgaatttttttttaaagagaagtgtgaagtcatctctttacacaagcatgt

SEQ ID NO: 201734 - DNA, 412 bp, Glycine max
  unsure (1)..(412): unsure at all n locations
tgagatgaggaagtgtagaagggtgaaacttcctgcttttattttttgtccacagagnggcgcctggagatatgtcgtgggggtcaagagaccttggggacgtcaagtggggtgctattgcccaaaaccaagcttgaccaatcccgacccaacccgggcatattcggttagtgagaacctgtgatgtacctaaacaggcgagctcctggtagtcaacagataaaaggaacaaagaccacaaagcaaggaggcttgtggtggctggctagctgtgaattttgtcgaatatatgggttgtggcctctggtaatcaattaccaaaggggggtaatcgattacaaggccttaaaatgaatacaggacgctaagatggtctctggcaatcgattaccatggagtgtaatcgaatacc

SEQ ID NO: 201735 - DNA, 339 bp, Glycine max
  unsure (1)..(339): unsure at all n locations
agctgggngcgagggactttcccgttgatgttcttataacgaagaagaacgaatgaagaacgtccaagaacggttgaaatctttgcgaaattcctcacggaaaacgttacggaaacgtttcaaaagcgcctcggcttatattttcttcatggaaacaatttttccaagcaaattccaaagagagagaagtgccaaaggggctgaaccccttccttcttgccttcctcccctatttatagcaaaataggggaggtggttgccgcccagctcgcccaggcgagctcaactcgcccaggcgagcagggttgcttccttcagaagcaaccgccttctggagga

SEQ ID NO: 201736 - DNA, 418 bp, Glycine max
  unsure (1)..(418): unsure at all n locations
ntactatgcagagaatatgcaaggagaataccttcatctgtacttattcatcaaacctcctaagttatcttttccattattcaatacaaaacatttacaaccaaagatatgaagatgagagatgtttggttttctgccattgaccaattcatatggagatttctttaaaatgggtcttattaaagccctatttaaactgtagcatgcagtgttaacggcttcagcccataagtattttggaggaggagtatcatttaataaagttctagcaatctcttccaaagatctatttttcctttctacaacaccattttgttgaggggcttctggggcacaaaagttatgcttaatcccatgcttatcacaaaataattcaaattctttattttaaactcacccncatgatcactcctaatag

SEQ ID NO: 201737 - DNA, 404 bp, Glycine max
  unsure (1)..(404): unsure at all n locations
agcttntatataagctgaaccattttatttttttcacaggttgagttttattcagaaaattagagtgtatcttttttatcttagtgagagtgattctcctaaatttttgagtgattcaagaacaccctggctgtatcaaaggactttcacaacctttgtttgttgccctcgccggaaagagtgattttttccttcctttcatcttcaaccttgttctttcaaaccacaattccagaaaatccacttatgccctgaattatctcgtggccataactcccattttacacactcaaattaagtgattcttgagcctaaattgaatttcaaaacgagacctttcacctcgttttggaatcaccttattgggagccctgtagcttgagttattgcatttctatattttt

SEQ ID NO: 201738 - DNA, 432 bp, Glycine max
  unsure (1)..(432): unsure at all n locations
tcaacttacagtgagtgattcaagcttatcgccactatttgcgctaagcgcacttncaatgacttcaaaatagaatgatgttggcgcttagtgcatccttccctgctaagcccagcttgaaagctcaacttacagaatgaatctggggcttatggcaggatggagcgcttagcacagctataataaattttcacagagaggaagtggaacttatcgtatcatccacactaagctcactttttaaggtgcaacttatagtgaagatgttgggcttagcgcagcgatgtgcgcttagctgagccattcagcaattcaatcaggggtctttatgcttagcgcgagcaagcttggcttatcacatgaagagatgacacttagcagataagcaatctgaaaattttctaagtcattttctgcttatctcttcacaca

SEQ ID NO: 201739 - DNA, 316 bp, Glycine max
  unsure (1)..(316): unsure at all n locations
gtttagaaacttccttcaaatagaagccaaaccagattttaaatggagttctatgaataaaaaccttacataattttcaagaaccaatttcatagtagaataaatcatagtacttagaaaagcactagactatgtcctaataaagatttggcattagtattaataatttagggaggaagaatacacatattntacaaagcaatgtaatagacagcaacactcctaaactctgcatatttacacagattaatgtggaccgcaaatcgcacatcacacttcataactacaatgtaatggacagtagcattgttagctg

SEQ ID NO: 201740 - DNA, 430 bp, Glycine max
  unsure (1)..(430): unsure at all n locations
ntgaccttntataaagtaaggaccagttgtgacttactctttntaaactngantnctatttattcgcacatgttttgaaaatggttttttatttgatttaactaatccttgaatttgtctgttgaagataacagtactttctacatgtagtcgtagaaagactacaacttatgaatggtaaattaattaaccctctcttaacatcaattactcattgtatatacataatttttattactcattattagcttttacttaatttaatattatataagtatatttattcactattagtaatatagataatttgtattactcattgttagggtttaattaattaattattattttattatatttattgattattaaaaatataaataatttttagaacttattcttagttctgatatataaacaattattacat

SEQ ID NO: 201741 - DNA, 454 bp, Glycine max
acctgcggcatgcaagcttgcttgtggggcttctatgaaggctggatctttgagcttcaatggggtcctttaatggtgattttccaccatggagatgcagtggaagacaaaggagaagaggtgagaggatgatggaagcttgcttgtggggcttctatgaaggctggatctttgagcttcaatggggtcctttaatggtgattttcctccatggagatgcagcggaagacaaaggagaagaggtgagaggaggtgccatccactagggaataagccatggaagaaggagcttcaccaccaagatgagccttggataaaaagcttggagaggatgcttcaatggaggaaaagaaagatggagagaaagagaggggggtgggggagcacgaaattgaaggaagaaaagagggagagaagttgaactttgagttgtgtctcacaagactctcattca

SEQ ID NO: 201742 - DNA, 439 bp, Glycine max
tccacaacatccaagcaaaacaacattcaaacagcacatgctatcacagccaatctaaacagagcaaaggcagaaaactctgctcaacacatcaaccaaaatcacagcttttctcacgtaaagaccacagtaacaatttcttcgatccaattcgttaaccggtggatcgactccaaaattttactggaagtctatagttcataagcctacattttgaccgttgggatctactagcaaacatccagaactcattctgcactagactttccacagccaaccacacacaagcatttttctgcacttgtgcaaaattctgctgcacaatttcacagcaaaaattctgcataagtgcagatttcgaaaatcacactttctcccatccaatcttgcccaaatcaattcctacaagtcccaaatcatgtatcaatcatgtctaaac

SEQ ID NO: 201743 - DNA, 359 bp, Glycine max
ctatcacatatagatgtgcttgcttttgattctgctccaagcggactaaagcggatattggtacgcctctacatcatccacatttttcatctaggttaatggtctcccccctactgaactcactccacacaatgggcttatgacaggaggatctactccccaccttagccgctatatatatctgcacaatgactaccatgcttgatgagcggaatgattggatcaaatgtcgttctctttcttcctctttgggaataataaggaacctcttagcatattacaaaatgctgactcatctattatctttgtggaatcctctatgccaaacgtgaaggtcctacaaatcatccccatatcgt

SEQ ID NO: 201744 - DNA, 375 bp, Glycine max
ttttcttactttattggaccctaaatataaagaccagatgtaatgacttcactttcttatttgtacaaagatgagtggacccaacctttacccatgggctcaaaaatctaccctaagattcatgagagccctaggaccttcttcagagctctaacccaatccttttggagtctcttgttcatggctctattgatatggcccttcctataaagatattgtaaatcgtaacggtccctttacatctcaccaccatcacaatgtgcagccttctccttggccttgcctttaccctatctatgtcccttagcctaatgcttgctgaatccttatacctacttctcgtcctttcctataaccttcactttatcacttttt

SEQ ID NO: 201745 - DNA, 326 bp, Glycine max
aaactaacctatatcctgtagcaacacaatggggacaaggtttcactttgagtaccaccacctaacatgtggtttcacaatcataactgcatttgcctcaaatcttatgaatgatctgaggaacacgtaaccatgttgggaacttgtaccaccatagatggattacctagatgccaccaaaacctttaaaacctgatcaaactttccggtcgcattatatatttggtttcaatgtcaccactaaatccatcttaacatccataatgtactcaaatataatagctaccatgcttaagcttaaaaatccttaaaactgaacatgtttt

SEQ ID NO: 201746 - DNA, 440 bp, Glycine max
  unsure (1)..(440): unsure at all n locations
agcttcacgtacttcatttgccatggcttgtttaaaaccttttttgtgtgtnaagctaaaacatatcaacaaatacttgatctatgaaagctaagcaagattgttcaccactctactaacatgaaataaagaaaactgttggattaataaaaatgctaagatgactaattaatcaaatgtgctaaaagctatgaagtttttaaaaatttagagattaaattgacgattttaaataatttagggatcaaattgataagtaagacttattttttttttttaaaaaaaaactttagataaaatcttccttatcacatctcctttttacatttcatatataaagctaagaaaaagtgggctatatagagctatgccttaaattgagaaatgttataactgtttaattataagattctgataaataattatgtaactaagaagat

SEQ ID NO: 201747 - DNA, 441 bp, Glycine max
  unsure (1)..(441): unsure at all n locations
ctagtgcaaggatgtcctgngggactaacagatggagaacatgctatcttatctaaggaagaaactataactctcgaaggaggattgaagcttatcaatgtgttatatgtgcccgaattaaattacaatttaatatcagtgactcaattgatagatacaaactatatagtctaggtcactaactctttgtgtgttatgcaggaccttactttgaggacgctgattggaatgggtgaacgaagagatgggctctactattttagagggatctgtcatgagaaagttttcaaagtagatgatatgtttttatttgaattttggcacaagcgtatgaggcaccctttcttgaagattactcaggtaattccaaatattgatagtagtgtaactagacataaagcatgtgatgtacgtcagagggcaaagcaaactagagatagt

SEQ ID NO: 201748 - DNA, 149 bp, Glycine max
attcctgaccgttcgagtcgtgtcggaaccactgtcggaaatcaggatagggtaaggattaatatattaatccacgagacatcttttacaaataataaggcggaatattagtcggacgtcttgtctgtgggatttctcattcctaatcg

SEQ ID NO: 201749 - DNA, 424 bp, Glycine max
  unsure (1)..(424): unsure at all n locations
ntacaangacagagaccaaaggatgagcatgctatattttctaacatgaactttttatatgattacaaatgaatacattatacatttactttagtgtactgcgtacacaagtgagtgaagtgactcaccttctcactatttcctgcttataaacaaacaatcctctaggtgctttaataataagaacctaattaaagttttttttttaaataattaaagtaaacgattcaactttttgataattaaaacatccaattaaattctcaattataactaaagaattaattgtataattaagccattaataaaaagttaatatctttcaaaattaaataaaattaaagtacccaagaatatacaaacatattctaatatatcagagtttcaagaccacactgtctaaattttatggccattaaataaa

SEQ ID NO: 201750 - DNA, 332 bp, Glycine max
ccaagcgccgcggctcagccgagagaaatttataacctttggttttctaggaaaccctgagggtgagagttttgaatgaatgctataggtccctgtaacttgtcttgactaaggcaatctatctctaaggctggtctttcctattgtgggattgtgcatgtgatgctgttttgtgcacaataataatgcaaaatgctaatgtaaacatttagcaagttgtaccagtacctccttgaccaagataagcttattttctttgcaagattactactgctttgtcttgcttcggaataatgatcctagcaaacaatccgtgtgttccatgcatctga

SEQ ID NO: 201751 - DNA, 471 bp, Glycine max
  unsure (1)..(471): unsure at all n locations
acctatagaatctcaagctggtgactctcggcaatttctttagaagccagtcactcattatgttgtgcctcacgcaaanaatcttccacgaaacaccgttacattgacagatattgctgaccttctcgcgaacatgtcatttttcataaatcaagtcactgtgaaatctcactactcattaagagtgcaatacgattacacatcaacagatgtgacttttcattctgaactttgaaaaattaaaacgtctataagctctggcaatcgattacaagtattgtataatcgattacacaactttaaaatactttaaaactgtttaaacataagttataattcttgaaattcgaaatcttaaccttttacaacactggtaatcgaatactaccttctggtcatccatcactagaaagtaaatctctcttgtaatgatattgtgagaactgctcgtgctacctaatatttcaaaaa

SEQ ID NO: 201752 - DNA, 394 bp, Glycine max
  unsure (1)..(394): unsure at all n locations
ancttgtaaaagaggaacgtgtctctaggtattatttgaaattaatattgctcacattcaaagacggtgttcgctatcaccgttttttaataattcaaaatatttacaaaattacaactgttatacaaacgaaaatagttatttaatgaccgtcgtaaatactatgcggtaaaaaagagtttttttagtagtgattttgtaggctttgaactaatggtagagggcactacctccactttgagaagaagggttgtttttgtgcgtgattaacaacaaaacaagatgaatatttaggctaaatttaaagcaaagataatccattttctgatctaaacaaataacttataaaagaggtgtttgcttgctcaacataactatactatcatgacaattt

SEQ ID NO: 201753 - DNA, 436 bp, Glycine max
  unsure (1)..(436): unsure at all n locations
ntgtgtaatcaattacactgttttggtaatcgattatctgtgattgtttctgaataaatcaaaagatgtaactcttcaaatgggttttgactttttcaaattggttttaagttcttctaaaagttataactcttcaaaatggtcctcttgaccagacatgaagagtctataaaagcgaggctttgttttggattcaattattcattcaatcttttaaagaatctttctatccaatcaattcattacaatcctttacaagccttgaatctctttgaacttcttcttcttctttgtaccaaaagctttttgaagttttctggttttctaaaccttgaaaacttgtgctattcatcttttcattctcttctccctttgccaaaaagaattcgccaaggactaaccgcctgaattcttnttgtgtctctcttctcccttt

SEQ ID NO: 201754 - DNA, 332 bp, Glycine max
agcttggagaggaggcttcattggaggatattatatagggagagaaagagagaggggggagcacgaaattgaaggaagaaaaaaggagagaagttgaactatgagttatgtctcacaagactctcattcatcaaagttacaacaagtgttacacatgcttctatttatagactatgtagcttccttgagaagctttcttgagaaaacttccttgagaagcttctttgagaaaacttccttgggaagctagagcttagctacacacacccctctcataactaagctcacctccttgagaagcttccttgagaagattcctaaagaagctagag

SEQ ID NO: 201755 - DNA, 423 bp, Glycine max
tgccgcccagctcgcccaggcgagcaaggttgtttcctctataatcaacagccttctggaggaatcttctggagggcccaagagggccaaattgctatttgcacccccatttttactaaatgcacccttttctatttttttgcaattttttttttccgtaacgttacgaaactttacgaatattctaacgatacctattttccttccgcaaggttacgaatcctcacggattatatattttactcttgtttacctttcgaagaagccacagaaactcacggattgcgcaaaaacacttcttttcgacttccgccacattactgaatttcacggatcgcataagcctgctttcttttaatttctgagacgtctcgaacttcatttatgcatgtatcaagaataatccccggagaaataaggtat

SEQ ID NO: 201756 - DNA, 389 bp, Glycine max
  unsure (1)..(389): unsure at all n locations
agctngaagcaactgttgcagcatatattatttactgcagagcagcaaaattgggctgcaaaactacttggttatgactctgttataagcaaggaaaactgaatagaggagcggatgccttgtccagaatgcatgaaggaatggaattgaggagtattacctcttttttgcagtgggatcagacacaattaatgaaggaggaggtgcagaatgatgaggaattacagaaagtaatagctgaactatcacatgatccggtttcccgacctggatatgtatacaaacagggagttttactgtatgatgggagactagtcctttcaagacattcagccatgattcctacatttttgaaagagttccatagtactccacaaggagggcatttt

SEQ ID NO: 201757 - DNA, 424 bp, Glycine max
tattcttcgtgactatatctctctgtctctacaaccttatctagacgctgacaactcgccacctgtcgcgactctgtctcatgtacattttgaaattatgtctcttgtctcttgtatttctaattatgaatgtagcaaacaatgccctattgagaggggctagcgctagctatatatggttgtgttgttgagcctactgtctcaagtactttttgaaattgtgtctcttgtctctatagcatgaaagcatactatggagtataaacattgttaatctagtttgtttgaaattgtttctgaactatgttatacatagggtgtgtgctacaatgtgatcatctagaagtactttgtattataatatgttttgaagtatgttattcatacattagttcctggactcaagtttaattatttgcatttt

SEQ ID NO: 201758 - DNA, 419 bp, Glycine max
  unsure (1)..(419): unsure at all n locations
agctntgagtctatatattgaacttacatttctctccnagattctgatgagagatgatgatagccacaggtggcaccttcctaggagcaatattctgagttgttggcatttcatctagaaactccaagctcttgcttgatggcagatattctcatcatcactgaatacaccatcctccaaaaaactcttcttggaaatgtgaaaatgtatggaaccaagaaaggtactatttgcaacaaaccctcatatgaagattcgtgctagctagtttgttggaatctgtgggggaattgctgaactatcttccattggggcatttgaacatctatcatgaacttccatttgagactttggtatcgatggataattagactcatcacaaagcatttataaaagaaccatggatgctggtagactac

SEQ ID NO: 201759 - DNA, 420 bp, Glycine max
  unsure (1)..(420): unsure at all n locations
ntgctcacatttctcattccagacaaacttctcattcttacaagttagtntagttaggggtagtgctaatttagaaaatccctcaatgaattttctataatagccggccaaccccaagaaacttcgaacttctgttggagttgtcggttgtcgccaatccataaccgattccactttaaccgggtccaccgcaaccccatctttagaaatcacgtgcccgaggaactgcactttctctaaccaaaattcacatttcgacagtttgacgaacaatttcctatccctcagaatatgcaacacaattctcaagtgcttttcatgctccttcttattcttcgaatacactaggatatcatcaataaacacaaccacgaactgatctaagtaatcatggaatatacggttcatatagtccatgaa

SEQ ID NO: 201760 - DNA, 422 bp, Glycine max
  unsure (1)..(422): unsure at all n locations
agcttatntcttgcaattccaagatacattagagcttactaacatatgacatgtaccacttgtgctnttcctatctactttgcaccctgcaaaatcagaaactgaaaagccggttagatttaaggaggtacctttgggataccacaaaccaacattggttatgccattaaggtacttaatgatccttttaacaactgtcaaatgaggttcctttggattagtctgataccatgcatacaagcaaacactaagcataataactggaaaattccttacacaaaatttcattagtatcaccaaagattatatcattaacatatatttgtacaattaacaacttactatttactttcttgataaacaatgtttttcaacttggccttatataaaagattgctcaattataaaattttcaatctctc

SEQ ID NO: 201761 - DNA, 429 bp, Glycine max
tctcctttcatacataaacaatcctctgaagaggaagactatcttcaagaagataaaaaatggttctttctcttccaatttagtttaattatatgctttattagctagctttgcagcatacatatttagcttttcataaaatttcaattcctaatcatttctaattttgaacaattatccttatagattgttatgtttctcaacaggttttctcaaaaaggttgatgaaatcactaccctttgtgatattcaagcatgtgctatcatttatactctagatgaacctgagcctaaggtttggctatttaaccagtgaatggaaagtgtgatttccaggtttatgggagtttctaaattggcacgaagcaagagaatgttgtgtcaagagaaccttttgaaaaaaacatgatgaatgccccagggaaattg

SEQ ID NO: 201762 - DNA, 438 bp, Glycine max
  unsure (1)..(438): unsure at all n locations
agctttaggctgctcaattgctccangttgctgcatggaagggcaatgtctgtatgggggncagcagaggagcacaaaccacaaacccttgcgacaggtacatatttttgattcaaggccagctgggttaccaagttgaccaacgcatccagtttgccttcaagcttcttattttcagatgatgcaaatgggtttgtagctacctcatgcactcctctaatgactatggcatcatttctggcactaaactgctgggagttggaggccatcttctcaattaaatttctggcttcagcaggagtcatgtctccaagggctccaccactagcagcatctatcatacttctctccatattactgagtccttcataaaaatattggagaaaaactgttctgaaatctgatggtgagggcaactggcacatagtttcttaaatc

SEQ ID NO: 201763 - DNA, 447 bp, Glycine max
taatctgtcacttttgggacttcatgacttagcctctttttcacctaatattgcagatatttcatcattaaatccaatggatatattctagagacaactttatccataaaagataatttatttacaaaaatcactaaaaaataaccataaattggggaactgtacaagttttggaaaatgatttctatacaaaagttagtcgtataaggcgactaacagaggccgtgttaccgtttgaagtagaggtcccctccttaagaattttggcacaatctgggttaaaagagtcggaatgggcctaagcgcattttgatcaactaaaccttatagaaggtaagagattggcaaccatgagccacgggcgattatatcaaagatgggagaagaacaccttcgacaagaaggtatgcccacgctcttggatcaagtggcctcagaataattaag

SEQ ID NO: 201764 - DNA, 437 bp, Glycine max
agcttaaaggaatcttgttggcttcatagtatccaggggttttcttagggtgcacttaggagaattatattaactgcatctggaggagctttcaagtgtgtatgtaacttcatttggctgttttgcatgttcaatggctccatgttttctttttctgttggaaacattcatttttttggggaatggaaggaaactgaaagggaatatgcagcactctaaactttcctatatatatctcaatgtcttattgctattgcctgttgaatcaatgttttttgatcaaggaaaacctgccattgttgctctcttagttctgtttccaggctctatataatcacgttgactataagtatcatcccctcgatgattgacagggattggccagttgataaactgacagatgttaaagttgctgatgcattaaaacatcctaactg

SEQ ID NO: 201765 - DNA, 443 bp, Glycine max
ctagaggatgaagctaggggctatggcagaacgctgggagatattatgttcttattattgaagaaggaagaaacaaaaggatgttctaaagattacgagggctctctgaaaggtgttatctcataaggtcaaaatgtgtatagcttagtgacttggacgataaggaaaaaactattaaggacagtaaagtctaagtgatgggaacataagccgtttagacacttggacgaaaagtcaaaaactagcttattaagtttgaccaaatcttacccgactgcttgagctaattaagtatattgcttcaatttagaaccaacccaatgaatgaactctattattgagcatcaagtggacgcggcagagatgggaatatagcgtttcacacacttttttctcttattaatgaagggtttcttgacctataaaaaccaacaatggtatta

SEQ ID NO: 201766 - DNA, 385 bp, Glycine max
  unsure (1)..(385): unsure at all n locations
catgcaagcttaaggatcgnttatgagtgattggtgtatgtgatgcttaatctcataatgaacgccttatgttgaatttcgcttagtaatttaatttagggtcggattaacgggttaaactgataaaggataaactctcgtaatctaggataagagacttgcttgtgaatcaaggggaagcaaccggttctaattctgatattttctaatccacatatattcgctgtttaatttacaaaagcaaacaaccccccccaccccccccatcgttactgttactgttactgcaagtatattatgaacatttggcttgtcactgctcgttgtgaaacgacctangatcacttcctagtaactacattctaatgtttatttgattccggta

SEQ ID NO: 201767 - DNA, 434 bp, Glycine max
tcaagctggaaggatgcttcatggaggagaagagagagggagataaagagattaggttggagcaccaccatgaaggaagaaaaatggagagaagttgatctttgagttgtgtctcacaaaactttcattcatcaaagttacaacaagtgttacacatgcttctatatatagactatgtagctccctagagaagatttcttgagaaaatctccttgagaagcttctttgagaaaactttcttgagaagctagagcttatctacacacacccctctcataactaaactcacctccttgagaagctttctaaagaagctagagcttaactacacatacctctctaatagctaagctcacctccttgagatgagaagcttgaacttagcttcacaccctctatataactaagctcaccccatgaacaaacatgaaata

SEQ ID NO: 201768 - DNA, 396 bp, Glycine max
  unsure (1)..(396): unsure at all n locations
agctngcaacaattttgagtaaacaagagtcactggagggtggttttaaaagagatgttctgagcagttatgatggtgatagtgatggagaacacattaataatttctggtgttagaaacttagaataaagaggttttaaaattcatgagtcacaaagagacgcataaagttaataatttcaggtagtgcttacacacacatgattcaagcattatcaagaaaattccaaacaatcaatctatgcaaaatagaataacaacgaaggtgaaggggaataagcgggttattgtgtagtatggaggtgaaagatgggtgaacaacgagatgaaactaaaacaataatattcacaagtccaaatgataagaactaaatccttgtctatctgaaaaacatc

SEQ ID NO: 201769 - DNA, 444 bp, Glycine max
  unsure (1)..(444): unsure at all n locations
ngaataagtgtctcgcttgatttattaagggtgtgttgtgaagaggttatgactaacacttgtgaaagtgtttaggagagtttaacaaaatagcttatgatatatccgtaagctgtttttagcttattttaacaagttatccaagataagggtaaataaaatttacagcttatataaaactagtttaacgtaaattctttttcaattatagaaacaactttatccatagatatttatacgataaagcttatttaacaaagcttaattaaaactcaacacactagtattaagaatgttgaacggctattttgcagtctagtttattggagatgaaaaaaaaaagttgtctttcttgttaagctcttgtgatttttctctcatggacttgttgagttaaattttttggacaaaatttacgtcaagttttttacagttttaccatca

SEQ ID NO: 201770 - DNA, 406 bp, Glycine max
  unsure (1)..(406): unsure at all n locations
agctngnagaaattgccatgttttttttatttaaacatacccattctgctttagggtgtttgtgatgatgtttgcgatgtttatatgctgaaattgctgatggaaatctgttatagacgaagggtagaactaacctatggttataaaatgagaatgtgatgttatgagtggaaaaagagtgagactttgagggttggaaggctaagtctgaattctgtggtaaatggaggttaaagtgagttaatactagcttgaaatgtcatttaggacttatgagaaagcttggactgtgcttgagagaaaaataaatgaccaaagtgaacaaagagccatttttagggaaatttatgtgttgaagagtcaaatttttgttcggtgagatattatgtgtaaatccagtttgaac

SEQ ID NO: 201771 - DNA, 427 bp, Glycine max
  unsure (1)..(427): unsure at all n locations
ctanaattggatccataggactatctacaggtctacaattctgcatacctgtctcctccaaaatatcaagagcatacttcctctgtgagatcacgacatcatcttctgattgagcaacctcaataccaagaaaatacttcaaatatcccaaatctttggtctggaagtgactaaacaagtgttctttaagttgggcaatcttagtagtatcatttcctgttatcactatatcatcaacatatacaattagataaacatacttctcaggagatgtatgacaataaaaaacagaatgatcagcttcacttcatttcaacccaaaaagttgaacggtatgactaaatttaccaaaccacgctcgagggattgcttcaacccataaagagatcgatgtagcttacatacgagagtaactcccctgagcaac

SEQ ID NO: 201772 - DNA, 431 bp, Glycine max
  unsure (1)..(431): unsure at all n locations
taagaatgctatacaaatgttngaggttgtgatatttatctttttatgatatgctttgatttaatagttgcaaattgccacatttctcatgtcagttactcgtattctcccataaataaataaggcttcttctgtctcaatttattttacttctaaagcaacaatttctttctttctcattttttttgtaccctctgatcagatcgtagtccgatcctcaagccttagcctctacacactttgtgctcgaggctcgatgattgtatatgcttctgaccggactgtagtctaatctggtggtggatcccaatctgatctgataacctccacagtattgtgcacattataacactgacgtagggttaaccatgtaccgagatccttgggcacagcatcttgatacgctcaattggcctcgattcctgaatatc

SEQ ID NO: 201773 - DNA, 360 bp, Glycine max
acccttttcaacctgccactcgctaaatactttggtcctatgctctatgcacattgatgcaaaagtactcttcatatctaattctaacctttccattttgaaccttgaagacctgaagatcttggacaccatcaaacaaaaatcgcgttgtctactccaaatcttagtcctctcacaatcaccaattattaaggtgtcagtcatcaaccattctcctccacatgcaatctttcgtgtcttgaaaaaggaactattcacaccactacttatatatcctactcgggcttataggctggctgaactcttgctaatgaaagatatgaaactttttagataccctgaaaactgaatgtagtttct

SEQ ID NO: 201774 - DNA, 390 bp, Glycine max
ctacaatctgacaacgcatcaaaagtatgatcattttttttacatcagctaatgcctcaagtggccattttcatcacctcaaaatcacgaacgctgtttacccaattcacctccaagttggctaaaatccacagccataagtccacttacaatctgaagcaccactacaccaaaactacctaattttgggcaccacacacacacacacacacacacacacatactgaaacacacacacaaagacacatacacacatagacacgcacacacatatacacacacacataagcacgtttcaatcttcactttttgcccagctgttccacatatattcttattcaactcaagttcgatgaaaagctattataatagtacttgcctcacaataag

SEQ ID NO: 201775 - DNA, 393 bp, Glycine max
  unsure (1)..(393): unsure at all n locations
agctagtatagnaccctatatttatggtattttgtaattataatcggagataaatcttgttttatgggtaacgctgactctagaacatttccattggagttagtgaggaaatctgtgcatttttagatgaaaaagaggctaagtttcgaattgcaaaatgtagcagttgggctaagctcaacaattgggctaagcgcatatccaccactaagtgcagcttcagggcgcttaacacaaaggagaatctggcagagcatcaacatcaaagccgcgtgctaatcgcgagatcactgcgctaagcacagcaggtacctttatccaggctaagctcgaaactgacgctaagcccaatttcactttctcggcctaagcacgaaggtggcgctaagcgca

SEQ ID NO: 201776 - DNA, 421 bp, Glycine max
tgtgactcttggcaatatctttaagactagtcacttattatatagtgacttttgaaaaaaatcttcaataacaagtcacttgaagaattgtgagttttggaaatgtatttttcaaaatcaaacattggtaatcgattaccattaaggtgtaatcaattacacattaacagatgtgagctttcattttgaattttgaaaattaaaacgtttagaagctctggtaatcgattacaagtattgtgtaatcgattacacaagtttaaaatactttaaaactgtttaaacataagttataactcttgaaatttgaaatcttaacattttaaaacactggtaatcgattactaccttctggtaatcgattaccaaagagtaaaacatcttggtaatgattttgtgaacaacttctatactactctat

SEQ ID NO: 201777 - DNA, 359 bp, Glycine max
  unsure (1)..(359): unsure at all n locations
agcttttagagnaaacaggagtatatttatatattttcttaagagttgctttcatttgaaagtaatgatttgcgatgaaacataaatctttaatataatgagaaaaaattgatcgaaactaatgtgagaaagatgaaattctaagaaaaataaagatttattaccggaaaaaatacgagatctagtatttttagaatcttaacaataaaaagtaaatgcgaaatgatgaaaatatgtgttataaagaaaaggaaaatataatgtgaaaataaatatataatctaagaaaaggggtagaattgtactttaaaaaacatttctaaataatctgggcagaacaacactttagaactcaattt

SEQ ID NO: 201778 - DNA, 436 bp, Glycine max
  unsure (1)..(436): unsure at all n locations
tagaatgcgattgtagagggtgtaatattctcaccacaactaaagctaaggcttnttttcactcaatgaactcagggtataagaggtgatgaaaccctttttcatcttttctgttgagactctctaatgttgggacaccagtcacaacacatagcacagacaaacgcgcttatgaagcaaataaataaatatcaatagatgcgtgtagttgtttaatgacttaccaatacgacttgacaagatgcgctttccatggccaaacggcgctagctcagtatgaggaatcttcaatgcgcgagctccacaccgacaatcttcatggtgcgagatccacaaggttcacgggttactgctttttggggcgaagtaaagtgtttggggtttcacctatggcatatcggggtagactgtttgggctcgaaaatgttcgcaacta

SEQ ID NO: 201779 - DNA, 390 bp, Glycine max
  unsure (1)..(390): unsure at all n locations
gagcttgaattctagttaaaaaattctctcttaacatattctaatactcatgcatcttttacattaaaaaccggaaacttagattcctaggcatgagtcatccttttggcactttagtctagcttctacaaactagccacacactcacaatgcgcacaatttatttcgcaagctaagttccacaaaatcatgcgcaaatgctattgaggaatttcaccgaacacttggtgggcgcatgtttaagcatgaaaatcaagggaataggggcaatgtggcatgccccattatctcaaaacgcaccctatgcctaaggccatcccctacaacccnttaattaaaaaaaancagcaataattcaaggatatatcccttactgttcaagccaataca

SEQ ID NO: 201780 - DNA, 430 bp, Glycine max
tcttgacttgatgtgcttaccggttgaagatcgaaaatagtaagaacactgacgaacgtttataacgggtgaaagctttgcgagattactcacggaactacgttacagaatcgtttgggaagcgcctctggttataatgagttctcggaaacaattattgcaatcctattcgagagagagagaagtgcctcatgggctgaaccccttccttcttgccttcctcccctatttataacagaatatgggaggaggttgccgcccaactcgacacatcgagcagggttgcttcctccacaagcaaccgccttctggaggagtatttctgagggcccaagtgggcctgggtgctatttgcagcctccattgtactaagtacaccccctctcgctgtggtgaggtgaagcttttatcgggaaggacggaaactcac

SEQ ID NO: 201781 - DNA, 432 bp, Glycine max
tctcaaggaagtattctcaagagagcttcttaatgaagcttcctaccctataaatagaagcatgtgtaacacttgttgtaactctgatgaatgagagtcttgtgagacatacttcaaagttccacttctctacctcttttattccttcaattctgtgctcccccctctctctttatctttctctttcttttcctccattgaagcatccttccaagcttcttatccaaggctcatcttggtggtgaagctccttcttccatggcttattccctagtggatggcgcctcctctcccctcttctcctttattttacgctgcatctccatggtggaaaaccaccattaaaggacctcattgaagctcaaagatccagcctccataaaagcctcacaagcaagctttcatcaagtggtaatcagagcacctgaactt

SEQ ID NO: 201782 - DNA, 219 bp, Glycine max
taaagaagttgcaagcatcacaacttaattcaactttgccctgtaccctgacctatcttggaaattatcttctgatcaaacaggttagcatagaattccttgaccaagccacatcaatgtgattatctggctgcctggtcaaggctctgcttcatcgatgcctctcatgctcctgaccagactcatcatactatgtaatctgtagcttaacattcctct

SEQ ID NO: 201783 - DNA, 433 bp, Glycine max
  unsure (1)..(433): unsure at all n locations
atcggcgtatatggaggagtgctcgggggtgtttagtgtctggctttatctaggtggtcttttgttccagcggtgtttactgacgtgacctatcgggcgttgtcgaggagggagttgatcgagcggtgtttagagtctggcgttatccaggtggtctttcttccaggcgtatttagcgggccggtgttaggggcgttatgtaggtggggagttgttcgagcggtaatgtgtgtcaggggttatctaggttataggttgttggtgcgggtttttccgctgagggcttcatcatggtgtgtgtattccagcagttttgtgtggggtcggggttcatcaggtacttcttcttcatggagtcttgcgcaggtttgagggtgggcttccagcagtttttgagggggtgggtanatcgagtttatcggttgggggggag

SEQ ID NO: 201784 - DNA, 421 bp, Glycine max
  unsure (1)..(421): unsure at all n locations
cctctaaagacgaccctgcagggcatgcacagcttgtnccatgtcaatgagccaacagaccaagttgcatatatgctttttactataagcacttctcaggcctctagtttttggtaatattctattgccaacgttggggaatgattaacactctatttcaccaaccttggaggggaggtatcaccgattaagccatttgcagttagttacacagaagttatttgactctctaggttggtttatggcaattatctggttactagaagttctttgagtagtcatttgattactagaacttattataagttatttaagtaagttagtcggtacttaaattaactattttctatctttgtataaataaactaacttttaataatttgataaatgaatctcaaactgctttcatcttttttcttta

SEQ ID NO: 201785 - DNA, 382 bp, Glycine max
ggtgttttgggtgcgtctgttagagaattttaggggggcttttcgatagtgctctgaatgggggcgctttcggagggtcctctataggggtcgcgcgaagttgcatggtctgttcctagtacttttgagagggatttttaggggcttcgtttgggtcttgagggcttggatgggctttttacgagttgcatggtcttgaggggaatttgcatggtcctagagacggattcaggagtttggtttgggcttgagattatatctctggcgggtcttttttacgggagattgcatgtctcgatgggaagtgcatgtcctgatgtggtgattgtttgtttatggttcgcggttgtaggggatcggggttttgaaggttaggggcgtt

SEQ ID NO: 201786 - DNA, 400 bp, Glycine max
ctgcagctgtaaattttttaattgctcttgataaaactttaaacttatagtttcccaattaatctatcttaatgttgatggattaaaaaaaaaagtgttttgctaaattgttgtatgaggacacgtccaaattaaccatgaaaagccaggatagtacaattgctcatgcccatgcttgtcattacccaatttctcctctgtctgatcctgttcatctgtgttgtgtaaaatataaaaaacttcctactgaatgagtgttatgtaaagttacattctgtaaagggttatgtaaaagtatatatatagtaatcaatgaaaaatatgcgatgtacttgttggaccatgaacaagctacatatctaattcgacccaattaaagttaatacagtttatcattaac

SEQ ID NO: 201787 - DNA, 455 bp, Glycine max
  unsure (1)..(455): unsure at all n locations
tgtcgcttacggatataggtatacggttntctacctcactattatcgtgagttttcgagtgtcgcgcgattgtatatattttagcggagagcttatcttgctttggggtcattagttctcgattggttcacagaatcgtaggcgagaacgcttgacgattgtttttcttaggtcagtagttgagacatgaattgaattcttgggttcggcgcggagtttggcttgtagagttacggggcttgtatggggcttgtgtgggaacggagcgggcgtaccgagagatagagttgacgtattaattcgctcgcggttgtggggaacgcttatgcagagacagagttccctcacgcgatcgcggatactgggattttatctagagggtacttctgattgaggagagacgctgactgtcattgatcgtggtccgtagatttttcgcccaggttcgaggaggg

SEQ ID NO: 201788 - DNA, 343 bp, Glycine max
  unsure (1)..(343): unsure at all n locations
ttagctcttgatagccacggggtctccttgtgaaacgacttcgtttcactgcagttggtgtttgacatattttggattaaaatattattaccatacacatatttaccatcactgcttttttattaaaaataaaaataaaaattggtggggcaagggaatcaaggaaagactaaatatagctctgggccaatatgaagtggagggtgcaattcttggatgctactcctcttttactcttgagttagattctgaaagtttgctcacatgttcttccttataataatcaaaacactagtagaagatcctctcaatntcttactattggtatatttaaaatactcta

SEQ ID NO: 201789 - DNA, 229 bp, Glycine max
ttcttattcttttttattgatcgttacgagccggtccgcctcttttcttgatgcgttcgggatatttatatctagatttgaatattttctggaatgccttgtggtgaacgggccgcctcccgtactacttcgccctctccccttattttagcgttgcttctgcttttccgcgtgatactcggggtgatacgcctttatgacgtgaaatgattttgattttgaattatga

SEQ ID NO: 201790 - DNA, 361 bp, Glycine max
  unsure (1)..(361): unsure at all n locations
actagtgacaccacctagggcgcgttgggtgtggattacaccangagggatctcacgaaggtagaatgggatactgacaagttttgcaggacttagaaatccaagatgagctccgaggactctatggttcccgggaagggcgcagacactcgacatctttagagaggctggccgcgtcatgacactgactctagttactatacgatggcgcaaagcattgaatcctgccaatataaaagtggtgaggacaccttcacgaagaagtttgcccatgacgtttggacacggttcgcagattataagagggaagcgcagaagtttccgaagacatagtgcagtgaatattataacaggtcttcga

SEQ ID NO: 201791 - DNA, 237 bp, Glycine max
  unsure (1)..(237): unsure at all n locations
ttaccactaaataatccaatctttttaccaaataaaaaaaatgaattacaaggataagttgcatgatacaaccaggaaacaaggaaagataacctgtgttcatctaacaaattacaacaatagttggtccagtgatcaagagtaaatntcagaatgacaactattgcaactaacatgtcatttttttttacaactttcaatgcanaaattcagcataatctatttatcatttatata

SEQ ID NO: 201792 - DNA, 394 bp, Glycine max
  unsure (1)..(394): unsure at all n locations
tctcgtgtcttgtcgcttacggcttcgaaacgagatcgctggtgtaggttcaaacgtacggcgtggattagtgattgaaccctgtggtgacgattttcctcgtaaataggacgtggcgctgccgtcagggacgtggcgcttcaattaggcgttgacggtttcttttgactcgattgcttctcttgagatggggttatttgtagttccgtttggtgcgggcttgggaagagtcctttatcttgagtgtttccctagggattgagggatggagggattggttatgtgttgttactgaagtcgtgaatgaaaggagggggactgattgtacctattttattcaactgtgtttttctttatataatcgtgatgatgattgnggatctttcccggggtg

SEQ ID NO: 201793 - DNA, 423 bp, Glycine max
  unsure (1)..(423): unsure at all n locations
agcttctacttatatggcagggcgggctttcttcactntcttgtctccaacgcgagctctgaccactgttcttcccttccccgatgctctctttcatgtccgcctgagtgggcttatagcctaaaccatacttcccacgatttccttggtgttttatcaagctagttatgccgccattgtctttgcctaaacccatcccgggttcataaccgttccccaacataactcgggccatcattaccgctgcatcggacagacaaggttgcccaaagagggagtccacggaggaaatgctgaccacctcaaaagactggaaagcggnttctaacgattcttctgcggcttccacataaggcatggaggatgggcagcttaccaagatatcttcctcgcctgacacgatgaccaagtgcccctccacta

SEQ ID NO: 201794 - DNA, 397 bp, Glycine max
  unsure (1)..(397): unsure at all n locations
taagatcagcctccagaagacctaaattgaggagggtcgacgttgtgaaaatcgatgatccgggttgaggggcttaatagttatgtagctttgagagatccggggcgggaggggggaagctggttgaggttttgatctggagggtatagttagggagggggggtttttttaggactgaagcctacgcgttgctgcagagctcctcggcttcctctcgtgagcttcttaggtctccataggatcgactgttgcatgcgttctgcgttcccatgggaagctgtcgcgttaggctgtagcgttgctagcgtgaggggtttggtggggggttgctggaatgcgatgcatatgtgagtccgtttggagcgattgtgcggggtctggngcggggcacggttgg

SEQ ID NO: 201795 - DNA, 426 bp, Glycine max
  unsure (1)..(426): unsure at all n locations
agcttcttggaggtactttnctttgtttcttaagaaagagagtggagaaagagctcacttcgagcatgccgccgtcgttccatgaagggtcgaacttctcgatcttccagtggtcgatgtttgggtccgtcgcccatggcttgggcttgtcatgcttcccctttcgcttctccttctgctcaagagcttgtgactcgttcgctacgccattctcctcctctgagaggatttccatcgctgctttctgctttctgctttctttccggcgcactttcttctgttaggttttcaaggtttgtgggacgctaaatcgctaatgcactattgtttcaaccaacataactacggttgaaaaaaaaacgtggattggttttgggctttattttgagcccaatatattattaagtccacctatgcatttaaaaa

SEQ ID NO: 201796 - DNA, 409 bp, Glycine max
acgtggtcagatctcgtgtgttgtcgcttacggttttatggctattcggatcttcgagcttcttttgatgggggagtctcccttgtgttattcgttttatggctattcggggtctttggtcggtggtctagtatggccttttgtttcttggacttccttccgactttcctgtggaggccactgatgtgggaggtgccccggcttatcaggcttcggcttctgtcggagctttaattactgtttctgctgatctaccgggctctgcttacgattgagcgacttactgtgacttttcgtttggtattgcttagagactaagtcttggttactgtgtgaggctagagagtctgatttagtcctgttttgatcgccggggtaggatggtgtagccctggatgactggcatgtg

SEQ ID NO: 201797 - DNA, 350 bp, Glycine max
gatcctctaatcgactgcggcatgcaagctttaagcaactttcataaaaattatatgaatctgatctcaaacctcatacaaatgggctgatctgagaactcgggaaaggatcaacgtaaaaagcatcaaatgaaaccacataacaagaacttgatcccattactcccaggattcatacccaggattctcaatgggcttcacgatcttcttcagagagaaatcataacagaatttcggattgacaacaatcgttgaagacaagggacttataactggctcaatttgtgacgccagagaagaaaagtgaatcattatgttgtgtgaaatggaataggaaaaaggaaacatga

SEQ ID NO: 201798 - DNA, 414 bp, Glycine max
  unsure (1)..(414): unsure at all n locations
ctggcagatctcgtgatgtcgctacggttgatgctcctggtgctcggtgtcgggtgatctgtgtgctttgtgattgttacaactgattttgttctgagttgagatgcgctggctgaggctggggcttcgtagccttttgggtggtgggtgtatatgcttgcgcnttctcttctgtttgtggagcttctttagttacgctattgatttgatgtttcggcttcgggagggcgactatttgccnntctgtctctgtctattactgattgtggttctcttgattcggcccgttcgttttcgtggttttgtctcccgtgttctaattcgtgtttttcgggtagtgtttccggtagtaaatgctgtactgaatgtagccgtgagagctgaattggaggtgggattcgggcggtctccttt

SEQ ID NO: 201799 - DNA, 420 bp, Glycine max
  unsure (1)..(420): unsure at all n locations
gatccttaagtcaccgcggctgcaactgctctaattacattgatgtttgtatttatgggaggaggttgtatgccatttttttttagtagtgtcccactggtaaaactaactttccaaatgtttgccttcgcaagaaatggccccgaggaagcttgcctcaaagaggtccaggaaggacaaggcagccgaaagaactagttccgctccggagtatgacagtcaccgctttaggagcgctgtacaccancagcgcttcgaggccatcaagggatggttgtttctccgggagcgacgggtccagctcagggacgacgagtatactgatttccaggaggaaatagggcgccgacggtggacatcactggttactcccatggccaagtttgatccagaaatagtccttgagttttatgccaatgc

SEQ ID NO: 201800 - DNA, 308 bp, Glycine max
ggcagtccggttttcgtacgggtggtagatcctggtgctggtctctaggaagggtggcattttggttaggtgcgggggtgggtgatataatggcgcctttggggatagatggctattctcccgaaggaggtttgatcgggtcttccggagagaggacccgccgaatttataatggcgggcggccgggtgcggtcccgaggcgggcttcctctgggcattttgctccggagcccttggtgggagaaccgttcgccctgggtcactcgcttgttagatgggataccgttggatggggtttctatccggct

SEQ ID NO: 201801 - DNA, 332 bp, Glycine max
aaaaagagagactgctttcgggaaaaaaatgctttttattttctttaatgaagggccaaattgacctttcattggattgctgggtgcaccagccatattgctgggtgcacctaacatatcctaaaacaataaaccaaagaatcgtcttatgaaaaaaattcgatccatgggccttgctaattctgttcatgaacttacgcctcactctgtgccttaaaaaggacccctcgcataatgcgaaggcgacatatttatatagaaagtttatttatttgtggaaaggtataactcttaagctcctaaaaaaagtctttatttgtacaggaaatttt

SEQ ID NO: 201802 - DNA, 401 bp, Glycine max
gtcgcttacgagttgcgtggcattgtaggttggtaggtaacgtagtgtttttatcgtctatattgagtgtaaatgaagaggatgctatgcggggaagtggccggaaattatttaggcgagttgttcgcgcggccgttcccctaggccggattccgggatgttaaaaaatgctctgcttgcttaggtgtgggggagggaggcggggttgtgcgaatcctcgtgcgtggtgtctggggctgactctgggagtgaaggagaagcctacagtgatgttgtcttagagtggagttcggactagaggcgttctccttgtgcttgatctagcgggccggccgggcggggacgagtgggccgagacggcctctgtgtgggacgggcggtgacggtgcagtgaggccgtc

SEQ ID NO: 201803 - DNA, 238 bp, Glycine max
tcggctttccccgattcgtcggttttccccggatcgtcggatctgtatcggtgcgaagcccgcgttttcgtgataatgaaagaagttggtcgtgatcggtcggtgatgtatgatggtcgcttaaggctctgaaacgggatgtgtattttcctttttgattacggggatgacggggcactttcggaccttgtggtggattttgattttgaagcgcttctggagtgctcggaattagatg

SEQ ID NO: 201804 - DNA, 230 bp, Glycine max
tggggatcttggtgcttaagtcccggaagatattactcgtgtgattcgtacgggagttgattcactacagatttttgtgagcggtgtccgttgattggggaaagtcctaggagtctgggctttgtctttgcctacatgatgaggtcgtccgtggtgatgttactggatccgatttcgttgcgagaattatcatgctgattccaggaaatgttaagtgcagctttgtgatc

SEQ ID NO: 201805 - DNA, 307 bp, Glycine max
tgttccgtgtcttcttgaagtgccaggggtggtgcgtctttccctttaaggagagggagaatatatctttgtgtgtatgtatgcgggggtggcgtgtttgagttcggtgcccgggcgttggcggcgggtgctcgtgctgtctgcggtcgtatttccggtgggttgggtctttgggcttgttggggggtgctttctgggcgtcgtcggatcgtgcctggggggttttctgcggcttgggtctcccattcggcggtgggtcgtctccgctgtcgtccggggtcgggggacctgggttgtgctttcgggt

SEQ ID NO: 201806 - DNA, 379 bp, Glycine max
  unsure (1)..(379): unsure at all n locations
catcacacttattaagagggagacactaattgtttcttataaatagtcttgtactctcttgcttttgggaaaagtggaataaaatttgaattttactcatttttgtaagttgaaagatatgctcttggggggttctttacttatgnttctttaaaattaagttaagccatcaaccttattaagagcgaggcattaattggttcatataaatagtcttgtactttctttcttttgggaagattggaataagatttgaatttcactcattttgtgagtttgagagctttgcctctcgtaagttcttcaattgaacatttcatgtgtcttatcaaagagttttatccctttgtggaaatcttctttggattatcactctctt

SEQ ID NO: 201807 - DNA, 419 bp, Glycine max
  unsure (1)..(419): unsure at all n locations
tcgctacggtgtacgctgctccgcgttgggccgtcgcaggtgctgtatcgttgacgtttttggctttggngtagtaggtcgttagggttagtgtcgtttggctttggtggtggtggtggtggtggtgtgtgtttagcgtctcgatatggtgcaatggattatcgcagcgtggctgtcttgtatttttgttgcggtctttgtggtggttgttatgtggggagctgtgtgtgtcggggtgtgtcaaagcgagatgtattttcggcttgcgtgaaggcgtcatacctggttgactttttccgccgggctggggggggctagggagatcgggggtgggtgactgtggtgttggttgtgtggaaactgaggtgtgcttgttggttactatgcttcgtttgtctcggtccggacttctttcgttt

SEQ ID NO: 201808 - DNA, 339 bp, Glycine max
  unsure (1)..(339): unsure at all n locations
tggtttgcacatgggacacatgttcttctgcattagccactgcttaatgcacccactgtgaaactcatgcccacaatccagtgatccaacattctccccatcagaaaattcctcctgccatcatgacaaaataagaaagatgcattatgtatttagctcanaagttaaacatcattgcatttgttgtcatgtcctctntagttntacagtgttactaactgagacagaccgaattataagattgatttggtggttgagaaccgagtctaaggagaaagggggaagggtggaagacaatgggtctaatcttctccactacattctaacaaaataacaact

SEQ ID NO: 201809 - DNA, 376 bp, Glycine max
atctcgtgtgttgtcgcttacggctagcattctcctctttgcttcgtttcggaggtcgagaggggagtgtgagctcgctgattcagggtacgccttgcggctggggcgctgcggtgtgttgcgtgcacccccacctgcgtgcggctgtattttttcgctgtttgttttacgacagacatggaaggcggttagctgtgcgcgcgctccggacgttttggcgcgggcgttggctcttggggcggagtagttggtttctgtacatacttactgtggctgggctactgaagccgctcttcgatggctaggttttgagggaggggcgccggcggtgataataacctggtatggccttgatgtatcactacttgtagaggga

SEQ ID NO: 201810 - DNA, 375 bp, Glycine max
  unsure (1)..(375): unsure at all n locations
tgagctgcagcttnagtttttagctagacaactttttattactattnntttatttcaatatccgtcttccatcttattcttttcttgctcgctctctttatgctcctttntttccatgagatattttgctacctaaacatacgtatatttttgtgaggtattttgctatatacatgcgtgtccaaggtatcttgctacctaaacatacatatatatgttttgagagatattttgctatatacatgcatatccaaggtatcttgctacctaaacatacatatatatantttgtgaaagtattttcctacatacatgcatatccaaagtatctttctacctaaacatacatatatattttgtgaggtatgactacct

SEQ ID NO: 201811 - DNA, 464 bp, Glycine max
atctcgtgtgttgtcgcttacggcgtgattaacgtttgcgggatacggctggttgagccggtgtgagatggggctagctgattaggtctacaattatgttttatattatgagatataagagctggctcgtgtattgtttcctgaattaatattacggctcctccttatataaaccttgatgttgttacggtgtataattacggcttgaatgattatattgttgtatttatgaaaacagagattgatttatttggtgattatgttaggattcgggtttagagagcgctcttagggcgctggctgctttaggtgatcttagaggtctctgagggcgtgggtgtaccgttctctgaaattacggccggatattactaattgagtacgggcggaatacgtatattttttcgggcggatttacgataaaacgtcgcctccccgcctgtacgttacgtccccgacctttg

SEQ ID NO: 201812 - DNA, 181 bp, Glycine max
catgaagtactcgtggcatctatatcagttcatcgaagacccccaattttcaacatatttttgcagaccatgggattatcaatttactcaccaaggtcccatactctgcagggccatttttaaacccctttaaaattctatcatctgcgaaaagccattaaagagtctcataaattgagac

SEQ ID NO: 201813 - DNA, 319 bp, Glycine max
  unsure (1)..(319): unsure at all n locations
gcggcgttcggtggcggtgctgggaacgctccttagggttgctgcgcgacctgataccgacagaggaatttgagaaagtctggggccggagattaccgtccgtcttttttaggtagactcttagtttttgtgttgtaatccgctcctcgcttcggtagaaggctcgcttaggctcgctgaggtctcgcgggcttaacggggcgcgtgttgtgagtcgcgggccgggtcctcgcggacggcggngtaggcggtgactattccggcttacgcttaagctattagtggcttgagatttgtcagctctttgcttttcgcttcg

SEQ ID NO: 201814 - DNA, 163 bp, Glycine max
  unsure (1)..(163): unsure at all n locations
agcttgtaagcccaaagttnntctttccttattaaaaggtttaataaaggcaaaaaataaataggtgccataagtgctattagaataataaattgaggttgaaaaacaaataagtctaagctgaataagtagaagtttttataggggggtatttaataaaatc

SEQ ID NO: 201815 - DNA, 431 bp, Glycine max
  unsure (1)..(431): unsure at all n locations
agctntacagcagaatttagtaatgacctcttaacctagaattaaaataacttaatgccattaacctagggaattaaaaaaaacttaatggctgagtgtaactgaaattgtggcaaccaaaagtcacccccaacagccaacaagtcagccaccatttggtctcccaaaaggctgatgcctaggttgccaattgggcccttattacaacttgaactaaacctaactaaagcccttttagttgattaacccaaaacatatttttggtcagccaactttacaaggattgggccattatttagacagactaaacactctaaaatagaaacaaagtggtgtcatttagtcctccttcatttgggccatgatacaactcacaaccttggacttttctccttgaaacttgggcttgtattcaaatagtatggacagca

SEQ ID NO: 201816 - DNA, 447 bp, Glycine max
gggtcaatccgtgttttcgctacggcgtgtgtacgattcctggggtgcttgtttctcttaggataggggtggctattttggtatagggtgcgcggggtgcggtagatatagatggcgccgtttggcggatagatggctattctcccgagcgagtgctttaatcgggctcttccgggagagaggacccgcacgaatttatagatggcgggccggccgggctgcggctcccggaggcgggctttcctcttggcctattttgcctccgcgaccctattggtgcgcagaacctgttcgccctggggtcactcgctttggttagatggcggattccgtttggatcgggcttttcatatccgggctccgcagggcaattgctgcgctgggaatacccgagtacggcttggtggacctgggcgtgtgggcgagcctacctcctcggttccgtct

SEQ ID NO: 201817 - DNA, 365 bp, Glycine max
  unsure (1)..(365): unsure at all n locations
taaaattcctactagtgaaggaattnntcttggcttcatattgaacactagaggttatgctgatcttctattcataggtgcagcagcaaagcaagtaattgtgagtatatttcttgacttggttgaattagacagtatttggataaacttctctccataagtacttatagaagaagaaaataagacagtaaattgaattaagtttatagcattaactaaaatcaacttacgcacttaacttctgtaggagctatgtttgataacttgtccaacagtaaaggcataattgatttacctatgagaagctaattcatttaccttcttttttcttcagtattaaagcaagtcatccaacaaacattata

SEQ ID NO: 201818 - DNA, 414 bp, Glycine max
  unsure (1)..(414): unsure at all n locations
gatctcgtgtattgtcgcttacgngattgaagggtgggtgatgctggagtgggggagagcggagctgttgaggttgaagggtaggatgcgcttttggggattgatggttgagttatgtagatgtaggcggttggtcctggtgagagtttggtgggcgtcgtgttgggttctgctgctagaggttgggggggccggggcgggttcttctgcttttacatctggtttgttttttttgttttttcgggatacgtttttgtgtcatttcgcttaggtgtgttttttttttagtcccagctgccggacttgtggcgcgaagataagaacactaggatatctttacggtgcgcctgggggctccggcgcaaagagagacattgcgaggggtgaagctacctgacgggactgtcttggggg

SEQ ID NO: 201819 - DNA, 426 bp, Glycine max
  unsure (1)..(426): unsure at all n locations
naagctttggcaagagaaagatgtgaatgtataataagaatagcacaaggttttggtcaatgaacttttcttgaaagagaaagtattgaacaaaaacttttataaagatgaagagaaatgaatgaaagaaattagtcttttgaatgaaagaaatcaatcttagttgtatatgaaattcgtgccatggtcacttatttataatcatttgatgactcaagttaaagttagtgactcttggcaatatccttaaaactagtcaccttttaaaaattgtgactcttttgaaaactagtcacttaaaaagttgtgactttngaaaaaatcttcagaaataagtcactttaagaattgtgactcgttggaaattatttttcaaaatcagtcactgggtaatcgataccatcaaggtctaatcgattacacatc

SEQ ID NO: 201820 - DNA, 357 bp, Glycine max
atccgtgttttcgttacgtgggaagtttaattacgggggggtgcggcgtaatcgtcgctgtgacgggtggggaataaggcgagtaggagcggtgttaacaccgactcttaactatgtatgcttaggttctcttttgtgattttgtttcttcttggtgcttggttacccttggtgggaccgttatccttttccataggttgagatattttgttatagctttgtatgagctttgttacgctattattctgttttgtccttttgtttttgacgcttgctttggccccttctcgggtgcggggactcggcgaaatttttcgtttgttttatcgttgattttatttgctttcgtttagtttt

SEQ ID NO: 201821 - DNA, 335 bp, Glycine max
  unsure (1)..(335): unsure at all n locations
gctttgatcacatttcttattccaaaccatcttcttatttcttacgagtcaatttagttaggggcagtngccatttatgaaaatcccttcaatgaattttctataatagccagccaaccccaagaaacttcgaacttccgttggagttgttggttgttgctactccataaccgactccactttaatcggatccaccgcaaccccgtctttagaaatcacgtgccccaagaattgcacattctccaaccaaaattcgcatttcgacaatttggcgaacaatttcctatccctcaggatatgcaacacaattctcaagtgctcccatgctctcctta

SEQ ID NO: 201822 - DNA, 361 bp, Glycine max
gtcagtctcgaggtgtggttctgattgacgactcaaagggggttgcttagctatatggattataggtggggagataggggagatcggatagaggggagatacctccggatgaggtcccgttctgcttagaggaatccgatagagactataggatgcgcgtggaggctatatacttgcgcgaagagagcgggatgggagggagtttctcgaagatagatggatgtgaatagatataaaaggcgctgtgcgttatagaacgcggtgagtattaggactgaaagtagaaggtaagatattcaggagtgtctagaacgaggtatgcggcattcgttgtcgtggggtagaatggggcgcccgaacg

SEQ ID NO: 201823 - DNA, 273 bp, Glycine max
ccaactgagcttacgtactcccacgtaggccatctcctcgtttctctcaacaccgggccccatcaatcctctcaagctttcacaacattcaagcaaaacaactggtcaaacagcacaagctatccagccaagcaaacagagcaaggcggaaaactctgctcaacacattaaccaaaatcacaggctttctcacgtaaagaccacagtaacaattccttcgatccaagtcgttaaccgttggatcgactcccaaaatttactggaagtctatag

SEQ ID NO: 201824 - DNA, 412 bp, Glycine max
atccttaagtcacctgagctgcaacttgcccgcacaccacatcctgaagtggtgccaaaataatcgccgccggggaggcacaaatggcagcagctgctccacgactgataccaacgtttaccatcaccggaaatagggttgccatcagcaaaacacccaaaccggttgcggaagagacggccatagacatcagacaggcgacaaaataggcggcaatcatcagcaggtaaggggagttaatatactgcaatggttttgacgccagcttgaccaccatatcattcgcgccgatatgggtcatgtaagcggcaaatccacacagcatcataatcatcatgccgaggtcgccgccgcggctcattagtcaatatttaacgtattcaacgatatccgtggcgctgtaacctgttga

SEQ ID NO: 201825 - DNA, 418 bp, Glycine max
  unsure (1)..(418): unsure at all n locations
atgtgcaggattgtcagggtttgtggtcgtgataccacacaacatccgcaactgatgatggtgatgacgagagaatgggaccacggtctgatccctgtgcaacacattgatgtgaagaagcttacgaacaggctttcctgnactagtgtggttcgccccggtccgacgatgatggaccaccgtggggagcaccgagcgatgagcgcgaaccagcgcggccacttccaagcgaaagaggtgacgatgaacttcccgtgggccaagatgaagtttcaggaagtgctagcagaacacttcgacgacctgggagaccgccccaacaacatggtggcgcactccatcggctgaaatgagaagacgaacaacacttacggactgaccgactgagcatcgcgtttgatgccccaagtccatacgc

SEQ ID NO: 201826 - DNA, 296 bp, Glycine max
  unsure (1)..(296): unsure at all n locations
gagggacgcgacgtccctgcacgngcggtggcggggctgggtctagtctctgctgaagtcgttgtatccagagaggggaacgacggttgggtcctgtttgctgttgaggtatgcgactcttagttgctgagttcgaatcactcttttggctcttatcggctgacccgagtgtgttacgccggtgcgggcttaagttaccctggggttttggttgatctggtgaggttttttcttttcgttgttcttgtgaggtggtctaaggtctttttcttgtggggtggtttcgatcttgtggg

SEQ ID NO: 201827 - DNA, 347 bp, Glycine max
ttttccttagttcttttgcctggcacgggtttcgcgagcggcttggattatcgtggccgattccttgtatcgatttggctgaaagacgtctgtggcgcgccctcctcgtgtgtcgggtgatcactacgtgctctgttactgacgctagaaatgaagtcgaagccctattcttattggaacgacatgtggcactgtcggaaagtgcaatacctcaaagtcgcctgttgttccaggctggggcctattacgatgagctcggtcgcttgcgacgttgcgtccttcttctttgattccagggtgctgatttggggtcggaatttttttcgcgtggtgctgtttggtggggg

SEQ ID NO: 201828 - DNA, 368 bp, Glycine max
taggattgtagttttgacggtggggggcgctggggccgccgcctctcgcctatgagatatgatcgtttaggtctgtgatggggggaattattgaaaaatggatagaattgggggggcctggttcgggaatgttgacggcggcgttgatgttttgtcttatcgtgggattgatttatcggcggggactgttgttgaagggtagttagaagaagattgtggggctgtgccatgaggagacgctctgggtttcgcgttgaggttataaaagggtttagtaggaagccgacgagtttcttttggtgcatttagtggttagtgagtttaaagcctaagatattgattagggggttacggagagagcttagaaa

SEQ ID NO: 201829 - DNA, 399 bp, Glycine max
  unsure (1)..(399): unsure at all n locations
gaaagagagaggggggagcacgaaattgaaggaagaaaaagggagagaagttgaactttgagttatgtctcacaagactctcattcatcaaagttacaacaagtgttacacatgtttctatttatagactaggtagcttccttgagaaactttcttgagaaaacttccttgagaagcttctttgagaaaacttccttgggaagctagagcttagctacacacacncctctcataactaagctcacctccttgagaagcttccttgagaagattcctaaagaagctagagcttagctacacacacctttctaatagctaagctcaccntcttaagatgagaagctagagcttagctacacacccccaataatagctaagctcacccccatgacaaataca

SEQ ID NO: 201830 - DNA, 452 bp, Glycine max
  unsure (1)..(452): unsure at all n locations
tctcgtgtnttgtcgttacggcgtcggtgagaactgaacaaacgggcggctccggcggagcgccttcacagttcggatcctggaggcggccggcccacatgacggcggggtgagccaccgatagaaacggtgtaccgtttcctgtgagccctcatgggccggaaagtgggtgcttacgtaggtgaccacctggcgaggggccgtttccctgcccaaaggctgttccaggccccttctgttcgcaaacctgctggtccacgactgcaatctatcttgacgaccgcttataaatagcctcgatgatttgacgatcctccgttttatcgaatttactagggcgttcatggcggcgacaacggcctctgttgactgaatgatgaaacttcggtccttttgtggggcgcaccgatctctgatcttagaccccgctcgtcattggctacgggaagata

SEQ ID NO: 201831 - DNA, 285 bp, Glycine max
gccctaagttcatgggatatttttctttggttttatgaaaccctataataatgctatccacagggcgtgggagaaaaatgcttcttgtttatagtagataattttactacctccaagatcgagttgctcataagtaacaatttttctacaatttgactaagattggggatcatttagcatcacataaattataaatgaccttagattaagttatcacgaaccttttacaatttaaaaattgatgaataatcatcaggtctccttgtaggtaatgttattaccagc

SEQ ID NO: 201832 - DNA, 293 bp, Glycine max
gctgttgctgttgattgtttctttcgtgctgttgccgttccttgatccccgtggcggcttctgggtgtaggtggggatcggtggggccgtctgtggtaccctctgtccttgaggagaaggtgccgaacaggaattggggggcctgctcctttgttgttaagggacatgggatagatcgggcccggggggtttcgcttgtagacggtgagcggccaagttgggtggagacgtctcgtggcgcgatgtttatttttgagcctgcagctttagttcggtgatttcgttctcggtgg

SEQ ID NO: 201833 - DNA, 352 bp, Glycine max
  unsure (1)..(352): unsure at all n locations
agctttagctaagcccaaagcttattnattttaaatntcaccttnagaagggcgattnttcaaagagagtgaatgcagtccacatccacaacaaccaaaccatcttttggctttcaatttgtaatgtagaaacggaaagataaagtacaataaggataaataatatcctaaaaagccaaagcttccatttgcatattcccatttgacccccaatagtttgctatgttcttattatatatgnttctctatctatagccaatgcacgttgaacgggcagaacaaggattttgtgggtttgtagggcctttttatttcattatcacgtaaaataaatatcaaactttttattatc

SEQ ID NO: 201834 - DNA, 383 bp, Glycine max
atctcgtgtgttgtcgcttacggtctcttattggtgacgtgttttggtgtttgaggtgtggaggggagtcttagcggaggtcctggaggtgggatggcttgttgaaattattttgttggatttacgccttcggccagtattgagtatttggtgtttggcgaggtatatgtcttttgtttttaggctggggtttccctgtgggttcggccccgtcccccgcccttttttgctgttgcgtactggtggctcctccctttttgaaccggctgttacgtttttttgttcccgatgatatttttcaaattagtagtatgttctggaatctgtttatacgttctgtggcttctctttatttataagttcgggtcctgacccttgatccc

SEQ ID NO: 201835 - DNA, 349 bp, Glycine max
  unsure (1)..(349): unsure at all n locations
agctttggtctctgcatatcttcacacattataatctctcaaactctctagaacttggacctttctctctctagaatctctcacatgcagaagctccttgagaaaatggccaaactccctctttaaatctgatttcaggcttaaataggtagtcttgttcgtggtcgtgctcttagcgcaacgttgattcgctcagcgcacattagagaatatcggtttagcgcatgcttttctcgctcagcggatggactgaagcggtgcgcttagcgggatgacccttcgctancgaacatgcatagctcatccttcttccagaatcttcctcgcgcttagccgaggaatgttgcgc

SEQ ID NO: 201836 - DNA, 260 bp, Glycine max
atgcttaatgtggaagaatttctgctatttattgggttgatttggcggatgatgagtggttgcgccggggtgatgctgtcttgtacgattctcagctcggcggcgcgggatctgagggatagatggagacacgcttaatcgttctgtgagagcctgagtgattgctgctgcggcgtctggttctccctggaggggacccgagtattcctctctcctccgggctgctcttgaagtggactcagttttgtcggagcgtacgg

SEQ ID NO: 201837 - DNA, 411 bp, Glycine max
  unsure (1)..(411): unsure at all n locations
agcttgtaaaggtagttctatatatattgtattgatagaaagattgattgaaaatgcaaaacaaagccttgcttttataaactcttcatgtctggccaaaggaaccatttaaaagagttatgacttttaaaaaaaacttaaaaccaatttgaaaaagtcaaaaaccatttgaagagttacatctttttgattttttcagaaacaatcattggtaatcgattaccaaatcagtgtaatcgattacacaaagcttttatgtgaaaggatgtgactcttcacatttgaatttgaatttcaatgttcaaaagcattggtaatcgattaccaaaacattgtnatcgattacagctttctgaaataattggaacccgtgtaattcatttaaaactttttcaaattcatttgtactgg

SEQ ID NO: 201838 - DNA, 388 bp, Glycine max
atctcgtgtgttgtcgcttacggcggtggggtagtatgattatgattgccagaacctgtgctgaatcgccgcgttcatcttgtactgctgggcggactggattggaggaaataggaattacctgcggcgcttcctttggccgtaccgctttaaaagctgtgctccttatacgcctcctcgaactactgcttgctgtcgccgcgcctgaggacgttagcccgctgtatttgtggactatttataggacgctgtttgcgaagaagataatctacgcactctcttgggcggattgcgggccgtagtcgctgtcttacgggcgcctcgttaggaccgatgacggatttgagtggggcgatgaactagaagccgtatgactgaattattgggc

SEQ ID NO: 201839 - DNA, 353 bp, Glycine max
  unsure (1)..(353): unsure at all n locations
aacgcgcttttaccgtttatttaaatcattttctcacctaataaatgataaaatgaatttcaaccgatcatttgtgttgtaatctcatttaatcacttttaaaacgaaatctaaccgatcgttcacgttataacctcggttaaaccaaaaagagtaaaataataataaaataatcaaaatatcttgaaaaataataataaaataatcaaaatatctttgaataaaataaccaaaaaaaatcaatcggacgtttttctttgaaagtttccttgaatgaattgattaataaccaaagtgaaactaagactaaaatagactcacaaatcaagttttgtccgaanaatcactaaaaa

SEQ ID NO: 201840 - DNA, 335 bp, Glycine max
ggtgaatatgagagtgagtgggggggggttttgagtgcctcgaagtttcgttcgggccttagggaccggcctatttgacccctgttacgaccgtgtagtagccaagttatctttacgactgttgattcgtaggccacgggcatagtgatgtagctccacgggtgatacacaagtctcctgctacacggcgttacctgctaaaagaagcagggcgccaatacatcacaggctacgctgaatcatcatagtgtcgatgggcctgataatttgtcaacaccaacaagaaactcctcgaaggtcgccctgacctaggatgccttttttgcccgtagggt

SEQ ID NO: 201841 - DNA, 220 bp, Glycine max
ccccctttttgcacattgttctgtagttgcatcctatccaaaaacattatactgacactgcctaaccaaggcaaccactatgtcctttcaaaaatggactcgggaaggttccaagttattgtaccatgtaacagctaccccagtaagactttcttggaaagaatgtatcagcaattcctcatcctctgcgtatgcctccatctttcgataatacattttt

SEQ ID NO: 201842 - DNA, 431 bp, Glycine max
  unsure (1)..(431): unsure at all n locations
acgggtcccgtcgatggccctagggtatctcgaggatctggaggagggccgatgatctcgggggacgggggaagggtggtggtgttggtgaaggngtagtcttgttggcccggggacgtaggggtgggtgaaagtaggtaggaacgctgccgattactgtgggttctagggatcggagaggggtgatctgaactagttttctcggggtgctggggagattttgaaggagtgacggggtggggataggatagactgatggagatgaattgggagaggcggcggctgatagggatacttagagagtgaggtgtctttatttattcttattgagattcggacttggtattggaggtaggcagtgtctattgatggagatttattttacggattctcattcccagatatagagatccgagttcgagatagattca

SEQ ID NO: 201843 - DNA, 222 bp, Glycine max
aatgcgagacgaaaaaaatgtcgtaattgtgacaacaactaattaagtaccaatgaagtgatgtcaggccttgtgtaaggagtacgacaactagaagccaaatcagcaaatctcaactatagatttctatccatgtcattttttaaaaaaaaatcatggttagtggagttctactaaatgttgcatgacaagaggtattcatccacataaaatggaagtata

SEQ ID NO: 201844 - DNA, 299 bp, Glycine max
  unsure (1)..(299): unsure at all n locations
atgtctggcggatgtttatatcgggcggggagtagngttccccggcttaagtgttgtcgaatggatgttgtgcagggcgcgaggctggggggggggtcgctcgggggggcgccgctttgtagcaaaggagaatggcgcgattgatggattgcgggattttttggcagtcggggagcagggcaacggcgaaaggggtgagggggctccggaagtgtgcggtgtgggatagtttttctgaggggggacagagcgtggatttcagggtttgaggtctgattgtttgaggagtcgcggcgggg

SEQ ID NO: 201845 - DNA, 254 bp, Glycine max
  unsure (1)..(254): unsure at all n locations
tttgttctttattcccttctctcttgtcaaaagaatgaaaggactaaccgcctgagaaatcttgtgtttcttcctttctccctcttaacaaaagatttcaaatgactaaccacttgaaatatcttttgtttcttacacaagaattcaaaggaataaccatctgagaatatctntttccttttcccttaaacaaaagaattcaaaggactaaccgcttgagatatctttggtttcccatacanagatcaaggact

SEQ ID NO: 201846 - DNA, 369 bp, Glycine max
atctcgtgtattgtcgcttacggattgatctgactctttagagatcgtgtgatgagaacgtgagggggtgcttactttgacgctccgcccccgccttttgtgttggaaaggaaacggcgccctggcttgtttgggtaggccttcctgtctctgctttgtggctcggttgagtgtgatttggtcttttcgtccccgttgtctttttcggagcgtgagacccgttttgtcttaaacgatttttgccgtctgggcgtgaagtccggtccgtgtgttgaatacccgtttgtcttgatcctttttgttgatttccggttgcgttgtgagtctttatgttactaacgctgtcgttaccctgaaaccctttgggtc

SEQ ID NO: 201847 - DNA, 285 bp, Glycine max
gctgcaacttgcctaacaatgttcacaacaagcttggtatcataccagcagtgtaatcgataccagaaacaatttgaaaataagattttaaaaaggtttttgaatttgaattttgaatcatgtcattgattactagatgtttgtaatcgattaccagcgacgacactttagaaaacactctgaaaagtcatgacccttcacaatataattgtgtaatctattactagaaatctataatcgattaccagtgaagaatttcataaattttttttttgaaaagacaca

SEQ ID NO: 201848 - DNA, 288 bp, Glycine max
atatttatgaatatttccctgacgagatcgagctggccgtgtccaccttagggccctccttcccttcttgtgctggtcgctaccttgttctatccgccgccggtccctccaccctaggtgcctctttaacctgcccgtttgcttcctctttaccgagcgtccactcggctttgatcattatcctccgggtgctctttcgctttttctccttctttttgagttgggactagcttttaccgagtgaaggctcccctttggccggagctgtgacgtttcggatgccccgtg

SEQ ID NO: 201849 - DNA, 200 bp, Glycine max
cggctgcgtactctacaccagcctattaattggggcctacgtttgttacggagaattggatcgcgatgcccttgacctgtgaggatcggacgtcctgccggatgctcgttcctgtgaacaagaagaatccgcgtattatgcgtccttgcgcctggggcggatgaagtcttctcccttgacgaccgtgaccgtgctgaaaa

SEQ ID NO: 201850 - DNA, 349 bp, Glycine max
  unsure (1)..(349): unsure at all n locations
tctcgtgtcttgtcgcttacggtgacgacntgtgggtctgtatccgacgcttgcgctgggcgctttgggtcctctactatacttggtgatccgggcctacttcaatgtcttcccgaatgaataattgctcccgttccgctctgaagcgctacccgctacttcttcttctactaccgacgccggccggcctttgagacgaaccctacatcctgcggcggccctgcctctcactctcccttttctcctctggaaaccccgcctccggcggttttcgaatacttgatctgacattctgctgggtactattccttccgcggctacggtcctgcttgaatctggtacgtcgctg

SEQ ID NO: 201851 - DNA, 368 bp, Glycine max
  unsure (1)..(368): unsure at all n locations
tgttttattctggggagttcggtgttacgcgggtggtgggangatgtcgtctctggtctcgttaggggagggtccttccgctgcgaatgagttcccttacttggattgaaatgaaagtaagttatatggtggtagacttattttggcttgcgctgccgtgtttcttcggcttggagcggcgccgtagagtctgttgctgaactccggggaataataattattgattattcttggactctgatgttgatgtaatattgtttggttttatttaagattgtttttcatggatttgtgattaagtgtatttgatctgttttgttggcgcgggtgtgtttattttgagtttatgtgattctctatatgttgat

SEQ ID NO: 201852 - DNA, 328 bp, Glycine max
gaaatagtatacgattttcttgggaattgtctattacaacatatgtaatgcgaataatatgattacctaatgatatggcagattgatgattattactcattatggaattctcaagattgtatgttgcaattctttccctatgatctgaattagttaaggatacattacatatattgaggcaagtgatacttatcccaattgtatgattagataacggtttcaaactatccatggtgatgacaaagattagggattgttttgaaaactgaattgacttaatgtctactaatttttatgaattcttgagctatcatatatttttttggaa

SEQ ID NO: 201853 - DNA, 216 bp, Glycine max
tgggctcatctcttttaagcttttcgggctggagtttttttcgtccctgggcagattctgtgccgtgatggctctttttttctgactttagcagtctgactctctatttgatgcctttgtgttttcgttttgcatctttcgttgttctgatccttcgtcacttcgtcttggttctttccttctcttcgtcttttccttattttcgccccccccccc

SEQ ID NO: 201854 - DNA, 392 bp, Glycine max
  unsure (1)..(392): unsure at all n locations
agcttggtgaaggcgttgggagggcaatttggcttcaaaaggaagctcgagaagcttctgccagaagtcagaggagagagggatggactcgtcaccgacgaagcttccgacgagatgctccgccgtgtccggcgttgacaacgccgaacccattgacttgttctgattgaaaaaaaaaatggttttttttttggcggggttcaggaaaacggcattgcgcggaatcacggtgagatgcgaaaagggtttgaggtgggttttgaaaatgaggagagttggtgcagcncagacacaagaagaggaggaagaagcaagaaatggcttctaaaccaaggcttttgtttccttctcaacaaactacttgtttgttcaatgactttttagttttggat

SEQ ID NO: 201855 - DNA, 361 bp, Glycine max
  unsure (1)..(361): unsure at all n locations
tcggcttgtgtccggtgaagttttttccctttagaatagtggggatttgtatacgtggttattactacttgatattattatcgtgatattgcttcgtggtttttctacgtgatatttcttcgtggtattattatgtggatatttacttcgttggtattttattattgttggtaattttctgatggtggtaatttagttaacaatcgtagactattaccctcgtggactccgtgtttattatttatattattgatttatctctcctttggccttcattgtctggcggtgtattatttaacgtttatgatattactactnaaatagctggcgccgccggccggggtggggggcccggtctttt

SEQ ID NO: 201856 - DNA, 404 bp, Glycine max
  unsure (1)..(404): unsure at all n locations
agcttcaagattagttattataaaatgtttaatggttagcctctcacatttgaaaatgaattaaagttgaaaaatatgctcttaatcaagatagatggcaccaaagtgaaatataaagtttcaatgcaggccatccataatattcagtgttccagacaggggaaaaaaaggatatagatggaatattaacttgttctgaattttgaaaaggaggcaatgaggataagctnttttttacggttcttattaaatcccatccccttccataagctaaaatactctttcatatacagtgatatggtcagacacaaaaaaaagtggaaaatattcaagtgtaacacacattgtatttgaaaagcaacaactatctttaaagtacaaacaagcaaaactaaaaatactac

SEQ ID NO: 201857 - DNA, 445 bp, Glycine max
  unsure (1)..(445): unsure at all n locations
agatctcgtgtgttgtcgcttacggaggcgtattggggccggtaggcgggttcttaccggattcttgtgtcggaaccggctgggttcgagcgggaaacggaacaacctcacgcttctttagtcgggcgtctccgtcgagtcaggatgggctccttgacgangtgaaattgaggacttcttgccgggttttccggtggatgtctggcgatataaggcaggagctgaggggcagtgcatcagccggcgcgtgcagttacctgcagcctgggggccgggatatgacatgcttgcctgaggacgtgaacgaatcgctaggctcatttgggggcgtttggggatgctttttgagacggactgaatagagtgacgactgttttggtaggtgattgttcttggggttagtgtttgatttagtttgtttcagatcctgcctgtgatttgcggt

SEQ ID NO: 201858 - DNA, 399 bp, Glycine max
  unsure (1)..(399): unsure at all n locations
agcttggaggtgttgatgtggacccggttgctganaggaacgaagataagggctacgtangagtgcgtgagcttanttgaaggtgggcaactggggatggtgtgttcatgttttgatttgtggaagtgggagatttgatttgtgccatcgcccgatcgccacctattaccacatatgacaggtgccccataatccaacaagcttgatgtgagaaaagcggggaagagtcagtcttcctacttttgttngttgaccacagagtggtacctggagatatgtcgtgggggtcaagagaccttgtggacgtcaggtggggtgctattgcccanaaccaagctagaccaatcccgacccaacccggcataatcagtcagtgagaacctgtgacgtacctaaaca

SEQ ID NO: 201859 - DNA, 463 bp, Glycine max
  unsure (1)..(463): unsure at all n locations
atctcgtgtattgtcgctcacgngtacgttagacggcggtgggttggcgagtgggcgtgtaggggcgatggtgttgacgaattgnggtttttataactctgcggcccggtttagggaggatattgaaccagacgggtggttagcttttggccggaaatagtgccgggtgctgttggttggcggctttaggctttgtctggttggggtcttgaagggcgatttgggaaggtctctgggtcagggcttgaaagttggggggggcgggtgggaagattgggattggcggaccgctcattattctgaagaagtgcggtggcctgattgttttgccttatgtagtttcgttcgcgtttatacggatttcgtcactcttcttcgtgtgattttatcttatgagggaatgatctcaaaggggctttgattngtagggactgatggtgtgnacgaagctgtggtggcggtt

SEQ ID NO: 201860 - DNA, 340 bp, Glycine max
gtatatctagacgctcgaaattcaaaacaaaagctctgagcaaattcaaacgaaaataactttttactcgtatgtccgattgtttcccgtagtatatcgagaccctcgtaattgaaaccagaagcccgtagcaaactcaaacggcaataaattttaactcggatgtccgaatgaatcccatgatatatcgaggcgatcgtaattgaaaacagaagctatgagcaaattcaaatgacaataactttttactcggatgtcgcgatgagtcccgtaatatatcgagacgctcggtattgtaaacagaagctctaagcatattctaacgacaataactttttac

SEQ ID NO: 201861 - DNA, 421 bp, Glycine max
cgactggccgatctcgtgatttcgctacgggaggtgattggctagagcgcatgtgtcgtcaaatctcttgcgatctgccatagttttaggtggatctgagattgggacgctgtactggcaggagcttggtcatacagcgtatgtgtggtttaatggctggcgatctgccatagtttttaggtggtgcgggggtggggacgctatacggcgaggggcttgggcatactgcgcatgtgtggtctaatcgcttgcaatgtgccatagcttttaggtggagcagggaatgggacgtcatacgggcgagggcttggtcatacagcgcttgtgacgtcaaatctcttggaatctgacctagtttttaggtggagcagagattgggtcgctatacggccgggaggctgggtctacagggcatgtgtgg

SEQ ID NO: 201862 - DNA, 283 bp, Glycine max
atttataaaaaatggatgttcacacaatttcaaatttataaaaaataaaaacgtattttagccttactaaaaaaaccaaaatatgattttaatgtttggttggaactgtgattttggtgccaatatgagaatgaaatgtgccacgtggccttaactaggggacgggtgacaagaattccaattatttatcttttttgttgttgctttcacataaattacagaaattaatatcaatatcgggtaattcaaattattcgggatataattattataataattaata

SEQ ID NO: 201863 - DNA, 418 bp, Glycine max
  unsure (1)..(418): unsure at all n locations
agctttcaactttncaaaataacattccttttgagcagcaagataatattatcatcagcttcacaaccaaatctagtaaaccataatatacataaacctttagtttgcccacatatacaggaaatgatacagttttaagccatctgaaaagaagacagtagtatgcaaaaaattacctctaagaaagaaattcagtcccaaaaattgaaaattgttacacagagaattacaataaagttcaatgtaacactaccaagattgaggagctaagcgatcagttgaaatcagttcctgtgccaggtaacttagcttcatatcttcctttaaatgctgcaccagatataagtcagttcgtcatgtagtaatcatttaaaattttaaacttttaagtggggggaagaagctaaaagaaatacag

SEQ ID NO: 201864 - DNA, 280 bp, Glycine max
ggggcatgggaagattcctccggttactgtcgaggatggccatgagccctgatgatgatggacgatacagggattttaataggttatgtgtagattgtgactcatgatgtggaggataccttatttggtgatgtgcaggatatgccgttggagtatctctggggagaggtgatagtcggacttgactttttttaaaacaggactacgatgggcaccttgcttgcctatacgacggaggaactgatacgtgaagattttgggttgcgatttgtgtttgtat

SEQ ID NO: 201865 - DNA, 369 bp, Glycine max
cgctcagttagaacaaaaaaagaagtttttttctttccacaccaacacagctatcaccttactttcaccccaatgttaattatcaaacggcgcccgtccaatctataaactcaaacccatgtaaaaatgctttaaaactacttattattaatgtccaaagcaacatagtatattcttgtatcatatctacaaatatttaaatacatacaagggcatatcaacatgatttctttttattatacccatatgtgaatagtcgaatcaagaccattgaactctatcacgaaataaaagactacaaacacaatcctgtcatcttttaagcgagaccgacatcttatattcacacttctctaaggatcaataaac

SEQ ID NO: 201866 - DNA, 340 bp, Glycine max
  unsure (1)..(340): unsure at all n locations
ctatattctgtgaaagaatcatattacaatacctaaaatcaattcaactccatattaacttttgaaaagaagaaaattgacacaatacatatttatgttccaaaataaacacgtaatgttgctgcgggtttttaaaatataagagaaagacattgttgtcacttcacttaaattgttgtatgcatagaaatggtgctggagcacctagcaacaccatcttattctgcaaaaatggactangcccaaaatgagaaaatggtccatgtcttaaaaaaaaaggtgttaacagagattcttgtttatttccacatccaaaaatggctacgcacaaatgaaaaaa

SEQ ID NO: 201867 - DNA, 357 bp, Glycine max
tgtcgttcgaacgttgggatgattacgagaaataatggggggagtcgacgatagtaaattggaaaaaggtccttttgagtcagagcggtgaagattcttccgggttcggtgagaacgtgcggtcgagggggcggggcagacgggtttcgatcgctgtagggattgggatgggggacggggattctgggagtgggaggggtcttttgcgttaacgtgctgagattgcaggggagatttttggatgcgcgtggcggggtcacggggtggtggtatcatgctgaggaggagaggtatttttacgggtttttggcgttctggccttgacagtcccccggcgtgatttgcgggcggtgtagg

SEQ ID NO: 201868 - DNA, 297 bp, Glycine max
  unsure (1)..(297): unsure at all n locations
aacccggaagtggacccaccttcttaaaataagttatttcgacagtggaacattgattgtatgtccttccaccaaaagtgctatcaaactgttaatgggcctactattatattgcagatggagtcaatttgattgtgaatgaatgatcaccttctttgtttatgaccttgaagaagggatatagagtggaaactatcttatcattaagagtgcttcaaaaaaagaaaatggattttagcntgtgcaacatttcaacaaacttcattgtgccaatggtttactgagaaaaaaatgaaa

SEQ ID NO: 201869 - DNA, 470 bp, Glycine max
  unsure (1)..(470): unsure at all n locations
tctcgtgtcttgtcgcttacggcggtcgaagctccggatgtagactagcagttcgacgtgacgaggcgggctggtgcgaagtaatggggactctgccgtgttacttctcttttgtgagttagttgttgtagggtgggtagatgtttgcataacttgccggtctgattcgtagggcctcaggattgatggtttttagattgtgcgactcttgctagcggatgggagggtagtcgaccagggttggtctggccgtcggggggggccccatttatttggttgtgtatactcttatgctattttacgggagtagggtgtctattaccactccaatttcggattggcgttactatagggtgcgagcggttttctcggatttacaggcagcctattnttctgctgtgttgggtaggtttgtggggaggggtagggctgctgtaccgtcggtttaaggangttggggatcttggtgg

SEQ ID NO: 201870 - DNA, 363 bp, Glycine max
gtcactttcccttctggcttggcttgttgggtgataggttcatgccaaatccttagagtataaatagtcttccattatcgcgtttccaatacatgtaaaattaagtagctagcttgaacatatctccattgtgagtcatggctccctccatcttgagttacataggctatctaacgaaactaagaattatcgtataccgaaaatattaccgtagttaccgaacaagtttttccttaaccaaatcttttccttacactttcacactcccacgttttattctacaacacaagaatattccttttctgaagtggatgatcagataaccgccccaccccatatcatcttcaaattttctattaatac

SEQ ID NO: 201871 - DNA, 358 bp, Glycine max
ggggctcctcagtccgagaccttggcggatgccgttttctgcaattgtctcggctgggatttggctgagtttttcggcggagacggtgtcgggggccgtcttcggggcggggagacagctggggggttggtatgatcgccggattatgttcaggccggtggcttccgactctgttcgagtgtgtgatccgtcgggtggctgggatcgtagcctcggatcttggcgtattttgtgggcttactttatggggtgacttgtagcttagtcaggtttagcgtggggctgtattttagtctggtgtttcttgactctcataaggagcactggttcctggtctgggtttgtattcgtggccgtt

SEQ ID NO: 201872 - DNA, 419 bp, Glycine max
  unsure (1)..(419): unsure at all n locations
acctgaggcagcaagcttaagagggaacaagaacatccttttctaattttaagncnnccagcgagagaaactcaagtcaagatctttgtgtaagaaatatgtcattattatttcaaccctctccatagagagtgactcacttctataaaaacttcttaactgatatagatcttaaatagaagtgatatattgtaatcttctgagtgaaaaccctcttaaaaggagaaatatgtttttggtcaaaacatacgaaccctttattgttgaaagtccggcaagtggctgacaaaggtggtaacaagtggtgttgttggcttaccaatggctacgtatgaaatcctgcaggattgcttgtaggttgttgaaatctactggctggttggtctaacaatgactactcgtatagtgaaatcttattt

SEQ ID NO: 201873 - DNA, 488 bp, Glycine max
ccgggagcgtggtcaggtctcgtgtcttgtcgcttacggatatcggcttatgcgatacgtggaggccggatcctgggggtgagattacggctgggttcaataaaatagcggggctcggcggtttcccgttcgggaggagcgggaattacgtaacggctggtctgaggaggagatgagggttttgggcagtgcgtcgacctgatcgtattcgtttgttgtgaggagggggcgtattagggtttaaggtttttgattggcgggactgaggttttctcttcaggtgccgggttggggtcgctttggattagggccgtacttttaggtgattgtgttcttagggttagggccgttctttttggtgattgtgttcttagggttaatctggcgagtgttgtttttgggagctccttctgtgagtgggtgtcttaggagagctctcgcatgtcttgtgtggtttgcggggtcggcgcttccctggggtcgttgtg

SEQ ID NO: 201874 - DNA, 271 bp, Glycine max
gcatgtaggacgtattggttggttgtaggtttggttatctcacggtgcggagtgtggttcccgtcgatgatgttgtttgtatttgatgaatgatgtctgatgactgatgctgtttcgtttctgactattctgtgtgttgtgacgttggggggttttatccgggatggatttgtgatattctggtgcggttgttaggcgggccggtctcggcgccgatctgggacttctgggggcgctggcgagaagttatgcactgtagaacagaagtggc

SEQ ID NO: 201875 - DNA, 420 bp, Glycine max
  unsure (1)..(420): unsure at all n locations
agctnttgtcactccacccgaatctggtttttaagttaaccaaagctagcacagctgataacctactaaagcttttgcatccaacatacaacggcgtttgcgcatctgtttgaagagcatcgtaaatatctgcatgacattcccgaaagccctcttgcccaagatcacgtatcatgtcttccatgagatctccgctttgtagctcaactggatgagatggacatgttgttgtatgaccaaccaactcaccatgccatatccactttgtgtacgtcgggctaaagccatcacatatcagatgcgatctaatgtcatccaatgaatgacgcctcccgttgacacatttaacacaagggcaaaaaaagttggcatctgtgggtgctgaatgtatntgggcaaatgacaaaaactcttcaaccc

SEQ ID NO: 201876 - DNA, 450 bp, Glycine max
  unsure (1)..(450): unsure at all n locations
gatctcgtgtattgtcgcttacgggcgtggcgttgggtatttgcctgattgagtcccgttgagcgattagggtgaaatggttatgaagctggatccttgcccgtggggtgatgggttcttttggaccatagattaagagtccggggataaagactcgatggatgatggtatttggggtgggggcgtgactgatgacccaccaaggaagggactccttccttactatgtgatccaattaacggcgggcctaggctggaacggggatttaccactgccgcctggtccggtggaggcactggggacggccgtatgcggctttccggaccctgagggggattattatgcgctggagctgagaatccgggcggtttaagggtctntggatggaaactctctggaggtatgtgcactgactgttaactggacttggattgaccccgggtccggtgc

SEQ ID NO: 201877 - DNA, 334 bp, Glycine max
gctcgtcgtttcgctttggcgtggacctgtccggcccggcttctgactggtcgagttgagactaggggccctctggccttacccttccgggggcggtagggctctacctagtgtgctccgaatcgagggctgttggggtttactccgagtagctcttatctggtgacttatgtgtgctcgtttgctgctgtactcttgccgaacatggttttgtgaaactgcgctttctggtttcggactggatgtttgttttgatgtgcgctcttcgattgtggttcggtcttgtatattctttctgatctgtctgtggtcgtctcggtgggccgtggtcaat

SEQ ID NO: 201878 - DNA, 255 bp, Glycine max
atgatcggaagatatgaccaatgagatcggaagcttgggacaaaatttttaggaaggccaccacggcaagttctcagaacgagagacaatttaaggtcataaaaataggaggattgcttgcatcttaaattttttgaggacattttgccagccttatttggatcaattcccaaaagaattgaaactgaatcacactacaaaaaattgccgaactttgtttgtaaacaaaaaataccaacctctaaaaaaaaaact

SEQ ID NO: 201879 - DNA, 348 bp, Glycine max
  unsure (1)..(348): unsure at all n locations
ctgcactactagcacgtctacttttttatttttaaaatttgaactaaagtgatgcctcggaggggagtggactgtttgntcaagggggcccttattgttatttagtgaaaactcatagtgcaccctaactcccacctataaaaagcttatgccttataagaccctcaaactggaacataccttgttcaagaattgtcttctaggacatcatcattagtcattaagggaaagcagttaacagaggctgcaaagggagagtcctaagaattccattgtataaatcaaaaggaaaacaatgggtactgagcctcttagaacacaattgttgtcctagactaaatttagatt

SEQ ID NO: 201880 - DNA, 376 bp, Glycine max
cgactgacttatcagttattgattttgtgttctgaatttattttacgaaggtcccgcctcgttaacgcggggttcgctcgtacggatcactgcagcggaggtggctcatgcgctttataggccgtcggcttagatcgcggcgcgtgctcagacgggggtgccgcctggtctgactcgggatttgtgtctgggggagataagaatgcgggaggcgccgatttctctgtttacgttgcggcgatgcggcgtgaccctgcgactagtgcggggggtcctgagcctcctgagtacggaggtgtgtctgattgaaacaaccttattgatataattgagctactgccgcgggtgagcgtgatttgatttgctgcgaattgtg

SEQ ID NO: 201881 - DNA, 350 bp, Glycine max
tcaaagaccctatttatgggcgccctttacggttaaaacttaaggtcatctataaaaccatatctataaatggtcctcgaataatccatcaatttattattcaaataaattagttacgccttctattaaagactctcatttattgttcaaataaattatcatgtctttaacacattgtttgacaattccaaactaaaagagtagattacaataatatcccctaagatttcttgaaatcacacatagtactcctaagttttacacctacactaaacccctatctttgttgaagaacaatattttgacacctgctcaaagtaattacaccccttaatggttgaagatatata

SEQ ID NO: 201882 - DNA, 273 bp, Glycine max
gatcctgggattgggcgcatatactgccagggagattcgagctacagcgcgtgtgagatgagaccgtttcccacctgacgtgggatttaggtgatcctgggattgggggctcatccgggcatgaagacttggtctgcagcgggtgttttgtgacccgcattgcaatccgcgatagattttatgtgattgcgggcttcgacgctttactggctggaggcctgggctaccacgcccgttatgacacgcgttctcatcccgcaaagtttagggatc

SEQ ID NO: 201883 - DNA, 450 bp, Glycine max
  unsure (1)..(450): unsure at all n locations
agctngacggatttaggagcatgggatacaacttctcttttaaaagtgggtcccacacggatgcctaattttcaacttacctatttggaagtgacatcatggcagttatgtcccagctttccattgtggattcaggcacaaaacaaacttaaatatgtgggactatctaacacggggagtttccattctattcccacttggctctgggaagcacattctcaggttttgtatttaaacctctttcataatcatatcccgggtgagcttgtgactacaataaataatccaatatctatccaaactgttgatctaagcccaaatcacttatgtggtaaattacccctattttcaaatgatgtgtatgacttagacctttcaaccaattcattctttgaatccatgcgagaatttttatgtgacaatcaggacaagccaatgcgattagaattt

SEQ ID NO: 201884 - DNA, 355 bp, Glycine max
atctcgtgtattgtcgcttacggcctctgtcggatgtacctggcgtctggagctactttctgtgcggggtgcgtgttgctccgcctaacctcatgtctcctttggaatatatggcccttgcgatatgaattggaggcctggaacaactgtcagctgagcttatgtctcctttggaatatatggcctttgcgatatgtattgcggcccctgattgcctactggtttataagcataagatagcttgataagctggactctttgatttattcatgggacctgtccggctttgttggagcacgcttaggttatgtgcattgcggtgtatatggcccatgcgatataaagtcgatgccag

SEQ ID NO: 201885 - DNA, 432 bp, Glycine max
agcttcaacgtgataaactcttattttattattcctttaattaagtttattaaaatagaccaaatattagtctagacagtagatgatgtattctcacctatgacacgttggataaagtaacgcgtgactctagtagacttgatgtttactaccacaccaccatcttttatttttaatgaaaatttataattaatcttgtagcaattgtaaaatctaattttgcattactaggtaactctattaattagataataaaataattaaacctacttttggaacaggaattgaacatgaatataaatatatattattaagtaaataggtgatatattatcacttactcattctaaagatattccaaagggatatttaccctttcaaattaacttctctaaagtgatgagacgtataaaacgtgaaagtaaaattata

SEQ ID NO: 201886 - DNA, 444 bp, Glycine max
  unsure (1)..(444): unsure at all n locations
gggtcgcgangacgcgacgtaagggccttacaggtgtgtgttgatgtggtttggagttccggctggagtcgagcttctgggatatcgtgggggcgcgcgacttttctggggggcagtttgcccttcaacgtatcgagagactttgagtcgtgatttagaagagcccttgggctcttgatgcgttcaaggttcataggcttaagcggtaggggtcgcgatgtatggggaaagagcgacaaatttttatttttgtgttctgccctggcggcagtttcgttgggttttttgtggaggtgggagtttgtttgtaggggtgtttttgatgatatgctggtgttggtttgtttgtagatatttgttcgggtggttggttttgttgaagggatatattttgtctttatgtggggtggtggctgggatgtttttgttttgtgtaaggagggg

SEQ ID NO: 201887 - DNA, 429 bp, Glycine max
  unsure (1)..(429): unsure at all n locations
agcttgctagagaaagctctatggtagggtttatcttttgagctccaatgagggtccttcaatggtgattttccaccatgaagatgcaacggaagataaaggagaaaaggtgaaaggaggccccatccactagggaataagccatggaaggaggaagcttaccaccaaaagagtgccctggataacaagcttaaagaggaagcttctttggaggaaaagaatgataaagagagaggggggcacgaaattgaaggataaaaagagggagagaagctgaactttgaagtgtgtctcacaagtttcacattcatcaaagttatgaacaagtgtacacatgcttttatntatagcctangtcactaactaaatgagagcttccttgagaagctagagcttagctacacacccnctctaatagctaagctcacc

SEQ ID NO: 201888 - DNA, 162 bp, Glycine max
cgtgttcgttccgcttagtatctttgggtgtgtcttattgttctagtgggtacggtttcttggggccttgttgtggggggtttttggttttcataggtagtatttgtgggggtgattttgttttgggttatttgatattagttgtggtctcgtggtctttgt

SEQ ID NO: 201889 - DNA, 390 bp, Glycine max
  unsure (1)..(390): unsure at all n locations
tcaagcttgtccgcanaaatcactaaaaaatatattttactgtccaacgccttaaacggtcctctttgcttttttatcagttaacatggaccgttcgaaagcgtaaaatcaacacatcactgccttttgaaagaactacgtaggtctaatttcctcttcgatggagggtacgtatgagcaagagccccgcttttgtcgacctcaaaaataaaaaagaaataaaagtttagatacataatttcacacaattctaatctaaggctgttgtcctttgggacaaacgtgagaggtgctaataccttcctcaaacgtaaagataactcccgaatctggaatattcttcatgaccgatttccttaggtttttctaacgcttttcctttcaataaac

SEQ ID NO: 201890 - DNA, 288 bp, Glycine max
tgagtgtctgatgggatatagctttttttgcgtctgacgacggcttggatgtaccggacggctattgttgggtatggacggcttctttcttaccggagggctatggccgttgatcctaccggaccgttttcttagacgggctatctgactcacgcgaagtgcgtgtcctattagagtgcatgtccattatcgaaggattttgacgagattttaagggttggattgggcttcgagtgcatggcctggaggagtgctgtcccctccttcggaattggttggcctagtgtt

SEQ ID NO: 201891 - DNA, 381 bp, Glycine max
tcagatctcgtgtcttgtcgcttagcggggaatagtgtttctgaaatccttcgctggggtggggggtttaattaggcgtgcgtagcttaagcgatatatcctgtcttagggccgttcatgggcgttggtgagaaacctggttagcgtgctgtgacgatcttgtaccatattaccctgattgcgcggcaaaaagaatagttagagcgacctgcaccggaaccggaacgttcttacaaaattaggcggatcgcccaggctaagttatactttccaagcctgcctctgaaggaccgcggaagagtttatagcatgctcccggccgcgtaccgcgggggccacagtgtcggatactgtcgcagccacatggcgtgacgcagaaac

SEQ ID NO: 201892 - DNA, 323 bp, Glycine max
tgatcgaagccgttcccgaattaaataaacatgaaaatgccgtaactaggaagtgatcctaattctttttccaacgagcagtgaccaaccaaatgttcataatatacttgcagtaacagtaaccaatgggggggggggtgttttgtttgtgattaaagagcagaacaagtgaactggaatactaaactactaattttaagaacgggttggtttctctaattataagccactctttattctagttatggaaattcttcctaacagtcaacacttaatcaaccctatttatttactaacgaaaataacttagggtttaatattga

SEQ ID NO: 201893 - DNA, 231 bp, Glycine max
tttgtggtgctttgggcttgaatgagtgtgctgacgtgctactgtgtggtctatggtttgttgagtcggtttaggctctcttggcaaagttattgttggtccggtcggtttaggcgaacgtgcttttgttgacgggagtctggtgttgtgtgtttctgtttctgctgacttctggttttggaagagattctttgtgtttgcttagacctggatttttacgatttcggtcga

SEQ ID NO: 201894 - DNA, 415 bp, Glycine max
  unsure (1)..(415): unsure at all n locations
agcttgcaaaccaaatgctcatcactgctataggagaagcctctcaagttgttcatataaatctcctcctctaaatcaccattaagaaagattgttttcacatccatttgtttcaactgaaggtcaaaatgagaaactaatgcccacataatacaaagagaatattacttatatacaagagaaaaagtcttagtgaaatcgattccttctttggagtaaatcccttagcaacgagtcttgccttgtatctctcaatgatgcctaatgaatcctttntggtcttaaagacccatttaataccaatatcctttaccccattagacaactctacaaggttccaaactttgttactntgcatgagaatcatcttatccttcatggcattataccataaaattgactcattgccactcat

SEQ ID NO: 201895 - DNA, 414 bp, Glycine max
  unsure (1)..(414): unsure at all n locations
gatctcgtgtgttgtcgcttacggcggaataagggatgaatgccgccgcggtgaggtgaggtgtgttgcaaaccctgtcgcgngttcttggcggacgcgcggtccggggcataaggcgtgtgcgatggcgaaggagacctattggggtcgtcgttgtacttattatgttcgaatgattagtccccctcgtggccggttgggttttattttgttttatgctatggcgggcgctgcgcgaatagtgactgctctgcgggatattgctttaggggggctataagtttcggctaggcttctgcgcctaggcctagttccagtatgagagaaattgctcgcctcttctcgggcggtggcagagagaggggtttctgttctcatgctgtgctgtctgtgcaaataacacctagagcgtcc

SEQ ID NO: 201896 - DNA, 408 bp, Glycine max
  unsure (1)..(408): unsure at all n locations
gcggcatgcagctttatattatatactcacaatttcaatgtttctttgggacggactaatgtaatttttgacttatgataagctacttttttaaattactcggaaataataatttgttgcattataaatattggtaatataaaatttattttttctcaaaattcaaaaataaacttaaagattgaaagttaaactntcattacaatattatttaatattttcaatcttttttatgatagtttaatattttaaatactataaaactaaattattttctaaacgatctaaagtaaccttacgatgcttcaaattaataccacatacagtttgaaaataggactattttttgtattaattacattttagaaaaataataaattcgtatatgtacaaatattttaaaaaact

SEQ ID NO: 201897 - DNA, 348 bp, Glycine max
  unsure (1)..(348): unsure at all n locations
gtggtttagatgttggggggagaatagccgaggctggcctggccggactggggtccgggcgggccgtgggcctggttgactgcccttttgaataggcgggngatggtgatttaactgagggctgtagctgtcgcgatcctctgggcgtgagggagcagtcttttggtggctgagtggatgtattactaggattttcctctgacctcttagatggagttggatgatttggaagtcttttcggattacttgaacgacatactcttggactcttcagaaatggctacgaggacctcgacgctgaattgctcttggatattgcgctggtgattgccggctggtatatgacgg

SEQ ID NO: 201898 - DNA, 398 bp, Glycine max
  unsure (1)..(398): unsure at all n locations
agctntgattaattaatgagagcagggttagtatatttantttgcgaannatttccgcgattcatatgtcaacggccaattaaaagactaatatccgataagaactaatttactccctgactcgatttttccatgttggactttaatttattcaatagatctcattaatatgataaaaaaaatagatttcattaattacttcctctaaaagtttctaatagatagttattataacatcttatttttcgtaaaataaattaaaaatgatttttatttaaaataaatagaaattgtaaaaaaatatcaagttttataataaataaataaggagaaaaatttattaatcaaatataattgaagaaaataaaagatgtttattattattgattgaataaata

SEQ ID NO: 201899 - DNA, 371 bp, Glycine max
gcttatatagtatagtaacatttttttatgtttgatttttaacctaagcgtccccttttattattccatttcaagagattgcatattcaccaatggggtttgttttaattctctgtcccaaaaggattaagtgcactgattaaacacttgatatgcacttaattatatatattattttcaatagaaatttattatatgaatttttttcaatacagacttattgtaaaatttaatgaaatatcataaaaaaaattttgataagaaaaatgttaaccaatgtttatagctttacatcccgtgtcatttatgataaaagagaaagagaaagaagtttttgggatacacaaaaaaaacagtgctcttttataaat

SEQ ID NO: 201900 - DNA, 398 bp, Glycine max
cgcgtgggtcctccctctgaatgcatgactcacttggtggtggttggcggggtttggtctcatcgaggctcgaaatcgagcttggaggcctgtctgatcatataaatttggtgactgtcgggactatggtcggatctttatgaaagacatattcgttgactgattcctggtagaggtcggatgtgggatgtttagtgcttagaacagtatggcggttggaggtactctgaggagtgagagcgcgcgccgggagttcgtatgggtggggtcggggagggccgcgagttttttttgttctgcggtggctgttgtgggggtgtttagggggggcgcttcggtccggggccgcgcgggcgcggctgctggttggctggttggttcgcttggctgcgggtggt

SEQ ID NO: 201901 - DNA, 449 bp, Glycine max
  unsure (1)..(449): unsure at all n locations
agcttantnaatatggtccaatgaaagatgtgaatttttttcatgagaaggcaaatgggaagtcgaatggctattgtcaagttgaattatttgacccttttgctgctactacttgcaaggaagggatgaatggatttcttttaattttaatttaatttttcatttaaatttaattttaatttaattaaaatatgatgttatatcagatgacaagtggtcagcatacatgtcacacttaatctaacgtgatatcacaagtagttggtcgacgtatcaaataaataaccacatcagcaattaatggattctttttaacgacagagacctcatacaaaacttttaaatgatagtgacccatctcacaatgaaaaatttatgaggaatcacatgctaaattcaagtatatatcagggatcaaaaatatatttaaacttattttctatatggag

SEQ ID NO: 201902 - DNA, 429 bp, Glycine max
gtattgtcgcttacggtccttcgttacgtcgttttagtatgtttttgtctttttctggcggggcgttcttggttcttcggagatttaggttttgctctagtttgtcggcttaatgtgcttgcgttgatttatttgagctgagtgtataactgtactgttaggtctttgtgtcctagttgactgtcttcttcttgggctttggtagaggcattgctttctgtgtttgtccgataggcataacggctactcttggatcggggctacttgatccactgatcgtcgggattgggctttctagttcatcctcttatgcttcttgaacgttttgcacgccgttgaattgcgattttgtggtgaactactgttgggtcgaggtactttggtttgtttttttgacgtttgatctgtgtttgttgtgtgggatggcgg

SEQ ID NO: 201903 - DNA, 348 bp, Glycine max
  unsure (1)..(348): unsure at all n locations
agctngtaagattatggggtacccatcattgtggttcttgtggcggncgggcgaaggtgcacnaacaagttttcacatccacaaagcgcgcataaacccaccatcccctgttgcccacctccatctgagctcacgtactcccacgtagcccatatcctcgtttctctcaacaccgggtccccatcaatcctctcaagcttccacaacatccaagcaaaacaacattcaaacagcacaatctatcacagccaagaaaacagagcaaaggctgaaaactctgccaaaacaccaaccaaaatcacagcttttctcacgtaaagaccacagtaacaattccttcgatccaat

SEQ ID NO: 201904 - DNA, 173 bp, Glycine max
tgacgggttggataattttctctctaaatatatttatgtatgaaaaatactcatttggattgattatttttcaatatattaggattcgggataggagaggcgtcttatcgcgctggctgctttaggtcttcttagaggtctctgacggcgtgagtgtatcgtgagtacgggcg

SEQ ID NO: 201905 - DNA, 311 bp, Glycine max
atctttgacttcaatgaggtccttcaatggtgaattttcaccatggagatgcagcggaagacaaaggagaagaggtgaaaggaggcgccctccattaaggaataagccatggaaaaaaagagcttcaccaccaagatgagccttggataagaagcttggaaggatgcttcaatggaggaaaagaaagagggagagaaagagagaggggggagcacgaaattgaaggaagaaaaagggagagaagttgaactttgagttcgtgtctcacaagactctcattcatcaaagttaccacaagtgttacacatgct

SEQ ID NO: 201906 - DNA, 384 bp, Glycine max
  unsure (1)..(384): unsure at all n locations
gtcgagtttgcgaaatcggtacctagagtgttagcgcgtctgtggaccgcccgacccagtgtgatgcacgatgtaagacggctctggatgatcggcctacgtagaccatcgagatttatagggattatttgccgagatgaccctcgaaataattgattacctgtgcggggcgcgaaaggcgtgcccgcctcatcttataggaccttaagtagattttgcgctgctcttataggaatccagagtttacttttctgattgaaaagtagcaatagtccttcattagagggaatgatttgaactttaaccggaactttgcttaacattgaaacgngcgggtggatctgcggaacacggtgatggggaataggagccgcgggccttgtg

SEQ ID NO: 201907 - DNA, 339 bp, Glycine max
  unsure (1)..(339): unsure at all n locations
agcttcttagttacagatgatgctgatgattttgtanctacctcatgtactcctctaatgactatagcatcatttctggcgctaaactgctgggagttggaaaccatcttctcaattaaatttctggctttagcaagagtcatgtctccaaaggctccaccactggcagcatctatcatacttctctccatattactgagtccttcataaaaatattggagaagaagctgctcctaaatctgatggtgagggcaactggcacataattttataaatctctcccagtattcatataggctctctccactgagttgtctaatacctgagatatccttcctg

SEQ ID NO: 201908 - DNA, 307 bp, Glycine max
  unsure (1)..(307): unsure at all n locations
gtttcttccgcnanggcaagagccacagatttgctggaggataataaccagccggatgatatatttgtgtttgaggataatctgaaagagcttgaaagcatcattgaacgcatgaaggccatgggaaaaactggttacgtgctgttcagttgtaattttctgtggtgctaacttacacttttgtgtgataaacgcaaactttcatgattgatgttatcttaagctctaatagccgaagtttgataactttgcagaggatatgttcttaaatttattgctattactgactgttttgcataatatgagt

SEQ ID NO: 201909 - DNA, 397 bp, Glycine max
gatctcgcgtgttgtcgctcacggcggtctcgctgtgctgtggtgattacgggggggccggagggggtggcgcgagattctccgggggaataataggcgagcggttccctcgcggaggcggcctctgcgggctttgcgggcggttatgattaacctaggccgctgccgctgctttggcggatgttattttgggagcctctcgctagagcgggatcttgatccttgtgataaaggccggaatcttacggcggtctcggtagacgggaatcttgatccttatgatgatgcgggttgaggcctttttaggcggcttaaatctgaggagcttatggcggcttatgcgttctggagttctgagaagcgcctgggaggatctttcggcgcttttgggagctgt

SEQ ID NO: 201910 - DNA, 387 bp, Glycine max
  unsure (1)..(387): unsure at all n locations
agcttaaagcctttccatttttttataggtttttncnctgcccacgtcaacaaggggagaatntataaccatctattgttctccacaacaacaaacaaagaagtcgaatactctgtttctaaaggcaaatagaggtctggtatatcttgcatttgtggtttcatacaatttcatcattccaaggtacatactttggtttcccctgngtagtgccaaaactgcaagaatatcattcaaaaacttctcaatcaagcacaattgttcaaaatcaaccactacaatgtaaaaagaacaacatcaccacagagaaaaataaattaactgcccttaaagacatggnnggaaagggtttcagtgagataggagaaccatcccatcaataatttg

SEQ ID NO: 201911 - DNA, 373 bp, Glycine max
atctcgtgtgttgtcgcttacggtggtctctggccttggtgagggtccgcggatttggggaggtgtttgttccgacggcggggctgtggccgcagctgatgggtgcgttatgtgttgagatggttgaactgtacgtttgggttaggtaggaggtttcctacaggctaccctgggtttttccggtgacggggcacctatctggggtggagcttctgttctggcccttttgttgtgttgtcgtcgaggggtgtgtgtgttcgagttggtggagtgatggcggtatgagtggcatgattttagagtgggggtttaggttgggtgactgtagtcagtttacggtcgatgttttggatgatcgtggggtagtggtttt

SEQ ID NO: 201912 - DNA, 362 bp, Glycine max
agcttctaaactttatacaagaatgaagttctgataccactctgtggagaagtggcatcagatatcttaagaaggggggttgaattaagatatcacaatcttttcttaataaaaaaaattctattttgattttgtcctaacaacccaagattcattttaaaaatgaactcctaaataataatgtaaattaatcttactgaatagaaacaataagcaataaacaataaaggagtttaagggaagagaaaatgcaaactcagatttatactggtttagccacacccttgtgcctacgtccagtcccgaagcaacccgcttgagagtccactatcttgcaaaatcctttacaagtctgaacccac

SEQ ID NO: 201913 - DNA, 394 bp, Glycine max
gatctcgtgtgttgtcgcttacggagaggccgtgaccgtattggaggggcgagctcgctggggtttgccggctgacgagcccgtgtctgtgttttctagccctcttccctctacgctcttttcctgacgctgtgcgcaggataactgggctccatactcggaagaaacactgagggtgactcattgtgcttatattgaaaatcttgagaactgacacctgctcggctattgtctcccgtgaccttaacctgcccggtcttccccgcttgccttctttttcttacttcttgcgataatgtttgcccgctcagggcggtgctttctctgacttgggtgtactccttttgtctgcttgaatttacgtatttacgcctattgatgagtcggtcggagg

SEQ ID NO: 201914 - DNA, 367 bp, Glycine max
aaaaattttcagaaacaagtcacttgaagaattgtgacttttggaaatgtatgttttgaaattaatcactagtaatcgattaccattaaggtgcaatcgattacacatcgacagatgtgactcttcatttttgaatttgaaaattaaaacgtttagaagctttggtaatcgattacaagtattgtgtaatcgactacacaagtttaaaatgatttaaaactatttaaacacaagttgtaactcttgaaatttgaaatcttaaccgtttaaaacactggtaattgattactaccttctcggtaatcgataccagagagtaaaactcttaggtaatgattttgtgaaagcttcttgtactactcaatgt

SEQ ID NO: 201915 - DNA, 292 bp, Glycine max
  unsure (1)..(292): unsure at all n locations
cgcagatttggccgcaaaaggagtctccggctcatgaacgggcgggacgtgngcacaatagcgatcgggcggctgagctgacattccgtgcctgcctctgtagcacggcggatgacttgactgcttgctcccgcccgcggacggccggggcaacagtctcggagacatttgccgcgtcgttcggggaggctgaaagctctatcgaagggttcgcggccggagtcgacccgtgatgtacgtactgacgggacgccagaacggcgttagaggatacctttcgccgcggtgtgcg

SEQ ID NO: 201916 - DNA, 361 bp, Glycine max
  unsure (1)..(361): unsure at all n locations
tactcacctttctctaatnnccagcctgtgatcatgaaattattatttatgtatattggactgggcagaactgatgttgcaattgaatgcaatatttatacacccacttgattaaattatctaatggagtatatacttccccggtggatactcgatcatggtcaccgagtcttctttgaccaaccatacatcttgaactctcacgtgatgaagtgttgttaacaagaatggaggagaataaacaaatcattaacatttgggtgattaattgaatggtttgatcgaaatgtctttcatgcacactttggctcaacaattgcgtacacctttattaatataatacaggaattacatacatata

SEQ ID NO: 201917 - DNA, 400 bp, Glycine max
ccgcgaattgtggcgtctgtgagggggggtgggcgaattccggtgaattgatgagatttttgtaggattatagagtgtatcgccgtcttgagagaatactggggtatattggttgcgcctcccgtgatgtctgaggtgcgcctcctggctggagaattagaatagtagtgtttgttgaagttataccggctggccgttgtatgccttagtatatgtttgtacggagattagcgcgtggcgttgtcggatagatacctcctgtgtcgatatcttggcgagtatctctggcgggagtcctgtcgtggtcgggagtgtagaagttattgcggctgtggaagttttgtgttccagagacgccctggtcgtccgggttggtcgtttgaccgtgcggttcgggtca

SEQ ID NO: 201918 - DNA, 422 bp, Glycine max
atgttggatgagttatacattacccatttctgttttagggtttttgtgatgatagttgtgatgtttatatgctgaaattactcatggaaaactgttagagatgaaaggtagagttaacctatggttagaaagtgagaatgtgatgttatgagtggaaaaagagtgaggctttgagggttggaaggttaaatctgaattctgtggtaaatggaggttaaagtgagttaatcctagcttgaaatgtcatttaggacttatgagaaagcttggactgtgctagagagaaaaacaaatgaccaaagtgaacaaagagccatttctagggcaaatttgggtgttgaagagtcaaattttgattcggtgagattttatgtgtaaatccagtttgaacaagtttaaatatatgttatggactggtgtga

SEQ ID NO: 201919 - DNA, 371 bp, Glycine max
ggccgggccctgggggtgcggcgcggggtcggagggggcggcggtctcttgggtgacgggcctggaatatgtgattacgttctcggtgctgcctaatgcctcgctgtacttaaggattgggataggcgaaggggagtgggcgttgcgggagattgaggctgcgggggcggcttgccgtgggggatggggctgatggtgatggtgacggtcatggattttgaatggtcaggtgaatggctgttagattgggataggcgtaggggatggggcggcttgccgaagagagtgttacattggaggagtgattcctttggagtggactgggggataggatccgttaggtagccgagtggtccattgggccgtagggg

SEQ ID NO: 201920 - DNA, 455 bp, Glycine max
  unsure (1)..(455): unsure at all n locations
cagatctcgtgtattgtcgcttacggagtcagtgtgtcttcaatatagtttcgtgtagtttgttgaagttgtgtttttgtggagtaaaataaatattactttcgcttgcattgttggccctcagaaggataatgaatgatgatgctttagtgcgccctcggaaggagttcttcttctaaggagtggcggactggtgtgtccggttaggatgcctagggggcttctctgggggactcgcgcgggcccgaattttgagttgctgtgctatggtggttactgtgttccttggtcgcctgagatcggtccttggatgatattttgagtctcgtgacgccgtggattcgggnggaagtgtagcatcttttatcgagtgtcggctgtggctacttgaggngcctgaagttttcgtggcgtttgtttgtttacatttgggcgggctggggggtcgcgggcgg

SEQ ID NO: 201921 - DNA, 318 bp, Glycine max
agcttgctctaaattacattgatgtttgtatttatgggaggaggttatatgccatttttgctttaagagtaatgtcccacaaaaactaactttccaaatgtttgccttctcaggaatggcaccgaggaagcttgcctcaaagaggtccaggaaggacaaggcggccgaaggaactatttccgccccggagtacgacagtcaccgctttaggagcgttgtacatcagcagcgcttcgaagccatcaagggatggtcgtttcttcgggagcgacgcgtccagctcagggacgacgagtatactgatttccaggaggaaat

SEQ ID NO: 201922 - DNA, 277 bp, Glycine max
atctcgtgtgttgtcgcttacggactctggtcgacgggtgtgttgtaatacttatgaagtggggcggaagtcctgatctgcttacaagtctgtgtagattgatagtgcctcttaaaacggcgaacgtcgtcttatgatgaggactgtcaggaatttcgtagggcgggcgttagaaaaagtgctgatgagtacgcctggaatacggaggaaccggaatgcggcggctgcttgaatagccgggacggcggattggggttgaactacttttgaatattat

SEQ ID NO: 201923 - DNA, 343 bp, Glycine max
  unsure (1)..(343): unsure at all n locations
tttcctcatttcttttacaagctttgaacaatatacttgtccttcatttaactggctntgggcttggcgaccatgctcaacaaagtactttcgacacctactgtacgttgatttcaccaatgttgttatgggaatgttgcgacaatcctttaaaaccttattgatacattctgagaggttggttgtcatgtggccatatcgacgtccttctctatcataagtcatcgtccatttttcctttgaaatgcgatcaatccatgttgctatggctggactcagttgacgaaatttttctaaatttagatcaaaaatgtgcttgcaatgagtgtaggctgcataaaac

SEQ ID NO: 201924 - DNA, 426 bp, Glycine max
  unsure (1)..(426): unsure at all n locations
tggtcagatctcgtgtgttgtcgcttacggtcctatccccgtctgatctatgaaggacagtcggatcgggtggtctgagtttgaggagagggagttgttaggtttggaatggtgatgagtttctgcagggggtgcggtgaggctcaggtgagggagtagtcgtatgtgtgttactcgggccgtagatattgctagactgctcgatgatgacagtgacgatatcatctcctgagaccgcgcaagaacgatcgtcattgacgctctgttgaaaatgctctaatacagcagtccaaactcagggtatgacgcgatcttgctcaatcagagacgaatgaccggtcacgatcctcctaataggtaaaacgngatccgatgggccgtcggccaaagctacgttatgaaaagccgtggagaagtcggaggcat

SEQ ID NO: 201925 - DNA, 390 bp, Glycine max
agctttgaaggagcgcagcccaccatcttttcatagtattataccgataatgtgtctaccatcacgattatcgtctccctttccattattgggggtaccacctgggccgccaaaaccctccaccttttgggcgtgttctttgaatgatcccgcccccttgttgcacatgttccgtagttgcatcctatccagaaccatatcaaaattgtattgatactgtctaacaacggcaaccattaggtccttccaagaatggacccgggaagattccaagttagtgtaccaggtaacagctacctcattaagactttcttgaaagaatgtatcaccaattcctcatcttttgcgtattcccccatcttttgacaatacatctttagatggttcttg

SEQ ID NO: 201926 - DNA, 395 bp, Glycine max
  unsure (1)..(395): unsure at all n locations
attttgtattgtatgcggagggggagcctgattcggggcggagtcttactgagaggattctttttcgcggtatttattaggatatttggaaggattgattgcttggtgatttggcagacctgaagctctgtgggtgtacctgggatgaacgcggattatttcctgaggttttaggagatcgcggaacttgggcggcttttcgtagctcgggttttacgagatcgcggaattttggcgtttttcctagctcgggtttttggagatcgcggaacttgggtgggggcttttcctagctcgggtttttggagatcgcggaacttgggtgggngcttttcctagctcgaagttgcacggcccggtgtagagttgcttggtctctgcttctaggagatcgc

SEQ ID NO: 201927 - DNA, 398 bp, Glycine max
agcttatgcatgaaacaattattatagatttttctcaccttagcaggaaaatcaaccacaacaaaataattatgacctcttccaccataagtacaatcctgggaggaggaatcatcccaaccttagatggtccaatcctttacaacagcagcaacaacaactttatttgtaaaatgctgctggcccaagcagaccatacgttccttcaccaatccagcagcaacaacaacaacaaccccataaacagtaaacagttgaggctcctccgcaacctttccttgaagaacttgtgagacaaatgactatgcaaaacatgcagtttcaacaagagaccacagcccccacttcaagcttaactaaccacatgggacaattggctacacaggtaaatcaacaac

SEQ ID NO: 201928 - DNA, 429 bp, Glycine max
  unsure (1)..(429): unsure at all n locations
tctaagtcacctgaggcatgcaagctaggaattaaacttttatctttttgcaagatatcatactcgtgactaggaacccacaatttggtttttttgaattanaaaagcataaaatagggacttgcctgtaagaatatgggctgccccatgattggtactttgcacctaagtaacatggggaatgcttttcaatagtgtgtatacataggtaatataaagggcatgaaattctttgcaaagggtgaaggaatatttaggtcacttcctaaatgaatgtatgatagcacgggattcccttttgaatgcaagtatgtgcataatgtaaatatcttgcccatatgcataagtgtgagtgaaacactgaaagttccgatggtatatatatttccagtgtgtgtacgtagtttgtgatagcaaatgtttaggaca

SEQ ID NO: 201929 - DNA, 210 bp, Glycine max
cggcgcttgttttgggcaaccgctgtgattgctgagcgccttaacggctcctcgaactactggtgctgtcgcggggctgtgtcgatagccggctgtttttgtggagtattattacgaggcgatttgcgatgaagaaaaacttcgaactctgtcggagggtttgcgggcctagtcgctgtctaacgcgcgcctcgttggagcgttgtccga

SEQ ID NO: 201930 - DNA, 373 bp, Glycine max
agcttgagctattgttgtgccccattttgctccacagaatttgtctcggccatgctctttcttgcgagccctcttggtttctttttcaagggctcttgcggtagctgcattttcttctcgtaactcggcacactctttttggacgtttgtagcgactaacttgaatttttctttggcaagacttgcctttcctagttctgtttttagagctcggacttcttcatcctcttccggagcttcgaagttctcctcgttgataattttcaacttggagagccaatctaaccctcgtgtacgaactttcagccattcatgataaccaccgatgatgccattacggatgcccctaagttctttatcttttcttaatggg

SEQ ID NO: 201931 - DNA, 423 bp, Glycine max
atctcgtgtgttgtcgcttacggagtgcctgaacggccgtgaagaagatgcggatgcgggtcgctgcggcgccggattagaactgcgccttgctccgggccggcggggcctggccaggagctggatgcggttattacttaaacgcgtggatgattattatgccttgacggtcttacgcgtgtgaatacgtctgctagggtgatatgtgtgaggattaggagagtgttgtgggatggatgtgctggggggaaaaatgcttaatgtgctgactgtgaggtcttgggtatgactttcttttgggactgtgtcgttcctcccttgggaaagaggacttcttctggtgattcgttttatatttttgagccttcttgtttttggtccgggattagttgaagcattccttggtgacgatgttttgggact

SEQ ID NO: 201932 - DNA, 417 bp, Glycine max
  unsure (1)..(417): unsure at all n locations
agctnnggtttgttacaatatttatgttgtatttagaatgatatctataaataatatagtttggactagttagaaattaacatgaataagatcacattacatgttattttcatgccgcttatccatatttgatttatgtcatcaagtatatgtngaaattgtgatcattgtggctcgatcatgttggattgtgatgaaaactacaatggtttcgtgttactatataagatggaccagattgtttaaggaaagtctaaaagtaaataacatacagtagcacacctaaagacttttgtagtataaatgactaaagttaatatgaagctcaagtggaagaatgttaagaatnttataattcctaaataatcaattaatgtacgctacttatttattataacatttatattanngtattac

SEQ ID NO: 201933 - DNA, 366 bp, Glycine max
ttatgagtgcgtcaatggggtggtgttagggtgcgttagcctttaaatttatgtcgtcgtggtgaagaaggagaatcaatcgctgattagctagcgtcgggagtccgggttagctgccggggtcgtcctgtgtgagaacgattgcggggagatttatttggtgccagggactgagcggcccgtttgcttggtgtacaatgtggatccaaagtggctgatatttgggggaattgatatgggggtcaggaaggatggcctttcgcttagggtaggcgtccgtgctcccgcttcaatgatcctctattagtagatggtgttgtcgggttttcggtggatagagggagactgatctggctttttggagag

SEQ ID NO: 201934 - DNA, 418 bp, Glycine max
  unsure (1)..(418): unsure at all n locations
agcttctagccaaatggacttaccttgaattaattccttngatagcccttttgagccttgtttccctttccttgttttgaagctcactacaagccttaagtgaaaaaccatgatattaccatatccttaaagaattttggagctttggaattgttttgggaataagtgtgggggttttttgtttcattggacaacttgttttgttggctatgcttcatgatgtattttgggccatacttgatgtacattgtatattggttaaatgttggacatgctgaatgaaatgttgtttctcaaaggcctaaaaaaaaaatcgaaaaaaaaaagcaataaagttgagtgaataacatcttaaatggcacaagaatgatgaaactcttgggtctactcttcatgttaaattttaaccttacttctt

SEQ ID NO: 201935 - DNA, 306 bp, Glycine max
gctttatacggagagcgtgtcttggctgaaccggctgctgaggcgataggtatctttgctggcgtgttggctatatgggtgacgttatgcttgtggctctaggtagcaggctcgctctatagttaagctctcgcggtccaaggggaaggcttacggggcgggctcttgcttgcgagcgacgatcgttcttggcgttggtcttagggtctggcggaggcgggcgggagcgttctgtctctcggacgctttcgctgatgttatttctctttcgcctgctcttgctgacaggcttggctttgttttacc

SEQ ID NO: 201936 - DNA, 316 bp, Glycine max
agcttctagctcaatggacttaccttgaatttatttctattatagcccatttgagcctatgttcccctttctttgatttgaagctcattacaagccttaagtgaaaaaccatgatatcgccttacccttatggaattctggagctttggaattgttttgggaataagtgtgggggggtattgtttattggaagatatgatttttggccattctaaatgataaatatcggccatgcttgaactatttatagattgcctacttcttgcttcaatcttcaaagacctactgcttgtaacatatgagacaaaaataaaga

SEQ ID NO: 201937 - DNA, 272 bp, Glycine max
  unsure (1)..(272): unsure at all n locations
tatanatactcaactcacaggcttagcgaggatggataggcgcacagtaacgaagctttttgttttggatatatccattggaaagcacaacgataaggtgctttgtgaaggtgttcatatggaggccacccacttactcttggggagaccatggcaatacgataagagggctaattatcgatgggttaccaacaagatctctctcacgcatcaacgcacaaagataatgctcacaccattcgagccaccagaaatgcgcgaggatcaaagaa

SEQ ID NO: 201938 - DNA, 341 bp, Glycine max
cccacgaatacgcactcgaagcccttttataaatacaaacacaacacaagtattgctgatttatcgatgctcttattcattggtaccaacgtcaactcaaaatcttaatttcaaaccacccaattatttgcaaattctgaatgcttggataagtgatcaggaaacgtagtttgcctgcctattaatagtgtgtttgggtagaaggttgcaaatctacatttgtaaacatgatcacccttatttttactttcaacttatacttaattgaaaattaccggttgaatttgcatagaaccgtgtgtaccatatttccaacttaaatgcaaatacacactacgtga

SEQ ID NO: 201939 - DNA, 371 bp, Glycine max
  unsure (1)..(371): unsure at all n locations
ctaagcttagcccactgtaaactcggcaatataccagaatggctgtttgtgtatattgtatcattcgtatgcacgtgaatggatttactcaggcaatttctggtgtctattatgttcctgaacttaagaataatctattgagcatacggcagctccaagaaaaaggcttaactattctgattcaacatgggaagtgtagggtatatcattctgagaaaggattaattatgcagtcagatatgagtggaaataaaatggtttctgtgctggctaccatgataccaaaagcttcctcgtgtttccacattgtatcagaaaatgaatctcatctttggcattgacgctntggtcacttacgctataatggattg

SEQ ID NO: 201940 - DNA, 441 bp, Glycine max
agcttgatgtatcaaattaatattagcatttatttttgttttggaggtatcaagcataattatattaatagattttttattttattttgtaggacgcatcaggcatacacaacggcggtgacaatacaatactgtatcacaaaattacaaacataaaatatccgtttgacttttgtagagtttaataagcaaaacaccataatagcctatttctgatgttaataagtgagaggtgacgtgtgatgttaggaagaatgaatatgcaatttgaatagtttactctgtgtttaaaatgatttttaatcaataagtattttgcttatcatatgggaattttaaaattcaagtaaagtttataattataaaaatatataagtaatttatgtaaatttaaatatacatatatgtatatatattaaaatatttagaactaaaaatatg

SEQ ID NO: 201941 - DNA, 476 bp, Glycine max
  unsure (1)..(476): unsure at all n locations
accactgctttctgaccaactgtctagatatacttttttatttgcatgttgggtcacttttaaggtatctttattttttttaggtttcagacatgctgcccttgctgaaacgaggaataggagtacatcactctggtttactcccaattctaaaggaagtgattgagatcttatttcaagagggactaatcaaggtttgtggaaatgaatcatgagatatgatacttttttcatctgtataagccgtgaacctgtatataaactggatgccgcaccttggttgaaacttaaaagcatgaaattacgtaccttagttaaaaacataactacatgctggtaaaggagtttattagcgataatagttgcttacttagtagcaattataacaatctgtgtgcaggcatcatatggtatccagccctgtattatataaatctacaagtgattatctttaagaaatattnctttcagtcatt

SEQ ID NO: 201942 - DNA, 313 bp, Glycine max
  unsure (1)..(313): unsure at all n locations
agcttgacggtgtntggtgcatcggggaatatnnattactttacaagaggggcccaattggattcccaattctccacttacccatttggaagagacatcatggccgatacgccccagctatccattgtggattcagacaccaaacacacttggatatggtggactatctaacacggcgatggtcgagtctatctccacacagacgtgggaagcacttgctcaggtggtgaatgcaaacctctctcgtaatcatatccatggtgagattgggactacattaaagaatccaatatctatcccaactattgatcta

SEQ ID NO: 201943 - DNA, 441 bp, Glycine max
  unsure (1)..(441): unsure at all n locations
gatgtaatctccttcttgacagtctcttatatgttggagtggtatcacagcattgaactaagttgatcgttccaatgggatgatggttttgattgctgcagataaagtgtgtgattgtgagtttctggtcccatgagtaacagaggtgaggtagcttgtgccttcatagttgggatgatgcatgtttgcacgtgccggtttgttgttgagagaaaagatgatcagccacgtctcgtgtgtgcatangagagtgtctctgccctctccacaacattagtctcaacaattgacgttagtcgaaacttgatggtgagaatcacaagagtaaacaaaacatccaactgggactaaaatataatgatttatattatagcgactaacaaaaatattgtcgatctcttatggccataacctcaatatacttttatttttatctttttg

SEQ ID NO: 201944 - DNA, 354 bp, Glycine max
  unsure (1)..(354): unsure at all n locations
agctttcttctattatcgatatgggggatttgtttgagatatcttcgatgcctagaatatattgtcttctttccatgtttcaggtggatgaagctcgtctctttctcacagataggacatgagtgatgtcctttgatactatatccactcaaatttctgtatgttggaaagacattaatggtacaaaataccatcacacacaacctgaaggtctgctgaagattcccatcccacacatcaaccttgtcttcccacaattntctcaagtcttcaatcaacggagtcagatacacatcaatatcatttcatggctgtcttggacccgctatcatcatacacatcataatgtatttt

SEQ ID NO: 201945 - DNA, 485 bp, Glycine max
cttacatagataagataaacatagggacaactagtttatctgccttacacaatataatttataaagtagccttacacaattatgccaacacaacgtttctcccttgtggcccaatctacaaaagaagcactctacaaaaaacaaaaccctaaaaaaccccaactcactttaacagaatcccaatagcccaatcgcaataaaaaaatgggaacgaagaaggaacccataatgtgaaaacaagggaaacattacataaatagttgaacgaagtgaaaaatcaaacattgttctggtgtgggtgcgacaagccgatgacacccgtgtgagtctaacaacatgttctagtgcgacaatgatgatgcactctagtgcgagggtgttgacaatgacgttgtaagttgcaacgaagaagacgatgtttggtcgttcgttggttcaagttcaagacacaacatcggtgaggctgactatccgatgacaacatc

SEQ ID NO: 201946 - DNA, 435 bp, Glycine max
  unsure (1)..(435): unsure at all n locations
agcttgaacgaatataagagacttcttcttctacctaggtgattcttgactccatctcattgaagcgcaagtccacttgtaacttcaaagtatcaaacctttcaccaacaaaggtttgaagaccatcgaacctatccaaaatctttgaaagaagagatgaatcttctccaccatgtccttcttcatcaacatgtcgagcaccctntttcacccaagagccatcatgctctttttgataaccaaaggatgcaatgacagaagttcctattagaaaggatctctcgattggaacatagggttcagaatcaagagggatgttaaagtgttgaagganaagggtgactaggtgtggatatggcaatggagcattcaatcgcaatgccttatgcatgcgatatctaacaagatgtgcccaatcaatttgtagacctttat

SEQ ID NO: 201947 - DNA, 494 bp, Glycine max
  unsure (1)..(494): unsure at all n locations
actcagctatgttgcaacattataatagacctcctcagtagcttaatctcaacagcagaataattatgacctttcgagcaacagatacaatctaggttagaggaatcatccaaatctgagatgggtaaatcctccacaacaacaagagcatgtccctcctttccttaatgttgctggtccaagcaagccatatgttcctcctccaatgcaacaacaacagcagcaacaacaacaaagacaacaagcaactgaggctcttcctcaaccttgcattattgggaacaataaatttgagaatgccatgctagatctaggagcattagttaatgtcatacctctgtccattttcaattctttatctcttggacctttacaatctatagatgtggtgattcatttggcaaatgaaagtgttgcttaccncgcacgtttcataaaagatgtgctggttncggttggngaacttatttttcctcttgtttttatgttcttaa

SEQ ID NO: 201948 - DNA, 434 bp, Glycine max
  unsure (1)..(434): unsure at all n locations
agcttcagtgttaggattccgattcaattatggtttatatcaccatggncatagcaagcttaattaaggaaactatccttaggcatctaattaaagtaattatctttagggatttagtcaaaatattattctatagtgcacccaattaaagtaattatctttagagatcatattataatatctatttataatgtgcctaattaaagtaattatgtttagagatcatataagaatatctatctatattgtgtctaattaaagtaattatctttaggtgtctataaataagaagttggagtttgtactttaggacattcgaaattcaacatttagtctatgttttttagagctttgagaggttttttaggtgtgggcaacaccgtgaaaatggatcatgattatcattccttccctactgggatgtctatcctaat

SEQ ID NO: 201949 - DNA, 496 bp, Glycine max
  unsure (1)..(496): unsure at all n locations
ctagttaatttcttcgatgactntagtcaattcaattatcctatatcttttgcacatatgaatttcatgatgagaaatcatgtacgcagaagaaaatataatgtttgtgaaataaaagtgtcaatatgtgtagtgtatacactgggacgtcgaaaatttaaaaaagaaaaaaaatcaataagattgaaaggccaatatatcctatctaaacaaaatcactaccacataattnttatgctaattataaagagtcataattcctaaggtacatactcaacacaagaacacatcaattntacaaaaaattcgcatgagaacaccaattggtccatctaatacactcaatctacgattgaaacaaaaaaacataattgaacttcataaaacatcccacaataacccaaanattgatctangaaattctacacatgttcattctaatcctcaagcatgagtaactcgtcccttacctcgatgtagtcgctcaagcgttccc

SEQ ID NO: 201950 - DNA, 434 bp, Glycine max
  unsure (1)..(434): unsure at all n locations
agcttaaccctcacataagggtctattntatattttacttaanggngagaatngnactccaaacactcctccaatccattagctaaagttctaaaatcataaacccagatgtatatatattattcatccataatccgtatgcacaaggctcgtgagagatcttaacggagacatgggtaatgtaaaccatggagctcactttgcacttcactgacttcagggtaattgcagaagaagcattttacatactcctttttcatgtaaaaagacgagcaagttcctttacacacacgaatgtatgtatgcatgatacctgatgggatgataaacaccaattgcgacgaagaatatggtgcttcattactccctatggactctaccaactactctgatccataagaaggcatgccattctgagctataaacaattttgg

SEQ ID NO: 201951 - DNA, 496 bp, Glycine max
  unsure (1)..(496): unsure at all n locations
tcgagacacttctgggcgttgtcaactgaaggaagaattagtttactgtggatgaagcattggagagtgagagaaataaagagaaagaacagagcgagaaggagaatgacctactgaaggagaaggagattgagcgcagcatttgagagtggatctggagatggaggaggttcggttagcaaaacctacacttgcgagggataatgggtgcggaacagtcgccattggaggacgaaggaaggaaaaggtcaatgaaaagggaagaagaagaagaatgacgacaaagtagcggtgggtaattcaaacggtgacgacggacagcagtagcgtgtaacggcggcctagtactccgctacacgtgccgttcatggttacgctttcattgtgttgggctggtcttcgttaccttgaatatatagagacttcaggtcatttctttttgctaccnccctcncttttcttaagactaaatattcatttgattttctttatacac

SEQ ID NO: 201952 - DNA, 391 bp, Glycine max
  unsure (1)..(391): unsure at all n locations
agcttgtgaggattgatggggtctcggntttgatttatacgaggatctgggctacgtgggaattcgtgagctcacttggaggtgggcaactagggatggtgggtttatgcgcccattgtggatgtggaaaacttgatgtgcaccatcgtccgaccgccatctagtaccacatgttgatgggtaccccataatcctacaagcttgaaatgatgaagtgttgaagggtgaaacttcctgcttttattgctgaccacagagtgatacctggagatatgtcgcgggggtcatgagacctttgggacgtcaggtggggtgctattgcccaaaaccaagcttgaccaatccctacccaacccgggcataggcggtcactgacaacctgtgatgtacc

SEQ ID NO: 201953 - DNA, 277 bp, Glycine max
tctgtccctgatgctgacgaagatgtcgcagcatctctctctctctttgtctatgtgcctgacgctaataaagatgttccaccatcttacgctctcaatgctgaatccctctcttctcccagtgaatatgaatcaacagattattaatatctacccacataatagaccccttgaccaatggccccagaacctgtttttactgagctcattggcctagacgatgtacaatgcgatgacgagctcattgtgcacagcctgcctcctgtggttgcgcaac

SEQ ID NO: 201954 - DNA, 344 bp, Glycine max
cacgagacaagggacaattatcctttgaaaaagctatattatcatacaaaagatggagttagtgaataacatcaacattagcttacaaaagtaaatggtatctttagtgaataatatatttacttgcacaaagtgatttccattgacaaatctaattgcaataagatgagtgagatgcaactggtgtgagactcctaagtggaaagatccaacttggcagcctatataagtggaccgagtcaacattatatcaaccagtaataacataacccatgtctggaatgatcatctacttcacagtaggcattgggccggccacattccacatacaaagaagttgttat

SEQ ID NO: 201955 - DNA, 440 bp, Glycine max
tctgtccctgatgctgatgaagatgttgcaacatcttttacttttaatgtctctgcgcctgacgctgagaaagatgttccaacatcttccactcctaatgctgaagccctcccttctcccagtgaagaggaatcaacagaagatgaagatcaagccacagaagagacccctgcaccaatggcaccagaacctgtttcaggtgatctcattgacctagaagatgtagaatctgatgacgagcacattgcccacaggttggcacctgtcattgcagaaaggttacaaagcacacaagggagaacccccattacgtaggtctggacgaatcacaactatggcgcataacaagagcactccgatcactcctaccacatccagatggagcagagttggactctcgtcaagaagaggaaaaaatctctcatttgttctgatgagat

SEQ ID NO: 201956 - DNA, 435 bp, Glycine max
  unsure (1)..(435): unsure at all n locations
agcttctttgagaaaactttcttgatatgttagagnttagctacgcacacccatctaaaaactaagctcacctccttgagaagcttccttgagaagctagagcttagctacacacacccatctaaaaactaagctcacctccttgagaagcttccttgagaagctagaggttagctacacacccctataatagctaagctcacccccatgacaaaaaaacatgaaaatacaaaaaaaaaatcctactacaaagactactcaaaatgccctgaaatacaaggctaaaaccctatactactagaatggccaaaatacaaggcccaaaagaagaatacaacctattctactatttacaaagaagagtggacccaaccttggcccatgggctcaaaaatctaccctaaggttcatgagaaccctaaggccttctttatc

SEQ ID NO: 201957 - DNA, 434 bp, Glycine max
tataatatattattacgctcgaaattaaacatcagaagctctctagatattcaaatggtcataacttttcacccggatgtccgattatggcgaatcacatatcgagacgctcaaaattgaacaacggaagctcttgagaaattctaatggtcataacttttaactcggatgtccgattcaggcgcatcacatattgaggcgctcgaaaaggaacaacggaagctctcgagaaattcaaatggtcataacttttcagactgaggtccgattcaggattataatatatcaagacgctcgaaattaaacatcggaagctctcgagaaattcaattggtcatcacttttcacacggatgtccgattcgggcgcataatatgtcgacacgctcgacattgaacaacggaagctctcgagaaattcaaatggtcataact

SEQ ID NO: 201958 - DNA, 430 bp, Glycine max
  unsure (1)..(430): unsure at all n locations
agcttgccacccagctcgcccaggcgagctatgtttcnttttctataagcaacagccttctggagggcccaagtgggcctggttgctatttgcacccccatttttactaaatacaccccctgctttttttggtgattctttttcgtaaagttacagaaacttacgaatttcgtaacgatacttgttttctttccgtaatgttacggaaccttgcggattacataatcatcccctttttgacttacggaatgttacggaacctcactatgtgtgcaacgatgctttcttttgatttctggtgtgtcacggaaccttacggattgtgcatcaatattttcttttgatttccggcacgtcacggaatttcacaaattgcctaatgatgggtgccaagcaccttataatgaccaaacacaagttgcatgccacc

SEQ ID NO: 201959 - DNA, 340 bp, Glycine max
  unsure (1)..(340): unsure at all n locations
tcagcaagacttgggttctaatattctntagcagatcctcaatgtaatttcttgataatggatcatccatgatggttcttctgttactctggaaagtacattatgcaatattcatttaaaataaagtattaaatagaaaaaagaggatgaatactttaaagccaaactagtgcatagcataatctcatggcagaatcaataaaagtaccttcaagattttctcgaattccgatatttcattccgttgataagctggtattaagattgtcattaccaaaatatcggggtcattcttgtatctgcagtatagaatatatgcgacgtgagaacacaaagaaat

SEQ ID NO: 201960 - DNA, 288 bp, Glycine max
  unsure (1)..(288): unsure at all n locations
aacccaccagggcaaaaggacccacagaaaccttataaaggaaaacccaacggggagcgacaaaaacaacaccaacccacccacaacagggaaaagcagcacaacaancacgcgggcaaagaaaaacaaaacgcacgaacacacccccaaggagagacacgcaggaggaacactccgccaggccggcaacacaggagcaagcgcaacgcaaagaaccaaaaccaaaccgacaaaccaacacagagagcccgacaaaaaaagacccgccaaacaaccaaggcgaacaac

SEQ ID NO: 201961 - DNA, 437 bp, Glycine max
  unsure (1)..(437): unsure at all n locations
ggctnngaattatcttatatcgaagggtgtgnatttatttttatgnggaaacttgcttgcgagaagaaaaactgttatctgctcagttgaatcacagacccattttctataaagtccagtactagctggaagaagataaatctatgggtgtagttggtctagcagaggctaagattgaagtccaatgatgaactaataggttattgaaacccattactttgctagtctacttgagaagcgagtgagctattgaaatctcatctttaagggtgaagactatgcctatcccaagattggggtgtattaatataaaaatcctttgcgcactctatcattatcctttcctttcctttgctctggacaaagatgacaactattttcgacctaatcattgaatatgntatcttaccagacttaacaacagatccaaacattgt

SEQ ID NO: 201962 - DNA, 473 bp, Glycine max
  unsure (1)..(473): unsure at all n locations
cgtcanaccttagagtttatcttaactagaagagtctacccttttgtttctatatactctaaatataagtccaattaatcaacatgatgaagcacagtttcttcacaaataatccaaagctcttcatgaaataaacaaaaaattacagctagaaataaactattgaaattgctttgcaccttgatccagacaacacggccattggattcactgccaataaatttcagtccatagaatgctatctgactgcactgcttcctaagctctcaagccaccaacaccgtttcatacccaccttgagctcctgtgagagctatgtaattattgcttaaaatgaatataactcaacatgtatcttattattggtcaaaatgaatataacttcataaacgatatgcacatcaatctagcataattttccaaaagagacaacagttataggcanacagacatcaaactcaccgagtcctatg

SEQ ID NO: 201963 - DNA, 446 bp, Glycine max
ctaagctcttatatatattattatatattataatatatatttatatatattatattcaaacgttaattagatacttagagtataataacgaactaatggaaaagattttttaaaaaaatacacaactatgttatttatgacttttttacttttactatttctattataaatatttttttcatttagtgtcctaaggttagcaagaccatatatatatatatattcctttggcggatcaaaataaataaaaaatattttgagccttgtggacgacattctagagggtaatttgaagacagagatcattgtaaacagttgtagcatttgttgctagagaaatgattatttggactcaccaggttcactatagcacacttggctttaactttttcagacagcttcaaactaattccatctttcattatcaaagtgatatgaagcacacg

SEQ ID NO: 201964 - DNA, 435 bp, Glycine max
agcttatatgtggtttcaagaaagacacttattcttctttctctccaatccccaaatgttatctttgttgtggtgatgaaaaagttcaactccctcttatgaaagatccacctcctttgctccagcatcttatatttgataacaatgctaatgatagcagaaattatcaacaacatattaggatttataatatgatgtttgcatttacatcaccaggggctaagcttgatagatctattagcaaatggtgcaggaccaccaaccatatggatacaaggtcaatcatgtcaccgaatatggagtttgttacctctttctggccatgcgcctaagtttgtacaactttacatttatgaaatagaaaacgagatacattatcggattcaatcaatcgagtatgtataaccttctgatcacaataattaaaaatttaat

SEQ ID NO: 201965 - DNA, 414 bp, Glycine max
  unsure (1)..(414): unsure at all n locations
cttgcttccagtttcttttcacgatatcttactatctttttgtctatttggngacaagcttactttgttttcacagtttcttactatttttgtccttttggtgacaggaggttcttctcttccctgccatgaaacctcaagactgagccttcagtcaaagctatgtttaaatctcagcagtaaaatcatacacttcaacaggtatgttcttcctcaaactgttatattccacatagcactaactacgttntggtatttctgtaagcttctcaaccacaatagtactgctatttgccgcaattgataaatgattattcagctctgtacatatttaattttaattnttaatgaanatgactgtagaacattggtattatttgattatccagagttcacgtgttaattcatatctac

SEQ ID NO: 201966 - DNA, 443 bp, Glycine max
  unsure (1)..(443): unsure at all n locations
gcacctgcggcatgcaagctttaagtctataaaatcttaagttgtttatgttggncagccatatcacaagagaatattctaagacaagaggaacaagtgtcgcaacattgtcagtccactggataaagctaactctagtaaattaagtgaatcttagctctactaagttagtgattttcattgtattcaaggttactgtgtaaacacttattgagtgattggaatacattttctatcaaacacatattgtttgtgaaagccagaagtggcttagtgacaaagaatacttgggtcttaatctcagggggagattaagtgtagtgccaagtgtgacaaagtgacaaacaatacctgttgtaagaaaaatttgcatacagaatacttggttgtgatccaagaattgattagtggaacccttcaaggttttaacgagaactgaacat

SEQ ID NO: 201967 - DNA, 434 bp, Glycine max
  unsure (1)..(434): unsure at all n locations
ngtgcanatcanatcactcctacatctcatctctagtttgctttttttttctttacccactcctcacgtttgtgtttttagggaaaaacaccataactaaacgcgccgcaagggatccctatcgcaccagatccaaatctagaacgatgggtgatcaagaggagacgcacgaacagatgatagccgacatgtccgctctgaaagacaaatggcctncatgatggaggccatgttaatatgaagcacttattcaagagaacgcggcaccgccgccgtggaattcggtgccgagcaaacccacttcttgggactaccaccttctcctcaacaaatagacgggaaggacccttggcacatgaaccttcctgatcaaccacggtacttttgatgccccactttccccctttttaaaaagggcccttgttttctcctaa

SEQ ID NO: 201968 - DNA, 425 bp, Glycine max
  unsure (1)..(425): unsure at all n locations
tatccagattctgtntaatattcggaatacaactgttcttcgtgaaagttntaattcagtggaaaaatctctctcccagtgaaaatagttgggaatctgtggctaaattacaagaggtttttctgacttatcaccttgaggacaaggtgagtcttttaagcggcggtattgataagcataagcataagccacacatcaccaaggtgtacacccgcaaatacccacagggtgcaaaccacccaacagttacaacccacccaaagggtgtaaactacccaatagttacgattcacccacagggtgcaaggtcaaaagatgtgaatcacggagacataacccttgcgagcagttaaaaacaaccgacaggggacataacccttgcgagcaatcacaaccaacccaaagatatgaatcatggcgacatg

SEQ ID NO: 201969 - DNA, 373 bp, Glycine max
  unsure (1)..(373): unsure at all n locations
agcttgaattaacaaggattttgatttatatattnnnnnatngaanattttggtctgatattattattttttattttaaatagatataaatttagaagaagaaaacaaaacaaaatgggtcatcaatttggattggatcaatgagctatgcccggacacaaaaatgtgtagcatatatatatataagtctagttggatcaacccacttgtcatggttgactggacggacgatataactatctcttcttaaaaaaaaatcttaattattntacatttactcattcttccatattttaatccaaaattagatgatagaactcaatttcattttcgttaatctttcaaacaagataaagataactntattttactc

SEQ ID NO: 201970 - DNA, 400 bp, Glycine max
  unsure (1)..(400): unsure at all n locations
cggtgcagatngatgatatagacagaaggcaattgcttctgttatcataaatgcagaccattaaattgcaaaanaatgactaacttcacacaattctcaccccatccaatcaaataaattaaaggaagacccagacagacatggaatgatggagcattgacaatattcagataattgtcaaaacagaacattaatataacttttggatgagatatatcccataagttcatcagacatacttcaatttttttggggtgtggtggtgttgggagggggggttacattgcangtgcatgcacatctgaaactggaaggagatagcctagtggacgatctatccttaaacatcaatatcacacacaattgggccagcgccacttgataaataacattatctggc

SEQ ID NO: 201971 - DNA, 181 bp, Glycine max
taccatcacgaggatcgtgcccctttgcatcattgggggtaccacctgggccgacagatccttccaccttatgggcgtgatctttgaaagatttgtccccctttttgcacatgttgaagagatgcatcctatccggaaccatatcaaaattggactgatgctgcctaacagaggcaaccat

SEQ ID NO: 201972 - DNA, 247 bp, Glycine max
tactgattatcctctatgcacatggattcgacactgccggtcattatacacaaccaccgcaggtactacatgaggcactatcttacttaattacacgtcaatagtcgtctcattcaacagggtgacacgagccataattgatcaacaggacacagaaataggcatggtggagatgtgtgaatacactatatgaatagtggttattcaaagcagcaaaccaatattgtgctatgatataattaattga

SEQ ID NO: 201973 - DNA, 422 bp, Glycine max
  unsure (1)..(422): unsure at all n locations
agctttagtcttgcaagaagaaatgctttttctganggcgangctgcnccgcacaatgaggatgaaggttgcactcttcctcagggattgtagatataggaatcagataaggtgttttcggctcttaattttaggatataaaaagtaatagggctattctatttactgattattagtggcttcagttaatgacatttccaataaaaacaaattatgtgcacacttttgaggttagtggaaatctgacatccaagccctctagcaatcctcaataaatagcttgtactgatactaattacacaaaagtggaattagtggcatattcaaagagtctaaagactaatgtacaacacagatgttcctgacattgatgccatccacaataccatattcaaaatccatgtcttccaagcgaacattaa

SEQ ID NO: 201974 - DNA, 347 bp, Glycine max
tcggcttgagagggagcgttgagaataaataatataatttatattgatttgatacgatacgatacattatgtagagaatttgatctacaggaaactgaatatcctctaagtatgtgtaatcaacactacctgtctatataaacaagcttcgtagggactctctgacgtacaatcttactcaattatccctctatattcgctccattttacattgtgaaacagccattagttgaacaacactatacatctatgttcacgtgcaagatgtgcgaataccctatatcaatttcttctattcaaactgcaagaccaaaataactgaaatgaatattataaattgaatacat

SEQ ID NO: 201975 - DNA, 425 bp, Glycine max
agcttgaccaggaaatatttgtattggttttatgccgaaaaccggaggatcctggggcggagatgatggtacagcgggtgaaccacgagcggcactttcttttggtgaggaagccatggaaaaacagagcgtttggaatgatttcggtaatctcacaaaactattgggaaatgctggagaaaacacgaatgccaagcagatataaatttgaatgaataatgtagaggggcgtgtgaagcaactgtcgaatttgctttggggcgaacgtgctattaatgttaagtgattcgtgtgggcacgtcagaatgcagtagctgctataattcctctaacagacaaatgcccagcttgcccctcagtttttagactgatttgcttccaaggctttgtggaaatatctgctatttggtcctcagggtaacgtg

SEQ ID NO: 201976 - DNA, 481 bp, Glycine max
  unsure (1)..(481): unsure at all n locations
tcaacatcagaccacttccagggtgctggaactacatcacatggtattgatggggcctatgcaggttgaaagccttggaggaaagaggtatgcctatgttggtgtggatgatttctccagatttacctgngtcaactctatcagagagaaatcagacacctctgcaactgtcaagcacttccacatctttggaagtccatgttacattttggcagatagagagcaaaggagaaagatggatcccaagagtgatgcangaatattcctgtgatactctacaaacagcagagcatatagagtattcaattccagaaccagaacagtgatggaatccatcaatatggttgttgatgatctgtctncagcaagaaagaaggatgtcgaagaagatgtcagaacatcgggagacaatgtagcagatgcagctaatagtggagaaaatgcagaaaactctgattctgctacagatgaatcaaacatc

SEQ ID NO: 201977 - DNA, 262 bp, Glycine max
gaactttcaaacgaagggatcatgcctgcatgcccacttctatttctacatccttctagcgaggatcctacaccctaagacattgatagagttatatgtgctgaaataccatcaaaggatgaagaaaaacaactttatcaggtagtgcgagctcacatgaatcatgggccatgcggcataaacaatcttctgtctccctgtatgaaagatgggttatgttctaagttttatccttataaatttcagagcaccacaattttag

SEQ ID NO: 201978 - DNA, 485 bp, Glycine max
  unsure (1)..(485): unsure at all n locations
cgctccagaacanaatgttngcttacaggtaatggaaatggttattgaggttctgaaagtaaggaccaaaatgggatttcacccatagaggtaaaagcgttaagctaatgacgttaaagaagcgcttcctgtgaggcaacccagttttaatttctgttatttttttttcatgcattgtatgattggaatttgctttatgatcttttgaaaagagggtgtttcagcttattttgaaggatagatataagggtttcaaattccttgaggaagggactaaaaaataacttagaaatttttttctgacaatcagtcctttcgctaagcgcaagcctcgcgctaagcgcatcttttatcatgcgctaagtggagagtctctagcacttagtgctcanaccttgcatctcaagctgatttcgtccgctaaactggcccaggctgagctaaacccatttctattcgatcttaatctggctagcgatggcctg

SEQ ID NO: 201979 - DNA, 432 bp, Glycine max
agcttccaagattgaggcatgagtgaatttttattttgcgttttacgcgcgagctagagttacttgtgtgtatccatgcatgtttatgtatgagtcttacgcatactctagttctttgtcatttttagtgactgacatgcacggttgtcaatgtttaaccgacaccgacatctgtattatgttttatattttggacattataaatatctatatatccgtattcgtgttgtccgtgtcgatgtccatgtttcatagatatagaataatgctgcatgcatgtggtttctttggctgctacatgtatgtggcagaacagttatatatgtctttaattaagtgacatttgtgaccctggctattaattaattcggacttcagagactgcgctctgttgaattgtttgtggcgtgataacaatgactatataggaca

SEQ ID NO: 201980 - DNA, 456 bp, Glycine max
tcatcagatgctgcatttcggtatcagctcctcttattgaatatacgatatgcacttcttgcattgtaaatttgctttatcgtggtgtaactgtcggcattgtgttccttcaacgttagcaagatatttttcggtttcaccatcgactttgtcatatcagcaataattttcttttcttccttagtcaatcgcccggcgtatggatgtccaactaaggacttcgccaattcatgattatgaatcccacagatcaacttcaccatccaaccttcccctccacgcactggtttcccacgaagcctgaagggacaaccacatttcctactcccggtgtcttttctaacgaattctttatttctacacttgtacgtaccactcccttcacacccaattaacacaaatgaacttcttcctctgctaccggtctctgtgtcagatctcataatcactgcaaca

SEQ ID NO: 201981 - DNA, 451 bp, Glycine max
agcacctgagctgcgctaccatggatcattggaggcttttgatttctattgttaatgtctagaatggaaaaagacaactgtcttcctgatcgccatacctataacatggtgctcaaattgctgattaggatatgaaggtttgataaggtaactaaagtttgggggaacatgggggacaaaaagttttatccttctgtctcaacatattctgtcatgatccatggtttctgtaagaagaagggaaagctagaggaggcatgtaagtattctgaaatgatgattgatgaaggaataccaccatatgttactactgttgagatgctgaggaatcacctcttgggtttagggtttatagatcacattgaaatactggctgctaaaatgaggcaaagcacttcctatgcaattcaagaattggcaaatattatgattggcaatagaacaactcata

SEQ ID NO: 201982 - DNA, 463 bp, Glycine max
  unsure (1)..(463): unsure at all n locations
tcctagtattaaatatatntaatgttntagatattaaacatactttctattcaataaatgtttttatattttgatcaaaattttcttaattaatatttagttacttaatcactaggatcggtctagtggtgaatgtttaggatgatatacatataattttaagtttaaacctcagtaggtctgactattgcacgtacacaaaaaaatatttcattacttatgataaattcttattataaaaattattaaattagaatataggtaaataaaatattaatgagattttagattcacatacacaacattaatagtttttttttttaagaaaatagactaaaacataatgaatattaaacgaaataagaacttggtaaaaaaaatttaaacgaaattagaaacagtaatactgctgtctcatttcacaacataatccattgtctctttcaatcactcacacgcaaca

SEQ ID NO: 201983 - DNA, 419 bp, Glycine max
  unsure (1)..(419): unsure at all n locations
agctntaaccgatcngtaagncgnatctcttcttatatttataaaangaacnccaaccgaccatttgtgttgtaatgtcgctcaatcactgttaaagcaaaatctaaccgattgttcacactataacctcagttaaataaaaaaaaggctcaataataataaaataatcaaaatatcttgaaaaaaaaataaaatcaaaaatcaaaaaaatcaatcggacatttttctttgaaagtttccttgaatgaattgactaataaccaaagtgaaactaaggctaatatcaactcacaaaccaagctttgtccgtaaaagtcacttgaaacctgtttaaggtccaatgccataaaacggtcctctttgcttttatcggttaacatggacccgtcacaagcataanatcaacacataactttacc

SEQ ID NO: 201984 - DNA, 421 bp, Glycine max
  unsure (1)..(421): unsure at all n locations
ngtacaccaacacagagatacaatctactcttggattcgcattaaaaaaatatctttgtatctatctttcttctgctccctgcctgaaaacatgcatgtatagcctggtaattggtcaatgtctntgctaaagtttatctgggctgttgactcgaagcttttctaatttattcaataagatgcatgaataatttaatcataaatcataaattccatacatgatgtaattattcatgtatcttattgaatatatagatcttatggttatttcatataattagctaattaactggtgattattttctgaccaagcctggtgattatctcatacgtttagctaactaattgactctgtttatatttaattattaatcttcataatggagatgaatctagacantcatgtttgaacacangatgc

SEQ ID NO: 201985 - DNA, 439 bp, Glycine max
agcttgatgttgttattgcacgcaatatttcatttttaaacagtttatgctttcggtggagagagctctgcaaccaaatcctttatagagaacatggaaaaacaatatcttataagcaaaggggaggcacttgtgaagggagttaggatagggatataacaaacagagagtttctattctttggctctcattgtatgggttggagtatgtgtggttagagcccaaagagcaaccccataagacataatgactggcgcgatgagtattctctttggtgccatgtaaggaagaaatcaccttcaggattgtttaaaatggagaaaatggtttataattaataactaagtaacaatagtctccttgggaatagcatatctctcacttacgcatcaccagacatgtaaatatttaattgatgttatttcgtatgagttattac

SEQ ID NO: 201986 - DNA, 472 bp, Glycine max
  unsure (1)..(472): unsure at all n locations
acctatgatactcagctngctgattacatctccctctntctcaagagaattcttcttaatatcatcaaaatcttcatgatttacaaccctggatggaggaatcaccctaatctcagatggtccagccctcagcaacaacaacagcagcctgctccttccttccaaaatgctgctggcccaagcagaccatacattcctccaccagtccaacaacaacaacaaccccagaaacagccaacagttgaggcccctccacaaccttccctcgaagaacttgtgaggcaaatgactatgcaaaacatgcagtttcaacaagagaccagagcttccattcagagcttgactaatcaaatgggacaattagctacacaattgaatcaacaacagtcccagaattctgacaagctaccttctcaagctgtccaaaatcccaaaaatgtcagtgctatttcattgagggtgggaaagcagt

SEQ ID NO: 201987 - DNA, 228 bp, Glycine max
  unsure (1)..(228): unsure at all n locations
agatgagtctttcaatagttataccgttggatnggaaggttctctcccacatcttcatattaattgaagactgctttgtatcccattcatccattgatattagatgtgtcttacaactaacaaacattataattgttaagacaaagctttcaccaactttttaatccgacacattaaattacaaaaatgtggtgagtctaatgccctgaccaacgtatcaatttctta

SEQ ID NO: 201988 - DNA, 323 bp, Glycine max
atcaccggcgaccaaaagggactgcgagcctcacgcgcgagctaggaaccgagaaagacacagacagcaagtgtgggcaactcagcaggaacgacacgggcccaagactagcgataagacgcacacactccagggcatagacgaccaccccggccaagaaaggtaccagatatccacaacccagtagtgcccgaagagagcaaacgtcaccaaaataacaaacacacgcgccggcggaccgagccgcctcacagagcgccctgatggaccagacaatggggaagagcacagcgccacaacagacgacatcaaccaggaggaag

SEQ ID NO: 201989 - DNA, 465 bp, Glycine max
  unsure (1)..(465): unsure at all n locations
actcagcttctatggatcaggagtctatcatgtgttaacaatatttttatgaatccaagcataccttaatagttaaaggttcagtagtcactaaacaacaaaattntagcaaaactaacctgaaggctatgaaggtggccttggaaaaaaccttgaaggagactctataagttgacgtggaagccatcgacaagtgaaaacaaaagagattggccaaatctattactaataaagaccttcgcctggacaacattagcattacaaggaaaatcaagaagataatggttgaaaaatagaagaagaaagccaggaaacaatcccaaaaggaagaagatcaagagatgttggctagggagcacttgaccaaaagaaggcatgagcttgccatgtctgctctggctcatccactcatattatatgcaatcacacatgttgaaagacttgagtgagactgatgatgatgat

SEQ ID NO: 201990 - DNA, 345 bp, Glycine max
  unsure (1)..(345): unsure at all n locations
agcttgaaccacatcgancgcgtgacttattcttctctacaaggnnagaaggagaggagaccttcatttctataacgcaacgaggcggacaaaaatgggcagttaacttgaatggccattattgtcaatgcagaaggtattctgcgcttcactatccatgttcacacattattgcagcttgcggttacgtgagcatgaactactaccaatatatagatgttgtctacaccaccgagcacatcttaaaagcatactccgcacagtggaggcctcttgggaatgaagcgacaattcctccttctaatgacgcatgggcactaattcatgacccaactacaattcctg

SEQ ID NO: 201991 - DNA, 457 bp, Glycine max
ttaaagacattaagtacgaatggaagcacttattattcaaattattttgtaaagagcttcttgtctaaattcttgtaaagtttagtaaagctcttaaaaaactttgtttctctttagagaaaagactaagtgctgaaagtgtctattcatctgtaagatgattgagtattagtcattgtgcaaccaaaccaacataatcttctgatttttgttaaagccagtagtgacttggtagggtaaaaaatattgattgcaacaagtttagtgtagagcttgaactaaggagctagaactgacaatgataaatacttgtaacttgttaaagttactggaactctgtggttacaaagaattgaatgtactttcggtgggtgagatgaaccagtataaatctcttatgtcttatcttggttattccctcttcttcactttatactgactcatggtttgatttgat

SEQ ID NO: 201992 - DNA, 428 bp, Glycine max
  unsure (1)..(428): unsure at all n locations
agctngccactcagctcgcccttctagctgtgttgcnttctccagaagcaacaaccttctaatctgcccctaggttcacctgaggctcatgcacgatgcccctcattgccccagtgtaaggctttgaggtaccaattgttatctttcgtcatgaccttgtaacaaggaacctattgggtgagaacttctaatctgcccctaggttcgtttgaggtttatgcatagtgcctttcattgccccagtgtagggctctaacgtatccatcattggtttgttttcacaaccttgtaacaagggagaatgaaaaaagcaattgattcttgcataaagaatcctccacgacgagaaatagttgtaggatttntttcagctgatggactacgtcaactgactcttatgtataaacaagatgtntttatgatgccca

SEQ ID NO: 201993 - DNA, 476 bp, Glycine max
  unsure (1)..(476): unsure at all n locations
cttagccaaatggacttaccttgaataattccttgatagtcttttgagccttgtttccctttccttgttttgaagctcactacaagccttaagtgaaaaaccatgatatcaccatatccttaaggaattntggagctttggaattgttttgggaataagtgtggggggtttttgtttcattggataacatgttttgttggctatgcttcatgatgtattttgggccatacttgatgtacattgtatattggttaaatgttggacatgctgaatgagatgttgtttctcaaatactacaaaaaaaaaattcgaaaaaaaaaattgatatagcaaaagaaaagcaataaagttgagtgaataagatcttaaatggaaaaagaatgatgagacttttggttctactctttatgtttaaattntatctttacggcttcttattttntcttaatatgcacttattccccattgatcctcta

SEQ ID NO: 201994 - DNA, 403 bp, Glycine max
  unsure (1)..(403): unsure at all n locations
ngtgatgagaggaaataattcacttatgactagacctgattctgtgtcataagattcagacacaaacccagctctgacttgttgactcccaacatctatattcttttttgaaaggcaaatacataattctatcaacattataatattatgcgacacatgagttgaatgcgtacacaatttgcggacaactatatattttgtctagataaaatttaagaaaaaaaaaaattaatataaaatttgtcaagactcgacaaaatagcaaaagattcctttcttattgggaatgagcatatccttggaatgagatttctttcccaaaacaaagaatggtgattccccaagaatgataaataaaatgtggctaaaatggaatggttattnttattgagccaaatgtgac

SEQ ID NO: 201995 - DNA, 365 bp, Glycine max
  unsure (1)..(365): unsure at all n locations
agcttcttaatattcccaccttgcctttgctcaaancaagcaangggaccccactgtattcagactcagacccttggctgacatgctattcacaatttcagcagcttcctctaatcggccttgcttgcagaaaccatttatcaatattgtgtatgtgatcacatttggctcaaaccgttttgctaccatctcatttaataattcaagagcagagaccaaataccctttcttgactagtccatcaatcattatgttaaacgtgtaggcatcaggctcataacctgcaattaccatgttattgtataaaagatccttggcttcttcaaaccttccactggcaacatatccactaattaatgtattat

SEQ ID NO: 201996 - DNA, 362 bp, Glycine max
  unsure (1)..(362): unsure at all n locations
gtaaagatcanaacaaacccactgtgattgtgactcccaaatttatattttttttggaaggaaaaaataatttatcaacattataatattatgcgacacatgattgatgcgtacacaatttgcggacactttaatttgttagataaaattaaaaaaaaaaataagataaatttgcagactcgacaaatagcaaagatcctttttagtggaatgacatatcctggaagagattctttcccaaacaaaaatgggattcccagaatgataataaatgggctacatggatgttattttatgaccaatgtgaccttttctaccttgctaaagaaaacaataagtcttggacacattcatatttaata

SEQ ID NO: 201997 - DNA, 422 bp, Glycine max
  unsure (1)..(422): unsure at all n locations
agcttcagtataggaaccccattatcattgngttttaagtcaaagggtaattcagataaatggttagagttaggaaaagataatcttctaaatttagcaagagaacaaacagaacaattataagaagagaaattgggagaaaggtgcacatcaattttattagtcaaatgtttgaaaactttgtctaagatatgaccaaatctagaattccaaatatgagcatttttacaaggaatggaatttgtatgtgaattaataacagaaaaagtaaatttgcaatcaagagtgtccttgagatctaagacataaaggccttggatgagatcccctctaccaatcctcttgcaagcttgcttctccactggcagaagacacaccttgaaggatgacaacattggtagcatgactttctaaaagatcat

SEQ ID NO: 201998 - DNA, 490 bp, Glycine max
  unsure (1)..(490): unsure at all n locations
cgaagctcanaaactgtgctctcacttaacagattatgcttttggaacaagttcatgacaatntatgtctcataacaagaaactgtagattctcttgtagaaaatntaatattagtttcttatttaagctttctattaactctctttttttttagcttatcagtttcattctatcaaagacgtggtagtttccagttttatcacatttggaattctgataacttgctggaactccagccttggcaaaagataagggtcatatatgaacacgacatacagagatcataatgaacagaaattgcaaattaatacatagtacacttcaaaatccagtacaccagcacgcatattaccaaaccctgcggctcanaatttaaggacttacaaaacattaataaaaacaagacccttttgcaattcactggatgatacagatgcagatagccactcttaactattatcctagctacaccgctgcagagtagtcttt

SEQ ID NO: 201999 - DNA, 361 bp, Glycine max
  unsure (1)..(361): unsure at all n locations
agcttcggaagaaagtgatgaggtacaagtcctaaaggcagagcttgaaagagcccgggtagtcgaagagaagttcaagtccatagccatcaaagtctgaaaagagtatgatgaactaagggacgtcaatatggccacagctgaagccttggaatgagaaaccaagaaggcccgaaaggaagaacacgaccaaaacaagttttgaggggctttatagggcagcaatagtgagctcaagctccgaagaggtgaaaggaatcatcacgggtcaaaggcatgatcttgaaagacgagctaaaggtttgccttangtcgaaaagatatttgtcccaacagttaagcgagactgaagggaatatgt

SEQ ID NO: 202000 - DNA, 409 bp, Glycine max
  unsure (1)..(409): unsure at all n locations
tangggcaggtatgagcaggtgctaggcctgcgaccaattaactatcatcccgcgttcggctcaagacggtaaagaagcactactaggaggcagcctagtacctttaaaatttctgcttttttatttattcgtctattttcttaaagttatatttgaatatgcctagtttatttgcaatcctaggaattaagaaaatatacaagcataacaaggggatatttaaaattttgcaaaacaaaaaatggccagagttagctcgcctgggcgagcatgcctgcaccaaaaagcttaaaaaggggcagggtgaagctttcttcaccccaatatcttcccccacattcaaaaaatgcagcagctacggaaaagcttggttctagcagccccaaggctccattggtgagttttttc

SEQ ID NO: 202001 - DNA, 433 bp, Glycine max
agcttcagtccctgagaaactgattcccattgacaacggtggtgaagattgctgaaaaccctagccctgcaacaagtcctagggaagtagacacggagatggacaagaaaatccgcggtattgtgagtagcattctgaaggatgcttctgtgcctgatgtcaataaagatgttccaacatcctccgctccaaatgctgaagccctcccttcacccagtgaagaggaatcaacagaagaagaggatcaagcctcagaggagacccctgcaccaagggcaccagaacctgctccaggtaacctcattgacttggaagaagtcgaatctgatgaagaacccattgccaacaggttggcacctggcattgcagaaagggtacaaagccgaaagggaaaaactcccattaagaggtctggaagaatcaagactatggc

SEQ ID NO: 202002 - DNA, 438 bp, Glycine max
  unsure (1)..(438): unsure at all n locations
tgcccttggtttagacatgantggtacatgatctgngacttgtatgattcaattngngcaaaattggatgagggaaagagtggttttcgaaatctgcactctatgcagaattttgctgttgaaatgtgcagcagaattttgtataagtgcagaaaaatacttgtgcatggctggttgtgaaaagggtagtacatatggggttgtggacatttgctagcagatcccaacggtcaaaatgtagacttatgtactagagacttccagtaaaattttcgagtcaatccaacggttaacaaattggaacgaaggaaatgttattggggtatttgtatgtgaaaagctgtgattctgagttgtggtttgggaagaagtttctgcctttgccctgtttgctcgattctgtagtccatgatgattggatgtggaactacttggatg

SEQ ID NO: 202003 - DNA, 422 bp, Glycine max
  unsure (1)..(422): unsure at all n locations
agctntngctggggatgatgtagatgattattntgaaaaagataagcaggagatcctcaacgaagaaaatcctgagccagagaagcctctattacttcctggctggggccagtggacacatgtacagcaaaagaaaggtttaccatcttggatgctgaaaaaacatgaagatgcccagaaaaaaagggcagaagccctcataaaaaggaaggatgctcagctaaaaaatgtgattatatctgagaagatagacaagaaggttagtgccattaaatacaaggttttgaacctttggtactcttttcagattatagatatcaacttgattcaatgtgcacaactatctttgttttcgtataagaaatttgtggagttgttctggggcagcatattattaatcattggtgtttgcactttgcata

SEQ ID NO: 202004 - DNA, 466 bp, Glycine max
  unsure (1)..(466): unsure at all n locations
tgccatgaaaggcagagacccnctattccttccctgcactctttattatatgctcctcaatctgattntttttggaatacacttaattattatgccaacaattgaattaatcttgcatgcctcttttctgtgtgtttggtaaaactagcttataagctataagctaggaattgaaagccaaaagttataaactaactaattgacttgaaattgtttgcttagattagctaataagctaactgatagatataaaacgacataacagaacatatttagttatttgtggcaaaaagggatttcaaataaattaatggagataaaaaggaaaaaaaaaaaaactaatagcttataaggtagcttatttcataagctacttcaactagcttatgaaaataacttagaagctactaaaataagcttgcataccaaattataaatgaatctattttcttacaaatcatgaatg

SEQ ID NO: 202005 - DNA, 325 bp, Glycine max
gcatgcaccttatccttaggctgcacagatttatttcagcccccggagattagccaagcccgtctttcgaggggcactccccctatgaagacatcccggcaagacaaggggaggagaacccatttggcccctctcccctagagagcaacccgatgactacccgaacgaacaacccgcctatctggctccccacacggaaaaaattgtccctccggaaaaaggggagaatgacacttaagagagtgaggagacaggctggaacacccatcaggaaggggactggctgcccaacacggatcctctagtcaagaccaattgtagacaa

SEQ ID NO: 202006 - DNA, 454 bp, Glycine max
  unsure (1)..(454): unsure at all n locations
acagccactcatggcacatgtcctcaggcttcccttctttgtgagttattgttgcaatgacatgtcggcatggcatccttacatcaaagttgtaaaatcagcacacaagtaggttaggaatgaaaaanaaaaactataaagaacacaacctgttagttgccatactccacaagtgcatgtccattcacctaaattgacctcaaccttattcccccacatgtggacctcacatctcaggcccatgttatcaccacaccaaatgggagtccattgattagcaaaatgaaattctttttctagtcttttatactgcactggacataatggtccaggctttccagaaagtttaaccttgtgggcagccatggttctcatgatataacttctaatttcttcaagcattgtgataataggcttgnacctatactgcagaattctggaattgaatacctca

SEQ ID NO: 202007 - DNA, 473 bp, Glycine max
  unsure (1)..(473): unsure at all n locations
atattctacaccaacaacaattntaatttcttcgtattacatnggcctttagctacaatcagcatcattcttaagtaaaataattcaccaatgtttggtggcacccaatatagtctgccaatactatagccttgtttccttggttgccaacatcatttttttgcaatgtaaacaaactttgtaacaaattgtgcatgtgtaagatttttccctttattgtagattttatttgctttcaacccagaagtaaacatagattcttttacacttggcttagaaagtaaagaatacatatcttcatcattattaaaaataatagaatgttcacctagtagatgaaagtatgatctctcaacagttggtgtccttccgtgaagtggaaaagaaaagattctccagctagtctcacacggtaagatgtatatgcaatcaagatattgttttacctcataaatgcattgtgtntctatatc

SEQ ID NO: 202008 - DNA, 353 bp, Glycine max
ccgcacgcaagcttcgagggatgagtgaagttatagatatacagttgttcatggaccaccaagacttgatcaatttccccacagggaagtatgtataacaagttatatgcggcgaaattcccatgaaaactagtaacattcgtcttgggagaccatggccatatgaacagagtaatattcatgatggtcatgccaaaaacgtcttatctgtacacggcgattgtgaatacgaacctgctatattaactcaacaggcctcatgggaggacccaagcacaacgacactgaaacgagagccagatacactccaatactagaatatgacaatttccgagaccaccacatagctggca

SEQ ID NO: 202009 - DNA, 469 bp, Glycine max
  unsure (1)..(469): unsure at all n locations
gagaggatgcttcaatgaaggaaaagaaagagggatttatttataaaggngggagcacgaaattgaaggaagaataaggaagagaagttgaactttgagttgtgtctcacaagactctcattcatcaaagttacaacaagtgttacacatgcttctatttatagactaggtagcttccttgagaaactttcttgagaaaactctctagagaagcttctttgagaaaacttccatgagaagctagagcttagctacacacacctctctcataactaagctcacctccttgagaagcttccttaagaagattcctaaagaagctagagcttagctacacatacctctctaatagctaagctcacctccttgagatgagaagctagaacttatctacacaccccctataatagctaagctcacccccatgacananaacatgaatatacaataacaagtccttactacaaag

SEQ ID NO: 202010 - DNA, 368 bp, Glycine max
tgcaagcttccatcacagtaggagcttttcggcgacatattatgctaaaacaggataggaaagttatgagaaacatggcaaggtttgttgctaaaggcttctcaccataggaatgaataaattacaaagaaacctatgctcatgtggctcgtctagaggcaataagaatcttgctttcatttgcttcccatactaatatgaaggccgatcaaatggatgaaaaaagtgcattcctcaatgaactcatcctacaggaaatttatgtaaaacaaccccttgggcttgagagtgacacctttcctcaacatgctttaaaactaaaaaagctctgtatagactaagaagctcctcgacttggaagaaaaact

SEQ ID NO: 202011 - DNA, 412 bp, Glycine max
tagttcatgcctttggcatttaatctaccaacctaagctaattatacatctatgagtgcatatgttgtatgaagattttgatgatgccaaaagattgaagcaattcaaagtttactacaagattcaagtcaagatcaagagatcaagagaaatgattaacaatagtccattatttgttaaaagaatctcttaaaagattgcaaaggtttggccttaatagacttaaattttcaaagtctcttataaagtttttatgtagtcttacatctttcaaaaatatatatttctctctattaatcgattaccagaagccaaaatgattttgcaaagctttcatatagtttaaaattgaaatttaaaggctggtatcgattaccaccattgtataatcgttaccacttacaaaaatttt

SEQ ID NO: 202012 - DNA, 180 bp, Glycine max
  unsure (1)..(180): unsure at all n locations
tgctcccacgatcaaattatagcatctngacctattatgccactgatgagggcatttgattggaaagtgatgccgtatgagatgaccgagagcttacttgttcgatgtcaagcgcttttccatgtgaatgggctgaatcggacctccgtatgaaaggacctggcactataaacatgacct

SEQ ID NO: 202013 - DNA, 364 bp, Glycine max
  unsure (1)..(364): unsure at all n locations
agcttctggtttgtttctgccggtgtgatttgtttattgcaancctccatcccaaatctcttcagagtttcaccagcatatttcctttgatgcatgacaatcccatattcagtccacaagaattctaacccaaggaaatatgacaatttccctaaggtagtcatttcaaattcactcatcatgagtgaagtgaaattatcaatctctgttgtatgattaccagtcactagtaaatcatcaacgtataggcacaccattaacaccttgttatcctccttcaacatgacataaactccatgttctaccacacaccttttgaagccaaagtgagcaagatatgcatcaattctcctattccatgctc

SEQ ID NO: 202014 - DNA, 403 bp, Glycine max
agaggcatcttcttcgacctcggtaattcttttatacatctcatcaaatctcatgtccacttgtaactccaaagcatcaaacctatcaccgacaaaggtgtcaagaccatcgaacctgtccaaaatcttttgaagaacagaggaatcttctccaccttgtgaatgcccttctccatcattgggttgagcaccctttttcacccaagagccatcatgctcttttcggtaaccaaatgatgcaatcacagcggcaccaattaagaaggatctcttgattggaacataagggttagaatcaagagggatgctaaagcgttgaaggaagagagtaactaagtgtggatattgcaatggagcatttaatcgcaatgccttatgcatgcgatatcggactaagtgtgcc

SEQ ID NO: 202015 - DNA, 401 bp, Glycine max
gaatgtaagaggcatcttcttcgaccttgcgaattcttgaattcatctcatcaaatctcatgtccacttgtaactccaaagcatcaaacctatcaccaacaaaggtttcaagaccatcgaacctgtccaaaatcttttgaagaagagaggaatcttctccaccttgtaaatgcccttctccatcattgggttgagcaccctttttcacccaagagccatcatgctcttttcggtaaccaaatgatgcaatcacagcggcaccaattaagaaggatctcttgattggaacataaggtttagaatcaagagggatgctaaagcgttgaaggaagagagtaactaagtgtggatatggcaatggagcatttaatcgcaatgccttatgcatgcgatatcggact

SEQ ID NO: 202016 - DNA, 288 bp, Glycine max
  unsure (1)..(288): unsure at all n locations
gagcccaatttttgccaatagaattatgtcttatattaaagagagaaaaaatgtgttcagcaataaccctttatgtngagggagaaaagaacacaaaataatagaaaggaagcaatcaaccaatgagctagtcacaattatccaatagtaccatcataaagaaaatgcaattaatataaaccccacctaaagaatagctctaattgtatactattccaatagcaaaacttttttaccttccattgctaatctcgtttttcccaatgaaaccaaagaaaggaccctgat

SEQ ID NO: 202017 - DNA, 345 bp, Glycine max
  unsure (1)..(345): unsure at all n locations
agcttgtctttgtaatgtggcattttcaataatcaaacatcccatattctattattacctctgttctattgatattttggattttcacgcaccccttgtattacggactgtgtgatggcagaactcgagaaattagggcaaaaatatcgtgtagctctaagggagatgtcatgttttcttgtcttttgattattattggtttatattttcatacatttgagatttacatataaaaaggatgacccactgcatgatggggctcccttagagtgaggtatggggagggtacatgtgcggtgcctatataaaatcaaatatacttgaccttatttntctttgatatac

SEQ ID NO: 202018 - DNA, 445 bp, Glycine max
  unsure (1)..(445): unsure at all n locations
agagtgataatggngacattgtgatggatgaggttttgangattatacaggcatgccaaattgtttgaggacaactattaaaaaatgttgataaatggagtttgacaatctgtaaaggttgaaatgtattgtgtattcttggaaattcaaatgaagctggtttgataggacaaaaatagttagtaaatatgatttttagcttcttaaaaattctcataactagcatatttactgaaaattgataagaaggtgaacattgagaattntgttgttgcttgcgaggaaaagggaagatgtgagaaactaacattacgctaaatattaagctgaacaaatgctatagctgtgaataaaaataatgctattaattagntctttacttcaatatcttctgttctatgcttaccctttattatcttgtttgactctacctgaatgagttgaa

SEQ ID NO: 202019 - DNA, 390 bp, Glycine max
  unsure (1)..(390): unsure at all n locations
actgagcatcagcttgcttttctgccttttcggaattaaaacatgggttaatgatgctaacangcctgttaacttttgcacctccttcaaaatgtgtggactcctcatggcaactacgacctcacacttatctgggttagcttcaatacctctataggcgatcttgaaacctaatattttccctctcccttactccaaaagtgcatttctctgggttgagtcgcatgttgtgcttcctcagctatgcaaaaatagctaaatcttttgaataatcatctgggtcttatgatttgactaccatatcatcaatatatacttcaatattctttcccaacaagattgtgaaaactttgtccattaaccattgacaggttgcttcatcactcttca

SEQ ID NO: 202020 - DNA, 262 bp, Glycine max
  unsure (1)..(262): unsure at all n locations
tcctttagtactcagccttaactctccgtcagcggagtatagtggctaaatttggatcagggtggtttgtncaatttggatcttcctcaactgctttcgatcttcacctctgggtccactagctntcttgaggtttcttcacacattntctctttgaacctagtaatctcttccatttgaatgaattcgacaacccttgctctcaacttgcccaatgttgtaggcgggttcttgcatagaactgttgagaaggaccaaattt

SEQ ID NO: 202021 - DNA, 399 bp, Glycine max
agctttgcataagatgaaggggaagattctagatattgctgtctctcacacctcatcttgggttcttctggtatgtacgctggtatctgttttttttttgttcaatttcaatttcacatgcttttagaggaataaattaacgatgactgatgcaagtcattggcttaactagtcacagctatttgcatgtagttagtgattgatgttgtgttgtgcccaaagttctgataaatataatcttcttttctgattaagacaaaagcttgaaaagacagatgagcatttaaatagtcaattaccattttcctttggcgtgaacttatgtctagtgatatataaagcattaacaaattcatggtgacgtattaatttatagtgatgaatagtagcaactatgta

SEQ ID NO: 202022 - DNA, 448 bp, Glycine max
agcttctcaggaagttttctcaagaaagcttcttaaggaagctacttatgtctatatatagaagcatgtgtaacacttgttgtaactctgatgaatgagagtccattgagacacaactcacagttcaacttctctccctttttattccttagatatcgtgctcccccctctctctgtctctccctctttcttttcctccattgaagcatcctctccaagcttcttatccaaggctcatcttggtggagaagctccttcttccatggcttattccctagtggatggcgcctcctctcacctctcttcctttgtctttcgttgcatccccatggaggaaaatcaccattaaaggacctcattgaagctcaaagatccagcccccattgaagccccacaagcaagtgtccatcacatactctctatcatctaatgattgacacacgacaat

SEQ ID NO: 202023 - DNA, 414 bp, Glycine max
  unsure (1)..(414): unsure at all n locations
cgcttaggtataagncgtgtcgtaagagccaatatttggtatttatataaacttgcaacttttgtgaaagctagtggaacttggtgggttaccaacaacctaccgtcttctgagtgacagagtaaaatcgctataaaactatatgcatcgtatgactttatcgtcttctattttaactaatatgggcttgaatttaattttgatttttgatcagattttaacaaaaaaggttattgaacaaggacttgggttataacaaaaagtttttgaaaacacgtggaatggagtggaggagcacccatagtcattgttaattgttacttttcatgacacttacgggagataacaagactatggcgtganttatagtgaacgaaacaaagcactatacggacaatctatgtcacatagtcg

SEQ ID NO: 202024 - DNA, 465 bp, Glycine max
  unsure (1)..(465): unsure at all n locations
gtcacatcagcacaattaataattgtatcccgaagtttaactgaggcatcgatcttcatgaaattcttattgatctacaattgttaccccactaccaccttagtgacaactcagaggcataattatggaagtggtaaagtggaaggaggtgaatgaggaaggaagaatttattagataacatttagtgaaatcaccttatttattgacgtttgtctttttgagtatgtatgtagattcttggtctaataattggtgtagttactccattccaaaagatgtctgttggagatgatgctcctttacgagttattgaagactctccatccatgttggggtaagtaagttgccttttattgctaactgtggcataatatgggtatcangtactcgcaagtttctttgtttgtttgattaaccaatattagaaccataatactatagaagcatagaattcatttcatcac

SEQ ID NO: 202025 - DNA, 440 bp, Glycine max
ttgagtcacctgcggcatgcaagcttatccttatggcctgcctccggacttttccttctgtgccactccggaagaattaagccaagctcctacttttgaagggcagctcccaccttatgaagactatcccggacaagacgatggggaaggagatacccatcttggccccctgctccacctcaaagatccatccccgcatgaactaccccagccgaacatagtccgccatatcccagcctcacccgcacccgtaaaagaatctgttccctttgcggaagataagggaaagattgaggcgcttgaagagaggttaatagcagttgaggacctccggaattacctattctcggatttggcagaattatgtcttgtgcccaacatcgtcatctctcccatattcaaagtaccagactttgataagtacaagggaccacatgttc

SEQ ID NO: 202026 - DNA, 465 bp, Glycine max
ctcatttctttgggtttccatcaatcttcttctgattactctctatttgtgaagagtcagaattctcatatgaccattctcctagtttatgttgatgatgtggttttgactggtaaccatcttgaagaaattaattttgtcaaaagttttctagaccagcagtttaagatcaaggatctaggagaacttaaatattttttttggcttagaggtggctcgatccaagtctggaaatgttccttagtgcaaatatgcctatgagttaatcaccgattttggcttgttaggctgcaagcctgtttcggttcccatggtacctaattccaaactttatgctacaattggtgttctcttattcaatccagcaagttatcgaagactttattggcaggccaatatagttgactaataccatacccgatttatgcttttgtgtgcatacattgagtcaatatttattccatc

SEQ ID NO: 202027 - DNA, 440 bp, Glycine max
  unsure (1)..(440): unsure at all n locations
tatttaagaatggcttctaataatgaacattaagttatctatattgtctaaggtcaaaaaatctggtgcaagccattgccttagacaaaactcgcactttccttaagttttcttaaccaaactttctcttgatgaagggttgtttgatatattangattttatgtccaagattaacacttgcttctagcaacttgggtccatcctcactgtccagtgtctcanaatggggtcttaactccaacgttccatttttaaatctttaaagcacgaggtaatattaaacatcacagctttattgtttcaatcatacgatacatactacgactatctacgcatatttacccacccaaaaagtggcccgaccccacacaacgtgtttaccctgcttttatttttgttctgctcctttttgaacttttttaaaccaaaaaaatggaaa

SEQ ID NO: 202028 - DNA, 388 bp, Glycine max
ttacggacactatataatctctagcttgaacctcggatataagagaatggagagtgcaaatagacattattttgtctgaaagaactaaatatatatttgaatgtgaacattaatatggattatgactgcgcttataaaactatattggtgattttaaataatatttgtttaagactatagacaacttataattgcactactggttaatgaataaagttatattttggaaaattaagccatttctattttaggtaaacaatagttaataagctatataaactttacctaatgatcgacttgctaactatatatgtactaactagaaaagagtttaatttctaaactcgactatatatatatatctatctatatatctatatatatatat

SEQ ID NO: 202029 - DNA, 442 bp, Glycine max
gagtttccaagtgccaattcgtcctcttctttagtccagtcttcttctggcttcaattcatcagtgggctttccttctgtgtccagcatcttgggatgttcccagcctttgatgacagctttccaggttctgctatccagtgatttgaggaaggccaccattcttgctttccagtattcatagttgcttccatcaagaattggtggtctgttcactggtcctccttctttctccatgttcatcagaatttatctccccagatctcactctgtgatttcgagtgttggctctgataccaattgaaattctgataccacgggacagatgtcgtacaggatgtcacgacatcacgcttcagaacatgcagtttatgtgtgttcgtatgaacagattacacaagtaataacacaagagaattgttacccacttcggtgcaacctca

SEQ ID NO: 202030 - DNA, 391 bp, Glycine max
  unsure (1)..(391): unsure at all n locations
tcccggaccttaagtgaccgcggctgcagcttcttgagaaaacttccttgttatgtctgagtttagctacacacacccctctcataactaagctcacctccttgagaagcttccttaagaagattcctaaagaagctagagcttagctacacatacctctctaatagctaagctcacctccttgagatgagaagctagaacttagctacacaccccctataataactaagctcacccccatgacaaaaaacatgaaaatacaaaaaaaaaggccttactacaaagactactcaaaatgccccgaaatacaaggctaaaaccctatactactagaatggccaanatacagggcccaaacgaaggaaaaaccctatttatatttacaaagata

SEQ ID NO: 202031 - DNA, 377 bp, Glycine max
  unsure (1)..(377): unsure at all n locations
tgcacgagacgtgcatccatatgagatggagttgttttattgtgcagcagaatagccatgtcctggattataaggttgaaccaagctcgcgctattcacaaagttctccactcactcacatagttaataagcgccttggatagtgatgcaaaagatgactcacatcactagtatcggctactagccatacatatatattgaggtcgttgatactttcggattgcacctgacatgcacgttatggaacatgttgatatgttaatttgattcacacctcagtgaggtgtgtgactactnctatagctcaagtgttcctcattcgcatgcatccatgcgatctcattgcgtagcatcgctcattgcattctctccttgat

SEQ ID NO: 202032 - DNA, 321 bp, Glycine max
agcttcttatacaaggctcatattggtgtttaatttcctcaccccatggcgcattccctagaggatggcgcctcctctcacctcttcttctttgtcttccgctgcatctccatggtggaaaatcaccatttaaggacctcattaaagctcaaagatccaccctccatagaagccccagaagcaagctctcattaccttgagatgaactttgaagtgaaattctcaaatgatcaaagttcacacctcatttgagacacaaaaaattgagctccttgtctccctctccctccactcatatttttttacctttaaagagttatc

SEQ ID NO: 202033 - DNA, 335 bp, Glycine max
  unsure (1)..(335): unsure at all n locations
atgcccgagtcgtgcatccatatgagacggtgttgtattattttggatcagaacagccattccttggattatagggttgaacccagcttatgcttttacagaaaggttcaacaagtcaagtgcgaaatatggaagaaaccgtcttgcgaaattggggcanaagatgagtcacatcactgcttcaggtactgtcaaacatatttattgatgccgtgatacttccgagttgaccttgacatagatgttatggaccatgatgaaaagttagaatgattcgaccctatgaacgtgcggaaaactccgcatacttaacggtacatcattcgcatgcaatc

SEQ ID NO: 202034 - DNA, 267 bp, Glycine max
  unsure (1)..(267): unsure at all n locations
agctccatagaaaaaattttataacccgttactccaagnganacctgatcggtttcttcaagaaagatgtatacttcaaatttgtctcatggatggaaaaattgattggtaggaaaaaaactcattaacaatgattaattaggttcttcgactaacattaattattatccaaactaaaatatacttcataccaatgttatggatgaaaagaaaaaaaaaatcagagtctatcctcataactctccaacttactcaatacttataaaa

SEQ ID NO: 202035 - DNA, 450 bp, Glycine max
tcaagaacatggaagtgaaagaggatgttggatagagaagctatgatgctgaagaacttagaggggagttggaaggaatgcagagtgggacccaactggccagtatgaagaagtcagggactcatattacgagcaatgctatgtacttgccaaaactctgttcatgatttacagtttcagatttgacactgaattttgtgtgtatccttgtgtagtcttcaagtattaaaggagtaaagttatgcaaatactgtacagatatcatattctgtaacagatttcacgtatgaataatttttatataagagacactgccatttgttctgctctgtgaagaaaagaacaacataagagaaatctataatactccttctggggcttcagcctcaccaatattcttaagacactaattaagaaatttataatacgacagttttattaaaatatatg

SEQ ID NO: 202036 - DNA, 223 bp, Glycine max
  unsure (1)..(223): unsure at all n locations
agcttcatatccaaggctcatctttgntgttatgcncccntcaccacggcttataccttaatggatggcgcctcctctcacctcttctcctatgtcttccgctgcatctccatggtgaaaaatcaccattgaagtacctaaatgaagctcaaaaatccaacctccatagaagctccacaagcaagcttccagccaaccatcgagcccatgtatagactcatga

SEQ ID NO: 202037 - DNA, 398 bp, Glycine max
  unsure (1)..(398): unsure at all n locations
gaagcttcaagcaagtaagtgtctctctctctttttctattcattgatattattatnttttattgttgggttttttcaatgctgcatcttcgtcctgtctgtgatccttcaggtttcatcgtgttaatgtatgtttgcaaatcaggtgtttcttctgtttntttatcagctctggataaattgaagttaaaaactaagaaaaaaaaactgtagagcgtgctggctctttttgtgtgtttaataacttttattaccctctacagtggcgctattcttaagtgagttcttttttctgttgaacttacttttacttctttgaattgacgaacttggatgctaaagtgtctggttgttcatatttcatttatgaaacaaatataacaaattgatttgcttgt

SEQ ID NO: 202038 - DNA, 289 bp, Glycine max
aagatgaccagaaaactcttgaggatcaatcctcatccttggaaatctggaataagaaagcagtgtctcacccttctccaaaactactggggtctctaagaaggtattcacgctgttagcatcaatcttgattaaatgtcctcttaccctcacttgcttatggctctggtctttcgggctgtataagttggcataaaactccttcaccacaattacatttatgctttcatcttggaaatgggtgaggcctttgtgaaactcatgcctctccaactctgccttaaactcg

SEQ ID NO: 202039 - DNA, 459 bp, Glycine max
ttcttctctcggaccttgaacaagcaatcaactcctctttcagaactatgctatgtgctcgcgactggtccctttcttcccttcgcaacttgagttcactattgctaccccatagagctccgcgaaatttgttccggccatactcttccttgcgagccctcttggtctcttgttcaagggctcttgcggtaattgcattctcttcccgtaacctggcacactccttccgaacgtgtgtagcagccaacttgaacctctccttggcgagttttgcctttcctaactcgctctcgagagcttggacttcttcgtcctcttccggtgcttcaaaattctcttcgctgacgacttttaacttggcgagccaatctaaacctcgtatgcgaactttcagccattcgtggtacccaccaatgatgccattacgaatgcctctaagctcttgatcttttcttaacg

SEQ ID NO: 202040 - DNA, 429 bp, Glycine max
  unsure (1)..(429): unsure at all n locations
agctncaacctctacaaagagcgggncttttgcttgtcttaaanngagncacttcttctgccagctcaccaacctggatttttgcactttggaatgcatcgtgagttgatttagttgtttccttgaattgcatcaacaaattatccagattggaacctctttctgcttcattttgatagtagggttgtaactctggccccccttgaaaatttttctattgagtagctcttgccaaaatgaatttcatgatttttcattgaattttgattggcttttgagatatcatggtatgccatgaattcctcaaacacactttcaagattaggagttctttcttcttcatattgatggtaagggactaactcctgtcccacctagagcattcatgggtagagatgaaattgcattgaatgctccttcacaaaatat

SEQ ID NO: 202041 - DNA, 446 bp, Glycine max
  unsure (1)..(446): unsure at all n locations
tgagaaaacttccctgagaagctagagcttatctacacttttctttctaataactaagctcacctccttgagaagattcctaaagaagctagagcttaggtacacacacctctctaatagctaagctcacctccttgagatgagaagctagagcttagctacacaccccctataatagctaagctcacccccatgacaaaatacatgagaatacaaaaaattccctactacaaagactactcaaaatgtctcgaaatacaaggttaaaaccctatactactagaatggccaaaatacaaggcccaaacgaaggagaaacctattctaatatttacaaagataagcgggctcatacttagcccatgggctcgaaatctaccctaaggcttatgagaaccctanggccttcccttggatctctggcccaatctacttggagtcttcta

SEQ ID NO: 202042 - DNA, 434 bp, Glycine max
tctacattatgagcaggcagattatattctcttacaaggccaagatagagcaaatcggagagattctcaatctgagatggaatcttccccatgaatcgagtataacagaggtcgagatgagtcaaggaagtccttgcacaaaggaaagaatgaattgacataccttctccaaggaattcattgcagctcaagccaagataccgatgcttagagagattgcccatctgacgaggaatcttcccacggaatccatcatcagagaggctgaggtgagtcaaggaagtcattgtcccaggaaacaagaattgacataccttcccaagaaaaatcgcgctcagtcaataattcaatgcttaatagcaaaaaggactatctttcacaaactcatctctatacttctatcaatatacggaaccatctacagccaaaaataa

SEQ ID NO: 202043 - DNA, 467 bp, Glycine max
  unsure (1)..(467): unsure at all n locations
gaacttaactacatgtacttgctaagtacacatttattttacctatntcctatgcattgtacttaaagagcttagcctatatcaaatcatgtcccttaccttggtatgtgatggctgaaatatctctttgggagagacaccaaaattcaaattttacaacaacttcttcatcaagtttctacctattttgctatttcctaaattaccctcacgtatgcctttaaacctaagtctattttgccacaaaaaacactcatttctccttattttcatctggatcatcttagcacagacatgttctctctctctctctctctctctgaccctctctcttcatttcatttcatttccaaactcanagtgtacagagggaataagacaacgaagaacggtagtttgaaaccctacatctagctccattttctttgaatattctatctatcttgctttcacttcttctttcatct

SEQ ID NO: 202044 - DNA, 428 bp, Glycine max
  unsure (1)..(428): unsure at all n locations
agcttgngtgttagataatgtaatggtggctcctttctattctctccaaggttttggccaaacctttccagttcacaaccataatttctttgtttagacggcttgttggaataagcttgntctgcatgtgcttttgatatttctttgcaagctttactagagcatctgcattaatttcaaggtatatattatctttctttcacatgaaaatttgggagtacttattttgtagcaaagtccattaaattagaattttgcactgaataaaataacaaattgggtagaatttactggtaagagtaacttgtaatctttcttctagattatattgcgagtagtgtaacgatggatttaaaaagattcatgatataagaaagaggaagacaataaaggaaattgtagatttataccctgttcagccttaattt

SEQ ID NO: 202045 - DNA, 436 bp, Glycine max
  unsure (1)..(436): unsure at all n locations
gacctatattactaagctaacaagctctcntatggtttgagtttgaccttattatctattatggctttttaaaaagtttgagctcgacctttatagtaaacaaaccaagccgagccgagccgagccttacataggccgagccgaaggccctcgacaagctgctcggctcatttccacccctaagtacacgcgtaaagcttagggactactattggccccgaccttattgctactcatcgcaccaatattttaattttcaaaaatacccttccccacattgtatagtagcattgtactttcgctgtattattgggggtgaaaaaaaaacccaatagaagtatgattttattggataaatgaggtgtcaaaacaatctaacaatagaaacacaattccgttgtgtattggtcaacaaaattgtgcttatgttgtatta

SEQ ID NO: 202046 - DNA, 273 bp, Glycine max
aaagggatgccccagattatttccatgacacggatgcaaagaagatgatttgcaaagtctatgcctaactggatacgcatgcacctatgcagacagtcaagaggctgatttttatggtcatgagatgctggggctcaagactcacttgctctatgctagggaacccaacgctggcaaaatatgtacttttatcaatttgcgcattcatccgaatgcattcatcgcggaagggaaagacttcacagcattcacccttcatgtgatacacatttt

SEQ ID NO: 202047 - DNA, 418 bp, Glycine max
atggaaagacttggcaactgccttcttatgcattaccaatacaacacggatatggctcccgatcggaaccagctttagagcatgaccaagcgagaacatgagtccattaaagaatatgcccaaaggtggagagacctcgcagcccaagtcgttccgcccatgactgagagtgagatgatcacaattatggtagatacgttgcctacgttctactatgaaaagctgatagggtacatcccagctaactgtgcggacctcgtcttcgcccgagaaaggatcgagtccggactaagaaaaggcaagtttgaatatgcctccaacgttacccccaacaacaacagaagagccctagtggtgggcacgaagaacaaggaaggagatactcacgcggtcaccaccgctcaacatggatgaaagc

SEQ ID NO: 202048 - DNA, 434 bp, Glycine max
  unsure (1)..(434): unsure at all n locations
gtgttcttgaaccccttttccatcaagcttttgttttctctattttcaattctaagcttgattgtcacttaattttcttgctcaattctcacttgtagtttcaaaatcttatttttgcactcttgaatattggaaaattgaatctaaactcccttattcttctttctaaattttgtggagcattataagttaggggggtctctccaaatcttgaaccctatacttgttaaacttccttgaatatgtttttgtcttgaaaattttgtattgctaccctgatgaaatcctacccnccaagggcattggatagaagactccaagaagattgggccacagatgcaagagaaggtcctagggttctcatgagccttanggtagatttcgggcccatgggctaagtatgagaccacttnattttgtacatattagaatat

SEQ ID NO: 202049 - DNA, 426 bp, Glycine max
agcttgcactgcactctctctctttatatttctctctcctttatgcacattgatccacctaattaattaaattagacctattggcgtctaactttttattttttttcttccaaacaaaccaaatactattattattaagagccataagattaatttgacccaaaaatgataaggattacatctaatagcttgcaataaagggaaccttgtgcgaaacatcccagaagggattatgtttcttgtttcttcctgtactaaaaaacatgattacgattaccaaagacatatttttataatacaatattttccctaaggacccaacccaatttattttttgtttcttcctgtactcagaaaatatcatgcaccaatggttatgaatcacaagtaccgctcaaccctagagcagggcctaacatatataat

SEQ ID NO: 202050 - DNA, 378 bp, Glycine max
tgatataaacattgacaagaatatagctgtatcagtatcaagttttcaattactaataaaactaaatattgatacatgaaacagagaaatggatacaagcttcatttgattgtatatgcattataacttgcagaagtagcatagcatggtgtgaatcaatcatgttatatatattctcaacattcaatataaatccaatgcaattacaaacataccaaaatggcagagaagtcattatcaccagctatcaactttgacgacatactagtcttggcacagttaaatagggaatcctttcccagctattcaacctaacatcattggcgttcaaatattctagcaatgacatctagtgacaatcaaacgagagacgagacc

SEQ ID NO: 202051 - DNA, 407 bp, Glycine max
  unsure (1)..(407): unsure at all n locations
agctttacgaagagagttcgaattgctttttatgtatgactgngaaaaagtagatagtgttttggggcaaaccttgattgtggccaccataacgaaatccaatggagaaactatggtagagagtatagtggtgagtaaaatactgagctccttgataggtaaatataattttgtagtttgtgctatagaggaatccaatggcataagcgttctaacctatcgatgagttgcatgggagtttacttgtacatgagcaaaggatgcctggactacaagaggaggagcatgtgttgaaggcacctcatgaagaacacactcgcccaaacactcgagaggatcatccatcaaaagctcgggtccaggtgcgttcataggagaccatgcacatggagaagatcacaatcctt

SEQ ID NO: 202052 - DNA, 215 bp, Glycine max
gcagcatgtggcctttctaccacttgaatctgagactagactatatatattcacatagatgtctattattgcgttattccacaaaaagatattccgtgactagtgattgccgacataaacgatgatgaaagacaacctgacatatgcgaatcaattaatgaaatgaatgatcgtcgctggcgcgtatttattaggatcgctgaaggttgaaagga

SEQ ID NO: 202053 - DNA, 397 bp, Glycine max
  unsure (1)..(397): unsure at all n locations
cccgcgcgcacgcacgctttaactctaagaaaaatatatacttctctctctnaaaccaagaaaaaaagaggaattaaagcgggacactctgcgccatataaatacacttttaacctcgttttaggtggggaaaggggccaaattattgaggacattacttttatacttttattttattttatgaagcttcacagaaaaaaattatttacacaaataatgttgcataaagtattttatttcgagactacccttaattcgtgggagttatgtattacaagagtaaatgactccttaattatagagatacatgatacgaagttacttaatattcttcttaaaatctaacacaacaaatcgatttcttaatatttatgccaaaaccttaacattatataat

SEQ ID NO: 202054 - DNA, 166 bp, Glycine max
ctgatgcacccttgcagcaatgtgccactcttcaatgcctatgagaatctgtaatactacgatctatgatattattttctccgacctgctctattaattgcgttattccacgaagaagatactccgtgactagtgatcgccaccatcaacgatgatgaaagacacc

SEQ ID NO: 202055 - DNA, 447 bp, Glycine max
gttgacaccaattctgttacatgcaatatcatctatatgttatctcactctctcaagcagcatccacatagaaatgtttctccccaaatcctgtggttgcccagggctgctctgtcacaagagaaattggaaatattgtgtttaagcttataacagttgtgaatcatgccgaaagtatgtaaaagtagttcatcactgttttcttccataactacagcagtaatgccaagattaatgtgtgtgatttgcattaaaaatgggaaataagggcagccattagaagacatgcctaaactagtgtgggagactgcagtgactaaataaagcacatggctctacagactagcaattgcaatatatcagcctccctacaattatatctttttaatatgatttcatgttgcaagaactcttcattgagacgctttatatgcctatagctacaat

SEQ ID NO: 202056 - DNA, 292 bp, Glycine max
  unsure (1)..(292): unsure at all n locations
agctttggatcacgaatttgttttgttcttttcatgnccagcagaagaaaaccttgacaagaagtgtcactcatccactgccatgaattgtgattcatcggagcttgacattaatccagtgttggattctgaaatggcaaacaatactctgcctactaaagaggtttgtatgaatgatgttcttgaagttgttccttccgggaatatatctgaagataatattacaaaggggaataatcgaaatgtagatgaatccagttctgctctcaatcatgctgatgagagtttattc

SEQ ID NO: 202057 - DNA, 408 bp, Glycine max
  unsure (1)..(408): unsure at all n locations
ggaaattaatggagaagtaaagtttatattcgttctcattttggttggggtgatccacanaacatagacagagagagagagagagaggttggggtgcatttgntgcagagccagacgtcctggtataacagttacatgaagctatctacctttntcctgctcggtgaggttaaggatctgccacgtgggcacactctctgccactgaccacccacgtacgttgttggatcattgcaatntgcaacatatcatcgtcaatgctttactactagtagtttcttttctactaacttggacaaataaatgtaaattcaatatctatagcgatcaatttttaatgtgtatgtctagattaatttcttgtatttaaaatttacaatagaaaactcattaattgttatatactcg

SEQ ID NO: 202058 - DNA, 431 bp, Glycine max
  unsure (1)..(431): unsure at all n locations
agcanngaccncggatcccgctggggggactaaatttatactcaaacaacacanggggacaacattgttaaaaccaaaacataatccgcagatccctcatttaagactaagcttcaatcctgcttcaatcaagttctaaggcaacaaaacattttccaatgctaaagtcacctaaccatgcacataaatggttgatcaaaccaaaagcctacaaaatttaagcattgaacacaagaaacacaatcaattagatattaaggtaattacattagttgttctttagaaatccccaacaatggtgtttagccagctattacagaaaaaaccctaacaataatgagaataagagtagagaataactgctccttacacagaaaggggagccctctcctctctcagcattgacaaacctctacaactacaatctgtct

SEQ ID NO: 202059 - DNA, 495 bp, Glycine max
  unsure (1)..(495): unsure at all n locations
tagagaggaagcttcaatggagganaagaatgagagagagatgtggtatgatattgaaggagacaaaagagggagagaagtggaactttgaagtattacacattagagaggaagcttcaatggaggaaaagaatgagagagagagggggggcatgaaattgaaggagacaaaagaggaagagaagtggaactttgaaggtcagtaactaaatgaaagcttccttgagaagcttccttgagaagctaatgtttagctacacatcccctctaataactaagctcacctccttgagaagcttccttaagaaacttccttgagaagcttccttgagaagctaaagcttagctacacacacacctccaatagctaagctcacccgccagccataatacatgaaaatccttagctacacacacctttctaatagctaagctcacccacatgccagaatacatgagaatacaaaaatgttcctactacacagactactcata

SEQ ID NO: 202060 - DNA, 422 bp, Glycine max
  unsure (1)..(422): unsure at all n locations
agcttaggggtnggaactagaagatcaattcccctttctttaggggnccgatataaatggaggctcctagaatctatttcatagccagaaagaatgtcttatctttgccaatatatatctagaatagtaatggctgctgaaaatctgttcccctctggaaggatcaagtattatcttcctctataaattagagcactctaaacgtaactattttaatgagagattcttatgcagtgcagatcatgatgcagataatatatcacacttcattgttagttatgctgccaacattccaaatttagcggtgagaaacttctcatgaatgctactggtaattgtccttgatgctatgcgatactgggatgtcatgcctgactaccagttgcttcttcctagaactatgaatctaatcctactcttac

SEQ ID NO: 202061 - DNA, 498 bp, Glycine max
  unsure (1)..(498): unsure at all n locations
gctgtctgaggtcgggctacaaacaaattatggttgttctaatatgatttagcttaagttataggagagcattcatccatagataaactcttttcattattatttccagcttcaattacttgcctttcagcacttagctntattagataacaacacacactcagttttatttttgatacttacagttttttttaacagcagctttttactttattgtgtgtgttgtcatcttcttaccattagaagttgtcacccaataaactcccccacatatgagacaaatttgctttgaaccataatgctctcctacaacctaagacaaggtaggtagagatataatttcataggctcaaggttcanatcaagcaatcagatttttagcttaatcatgggtgcaaaggatatatcatntcattcacaaggtaagctcttcggctaagtgagagtttcaatcaatcatggncttcatnctcttcacattcatgcattcattccata

SEQ ID NO: 202062 - DNA, 445 bp, Glycine max
  unsure (1)..(445): unsure at all n locations
agctttgatgttgtgtgtcgaagctagatttgttttttnttatttcatcacttctcaagcagaggactttgttttccaaaggggtacctttttttctttatttcggtgccacaagcagggatggttggatcagtaagtgagagattactaataagagctgaatttgagggatatggacaaggaaaaagaggaagaaatcggtagaaaaagaaaaacagtttgaaaaatttgaaggatttaaatgaaattatttgatggtgtgatatttatattttctaaaaacaattcataaaattcatcaaaatctattttagaaaaaaattattaaaatttgtgaacttttaaatactagaaaacttcttataagttataaaaaatcatattgaatatcaatgaattntattttactctttaaaaactcttaataattntaattgaataccat

SEQ ID NO: 202063 - DNA, 472 bp, Glycine max
  unsure (1)..(472): unsure at all n locations
gagacagtgtggaagagtcagtcttcctacttttattcgtttaccacagagtggtacctggagatatgtcgcgagggtcaagagaccttgnggacgtcagatggggtgctattgcccaaaaccaagcttgaccaatcccgacccaacccggacatagtcagtcagtgagaacctgtgatgtacctaaacaggtgagctcctggcagtcaaccgataaaagaacaaagaccacaaagcaaggaggcttgtgtggtggctggccagctatggatcttgagtgatatttggaatatggcctctggtagtcgattaccaagggtgtgtaatcgattacaaggtttaaaaatgaagacaggaagttaagatggcctctagtaatcgattaccaaaggtgtgtaatcgattaccaggcctacaaatgggatcaggaaagtgagagggcttctggtaatcgattaccaatgggtgtaat

SEQ ID NO: 202064 - DNA, 232 bp, Glycine max
agagccgccgggaattgtggcccagggatccatgacaggcttgcgcgtgaacaaagctagtgccaccccatcatgagtttgatttcctcaacaaatctgggcctgttaatcccaacctaacgaattagggacatcagatgagggtgcgaacggttgctatgagataccgccaccccaatacatcccacagacaatgtcactcccgacacgtggcgcgaccccatgagtggca

SEQ ID NO: 202065 - DNA, 455 bp, Glycine max
  unsure (1)..(455): unsure at all n locations
gatgacataaaggttcccttgtcacaacacattatctattttatctgttgatgaaggcggtcaaaagaagatctatctgccttacatagtaaagccttcgttattacaaacttacgttgaatcacatcagctctgttacaataagaggatgtaaaaaaatcagaataacagagcatagaaatcttggtgttaggaacccagaatagaaaatagtaaaaagaaaataaaagttacatttctagattgaaaatgagcaaaacatggtaaaaaaatctctccgccaagggttttcccctttcacagctgagcatttgctcaattccctaatgctaacaaatcagaatgatccctcttcccttatttaactaatccgtttcaactaattgttcctaactaatcctttccaagttcaagcaatcctgatatctncaacatgaacaaatggatcacaacta

SEQ ID NO: 202066 - DNA, 414 bp, Glycine max
  unsure (1)..(414): unsure at all n locations
ccgcagctgcagctatgatcagctttcctctaggattattttttcttgtgctccgnngnaaaggcngttatccattaggttttaactgatttttttttattttggtgcagaccaatgaactttatcaattggcatcagtggcattctgcctacttgttgcttgggtgtgtcctttatcaagtcttaatcttcattacttggcaaaccttgtcttctgtcaagnctgttttattatctacactgtataataaccttaatcttggacaagtccatggttgttttctcttgatttgtagccttaatcttggacaagtctggttgttttctcttgattngtaatatgcaccaaactttatttctctaaatctgagggattgcttanatgcattcatgcctgaaacttatttatacata

SEQ ID NO: 202067 - DNA, 450 bp, Glycine max
acctcttctgatgactcatttagtaaatgatccacattatgtctactgcagatgcactgcagcatagtaacaaaaccatgcacttatttagttaatgcttacgaaataaaacaaaacaaaacagatgtgaggtatgtcctacccaagaggaccaaatggtagccatataacatcccaacggaacttctgcaacctaccaaaaaaatcattattatttaacagtaaaagatgagaagcacctagagatagcagacaacttaattgaagagtgtgcatgaaagcagtgtaaacatttgtttgttcctccttaccatattacttgagtagaatgtgtacaagcttcttttatcgcatatccgccttatgtatctgggcccaatagtagagcctgttgattcaagtagctagaaaatccaaactgaatgccaatgtttcagagcttataatatg

SEQ ID NO: 202068 - DNA, 439 bp, Glycine max
  unsure (1)..(439): unsure at all n locations
agcttcactgttgactttgaaattttagatgatgatangaagancaaggatgaagccccaaaactgatagtaagagtgttcaaatttttatttcatctttttctagttccacaactattcaaagttattttgcatgcaaagcaatatactaccagtaatacaagtagtagtaggttaatcacttaaaaggatgtttacgactacaattatagagggaaaataaaaggagggcaagttttttttttatattgagaattatttgatattttataaaagtaaacaaaagattaggaaattaagtttatgttaattaatcattctattgctttcatttatataaaatgaattagagaatatctattagaaaataaaatgttgtcctcccttccctttccctccaaaacttaacccccaaatataacctaaatgatccctcatt

SEQ ID NO: 202069 - DNA, 432 bp, Glycine max
  unsure (1)..(432): unsure at all n locations
catttcgttatttcatgaattgagcttgtattcgtactcagcaggttgcttaaatctaccgaaattgtacaattaattgtccttaactacgtatagatttgaatgtaatgtaacaccaaagcgtttatgaagtcagttaaaattggttggatcactgatgtggtaataagtaaaccaaactagctaggtagtgcctacaatttaatgaggattgccttattaatgtacatagatatttctagtttcgtatgaccatgtgcatgttcaaaactagtttatgagaaatcaaacatcactttccagattaactatctntcactaatggaagaaaaaaactatttttaactgtggctactttagtttctacgaagtacgataattgtggggagagaaaaagaccaaagtagagggttctgagtctctataacttca

SEQ ID NO: 202070 - DNA, 433 bp, Glycine max
  unsure (1)..(433): unsure at all n locations
agctntgaaaagggaagagnatcaccttctcgctatatccaaccgctggcttagcgagtgtctgctaagcgcaacactcattggctaagcgcaaggaagaatctggaagaagatgagttgtgcaggttcgctaagtgcaccgcttcatctcactaagggcaccacttcactccatccgctaagtgagaaaggcacacgctaagccgaaattcactaatgtgcattaagcggtccagaattgtgctaagcgaatgagcacgaacaaggccacctatttaagcctaaaattatattctgtgaagagagtttgcgctgggattcacagctttgcatgtctagagattctagagagagaaagggccaagtttcacagagttttgagagattttgatatgtgaagatctgcagagactatatcttgaagcaggagtcg

SEQ ID NO: 202071 - DNA, 443 bp, Glycine max
  unsure (1)..(443): unsure at all n locations
tgcaaggaagcatgacttatgcctaggaatctatattttggttttgaatgtgaaaaggcatgaatattatgacatgcctgagagggtttttactagaatttggctgccccatgaggaataccttgcacctaggtagcatggaaaatacctttcaatggtatgtatatatgtgaatataggtagcatggaaaatacctttcaatggtatgcatatatgagaatataggtagcgcggaaataccttgcanagtgtgtgaatatatggcataaaccttgcaaagtgtgaatgagtagcaaaaatgcctttcaacatatgcatatttggggataggtagcattaggtgccttttagaanatgtacccatgtcaaanatggcatgaagaggcttcccaaatgaatatatgatgtggaattgcccctcacaatgtatatagatggcatg

SEQ ID NO: 202072 - DNA, 334 bp, Glycine max
  unsure (1)..(334): unsure at all n locations
agcttaaaaataaacacaatttttnttttcctcttttcaagactaaaacaaaatatatattcgtgttgtctaaaaagaatttatagatggtacttttacatattctgacaaaaattcacgtataacaagcaagatttcgctgctcttcttatgcattaccttataatttttcaaaaacaagatatttttgtaattgttggtaaaaaaaattgaagacaaataatattttttcaaaacaaaaagaccaaaataattcaggttccaacaataatagagaattccttttcagtgttttgccattatctagaagttaaaaatattcttatgtacttta

SEQ ID NO: 202073 - DNA, 465 bp, Glycine max
  unsure (1)..(465): unsure at all n locations
tctgatctctctctagcagtgtttgtcattacggcattgcagntaccgatcttgtcctaagttgcctcccanatgtcagcgagaaagggttctgggttatgggtaatggccatggactgcagaaactaacttcaatcacaattgattgctgccgaggagtaacagatgttgggcttgaagctattggaaggggttgtccaaatgtgcaaaacttcaagcttcggaagtgtgcttttctgtcagacaagggattggtatcgtttgccanggctgctccatcagttgagagcctacaattgcaagagtgccacagaattacccaacatgggctctttggtgtcttttttaactgtggtgcacaactgaaggttcttactctgatcactgctatggatcaaagatttcatatggattgcctgaatatctcctctgatcaattggtattacaatccggactgcctgatt

SEQ ID NO: 202074 - DNA, 315 bp, Glycine max
  unsure (1)..(315): unsure at all n locations
gaccttaagcgacgcagctgcagcttacacagatttaggttgacccttctttttagaangaaaagaacttcatgccattaacctagggaattaaaaaacaaaaacttaatggctgagtgtaactgaaattgtggcaaccaaaagtcaccctcaacaaccaacaagtcagccaccatttggtctcccaaaaggctgatgcctaagttgccaatacggcccttattacaacctggactaaacctaataaagcccttttagttgattaacccaaaacatatttttggtcagccaactctacacgattggacccttttt

SEQ ID NO: 202075 - DNA, 264 bp, Glycine max
cttcgatagaggctggatcatcgagctctttgtttgttctttaatgagaggacccaccagggagatgcagtggactacgaaagaaacaaggcgtcatgaagccccattcgctatggaatgaagcatggcttatagagcatcgctacccagagtaccatggcttacactcttgtgagcctgcgtgccagtgcgacacgacagaggggccaaattagatagaggtggtgcctgaatcgaatgaacattaagggtgcgatatctaag

SEQ ID NO: 202076 - DNA, 326 bp, Glycine max
  unsure (1)..(326): unsure at all n locations
agcttaataagnccatttttggtttgttttgcctcccgccagnggtatttaaaatttcataagggcatttcttcatttagctttgaagagaatgtcatggatcactgtatataccaaaaggtcagtgagaagaagatttgtttccttgtattatacatagatgatattctgcttgcgactaatgataagggtatgctataggaggtgaaacaatttctctcaaagaactttgatatgaaggatatgggagaagcatcttatgtcataggcataaagatccatagagaaagatctcgaggcattttatgcttgtctcaagaaaccta

SEQ ID NO: 202077 - DNA, 257 bp, Glycine max
  unsure (1)..(257): unsure at all n locations
tgaggcngctgcaaaggcgagcctccatgaccttgccacctgggagtcctgactacctaaacttcacaccatgcttgggaatgatgaagtattatttaggcgaatctttcaatctgaacaagaactaataatgctactgcctaaaccagataaaagtctgatcttggggcaactaccatagggatttactatcatatgataggtgaaatcattaaaaggccactcttcattacctgaaccatagcacaataggttat

SEQ ID NO: 202078 - DNA, 212 bp, Glycine max
acacgtagttattcatgctttatatttgttttacataggttactgaaactatgcaggaaatgagtaaggatacttttgttgtccatactcattagagagcagatggaagatatataaatgatagaggctcaaatattgtgcatacagaatcatatcctttttatgtatttgcaattttgttattttgcaagtgttctgttaacatcatttat

SEQ ID NO: 202079 - DNA, 344 bp, Glycine max
agcttggagtgtacaatattgtgttaaagtggtacatatatatatatctaacaagggagaaatattctcgaaattaatttcctagagctggagtagaggtttgaagaaaagtaaaagcacatatatatttcattaggtgatacacacaccaaagagcctcagacccttttgtgcattgaaatcctttccaatgtgtgcatcttcatcttcaccttcttcactgccagctaattgtaattggtttcccaaaacttgtttggggtctcccttgctgacttcttctgcatttatattataaaaaacatcgaccattgaaaaagcttctcccttccctccattttccc

SEQ ID NO: 202080 - DNA, 269 bp, Glycine max
caacaacagcgatacaccttgtgcggttgtcctcggtaacattaggtccgctcacagactcctttgtgaaggcttgcaaggtgatggacagagagctgaagtgcaacttcagatagattgctcttgtagcggaacacgggtttgaccttgtgaagcacggcaagaccttgttatgcgaatgtggggactccaaacaatatgggcacccagaatcgtcaatggttctttgttgtgccaagtgagaatgaccacaaccacatttccatgga

SEQ ID NO: 202081 - DNA, 438 bp, Glycine max
  unsure (1)..(438): unsure at all n locations
agctnggtcttttccaaccatagctntattatntgtcaattattcctgtattatccaaatctccactagatgcacgtcatacatatgcacggtagatttcttcacgcaaagaacgattgcgagcatgttgcaaaacaacaataaaactaggagcatctaatgtaattatccattccccattctcagtggtggcattttcatgccccttcatttgcccattaggtaaccagaactcaacatagttgattttcatatcttgagaatataataaaagtacaaaacatgtcaacatgacataccttggatactgcactatgtgcagccaacccaagagcaataacaggtaatccttcaatttcattcttattagtgattagctntccaaacttctttggtgcatccagnaacattttcccaaacttttgcaactcctatgga

SEQ ID NO: 202082 - DNA, 482 bp, Glycine max
  unsure (1)..(482): unsure at all n locations
agtgtttagaaaaataaataacagagccattcgtatttttgaaaaagatgttataaatggagatgaaagcagtaaaagaacatatgcagagagtagtagtcagtgagtgaattagatccagattgaggtcaaattaaagccattctgctgcaacacttcactttcacagctagttagctagctctatagctatggtaggagcagtaaagtgtgtcataatagcttgaaaattgcttttattaaacaaacatttggtttaataagtatttaattntgatagaattctacaccattcattgctaattatactaatagttntacatgcccgacaganaagaaaaataatataaacttgcaaaanataactattagaagaaaaaagaagaaaaaacccacaagagactgataaaaaaaataaaacatattggttaggcttctagcctgacacccttcatgcncacagatcagacgattattagcat

SEQ ID NO: 202083 - DNA, 426 bp, Glycine max
  unsure (1)..(426): unsure at all n locations
agcttcttacacttagtgctntggacaattaccnatangatgatctttaaggctccaaaaagttcttcatgggacatgttgtcaagattcttcaaagatctcaacattgtaacatgtggtctccattttgttgacaaacttctcaaaattttgtcaatatgatcataattgataaaggttatacctgaagatcttagttcatttaatatggttttgaagcgtccaaacatgcattgtatgtcttcaccttcttccatagtaaataactccatacttacgcataatgagactcaactagttccttgntacctatgacgacccttcatacattatggccagtgtgtcccacatttgctttgaacttttgaagttgtgaaccttggtatattcctctttagatagagtacactatagaacattttgagc

SEQ ID NO: 202084 - DNA, 443 bp, Glycine max
  unsure (1)..(443): unsure at all n locations
cccaatctgttattgtcttatgtaattttctttacgaacatgtgctccaaggtctattattatcttatgataaaatgtcataggttcctccatttttggcaaaaattacttttaatttttataaaataatgattttaattcttgtattttttagtgaatttcttccaatttttttggaacttactataagtttttttataggttcctcaattttaaaaatgataaagtatagaagccaaaatagattggactctatattntattattattattgaggaggggttttaatttatgtatgttttgtatgggtatggggaccctacgttgatgatgtctttgatagctcgatcgatggacgtggataaagcaccacagatgtttctgcagtggaagaagtggaggtctcgcatggtgccaaatggattcatttcagaatctgaaat

SEQ ID NO: 202085 - DNA, 404 bp, Glycine max
  unsure (1)..(404): unsure at all n locations
agctggataatttctgcacattgaggccattattatttattatgattcgagtgctctattttaacacactacaagatgtctgtcaaacactgcaatgaaaacatgattattatacatgtgtataatagaatcatgtttttgttgtgattcatatgacaaggaaagtgtaattatgttgcacacgggtactatggaaattaatatactttcattgctatgtacgacatgaaaaaatatatatatacaatcgaagtatgattccattgtgcatgtatgcagttgaatcacacttctatttctatacttttgntttccaccccatacattgcaacagaatgtacgaaggaatcattattctgtaagaagagtctttttggaattcagtataaagtcactcacatgag

SEQ ID NO: 202086 - DNA, 475 bp, Glycine max
  unsure (1)..(475): unsure at all n locations
tatgatgccaaagattcttcaaacaagattaattgttatcttgaagattcaagcgaagattcaagagaagactcaagatatgcaagaacctcaagagaagcatcaagataagtataaaaagaatttttcaaagaaaagattgaatagcacaatttgtccaaaagaatttttcaaagaaaaatcttttaccagagtttttattctctagtaatcgattacaagaaggccgtaattgattaccagaagcccaaaacagttctataactgatttacaaagtagtaatcgattaccaatgtttttgaatgttgaatttcanatttcaagagtcacaacttgtgataaaacattntcaaacttgtgtaatcgattacacaacatttgtaatctattaccagtatttctaaacattggtttcaaatataaacatgaagagtcacaactgttgatgtgaatcgatacactataatggaatcg

SEQ ID NO: 202087 - DNA, 335 bp, Glycine max
gtattcgattatatgcaaattggcttacgtcattatttcctcctacaattaattttacagctttcaaactagaagttgagagagacacgtgtagatccaacgctagaatttgtgaaataatgagtgcggagacagaaatgtcccttgcacaaagaaagggcaatgaaaaggctgatttcttcttcttttctctcccgctagaaaaccctagtaaaacaactagaggataagctcgcggaatcttgatgaaccattagagacattgctattgcttccggaatacacacgtgagcccgcacagagatcagggatgaatttatctcaattggagtata

SEQ ID NO: 202088 - DNA, 443 bp, Glycine max
cagcacacaatatatgtgtctacgtccacgactacattattataacttttattacttgcacatataaaagcttacaaagtgtctttatatataacactaatgagacacaagtttttacaaatcaagcaatgtgagactaagattacaaaattctaacactttgcagagtgctagcaatccacgcggagctagctccttgaatgatagaatgatgagctccagtgttattttgaaaggttcgtgtggagggtggcgtattgtgtcccatgggagagagagataagagaatatggctggaaattgattggcatggtttcaagtacgagtacttactctcagtaacattaaaaatcaaaggagttcaactactaaaccagagatactagtatattacctccagctacagtaaatcggtgcagccgcttaactctcttaacatcatt

SEQ ID NO: 202089 - DNA, 375 bp, Glycine max
  unsure (1)..(375): unsure at all n locations
cgaacnnaagcgaccgcggctgcaagcttagccaccgtttttttttttttttcttcccccaaggggccaaacaaaaacgaatgaagacctatttggccactctaatactatattcccccttccaaaccccactaagaaagaaggatgaaacctgacggcccctcccaaaattgcatatcgaacttccattcccttccttttattgttttatcctaaccacacaaatgaagaccccaaacattttcacttctttttaactttaccctactatgtgtgcataccaattaatagaagaaaaatagcttggagttcacaagggagaaaaaagatcgataaaagatccatattccaaaactctcttgatacaacacccaa

SEQ ID NO: 202090 - DNA, 352 bp, Glycine max
  unsure (1)..(352): unsure at all n locations
tctaactttcccctgcagattgcagtttcaagggcccgattgaccaattcgcctaagattcttaatttagcactggcatctacaaggccataatgtccccgttttatagatgttntatgttgccatagctcacgaatattgatcatctctagaaaatgacataaatattctgtccaattatttgttgtaatctgaanataaaaacgaatgagacattgtcacattaaaaacaataatgaagaaaccatcaaccaagtcacaaatgataccacacatacgaagaagaaatattcaactcggggtcaagccatctcacgaaatatggacaattatgtattgctcatactaatac

SEQ ID NO: 202091 - DNA, 265 bp, Glycine max
cgcgctcaaagcttaaagtatctttgttgttgtatgatcgttccgcctgacacaactaaacggcgccaatagcatgtcattgttccatcttgggcctcaaggatttcctgctcaaaatgggtctggctcagattcttcttctgctattactatatgcattctctttttgctgcctgcaccccaacagacaaaattacccctcaccataaaccctatcgccaaacaccacaattgcggcccacctttataacaccacaacccatct

SEQ ID NO: 202092 - DNA, 433 bp, Glycine max
  unsure (1)..(433): unsure at all n locations
agcttgggatataattaaacgactttaattttagtgtttcgagnaacaaggaggtaatgagtgtgggtactgtataatgcattggatgtcactcattatacaattgggtattaaggataattgggaccaggtaatataattttttattttaacaagttacattaattatttgtttttattctttatgatctaaagttatgttattttatgttgtagatattagaggatgccacacaactgcccgatagtcgcttggaagaaattcgagttcagtgggctaatttctttttagagaaatttaaaaataaatcttaagttcttcttggtagcctagaatgtgcaataccctataatagtctaccatgagttgtttaatattgtttggagaatgtgcaagacataaatcattaatgtggaatagcgagaatgagag

SEQ ID NO: 202093 - DNA, 478 bp, Glycine max
  unsure (1)..(478): unsure at all n locations
aaatgtgattgaacttgagagaaagatntttctattataaatacttcacagatgaaaaaaaaattgtgtaaatccttaagaagttcatccattgaccaaagtatataccgctgctgatcaattcctgaaacatcattaattaattggtatgacaattntggtgtggaaaattaattttcaactcaagcaaacaatgttcaacaggcgatgtgggacccggattcttgaatgtctaacgtttaaggaaggatactattacactagttaggagacacgtaaattctccttcagtatctctccaatacaaaatttcagggttgtttttttctccgtgatcatcattttgtcatcaacttctcggtagaggccacagacacaccatggtttcagaggaataataattcagtacccttttgcttttcttctgcactaattagaactaagacattcnnaaatataccttctttcttcattttct

SEQ ID NO: 202094 - DNA, 316 bp, Glycine max
aattgtaaacaagtatcagtgaaaactagaagctatcatccaacaatagataaacaagcttttcacaaaggtttttcaaataaacacttggtgaacaagtgcgttaaagtgagcgtaaaagaacacttaaacaaatagcttaagagagaagttgaaacactaggtttatgttggattcactcaaacaaagccacatccaattctcctttgaaagattacaaagggttccactactcagaacttgattacacacaagtattctatcctgtcactcctggatatacaacgattgtctggaccactacaggcacaccct

SEQ ID NO: 202095 - DNA, 491 bp, Glycine max
  unsure (1)..(491): unsure at all n locations
tacaatgaaactcgctaacttagcaaagctaagatcttttctattgctcaagtttccttcgtctagtggactgacagcgttacaacacttattcgttntgtctcagaataatctctnttttttaacaatcttaacacaaacatcttcaggctttatataaacttcaaagcttcaagccattgaggaatcccagctagccgatgtataatagctntggcgcttgacacgaggttgctattgtgtaaagagagagtggngaccacaaatgctntctgcaccatttcctcatagaagtatagtttgtcggtgtggcctagtactcanagctgactttcaacatatagattgaaagaaacattaacaacataagacaaaaggaattaagaatgtcaagacaagaacatttaaatcttcccttttgtgcgttatagcacaaagttcttactgaatctatggacgttacattcttgtgagtggttccagtcttaaag

SEQ ID NO: 202096 - DNA, 381 bp, Glycine max
  unsure (1)..(381): unsure at all n locations
agctttatgatcatgagggagctaacaatttattttatgcaggnggaccttcttctaatagttctgacttgcagcaggctcttatccctcttcaatttccacctagagcaattccaaacaaaaagatggaagaagtggataaggagatcttggagaccttcaggaaagtagaggtgaacatacctctgctagatgccatcaagcaaattccaagatatgccaagtttctaaaggagttgtgtacccactaaaggaggctcaaaggcaatgaaaggattagcatgggcagaaatgtgtcagcattgatagggaaatctattactcacattcctgagaaatgaaggacccaagactttttgataccttgattattgggaacac

SEQ ID NO: 202097 - DNA, 283 bp, Glycine max
ttatgccaacaccaacatcctgccctgagctatggtgcaaacaatcaatgtagcgcaacacaccaggggattattgtgagagatggctctgctgctaccgccagtcctatactcactattttaccgcgctctcaacactgtcattacttgtccagaagactaaccgttttcttatcaaccgacgagataaactcatatgttctccataattacccctctcttgatgatttcctatctttcaaagacgaacatgcacttttgcacattcacatgacactgaccc

SEQ ID NO: 202098 - DNA, 404 bp, Glycine max
  unsure (1)..(404): unsure at all n locations
agctngagaaagataagtaagtcttgttttataaagctcaaagngcaattagagtgtaatttgcttttgggaaatattggagttcttttagggaattgtgtgtgcatagtatttgtatttgattctctaatagcgaaagntgtaagagatcttaaaaaaactagatgtaggtcctgatttgactaaactagtataaactcttgtgtgattctcattctctctcaactcttagccttgaattcatcttggtattgaaattgatctcaaagggccataaaaaatgtttttcatatgttatactcattgaaagttttcttgattgtgctgatcattttatgtgatcttttgaggaaactctgattaattgaaagggatcattttaatctgattaaagaacgaattgt

SEQ ID NO: 202099 - DNA, 342 bp, Glycine max
  unsure (1)..(342): unsure at all n locations
ctattacggacacttagaaactcagcttgtgattggcttcccgaaaaggatttatggggttaattagangccaatctgatcatcatgctctgagatatgcagcaaacaaacaatctagggcaactgaccagggtgatattgtgggagatgcctatgctgtgactgccattcctatacacactagtttaccaccaccccaacactgtcattactcagccaataaaccaaccttcttcttacccaccgcccggttatcgacttatgccatccctaaatccaccacacaggatgtttaccgcactttcaatgacgaacatgacctttagcacaatcccatgacac

SEQ ID NO: 202100 - DNA, 265 bp, Glycine max
aacacagaagtatgatatactctctgcaaaactacagattggctaatgagaggagacagggacatcgaaacagtactgcaacttaatagttcgagttcctactttcaatttgttgttcactaacattccggatataaataaagccctaaatctatatgtaatataagaggaccactcgaaccttctaaatataaattcagaccaacccaaatatcttacactaaccgcaaaaaaaatgtcaggataaactacttccgcataacat

SEQ ID NO: 202101 - DNA, 458 bp, Glycine max
  unsure (1)..(458): unsure at all n locations
tggcacactggatctccattttgattttcatagganaactcgccaaacaatgcaacatatcgatctggcctataatgaacataacaccatatagttcaaaaactttagctntatgtctcacaagagtgaagagacagataggagaatatttgcaacttgtctgcttgcatcaggtaaatatataaatgcataacactcctgtatgtattaataatcaaggttacattttatgtcaagtacaagtgtggtaaacctagtacgtgtctttctggcccgatatcgctactaacttacaaagattcctaaaacaataagaatcataatattttaagaatgcaaactatacacaagtttcccacggatatttacaaagcctcanattatatacacaactaataccagtacaaaaatattctgtaagctcaccagtgaatttgcagcaaatcaatataatcagt

SEQ ID NO: 202102 - DNA, 387 bp, Glycine max
  unsure (1)..(387): unsure at all n locations
agcttgcgaaagaaagatttatgttagctttattatgacatcagaaaaatggtattctcaagatgtagatcaacgactcaagtagaagtatgcttgatgattattgaaaaaagagacctaaacgatcaaatacatcatttatagaactagttagagaagaaagtttttatcttctaaagtatactcgtctcttgtaatattcgacatcccatcaagtaatgaatgacaaaattaacaaatgtcaaagatgaacaaatagaattgaagcaattagagttaaaaatgaggggagatnttgggttagagatcatcttcacggatacatcctanatgatagaaagaaagcaatgagattggtagatattgtgtacttaattataaaaaaca

SEQ ID NO: 202103 - DNA, 433 bp, Glycine max
  unsure (1)..(433): unsure at all n locations
ataatatccattgattaaattaaaagagaaactctccatcttatatagagttgcattatggggtacataattttttaaattntcaaaatttggaacgcattgggtttaagaatttccggagtttattaggtttgtccaaaatgattttgggcctatttgagctataacccttccagttttagaatgagttgtatattaattacattcttcttattcattttttaatcctcatttgcctcttcgacttaaagcaagagggttgtgtgccccactagttntaggtggagctatacacatattagatatatggttctaaatactcatcactgtatattaaattcattttctaatgtcttctaggcccaattagtgagtacgttagtcatcgtctaaaagttttgatagttgatgagataagtttgacaataacaat

SEQ ID NO: 202104 - DNA, 378 bp, Glycine max
ggatggaccttttaggttttgtaatgatctattacaatgcctatatgttggacctcccaaaagagtatggagtcagcaccactcttaacatttctgatttaacttcttttgcaggtggagctgatattgatgaggaggaactaacagctttgaggtcaaatccttttcaaggggaaggggatgatgcaatcctccctatgaagggaccaatcactagaaccatgagcaagaggctctaagaagattgggctatatctgcttaaaaaagccctatggttctcatgaaccttagggtagatttatgagcccatgggccaaggttgggtccaattatctttgtacatattagactacgatgttattatatttgggccttgt

SEQ ID NO: 202105 - DNA, 417 bp, Glycine max
  unsure (1)..(417): unsure at all n locations
ctctnntcttttgtttagtcaaaacttctaatgctcttaatctctcctcatctaaatcaaccaactcatctgacatcattttccaataatggtcgattggaatgtccatttgtttttgtaccctggctgattgcaaatgtatttcgaccggaagtacagcatcatgcccataagtcaatcgaaatggggtagtattagttgattccttaggagaatttctacatgcccatagaacttgatctaacgttntattccaatttcttggtttttgggcaatgtgttttttaatcaagttaattacaattttattggctgcttcgacctgaccatttgcttgcgcgtaatatggtgttgaggttaataatcgaaagccagtttctttggcaaattcttgcatntttcgtccagtaaaaactg

SEQ ID NO: 202106 - DNA, 404 bp, Glycine max
gcatgcacgctttgttactagttgttaaaaatatcatccattctcattatgcttttgattgagcgcatataattacagagttgaaaagaatttccttgattatatgcgcctttgtctcttatcatgcagtaccatgagttgaacaagcctgtattgtaatgacacatgtttcgaagttattacaattcattacctcaatttcttttttgagtatcattcaagattgttatcagaaattaaaaaatgcaaaaaaaattcttgttcccctaaaatagttatcaaggtttctgttgtatttttttcccaaaataaatacagactagttgttgtttatttccactctcatcacaaaatttaaattaattaaaaattatgttaagagtgaagattgaacaaaaattgtt

SEQ ID NO: 202107 - DNA, 327 bp, Glycine max
aaacttcctgctcttattggtgaccacatagtggtacctggagatatgtcgcgggggtcaggagaccttggggacgtcaggtggggtgctattgcccaaaaccaagcttgaccaatcccgacccaacccgggcatagtcggtcagtgagaaactgtgatgtacctaaacaggcgagctcctggcagtcaacagataaaaggaacaaagaccacaaagcaaagaggcttgtggtggctggccagctgtgaaacttgattgatatgtgagatattgtctctggtaatcgattaccaaaggtgggtaatcgattacaaggcttaaaaatg

SEQ ID NO: 202108 - DNA, 397 bp, Glycine max
ctgtatgcatgcaagcatcaaaccacagcatcatcataatctaagtgtccaacacttctttcattcaatgggatttctatgtctgaaaagtgaaatttataatgaggtaaatttgaagcaaactctcacctcacacaagttcatagcatcaacttaaacttgctcaaactgaatatacacctaaaattccaccgaaacaaaatttgactctccaacacccaattttgccctaaaaatggctcttggttcactttggacatatgtttttttctatatcacagtccaagctttctccccagtcctaaatgacattttcaagctatgattaactcactttaacctccatttaccacaaaattcagacttaaccttcctatctctcaaacctaactttttt

SEQ ID NO: 202109 - DNA, 431 bp, Glycine max
  unsure (1)..(431): unsure at all n locations
ctaagcttncccacatccaagtaatacanaattcacacagcagatactatcacagtcaatataacggggcaaaggcagaaaactctgcccaaaacaccaaccaaaatcacagcttttctcacttaaagaccccagtaacaattccttcgttccagctcgttaaccgttggatcgactcgaaaattttactggtagtctctagtacataagcctacattttgaccgttgggatctactagtaaacatccagaactcattctgcactattctttccacaaccagcaaaacatagcatttttctgcacttatgcaaaattctgctgcacaatttcacagcaaaattctgcataaagtgcagatttcgaaaatcacacttcctctcatccaatcttgcccaaatcaaatcctacaagtcccaaatcatgtatcaa

SEQ ID NO: 202110 - DNA, 399 bp, Glycine max
agcttgggctaagtgagttgtctcgctaagcccaaggtaatttatttctataggtttatgtgcatgcgctaagcgagccatctcgccaagcgcaattacctctctgtcttataataaggcttagcgagcctgtctcgctaagccattaatgttgcagtagttatgtccagctaagcgcccactggcgctaagcctgtatagtgtgtcacactaagcgagccatgctcgctaagcgtaattagctctctataagagaataaggcttagcgagtcatgctcgcttaaccacagtgatgttttaactaagcgagagtgtttcgcttaaccagcgactgtgtttatctgaaatcgagctaagcgcgccctgcacgctaagtgcatgtttcttatatctgaagg

SEQ ID NO: 202111 - DNA, 425 bp, Glycine max
  unsure (1)..(425): unsure at all n locations
actacgctatgatacttgttaatgttntcttactaattgtggtgtattggattttgtattatttncttttataataaactcacccctcgcaatttttgtactgtgtggttggtacctgtgatgatcgcgaacctttgtttgtgggagcagaatgacagtagtagtgaatgagaagtgagattcttttgtggagccaccgagccgacgtgatgacgctgggattattctgggagagagttgtattttgttaatcaattcctccatagcttgttccgtaattctttttgttgatttgaagatgtaaatcacaaatttaattatatgtatgaacaaatttattttccattatgtgaatgatgtgtactagggtactatatatatatatatatatatatatatatatatatatatatatatccgtgtgt

SEQ ID NO: 202112 - DNA, 411 bp, Glycine max
gcttggacttggccttgactcaaccccaatatttatctcaagagtgagggtttcctgcacttgtataccctattttatttaaggaatatctctaatcaatgtgggactaaacaccacccttgaggctacaattaaggtagaccccaaaaaggccacagctaaagtaggctaagagtgaccacaattaaggtggctttccaacactctcctcatgcccaaagcatcggcctaaagcatggcaatgtagatggcccaacaatggatctaggataactttgataccatcttagaatttggacttagggcctaactaggaagataagcatttagttatttttggtcaataagatacccccctcattctcagctaagaaagttaaacactttgtaattaatctggtcatattaatg

SEQ ID NO: 202113 - DNA, 422 bp, Glycine max
  unsure (1)..(422): unsure at all n locations
gcttctaaactntatacaagaatgaagctctgatacgcactgntagacatgtggtctcagatatcttaagaagggggggggggttgaattaagatattccaaactacttccccaattaaatatctatttcactttttattcaagttatgaattcccttaatgacaatcttcttaaatattgattcaaataaaacaatttgaatatgaatataaagccataataaataaaggagattaagggaagagaaagtgcaaactcagatttatactggttcggccacacccttgtgcctacgtccagtccccaagcaacccgcttgagagttccactatcttgtaaattccttttacaagttctaaacacacaaggacaatccttcctttgtggttagaattcctttacaacaagagactcacagtct

SEQ ID NO: 202114 - DNA, 415 bp, Glycine max
  unsure (1)..(415): unsure at all n locations
cctgtgtgtcataacctntatctaatgagctgataaaggtatgtttatgagctattntagcagcctcttcaattggatccatggtggtatctctcccataagcaatgttgtctcttatactcaaactgagtaaagcaggttcctgggtgaccagtcctatatggcttcttaaccattccagtttcatattctttatatcttcaccattctaaaagaacttcccctgaaccacagattggtatattaatctaaatctgaaatgacctataaagtgctttagatgaaatatagaataaatatgcaccatcgaggggaaatcaattacctaatgtcggatcatagaaccgctccatgaggggaataatactactttttccagagccatttctgccaacaagtgccacagtttttttag

SEQ ID NO: 202115 - DNA, 391 bp, Glycine max
  unsure (1)..(391): unsure at all n locations
tcgattaccagaagcctccatatcttcttgacctcgttntcaagcctggtaatcgattaccagagaccatcttagcctcctgtcttcatttttaagccttgtaatcgattacccacccttagtaatcgattaccagaggccataacccatatatcacacaagattcacagctggccagccaccacacaagcctccttgctttgtggtctttgttccttttatctgttgactgccaggagctcgcctgcttaggtacatcacaggttctcactgactgactatgcccgggttgggtcggggttggtcaagcttggttttgggcaatagcacccgacctgacgtccccaaggtctcctgacccccgcgacatatctccaggtaccactctgtg

SEQ ID NO: 202116 - DNA, 420 bp, Glycine max
gcttaactcatacaatttcattaactagaggatctcaatatgttgtttgtctttctaaggattaaaataattttaaacgttcaacatgtatccaattaattttgtagatgtgtatctgaatatgtagtatggtagagacattcttatgaaatttcatttaatacttaagttttttttatctctatgtgaacattgcataatgaaatcacaattgaatgcacaacataatctacctctaaagcaaccagtagaggaaaatgcaaattgagattctcattatttttccttttttattcaatttttaaaaaaacttaaatgacataatcaatatttcgttatggtaaggaggtgccaaaacaaattacaatggaatttcgaatttgttgtgataaaaaacttacataacggaattgtggattt

SEQ ID NO: 202117 - DNA, 412 bp, Glycine max
  unsure (1)..(412): unsure at all n locations
ttacattnttgtggctattctctctgtggngntccactcaatttatagngcttcttagaccaatagctnttaaggtggttggcccctcgcttcttgactgaaattcttaaatggatggcaccaatcctcttttccaattccctatatgacaactcacaaataaggaaacaaagaggcaagcaataaccaaagaccaaaaaattaaatgaaagctaaaccaatagagttttaacaagacaaattttcaaggattattcaacaattaaagcaatgaaaaggacatagaagcaagctaagactcaaagagaaacttagaatacaagatttgactcaaatcaactaataggctaaaataatttcatacactcatgaataaatgagttagacaaagaaaccagaaaaataaaattca

SEQ ID NO: 202118 - DNA, 409 bp, Glycine max
cgaggtacttacccgttgaagatcgaagaacgatgaatatctattgaagaatgtcgaagaacgggcgaaaaccttcgcgaaattcctcacggaaaacgttacggaaacgtttcggaaccgcctcggcttacattttcttcacggaaacaatttttccaagcaaattcgaaagagagagaagtacctaaggggctgaaccctttttctcttcacttcctcccttatttatagcaaaataggggaggtggttgccgtccagctcgcccaggcgagccaagttgcttcctccagaagcaacagccttctggaggaatattctggagggcccaagtgggcctgggtgctatttgcacccccatttttactaagtacacctccctctgctttttttggtgattctttattcgaa

SEQ ID NO: 202119 - DNA, 406 bp, Glycine max
tacaatcagatacgaatacacgctctatacgaagagaaaacaacattcattactgaagatgtcaacttctgttatagggttatgccctttggcatgaaaaatacaggcgctacatatcagagattgatggaccagattttcaaatagcagattggacgaaatgtcaaggtccacatcgacaacatggtcatcaaattccatagcatagcccaacacatggcataccttgaagaagtgtttgaagaaatctacaaacacgatgtgctccttaacctggaaaaatgtactttcagggtcggcaaaggcaagttcttgggctttatgatcacacatcggggaatagaagccaaccccaaaaaaggcatacccatactggagatggatagtcctaccagcatccaaaaag

SEQ ID NO: 202120 - DNA, 426 bp, Glycine max
  unsure (1)..(426): unsure at all n locations
ctctagctcgactcctaanacagaagatgagatagttgcacaatagaggttttcttttgatcagggagctaaccaaaattttcatgcaggtggaccttcttctagtagctctgacttgcagcagcctcctatccctcttccattcccacctagagtaattccaaacaaaaaaattgaagaagcggaaaaggagatcttggagaacatcatgaaagtagaggtgaacatacctctactagatgccatcaagcagattccaagatatgccaagtttctaaaggagctgtgcacccacaaaaggaagctcaaaggcaatgaaaggattagcatgggcagaaatgtgtcagcattgataggtaaatctggtgctcaaattcctgagatatgtaaggacccaagtactttttgtataccctgcatataggg

SEQ ID NO: 202121 - DNA, 393 bp, Glycine max
atgcgaagagcccaaatgattgattcaagatttcaagatcaagcatcaagaatccaatccatgattcatgattcaagagaagaaatcaagaagcaacaagtcaagacttcatataggataagtattaaaagattttttcaaaaaccaaatagcacagttttggtttagaaaagaattttctcaaattttctaagttaccagagtgattactctctggtaatcggttaccagtgaccagcttggttttcaaaatgttttcaaatgatttgtaacgttccaaaatgatttcaaatagtgtaatcgattacactatattagtaatcgattacaagtgaatttgaacgttggaattcaaatccaattgtgaagagtcacaacttttcataaaaaaca

SEQ ID NO: 202122 - DNA, 426 bp, Glycine max
  unsure (1)..(426): unsure at all n locations
gcttgcgcctcttcacgtctggaatatgaatgtagcatatagatccanagacctttatgtgcttngctgatggcttcttcccgttccaagcttcaattggagtcttgtcttttacagacttagttggacatctgttgagtatgtaaacagcagtgtagactgcttcagcccagaatgtgttaggtagtcccttctccttgagcatcgatctagccatctccataactgtgcgattctttctctcgaacactccattttgttgaggagaatatgcgactgtaagatattgctcaatgccttcatcctcacaaaatctttcaaactcgcgagaggtgtactctttgccacgatcacttcttagtacttttatccattttccactttgattttcaacaaaggcctttgactctttgaatacttcaaaga

SEQ ID NO: 202123 - DNA, 422 bp, Glycine max
  unsure (1)..(422): unsure at all n locations
agaagcttctcaggaagtntctcaagagagcttctcaaggtggtttctcatggaagctacctaggctataaatagaagcatgtgtaacacttgtggtaactttgatgaatgcaagtcttgtgagacacaactcaaaattcaacttctctccctcttttactccttcaatttcgtgctcccccctctctctttctctctctttttcttttcctccattgaagcatcctctacaagcttcttatccaaggcacattcttggtggtgaagctccttcttccaaggcttattccctagtggttggcgcctcctctcacctcttctcctttatctttcgctgcttctccatggagaaaaatcaccattgaaggacctcattgaaacttaaagatccagcctctatagaagcttcacaagcaagcttc

SEQ ID NO: 202124 - DNA, 395 bp, Glycine max
  unsure (1)..(395): unsure at all n locations
tgaaattgagagagtatgattattaaacactctttatggaagtactaagtatttattacctatacttaacaaaaaatacttataacactacaaaataaccataaattggaagagtttgatacattttacacaagttttatacacaaaatttagtcatattcaccgactcacatcctcacgcatcatttcacacgtgattntccctttttaatagttagtttacacatctgttcatataaatacatctcttttcacactagacacctatttactaaaatagctttactaagtaacacaagttccccgagagttcgatactcggttcttaccgttttatactacttgcgcgatccagtgcacttgccgaaagcgagcaagttcttggcaccgttgcc

SEQ ID NO: 202125 - DNA, 426 bp, Glycine max
  unsure (1)..(426): unsure at all n locations
ctaagcttctnttcattgctngcaatctgcaacaagacatcaatcatccattgttttgaattaccagatggaatgcagagctttgttgtactttggaacaaaatgtatacatgttaacatacttttcagcactttgcaatgctcaatgctgatccctttatctagaattttggttcttcaatattgacacctacttgatgattaagtcgttgcctttaaaattggaacattgaacctgtacagattcattttccgttagaattaatttcatattttgtggattcttaattgccatcactcttcattttcacattagcttcatcttctttaacttttttttatcgtagcacatgattgaggtcacattttagagtttagaccatgaacaagctatattctatttattggtgnaatactttgatttaa

SEQ ID NO: 202126 - DNA, 409 bp, Glycine max
agactcgtacctgctatcgctaggttggtggagcattcttatttctatccttagctctttagatgattattatgggtataaacaaatctcaatgatcaagtccaatggtgaaaaaactacattcatgatggatacgacttactactattactcagttatggaatttgatcttaagaatgtcgaatcaacattatcacagactgatggattagatattcggcaagcaactcatgagaaatctaaaagtctatgttgatgacatggcggtcaaaagcacgagcaccacttctcacacaaaagacttaacagagatctttgcatacatgataaaatacaacatgaggctaaaccttgagaaatgcatattcgaagtataaggcataaaagcccttgattcctgcttactcat

SEQ ID NO: 202127 - DNA, 425 bp, Glycine max
gcttgtcggataaatagatggttctcaagcatgtataatatcaaattggattatacttttcaagaaaaaaggccaagaaaatttagatatttaatttggcatgcaacatgttggtgtgtttggttaactaggaatgttattatttttaaaagaaaagcaattattatccatagatttgttagctcacattaaggaaatttcttggcaatggttgctatgcaaaactggagttaagtagggctgctttttctcatcttagtgtataaatcccacacaatgtttattggggtagggaagaaggatatgaagcttggtatttttgggatttgatattttctttattctccttttgatattcataaggctcactctggaggggtttgttttgttatggcctcattaaaggttatgttgtacatcttgta

SEQ ID NO: 202128 - DNA, 368 bp, Glycine max
gcttaacaaccagcttgagatggagagctagagcttaactgcacactccctatagagctaagctcagcgccatgacatccacatggaggtccaattaaaagctcttagttccaagactactctttatgccccgatatacaaggcttataccttatgctacgaacaatggccgtgagtctaggcccatacgaaagaataacctattctaatatttacggagataagcgggctcatacttagtccatgggctcaaaatctaccgtaaagcttacgagaaccctagggcgctcccttggatctatagcccattctactcggagtcttctacccattgcccttacggggtaggattgcatccaacggatatt

SEQ ID NO: 202129 - DNA, 408 bp, Glycine max
tgttcgcacatcgttcgcgtgtatgatatccactccacaggtttgaatttgaggagaccttcaatcctattacgcaacgtggcggacaaaagtgggctggtaacttgaatggtcattattgtcaatgcggaaggtattctgcgcttcactatccatgttcacacattattgcagcttgtggttacgtgagcatgaactactaccaatatatagatgttgtttacacaaatgaacacatcttaaaagcttactccgcacaatggtggcctcttgggaatgaagcggctattcctccttctaatgacgcatggacacttatccctgacccaactacaattcgtgcgaaaggtcgaccaatatcaacaaggataaagaatgagatggatcgggtcgaaccatctgagcacc

SEQ ID NO: 202130 - DNA, 423 bp, Glycine max
  unsure (1)..(423): unsure at all n locations
gctcacgtccagattttcttntggattattcaatggctctgatcttcccaatgatgccatgcccctttgctttgttcgcacgccactgggccactgctgtgcctcagcatagacatgtgtcccccaagtttttccaattacttttaagattaaatatttttttagtatacctaaaaataaacaaaacttgatttcactttttataatttttcctttttaaaaattataacgaatagaaggagtgtcttatgtgtttatcagttagatatacttagatgcattttgaaacgtgtagccacaaattggatgaaaatttaaaaatccacaaaattattgtttttagacattattaagtaaaaaaaatatttttttctcaaaatataagcagaactcaattatttttatcttatctaattgaactat

SEQ ID NO: 202131 - DNA, 431 bp, Glycine max
  unsure (1)..(431): unsure at all n locations
ctcaagcttgcgattnggtcttcgccagtgaaaggatcaatgtgggtccaaaattatgcaaanttgatcatcctactacgatgactgagaaaactggggcaaataaagagggtgaggatgagggagaaacccgtgctgtgactgccattcctgtacgaccaaatttcccaccaacccaacaatatctttactcagccaataacaaactttctccttacccaccacccagttatccacaaaggtcatccctaaatctaccacaaagtctgtctaccgcacttccaatgacgaacaccacctttagcacaaaccaaaaacaccaaccaagaagtgaatcttgcagcgagaaagcctgtataattcaccccaattccagtgtcctatgctgacttgctcccatatctacttgataattcaatggtagccataac

SEQ ID NO: 202132 - DNA, 424 bp, Glycine max
  unsure (1)..(424): unsure at all n locations
cgcttctgtggctaacatgtgaaaagntgccttgtatggaaaatttttatatattcgaagcaagcaaaggtttctcaaccagttatgcagggatcacttatgaagcaatcttggaatagtttgtacatgcggaggcagctgcatgcacaatgaagcagggttcccataagcactggcgtgccattcagatattcaatggatttggaataccattcttatgtgagaaacttcatgttggtgatgatggttttgatttaccattcacccaaataaaaaacaaattaattgatcaatgtaatttcttatattaaatatattacagaaagaaaaacttatattagaagaaaaaattacgaacggataattttccatctcatgttaaataaattacaaatcaaaaagattggcttaacaatgagcttag

SEQ ID NO: 202133 - DNA, 404 bp, Glycine max
cggagtttccgacatgctcttggtggtgaacaagtttttttggagagagcaagaaatgaagagccaatggttgatacatggacggagatgaaaaagatcatgaggaagcggtatgtgccggctagttactcaagggacttgaaattcaagctccaaaaactaacccaaggcaacaatggggttgaagagtaattcaaggaaatggatgtgctcatgattcaagcaaatattgaagaagatgaggaggtaactatggctcgatttcttaatggtttgactaatgatatccgagatattgttgagctgcaggagtatgttgaaatggatgatttgcttcacaaagcaatccaagttgagcaacaattaaaaaagaaaggagtggctaagaggagttttaccaactt

SEQ ID NO: 202134 - DNA, 430 bp, Glycine max
  unsure (1)..(430): unsure at all n locations
atacacactcatgctctgcgtaatcgatgacactganttggtaatcgattaccagtgattgtttttgaataaatcacaagatgtaactcttcaaaaggtttttgactttttcaaattggttttaagtttttctaaaagttataactcttgtaaatggtcttcttggctagaaatgaagagtctataaaagcaaggctttgatttgcttttcaatacacttattcaatcaatcttttacaagccctcaatatctttgaacttcttcttcttcttcttcttctttgtgccaaaagctttccaaagtttttctggttttctaaaccttgaaaacttgtgctattcatcttttcattcccttctccctttgccaaaaagaattcgccaaggactaaccgcctgaattctttttgtgtctctcttctcccttttc

SEQ ID NO: 202135 - DNA, 409 bp, Glycine max
  unsure (1)..(409): unsure at all n locations
atgcttactccggatacaaccagatcaggatgcacgatctatatgangagaaaatgacatttatcattgaggatgccaccttttgctacagggtcatggccttcatcctaaaaaatgcaggtgctacatactatagactgatggatcagatgttcaagcaattgatcaaacataaaatcaaagtctatgttgacaacatagtcgtcaagtctcaaagcatagcccaacacggggtagacttggaagaggtctttgaagagctcctcaaatacgacatgtgcctcaaccatgaaaaatgtacttttgagaaatgcactgctattttggatatgcatagtttgactaatgtccatgaagtccaaaaactaaatggaagactagcatccctatccaggtttctccccaagct

SEQ ID NO: 202136 - DNA, 392 bp, Glycine max
  unsure (1)..(392): unsure at all n locations
atgagggctttcgacaagtgagggctttcatgtttcaaacaatgacgaggaccaccacaacgtgattagctcagcagtccagcacggtagcacgacaacgatgacgacaaccaccaccacgcgagtagctcagcgagagtcattttggggggttagtagcttgaacaaggtagagtgagtgagtagagagagtcgtgaaagtcattnttgggggttgttgtgcgacgccgtttcagattttcataaactcgtggactcgaagtagactcgtgaatctacccaaactcgttcgagtctacacaaaatcggacgagtctactctgatttcgattctacttccgatttaacttcgccaatccttagtagaatcgtaaaatcgtaagaatttacga

SEQ ID NO: 202137 - DNA, 424 bp, Glycine max
  unsure (1)..(424): unsure at all n locations
tttcggaactatgttaacataatcttagaaaggcttgtttagaatgtcagcttgagttntttgaggtgcaaaaagcaataggaaggtacagaaagtaatagcctcaaatctgtaatgggtaatttcatgagcccaaccaaaaaaagcatgagagttgatggagttaaacagggttaattaaggcttaagatcacatatagaccaagctaaattataaataaaccacaaaagaaactaaattttaaagttttaccaaatttaaatgtattaataattcataattgatcagatgcaaaaacttgtgccctcattctatttgtttggcattgcttccattaaacatgtaagattgtaagtgaaaatatgaaacaaaaataatttataatgctgccgagaaagaaagttattctaatcatattattaa

SEQ ID NO: 202138 - DNA, 374 bp, Glycine max
  unsure (1)..(374): unsure at all n locations
tttcagctggcgatgataatacttatgaaatatttgatagtaaaataaaacaaaatccaggattgtccatggaggtccctagtcttttgagtgctaatcaacttttggaattagtagtatgccaactgtttattacatcgtanattgtttgaaactacgaactttgaagctcttctcatataaataagaagattaacagcgtacatcatgattgtaggtttcggacacacctaatgaagctaggaggatttccatatcaattacatatgatatgccttacaaggatatgatgcataactgtgaggtacttcggatgggaaaacaaaaaatgtcccgattgatgagtgcccaacaggagcatgaatgtttgatga

SEQ ID NO: 202139 - DNA, 407 bp, Glycine max
  unsure (1)..(407): unsure at all n locations
acattccacatggctgtcaactcactccacaagtttgatctttgttttttctcatttatactaggggacttgtttncatcacagccatatttccctttcaacacctggacccataaatnaanagnntttgtactnaantnctacgccaactttaacatgaaagaatcattgacatgtgctttcctccactacaaaaaaaatgttaaataatggaggttattttgcggaggttttaaaaacctccttaatttattaaaaactacaattttttgtgcttattttgcggaggatttaaaaacctccttaatttattaaaaactacaattttttgtgcttaatttgtggaggtttataacctctgctaattaaaatattatttttccactctcttctctttaaaataaaat

SEQ ID NO: 202140 - DNA, 419 bp, Glycine max
  unsure (1)..(419): unsure at all n locations
tcctcatgttattgatatcccanacctcaatcgggaagccccataactgtatccatataacccgattatttggtctgagccctggtcgccacttctctagagaatagaatattgatttgccgccatcaatctccgatgatatgatttgttgagctgtatcatcggatagtccaatgagaagaaccatatcgtcacccaaaaatttggtacgaatgttgtaccctaaatcccacgatatacgatcctccatactctccatcgtcattggtgtttttaatttcccaacccaagccccgttgcaccagtactcgccgtgttcgttggttggaatggagatcacgaatgatgatcctacgtctgccgccatacctcctgaagcaccaccctgggccgtcacctctgcgtatgatcgcagtcgt

SEQ ID NO: 202141 - DNA, 400 bp, Glycine max
  unsure (1)..(400): unsure at all n locations
ctagaatagggctgcttagattctnttcttttaattagtgctgcttaaaaatcaaattaattagcgctgcttagttccttttgttttaattagtgctactggacaatttgccattgtgtgctattggataattactaacattatacactatttaacgataacaacttttcctaacatctattttcagtcgtaccatcgataatccacctaagctagattattaccaagaagtactgatgtagagttgtttcaccttgattagtagtttcaaattgtagtctttgatatgttgcaagaagaaaatgacaatttggtcgataaggtgataaaatacattagtttgagtaatatgttttccttagacatccaagttttgagattctagcagggtgtttgtaaa

SEQ ID NO: 202142 - DNA, 410 bp, Glycine max
  unsure (1)..(410): unsure at all n locations
cctgcgaaggcaaacattgggaagagaagnnttttttttgatatgctactcttagaacgaaaatggcatacaacctcctccaataaacacaaacatcaatgtaaatttagagcaaactcatgcacatacttccttacgaacattcactcgcacaagatattcttctaattaagaaaaacgcacccacgcacaattaaggcaccttcgttacctagatcacttatatgtacttccaaggtgtatttgctacctacatcacatgcatttcctttgctaaatttacatacatgcatactcaaagcactttggctaccaaaaattgcatacgtgcacattctggtatttctaatacctatacatacacaaacttcgtgatgaatcttggctacctacacaataaggtgctacat

SEQ ID NO: 202143 - DNA, 379 bp, Glycine max
ctgttgtctcttaacaatcaaaacctatattatttcatgtactataccagaagtatgtaatatacctacctgtgcaggacaaaaacattacagatcatgattattttcataatcgctttggctatattcaaagacttacaaactgaacataatatgcagtgggcaacagcgagcagaaatattcatctacttcatgaaccaaaaacaacaaaacatatgatgactctatctatacctttccttgtagaacaagtgaggcatatgactatacataacctacagttacatcttgagtaccaaaactttacttcttagcttttataatcagatcggacaatggtttcatacgaaaatctaaagcagtgccacatactgactg

SEQ ID NO: 202144 - DNA, 406 bp, Glycine max
gctagtcggcaatgaattagctgaagatacatgagtcacatctgacccttcagattcacaaaaatatcttttcattgccttctgtaacagcatggaaagcaatctatgtaatggaatgtgtacagatatatcttgtgaactaacatcataggctatttgtggccaatcaggcaatgacaaaaaacgcggaccatctgattccacggggaaatcttcttccatggcattatcatcaaacgtgggacgcatacaggtattttctgaatcaatttcattattttcagaacactgcttaccatgatcttcactaaaacttacaagcctaccaaatgtatatctaccccttccaaacttggatattgttctcttaaatgctgaaaaattgccatcacagacagcaccactg

SEQ ID NO: 202145 - DNA, 424 bp, Glycine max
gcttcttggaaacttcctgagaagcttctgtgagaaaactgccttgtatgctagagcttagctacacacacccctctcataactaagctcacctccttgagaagcttccttaagaagattcctaaagaagctagagcttagctacacatacctctctaatagctaagctcacctccttgagatgagaagctagagcttagctacacaccccctataatagctaagctcacccccatgacaaaaaacatgaaaataaaaaaaagtccttattacaaagacaactcaaaatgccccgaaatacaaggctaaaaccctatactactagaatggccaaaatacaaggcctagatgaaggaaaaacctattctaatatttacaaagataagggggctcatacttagcccatgggctcgaaatctaccct

SEQ ID NO: 202146 - DNA, 423 bp, Glycine max
  unsure (1)..(423): unsure at all n locations
ctaagctgccagtcgaatacaaaaaaatttagagacttgcggngttcttgttgtgtttgctncgaagngtttttcacttctttttttttatctcaaagtaaagctacaagcaaaaatagatccaaaagagttttgggagctcaaaattgaatggggcattgactaactaaaaaacactattaactacgttttgtatgattatgaacttgtgctcatacaacaacatttctctttttactttttctatttgncatgaatcaacttgtcatatgcatggtatatttatatgtactagcttgtaaaattttccagagtgtagttgcctacttggacttcaatggtttagtctctcttgtcttcaatattttatgttcaactgttagatattgattgtaattttgtataacacatgatctgcagaaa

SEQ ID NO: 202147 - DNA, 408 bp, Glycine max
ctcgcccaggcgagcaagggtgcttcctccagaatcatctttcttctggaggaatcttctggagggcccaagtgggcctgattgctatttgcacccccctttttactaaatgcactcccctttctatttttttgtaattctttttccgtaacgttacgaaactttacgaatttcgtaacgatacttattttccttccgcaaggttacgaatccttacggattatgtatttactcttttttagctttcgaagaagttacggaaactcacggattgcgcaaaaacacctcttttcgatttctgccacattacggaatttcacgaaccacgcaagcctgcttcctttcgaattctgagacgtctcaggacttcattcattgtatgtcatcaagtaataatccccggacgaa

SEQ ID NO: 202148 - DNA, 424 bp, Glycine max
  unsure (1)..(424): unsure at all n locations
gcttatgctgcanacatctataatagacctccgtaacctaagcaacttattcagccacaacagaacaattatgacctctccatcttcaggtacaataccgggtgtaggaatcatcccaaccttagatggtcgagtccttcacaacaacaaccttattttcagaatgctactggcctaagcagaccatacattcctccaccagtccagtagcaacaacaacaacaacaacaacaacaacagccccagaaacagcaaacagttgaggcccctccgcaaccttcccttgaagaacttgtgaggcaaatgactatgcaaaacctacagtttcaacaagagaccagagcctccattcagagcttaagtaatcagatgggacaattggctacataggtaaatcaacaacagtcccaaaaatctgactgat

SEQ ID NO: 202149 - DNA, 369 bp, Glycine max
acattatccgcaagtttaattaacaggtcggtcttggagctgggaccatatatctagtcctaatttatatatacttattttttaattgacatatattagccagttataacaaaaaaaaattatatataaaatataatttttatcaattcgccagttatattaccaaaactaatttaacagctaaatgaatattatatgtgattatggcgcatgattcctcggctattttaagatgttccgtagatactccctatatcatgagcacaatcggccatacctatgatatataaattccaaaggtttttaatcaaaaaaatgataatttcaatggttttgaaaaccccaacaagttcaaaaaccaaatgaaag

SEQ ID NO: 202150 - DNA, 423 bp, Glycine max
tactcagcttaggttgctcattgactccagattgctgcagagagggacaatcatctatatgttgatctacagaagaacatagaccacaaactcatgcaacatgtgtagatttctgattcatggcaagctgggttactaggttgaccaaggcattaagttttccttcaagttttttattttcagtagatgaagatgaatctgtggccacctcatggactcctctaagaataatagcatcatttcttgcactgaattgttgggagttggaagtcatcttctcaatcaaattcctaccttcaacaggggtcatatcaccaagagctccaccactagcagcatcaatcatactcctctccatgttgctaagttcctcaaagaaatattgaagaaggagttgctcgaaaatctggtggagggcaactt

SEQ ID NO: 202151 - DNA, 407 bp, Glycine max
  unsure (1)..(407): unsure at all n locations
ctggactctgcattcttaaactagtcactaaaaagttgttctnttgaaaaaatcttcagaaacaagtcacttgaagaattgtgacttttggaaatgtatttttcaaaattagttactggtaatcgattaccattaaggtgtaatcgattacacgtcaatagatgtgactcttcattttgaattttgaaaataaaacgtttagaagctctggtaatcgattacaagtattgtgtaatcgattacacaagttcaaaatgatttaaaactgtttaaacataagttttaactcttgaaatttgaaatcttaatgttttaaaacactggtaatcgattacatgattctggtaatcgattaccagagagtaaaactctctggtaatgattttgtgaaaacttcttgtgctacc

SEQ ID NO: 202152 - DNA, 422 bp, Glycine max
  unsure (1)..(422): unsure at all n locations
gctgtcgaaaacttctanagaagccacgaggaagcttctggaggaagcctcttattgaagcttctagaaaaaactacatgaagctgcctcggtagaaacgcttcccagccttcgntaaccattggatcttctcgaaatatggtttgcaacttcacaagacactttaccatgatttaaccgttgggatctttgagaaaatatctggagtgtgctagaagcttccgttcccgagagcatctcttatttaagcatttcagcctttgctttcttgtagcttaggaaaaatgccatttcttcttctttctttcttccaaatccatttctaaagttccaagtactttctccatcacccacatccaccattagccaccacaaaccatcattgttctccattgaaaacccacaccgagaggaacccttcc

SEQ ID NO: 202153 - DNA, 421 bp, Glycine max
gagatagcgaagtgtagaagggtgaaacttcctacttttattcggtgaccatcagagaggtacctggagatatgtcgtgggggtcaagagactttggggacgtcaggtggggtgctatttcccaaaaccaagcttgaccaatcccgacccaacccgggcatagtcagtcagtgagaacctgtgatgtacctaagcaggcgagctcctggcagtcaacagataaaaggaactaagaccacaaagcaaggaggcttgtgtggtggctggccagctgtgaactttgattgatatatgggatatggcctctggtaatcgattaccaagggtgggtaatcgattacaaggcttaaaaatgaacacaagaggctaagatggtctctggtaatcgattaccaaggggtgttatcgattaccaggcttg

SEQ ID NO: 202154 - DNA, 377 bp, Glycine max
tattctcatcaaaaaccacaatcacacacaaaacacataaaaaaccagcattgaatcgcaagaatactactatgcaacaacatcacatcacaactgtgaaaggaacgcgcacttgaattacgaaaaacgcaatccaaaaatcaaatcaaaccacattcgcaacgtaataccaaatgatacaccctaaaaaaaggaaagccatgaaacacgcatcaggatgtggtggaacgaaaagtgaaaaagctattcaacaaaggcgaaaccaatactccaatgcatccaaaacaaaatcggaaatcgaaaaaatccagaaaacaatcgaaaggatactaataaaaatcaccataagcataagccacagaagcgagagaaaaaaa

SEQ ID NO: 202155 - DNA, 375 bp, Glycine max
  unsure (1)..(375): unsure at all n locations
gtcctctcactgtgtggaggntgngccatgttctcagaatgtgcaaaatcagaatgctcagaatcagaatgctcaaaattataatgctcaagatcaggatgttcaaaatcaccaataacagaatgcacagattcactattaatggaatgctcagaatgatcaaaaggtatacaatgatgcctaactaatctgtgaaatgtcctatctatctcacgatcaaagggttgtaagtcagatggattgcctttagtcatacactacattcagcatgcacacaactagttgccttgtcatgtaaataaaggtgtaagtttgaactacagctaccctcaaatgatatccaaatgactggaaattttgtgatccaccttataa

SEQ ID NO: 202156 - DNA, 383 bp, Glycine max
ataaatgttgtttgttacaatatggacaaatcatgtcgtcccaaattacatcatttttcttctccaatcatttggattctcactttcgtaattacattgggaaaaaaataattataatgatataataatttttagaatttgcttgttctttctccatcctctgaagtcaaggactatgtcaatatacacttgattatctttttatgtgtgatggatatggatatctgtaaataattacagctccaaaaaatcagctatcctgtttatttgcatacaaaatgctttattcttttaacaaccagttaagattctgaagtccctcagcagaaatgcttcttcttactcgggttctttccacaaccacaggtggtggaggatcaaag

SEQ ID NO: 202157 - DNA, 403 bp, Glycine max
atcagaagacataaagtttctcttggtctataagtcagatgcaaattcagtagaacagataaatatatgatgctctaatttacaaaacgaaataaaataaataaattgtctttcatgttgattgtaaaccttttgagtttggaaacttacacatcctggtgaagctgacaaatgcagtatatgtagctgaagacaaggcaggcaaaagaaacattggcaaaactcggattgccctcattttccaattcatatccattgatcttgttgtcataatagcataacctacagcaatgacctgaaagttgaaaccattttaagcaaaatccatttataaaaacaccctcaataatcaataagaatatattaatttgtcagagaagaaatttaaaattcaagtaaaccc

SEQ ID NO: 202158 - DNA, 411 bp, Glycine max
  unsure (1)..(411): unsure at all n locations
agctttactcatacgaagcactaagtgtgttgacaggtcagagatttggtaggttngtaatgggaaagaagtgacattaacatgctatccaaaggattatactaactatcattttaacgtttcatgtgaaccaagcaaatgaaataagttaccaaaacccaaggctatctcatctcaaatgatacagaattttcacaaaacaaaacattttaagataaactacaaatttcttgtgtgaaatagataattgccatctctaaaaattgcaagagttaagaaaactcctcaaaggggaaaattccaacaactagcaacttttccattagctaatagccaaaatggatattccactaacactttggtgtgcattactattaacaattattcctctaccccactctgcctctatac

SEQ ID NO: 202159 - DNA, 404 bp, Glycine max
ttcattatatgtacccgtggtggtcgacattgtgctttatgtgtttttattctcgctttcatttactttttatactcccttttgacgtgcttaagccatttatttaagtcattcctcgcttaatctaaaaataaaataaatttccaccgatcgtttgaattgtatcatccgataattttggttaaaatgaattccgaccgttcggtcgtgccgtatccacgttggaaatcaaaaaagaggtaaaataataatataataataaaaaataccttttagtaaagtaaagcgaaaaatcaatcggacgttgtctctttgggatttctcattcttaattgaattgactaataactaaagtgaaactaatgctaaaatctaactcgcctagtctagctcgtccacaaaaa

SEQ ID NO: 202160 - DNA, 415 bp, Glycine max
gctatctataatacttctaggagaataggtagtatgaggagcatgtttttcttcagtaactcgttcaaactctcatttgtgcttctttgagtgatattcttaatttattcatacgtgaattttagcttagccagaattttattttgtttttctttcttaatcattgtatcctcctagaacgactgatggataagctatcaaacaggcttccaaacaggcttgagaaaactaatttccgatcatgatgtaattatgtcttacgctgtagcttcttgtccaccaccttggcaaccggtgctgaagaacattccagcaggcttgccttcaagaaattgatcttcttcgtcccatagtaatccgattgagtcgaggaaagcttgaaactgagcagccatcatttcaaatcttgttggga

SEQ ID NO: 202161 - DNA, 372 bp, Glycine max
aaccgcacccattcccacactggaggcatcatgttccatcatgaaaggtaactggaagtccggtaagcctaagacaagagcatcagagagagcttgcttaagttgttccaaagtgacctgtgtttggtccgcccactgtaatggctctgtcggtattgcattgacaagaggagttgcgatcgtatcatatcctctgataaagcgtctataaaaacctacgaggcccaaaaaattgtgtatgtcttttctttagaccgaggaatgggccattgatgaatggtactcaccttggctgcaactagttccattttgccttgtgaaatgatgtggccaaaatactctaccttcgattgagcaaatgaacatttggac

SEQ ID NO: 202162 - DNA, 407 bp, Glycine max
  unsure (1)..(407): unsure at all n locations
cttctcttctgttcactggatcgggttccaggaattgaagggtatgttcantangggttgtgttgatctgcaccaagatgcttaatttgcgttgaaaaattcattcatttgcgagactcggcatcggaaatgaaccagttagttgaaagttcaacgactactcaaagggtatctagagttcaagctccactggtaataagaccttttcctccaatttttttatctgcatattagttttcttcttttgaatagtataatttttctccatttttcagttgcagcttttttttctttttatttttttgtgtgtggataaaaggttcgatttgccagcgctgtgcttgaggttttggttaacttgagttcctatcattctctgcttgggtttggacgagaggcagagaact

SEQ ID NO: 202163 - DNA, 421 bp, Glycine max
  unsure (1)..(421): unsure at all n locations
tactaagctataaacnaatgcctaatatttccaaaatgcatgttaattatgacgcatcaacaagaatcaagccgaggctattgtgcatgcaatcaatggggcaaaacacaccaaatgattataatgatggatggctcaaattctcacaaaggtaaaatcatcactttcaaattgagctttcaaaactatcatgacatgtagaaaagaatcaaggatttcaagtcacaaaatgtcaagaacttttattttcaaaacaattacccatttcttgaacatatcctataattcaaagaaaaacatgcaaagtcgtacgtgcacacaaaattgacccaaaatattaaactgaaaatccgacgaaactaacaacattaacaaattaacacaactaacaaattaacaaaaccaacaaaactagcaaaac

SEQ ID NO: 202164 - DNA, 416 bp, Glycine max
gcttatgcttctcctgtacattcgagagctcgcagctattaccatggttgttaataagtggcaacattacctgttaggtcaccctttcgtgattctcactaatcaccaaagtctgagggaccttatgactcaggcggtccaaacgccgaagcaacatcgatacctcgtcaggctattgggattcgagtatagcattcagtatcgcccaggcgcgagaacggcgtcgcagacgcattatctcgagtgaatgaggaagacacccaggcttccttatatctactgtccattccccagttcgcctttctagctgaccttaagaaggagctagtcactctttctgaagcattagcactactagagaaactccaaaaggaacccacgctagctccagattataagttcgagaatggtttgat

SEQ ID NO: 202165 - DNA, 416 bp, Glycine max
gcttctgtgtcatacgagcatctcgaaatcctacgggacagaatcgatcattcgagtcaaaagctattgtcgtttgaatttgctcacagcttcagttttcgattacgagcgtttctatatcctacgggacacaatcggacatccgagtgaaaagttattgtcgttagaattttctcatagcttccgttttcaattacgagcgtctcgatatcctacgggacacaatcgaacattcgagtcaaaagttattgtcgattgaatttgctcagagcttcagttttcaattacgagcgcctcgaaatattacgggatttcatcgcacatccgaggttaaagttattgtcgtttgacttttcttaaagcttccgtgtacaatttcgagcgtctcgatatattacagggcacaatcggacatt

SEQ ID NO: 202166 - DNA, 363 bp, Glycine max
gtaatacatctagaagctcggacttgaatgcctgagctctgagcaaattccaatgacaataactgattactcggatgtctgagagagcccagaaatatgtctagacgctcgaaattgaataccgaagctctgagcctattctaacgacagtaccgttttactcggatgtctgactgagtcccgcaatatatagagacgctcgaagatgattatcgtagctctgaccaaattctaacgacaataacttgttacttggacgtctgatagaatcccctaatatatcgagtcgctcaaaatgggataccgtaattctgtgcggagttcaacgacaatagactttttctcggattggctattccatcc

SEQ ID NO: 202167 - DNA, 384 bp, Glycine max
aagaatcaccgggttgagtcttctctgtggctggcttactgggttagctccatcttctaaatttattcgatgcctacatgtggatgggctaataccacgaatgtccgccagggtccagcctatagccttcttatgcttcttgagaactgacaacaacttctcctcttgctcatcagcaagggaggcagatataatcactggaaaactcttgctatcatccaagtaagcgtatcttaaatttgatggcagaggcttcaattctggtgtggtcggctggacagaggtacaaagaaatggtttctcaacctttacctcataataaaagtcagaggtatgtgtactttctgaaacatgggtagtcctatctgactctatcaaatcatt

SEQ ID NO: 202168 - DNA, 411 bp, Glycine max
  unsure (1)..(411): unsure at all n locations
tatgcaccctangggtccattctcgctatgaatgttcttatcttcattcttctactttcggtattcttttccttcattttaagcgagatacaattgatcgattaagtcgtaacctcacttaattaatgtttaaatgaatttcaaccgatcgtttatgttgtaatctcatttaatcccctctataataaaattcaaccaattgctcatgccgtaagctcggttaaatcaacaaataataaaataagtgtcaaccggacattttactctgaaagtcctttttaatgatgtgagaaataaccaagtgaaactaaggctaaaatcaacttacaaatcaagcatttgcccacaaaaaggtcatttgaaaccgtttcaacgtccaacaccttaacggtggctttttacttctattaa

SEQ ID NO: 202169 - DNA, 419 bp, Glycine max
  unsure (1)..(419): unsure at all n locations
gcttcataccaagcaactcanaatctaggcatgtaagacccctcattttatggatttcaaggtttgagaagttaagatgagaatggggtaaatttagagtaaactctcacctcacacaagtctatgacatcgatctaaacttgctcaaactgatttttatgcctcaaattccaccgaatcaaaatttgactcctcaacacccaattttttttttaccctaggaatggctcttgccttcacttcggtcatttgtttttctctcttgcacagtccaagcattctcataagtcctaaatgacatttcaaactaggatttactcactttaacctccatttaccactgaatcccgttttagccttccaactctcaaagcctcactctttttctactcataacactacattctcactgtctaacc

SEQ ID NO: 202170 - DNA, 399 bp, Glycine max
agttgacaagaacattgtcagactgatcttctcttgcacagtggccaaagatgcatgggagatcctgaaaatcactcatgaaggaacctccaaagtgaagatttccagattgcaactcttggctacaaaattcgaaaatctgaagatgaaggaggaagagagtattcatgacttccacatgaacattcttgaaattgccaatgcttgcactgccttgggagagaggataacagatgaaaagctggtgagaaagatcctcagatccttgcctaagagatttgacatgaaagtcactgcaatagaggaggcccacgacatttgcaacatgagagtggatgaactcattggttcccttcaaacctttgagctaggactctcggatggggctgaaaagaagag

SEQ ID NO: 202171 - DNA, 419 bp, Glycine max
gcagcatatggactaaggtttgcgagctttagacatccggtcctatggttgctgacggaggagctggagtggatgatgaagggatgtcatatgctctagccctttttctcgatgccatctgtaactaaaaagaactcataattccttagaccaaatttattcaagtttaaaaatagaaataaaggctgaaatttacgatgggcgcttaatgggatacaacttgctcagcgcaccctcagaaatataacatatcggcttagcgaaatagcatgcgcttcagcctaatcaatgctgcaacatatatgcgctaagctcaacagggttgtgcttaacggcaccatgaaattcagaaaattcactaagtatgggggcttagcgagcaaggctcgcttatcccaatggctgccacaatgaaatga

SEQ ID NO: 202172 - DNA, 418 bp, Glycine max
  unsure (1)..(418): unsure at all n locations
ctatactatattttagtatntttacactagatatgtgaataatttttctttaaattacactgggccccaagaaataaaatttcttttaagacagtctctttaatattttctttcttaatatctcactatttgttctaagggtacctatcccttgaaaaatagaaaaactaatttcctcgacatatctttcctttttttaaaggcgataatgatgaatattatttttagacaacaaatatccatcaataatatctaactcagttggttgaacaaaatgctaagttattataaatttacaccattactcatatatcttcaaatttaattcttttaactttctagtcaataatatatttattactttatttttatccgctatgcatttgaaaagacaaactaaagttgtcaaaatactcca

SEQ ID NO: 202173 - DNA, 412 bp, Glycine max
tgctcttccttcccgcgatgcttcttttatgtccgcctgagtgggcttatagcctaaaccatacttcccacgatttcctggggcatttatcaggctagttatgccgccgttgtctttgcctaaacccatttcgggttcataaccgttccccaacataactcgggccatcattactgctacatcggacaaacaaggctgcccagagagggagtccacggaggaaatgctgaccacctcaaaagactggaaagcggtttctaacgattcttctgcggcttccacataaggcatagaggatgggcaactcaccaggatgtcttcctcgcctgacacgatgaccaagtgcccctccactacgaatttcaacttttggtggagtgtagaggacacaactcccactgagtggatccac

SEQ ID NO: 202174 - DNA, 407 bp, Glycine max
  unsure (1)..(407): unsure at all n locations
gtcctttgatactatntatacattgttgactntatggcattgtatgaagtgcaaagattggacctcttgctagttgttactaatgaatagcttaaacccttgtgcttgagtgaaacagtagccgtgagactgtggtttaagctactttccttaatatttgtcttatgattaacttcatctaatgatacagcttacattntattcttctctttgaaagctgcatattttgtgaaagacaagtgatgagtacataatgcttcatttttttatcatgcaatcagtaatttttgctgcatacacctttgttgatgatcactgcatgttattgtcacttgaggacaactaagttgttctctttttgcttgaggacaagcaaaattgtaaatttgggggagttgttagtcgat

SEQ ID NO: 202175 - DNA, 385 bp, Glycine max
  unsure (1)..(385): unsure at all n locations
aatgcattgacagaatagtgtagacactcttctatttttangaggactcagcacatngagatatacttgaaaagaataattgaaagtggccacttgaggccgcgataatatatgaattgcaatagagggtaccttatccccatgtaacactgtaacaatctgaataataccaagaacagatcctttactttaatttacaggcaatctatgagagacccaagacttaaaaaacaagaattcagtgtcacaacctcacatgcaactcatcataaaatggaatattgtgctctactcaaaccagactctacatttcgtcaaatatataactgttaaatattaaatcaatgacacgtgtatccgatatttaaatcacgcctgcccttaa

SEQ ID NO: 202176 - DNA, 363 bp, Glycine max
tgaaggaaattaatatattaagattcaacaataaatacttgtaatgcatttttagtttaattatttattaactctttttaattgaaaataatacaattcaatttaatatatacatgttttgtgtcatgtaaatattaatattgtgtgatgtgtatatgattcacgaggtgtgataacatgttgctttggtattataacattgtgattgaaattgggtgtatgtgataaattgagtatgagttgaattataatatacgtgtgtattgagatattgtatgcattgagttataagctatgaactatacaatcacataactataagatcctttaaaggtgatgacttaatgctcgacgatttttatg

SEQ ID NO: 202177 - DNA, 428 bp, Glycine max
  unsure (1)..(428): unsure at all n locations
tactcagctctttgtagacctcgatcggncatctttccaggccgaggtcgaccgttatttttttcgatccatttcggtgaataatatttttttgtcgagatgggcaaaatgccagtttcggccgaataaatgggaaaatgccagtttcggccgaaacgaaaagtcggttgggctcgcacaaaaaaacctagccgacctacattttaaattttttatgccacaccaaaacaagaaaacttcctgtgccgtaaaaaaaaaacattacatgacagcgagcgttttgaaaaacaaaattgcgcaacgtcggctgaaaaatatcagtcggggctttttcacgaccgatgtcggctattgagttttcaattcaatccgtgaacgaaatttgtatgatgttggttaggaaatgtacaatcggcatctcctgtgaa

SEQ ID NO: 202178 - DNA, 414 bp, Glycine max
actactcattctcaacctaagcagaggcatgctgatgctatatgttgtctacttcctcagcattacctttcactggcatgtttgtaaacaacatgattggattcattgattcgaaacgttacaccgacacaaacacctgttaatcccatattataaccacattcaatgggattttatggctaccatgaagaggtggattcactgatcaatgagttctaaattaacgaccattgatatctaattattaaacgagagatatgaatggatagcgaaggatcagcccctgtattttaaaacaattaaatttatttatgttgaaaaaactgtttaatcttaatgacaaaaaagtgactcattttctcccttatcgggaagaagttatattccaaacaaatctggaccttaatttttctc

SEQ ID NO: 202179 - DNA, 448 bp, Glycine max
ctttttttttctctatgatactaagcttccttgcacttattcttttgtatcgatttaggaatagacacaactactagccatagtaagaaaactcccattttgagaaggttgagctctcctcaggatcttcaaggtagatgtcttctacatggaaggactccccatacttggaacaattccagggcagaaccatgttgaagataaccatcagaccaagaagttgcttaaggtttaaaggagtagagaatggcatttcattagatgcatcctttatgcttttccaaaatgtagctcctagaggatagaccttcctataaaatggtttgtgttcaaagatgatgttgttgaggtttagagaagagggattccttgaaggatactcctttatatgactatcttttcaaaagtatttggaaagagcatggaccttttcttcttccaggtcttt

SEQ ID NO: 202180 - DNA, 278 bp, Glycine max
gatcctaccagtattgtatgaaattcagaatgtgtggttccacactatcaagatacgtatatggaggaccgataacataaaagcgctatcaaaatattggaaatggtattacgtatgaagagaataaattatttaatagagcgagactactaaattgatatcacttcgtgaataaataaaatgattatcagactgcataatgaaagtaggtttaggacgaacctactgaagctaggaggatggccatagcaaataccgatgactagccttacaatgat

SEQ ID NO: 202181 - DNA, 415 bp, Glycine max
gcttagccgtactttctgaaatcgctagacagtgtttgtgataaataatctgctaacagttccatagattcaaacaatgacaatgtcatcaacaacaacagcaataacagtaacaataacaacaataataatattagcaaaaggaaggccatgtctcctgagcctcatcaggaggagagatcaagacccaaaatgaaagagttagcggtggtgtaaaaaaaaaaaaacactatatatagagagtggtcgatcgatgcatgcatacgtattatacattatagtttatgactatgatcctaattatggttatctcctcaactctcaagaacttaataaatgaattcctagtgcgtactaatgttattcacaaatcaaaattacattttaccttttcggttccgcatgtacatgccat

SEQ ID NO: 202182 - DNA, 419 bp, Glycine max
gcttctcaggaggtgagcttagttatgagaggtgtgtgtgtagctaagctctagcttctcaaggaagttttctcatagaagcttctcaacgaagttttctcaagacagcttgtcaaggaagctacctagtctataaatagaaacatgtgtaacacttgttgtaactttgatgaatgagagtcttgtgagacacaactcaaagttcaacttctctccctttttcttccttcaattccgtgccccccctctctctttctctccctctttcttttcctccattgaagcatcctctccaagctccttcttccatgacttattccttaatggatggcgcctcctctcacctcttttcctttgtcttccgctgcatctccatggtggaaaatcaccattaaaggaccccattgaagctcaaagat

SEQ ID NO: 202183 - DNA, 377 bp, Glycine max
acttgtatgggatggatgatgaatactggttgtttctgttgcggagatgatggtacagcgggtgaaccatgtactgaagtttcttttggtgatgtacccatgcaaaagcatacctgttgaaatgatgtcgtaaatctcagacggcttttcgggaaatgctggtgaaaacacccaacgccaacctaattctaatttgtacgaagaatgtatagggtgcggtgaaacaacggtcaaattctattcgtattgaacgcgctcttaatgttaagtgattcgtatgggcactttcatatcgcacaaatcgctatattcctctgcagaaactgcccatctgcccctcatttttcaaaccgatttgcttcaaagcctattgaaaa

SEQ ID NO: 202184 - DNA, 181 bp, Glycine max
  unsure (1)..(181): unsure at all n locations
ctcacgctncntcactctctcctcaattatgactatatgtacataaaaaatcttgacttagtgtaaatacaacgtggcgttgtaacctatcctttctatctttaagatatctccaacactttttgccacacattattgcgtaacatgacttccttgcctaaacattttgacatggttgttt

SEQ ID NO: 202185 - DNA, 419 bp, Glycine max
tgccgaattcctttattgaatggtttcattgcagaatttgttgtccttctcattgcatgtatatagccaatactgctcactgtagtccttcataattgtttgaatcatcccttttattgtggctctgaatagtataaataatttgtttcaattctttctgaagcaagtaagtctggataagttctgaagttgtgatcaatttttataatttttatttcctcttttagcactcacatttactgagaacctaaccctgtactgatggcagaaggacctctttccctccacaaatgtcctagtcaatttagtagggagattctttatttttaaattgttgctgtcgttatgtggttacacacttacctatcagcttggtgtacctgtcctgctttcagaaaatccttgaattgcttgacaat

SEQ ID NO: 202186 - DNA, 425 bp, Glycine max
cttgatactaagctgcatacaagatttccttgctgcactgaaaaccttctggttggtttatatagaggtcttcctctacatccccatgcaagaatgcaattttaacatctaactgctccaagtgaagattctctgcagctactatgctcagaataactctgatggtagtcatctttacaactggagagaagatctctgtgaaatcaattccttaattttgctgaaaccctttcaccacaactctcgccttgtatcttcttctaccgtcagattcttcctttagcctatagacccacctattgtgtaacgctttctttccttctggcaatttagttaaagaccacgtcttattcttctgaagggatgtcatctcatctttcatcgctagctcccactcaatagtgtcattcccctgtgtagcctca

SEQ ID NO: 202187 - DNA, 428 bp, Glycine max
  unsure (1)..(428): unsure at all n locations
ctaagcctgcatggtcttgtatcacactcatatgtcagacatgagtgtggtccttcccattgngacagntgtccatggaatcagctcttttaagataaaattgccctcatataaaaagggcaaggacactctgcgcgtttatccgggcaacaaacaatatatttttgcgattcgatttcaagaactttagaactttgatgcaccttcataacataattgcttcacttcattttttgctgcatctttactatcaaaattcataccaacatataattcttgcccaacattaaaactcgatgacatctctaaaccgtatatgtcctcctcatcaggatgactccaattgatattattataatgcaaaacatcattccaaaatggattatgaattccttcacacctaataggtaaaaaaataaaattcaact

SEQ ID NO: 202188 - DNA, 407 bp, Glycine max
tatggaggctggatctgtgagcttgaatgagatcctttattggtgacttttcaccatggagacgcagcggaagacaaaggggaagaggtgagaggagactccatccacaagggaataagccatggaagaaggaacttcaccaccaagataagccttggataaaaagcatggagaggatgcttcaatgggggataagaaagagagagagagagagagagaggggagcacgaaattgaaggaagaaaaagagagagaagctgaactttgagttgtgtctcacaagactctcattcatcaaagttacaacaagtgttacacatgcttctatttatagactacgtagcttccttgagaagctttcttaagaaaacttccttgaaaagtttctttgataaaactttcttgag

SEQ ID NO: 202189 - DNA, 350 bp, Glycine max
ctaccatgaaaaaaacagacactctaggaaactactaatttttatctggctcacaatggcaataaccactggctgaaaaaagatgtgcaatacaacaaagacagaagatgattcaaataaaaaacttcatgcctcgaattgcaaatatggtatccccatgcaactatttgcaataataaaaacacatctatctcccaatcgcaaatatgtagtctcacatagtgaacctcacttgttcactatataatacacaaacgacatcagcttgcctgtaatcactgcatgacacagaaatttcactctgcagcttctcacaagaggcctgaattaaagctccactctatcatcaa

SEQ ID NO: 202190 - DNA, 428 bp, Glycine max
ctaagcttcttgatgacttcgaattgtaaagattggtatgagaaagactttgtgattacatttctcacatggttgttctttcccttgaaaatcctaagtaataattgaaccaccacaattttaacaaaaattatccgattgctcacacctaccaaaattggtgtaagatcatttttatccatactggctagatggaaaaaacaactaagaatgagaaaatggaagattagtttaatttataggcacatgtaaaattgtttatattatcaattaatcagaatagtgataagtgtgactttttttatagttattaaaaagtcaacaaacttataaacatagcaatctataaatagatggcattgtataaatcttttacactatagattcgttactctttacatatttgtgaaaggtgtgatgcaaactgc

SEQ ID NO: 202191 - DNA, 426 bp, Glycine max
  unsure (1)..(426): unsure at all n locations
aagctttagccaatggactaccttgaataattccttgatagcccttttgatccttgtttccctttccttgttatgaagctcactacaagccttaagtgaaaaaccatgatattaccatatccttaaggaatnttggagctttggaattgttttgggaataagtgtggggggtttttgtttcattggacaacttgttttgttggctatgcttcatgatgcattttgggccatacttgatgtacattggatattggttaaatgttggacatgctgaatgaaatgttgtttctcaaagtctaaaaaaaaaaaaaaaaaaaaatattctataaaatattttgaaagaatataatagaaaaaaaagcccttaagttgagtgaataatatcttatatggcacaagaatgttgaaactcttggttctactctt

SEQ ID NO: 202192 - DNA, 361 bp, Glycine max
  unsure (1)..(361): unsure at all n locations
gggactcatgagtggtaagttgaggtctaagtggattggtcattttattgttactaatgttnttccttatggtacagttgagatcaaaagcgactccacaaacaagagcttcaaggtcaatggacaccgacttaagccattcctcacaaacccttctttagtggacgtagaggtggaagagacttccttactccaccctactcttcctccaccatgacttagggagttttttttttcctatctccttctttaattttattacatttgtccgattctatttgatggtttacttgcctttaatctttaaattgcgctacattgaggacaatgtgttgtttaagtatgggggggggggggagtg

SEQ ID NO: 202193 - DNA, 417 bp, Glycine max
ctcagctttataaaggtcgtcctattatctacaatgctacctcttatgagctggtgaagaagaatgtggcatttaccttcggtgaaaaacaagagcaagcctttgctttgctcaaggaaaagcttattaaggcacctgttctagctctttctgacttttctaaaacttttgagctagaatgtgatgcctctggagtgggagttggagctgtattgttacaaggtgggcaccctattgcttattttagtgaaaaaattcatagttcccccctcaactaccccacctatgataaagagcgttatgccttaataagagccctccaaacttgggaacattaccttgtttccaaggaatttgtcattcatagtgatcatcaatcacttaagtacattagagggcaaaacaagttaaacaaaa

SEQ ID NO: 202194 - DNA, 356 bp, Glycine max
atcaacaaagtactttaggcacctactatatgtcgatttgatcaacgctgatatcggtatgtttcgacaattcttcgtaccttactatacattctaagaggttcgttgtcttgtggtcatatctacatctttctccatcataagtcatggaccattcttcctttgaaatgctatcaattcatgttgctatgcctggactcaattgacggaatttttctaaattttgataaaaaaaaaatatgcttgccaggagtgaccactgcatgaaattagttagcaacaataatttgaatgttacatgaaacttaaattaacgcgaccatgataaatgaaatcttactcaattttttcaacat

SEQ ID NO: 202195 - DNA, 420 bp, Glycine max
aacccggtcatatgtgcagtcagtgagatcttgtgacgcacctatgcaggcgagatcctgtcagataaccaatataagaacaaagtccatgaagcgaggaggcttgtgaaggcggctggctcagcttatgtatcctgggcgtgcgatcatgaaatattatgcctctggtaatccgatttacaaacttgtgttgtaatcgattacagggcttaacaatggagacaggatgttgagtggctactggtaatccatcaccaattgtgtgtaatcgattacacagtatgatagggcactggtaatcgatttccacttgtgtgtaatctattacacagtgctacctgctactgataatcgattaccatttatgtgtattacatcacacagtgtaatatgtagattcccatgtgcaaaggtcgtagt

SEQ ID NO: 202196 - DNA, 424 bp, Glycine max
tgtgcatccaataccctgatgaggatgtcccatatgttcttattactggactgattcatttgcttccaaagtttcatggccttgcaggtgaagacccgcacaaacatttgaaagaatttcacattgtctgctccaccatgaaacccccagatgtccaagaggatcacatatttctgaaggcttttcctcactcattagagggagtggcaaaggactggctgtattaccttgctccaaggtccatcacgagctgggatgaccttaagagagtattcttagaaaaaaatttccctgcttccaggaccacagccatcaggaaggatatctcaggtattagacaactcagtggagagagcctgtatgagtactgggagagatttaagaaactatgtgccagttgcccccaccatcagatttcagaaca

SEQ ID NO: 202197 - DNA, 424 bp, Glycine max
  unsure (1)..(424): unsure at all n locations
actcagctngcaagaagtctcttgtatcggtttaatcgataacaagattattgtaatcgattacacaattctttntgagacaatgattgatttttcaggagtctctgccttaatcgattacttggtgatataatcaattacttctcttttaaaagtgtttcagaagttatcgataacactttaatcgattacactgagaatctaatcgattacattgttcttgaaagttttccagtttttgggaagaacactttaatcgattgaaataataatataatcaattacttctttgaaataatcgattacattgtatatttaatcaattacaggagattataactgttttctctataaatagataccttgtgttctcacttctaacaacttctgaatgagctagaattacgagttgatattagtaaaa

SEQ ID NO: 202198 - DNA, 404 bp, Glycine max
  unsure (1)..(404): unsure at all n locations
cttgccccggagagctaggatgctntctccaaaggcaccgccttctggagaacttccttgaaggcccaagtgggcctggttgctatttgcaccccctgtttactaaatacaccccttgcctttttttgctgattctttttccgtaatgttacggaaacttacgaattacgtaacgatacttgttttctttccgtaatgttacggaaccttacggattacgtaatcatcccttttttgccttccggaatgttacgaaaatttacggattgcgcactaacacttccttttgactttcggcatgtcacggaacttcacggattgtgcaacaatgttttcttttgactttcggcatgtcacggaacttcatgaattgcctaacgatgggtgccaagtacctcgaagtg

SEQ ID NO: 202199 - DNA, 385 bp, Glycine max
  unsure (1)..(385): unsure at all n locations
cgatgtgcacacaagttttcacatccacaatgcgcgcataaacccaccatcccctatttgccacctccaactgagctcacgtactcccacgtagcccatatcctcgtntctctcaacaccgggtccccatcaatcctcccaagcttccacaacatccaagcaaaacaacattcaaaaagcacaagctatcatagccaagcaaaacagagcaaaggcagaaaactctgctcaacacatcaaccaaaatcacagcttttctcatttaaagaccacagtaacaattccttcgatccaattcgttaaccgttggatcgactccaaaattttactggaagtctatagtgcataaacctacattgtgatcgttgggatctactagcaaaca

SEQ ID NO: 202200 - DNA, 423 bp, Glycine max
  unsure (1)..(423): unsure at all n locations
gcttngcgcattgtgctngctaaaaggtgactggtcgcagcttatcttatctgttttgcattttactccagcgatgaactatggactatggagccataaatgtgccaacttaaacacattgtatacaattaagtcataacgatgacaattgtggatatggatattcatatagtaacttcgttattgatgtaacgtgtacgtggattttaagtntaataatactaatattattattcgttatgcatggagaaagatcttgacctccctctatttttcaacgcacaaaacactgaagctagtcaagcaatgaatgaaatataattaaaatatatacaaggaaagagcatggaaaaagagatgtgttttattttagacttaaaaagaatgcttcggattccgataagttaggtatattttctctat

SEQ ID NO: 202201 - DNA, 431 bp, Glycine max
ggcctcattttcttaagtctggaccttatatatgacctcctatcttatgtaaaggatcattagatgagctgggttcaccttcatcaccctccttctctcattgcatatggaatggtaagaattcatatcccatgtaatatattggttccttcatagaaaataaaaattatttaagttcctgacataatgaaaataatatttttatgtgcataaaacaatctcatccatatgtctttggcaatgaattgagttttcagtaactacatatttttgtaagtacattataatcacatctctacttgttttcattcacacaagtgaactattatcattactatcttacattatgacaaaaaggtatatgtagatgacatgaatcatacaactacgctcaagaagacatatatcttagtaattatagagggatgaaa

SEQ ID NO: 202202 - DNA, 402 bp, Glycine max
  unsure (1)..(402): unsure at all n locations
aatctagcttaaattgattaaacgtttagaactgctggtaatctattatctatatgtgnatcaatacacacgccaatttgaatcaaattctatagctgttgaaaatcagtttggccactggtaatcgattacatcctctgggtatcgattaccagagaggaacatttgtttgaaaagagttttaacttaaatttcttggccaaaccttttgctacttcaattggaattcccctcctatgtaatataccctttctaagactagaaacttgtcttgatcatccatcttgaatatctttaatttctttgtcttgaataaagctttgagacgcatgcgaaactttggcatcatcaaaacattcagcttgatcctttgtctacaatcttcccctttttgatgatgac

SEQ ID NO: 202203 - DNA, 416 bp, Glycine max
tacaaaacttgttgagacagcaaaagagaagaagaatatgcttgatttgttattgaaatgtaaaaattagttgggtacatgcgtgtatggcagctatatatacacaagttagttggaataactaaattttaactaactaactaacaattaactaacttactagagttctaaccattaatcatgatcaagctaaactaagtgtaacaccctaaaatatttatcgttataaattgatgtttaattgtatttatcttgttatttgactatatggttgacttgaatgatttgaggtatgacttgagttagtcgtgtatgaatttcttgatgtggatgttgagttttgttgaactatagtgaaattatgagatttcagaattttcccaaatctatctcagtaaaattgcgatcccagattc

SEQ ID NO: 202204 - DNA, 400 bp, Glycine max
ctataaatagggggagaagtttgtttgtttaggttcaaccccttaggcacttctctctctttcgaatttgcttggaaaaattgtttccgtgaagaaaatccaagccgaggcgcttccgaaacgtttccataacgtttccgtgaggaatttcgcgaaggtttcgaccgttcttcgacgttcttcatcgttcttcgatcttcaacgggtaagtacctcgaaccaagcttttcgattcattctatgtacccgtggtggtccacattgtgtttcgtgtatttctattctcgtttcatttactttttatacccccttctgacgtgcttaagccattatatttaggtcattttcgcttaacctaaaaataaataaatttccaccgatcggttgattgtatattcgt

SEQ ID NO: 202205 - DNA, 426 bp, Glycine max
  unsure (1)..(426): unsure at all n locations
ataattgtcaagttaaggactatcatgatgatgtatttttgtctgnntngcccaaaattcagcanatcattgaaaaaacaagaaaacttgtggagcatggcaaccatattggtatgataatgctaatttgtctttgtttgaggtgtcaaagggcatataaaagtttgtggttaatctaaaagaacatacatgttcttgtagaaagtgagagttaactggaattctatgcacttattcaatagcatgcatatggatcaatggtgtcgaacctaaactcaatgttatttcttattatagggcttggtttctattattcttatatagattttggagcgtttttggtaactgttttgaattgaatatcttttgattacatttgacaagaaatctatcgtcttgtcacatattcatttattatctttccat

SEQ ID NO: 202206 - DNA, 424 bp, Glycine max
  unsure (1)..(424): unsure at all n locations
tgtggcctaatgttgngattatgctcttggggtttcattttatntcttttnctcttctttattttgaggaggcagtctaccatcccacccatttatgggtaggtgttaagacaataaaatcaaatcattcatgagaagagccaatttagaaataattctagtaaaactgtcaagtcctattgtaaccaataagagaaaatcaaggagtaatattagaagtcaattcaaaatttagatcccctgtactctatatatatggaatatatgtatgctgtgaatattaatatgcaaataatatcctagattaactctctcattaatggtttgattctattatcttaataatgtgctacaacttttgatttactcatagtaaataggccaatccgtttgtccccctttttatatgaactagtggtgagtc

SEQ ID NO: 202207 - DNA, 413 bp, Glycine max
ccttagatactaagctatgaatgcttaatttgtaacatttgatagcctacatttccaagtctagcatgccacaaagtaggactatcaacttggctggttctcttgacatacgcctctcctgcagataaaacaaaccaaaaatccttcctttttcctttgaaaatgatgtcagcatcaatatttctcacatcattcaagactttgacgctattggggccacaaaggacatacttgcctaaactggcgatttgtgagacagaaatgcgatatttcttctaagcaggaacatgatagacattactcagttgaacttctatgtgccaacattgatctttacaataccttccttcaccacaggatgagttgtgttgtcagtagtgactatgactttctccattgtgatgatgcatttc

SEQ ID NO: 202208 - DNA, 429 bp, Glycine max
cggtgttgaacctgaaaaggaaataattgtacgttgctttgaccaattcttctgaaatcaaacatgttgtaaggtgaaagcacccaaatagattttagtaaagttatttgaaacattctaaatcactgttcaagagtaatgatcaaagcactaattcctccttttttgctttcgtacaacctcactctaaaagatatgcttactaagtttctaatatcaaaaattttgtcttcattaattcctaactatagctttcccatctaaagcttttaacttgacgcccaagtatcctccaattagattatagtcttgcctcttgtgtccttcaaaattgtcttatgctataattacaaacaagttaatacaaatggtgatattgatcatatatataaaaccttgtggagcaggctcataagaaagcacggaatc

SEQ ID NO: 202209 - DNA, 332 bp, Glycine max
ctggggaatttgtctactaccattctatgtttatttccatactgagtgttcacatgaatgtgcaacttattcttgaaaatggctagtcaacaagggcttcaatagtttggtaatgagtcaatgcattggacaatcgtgctaaaatataaccctaatttgacattctaggtcctgactaaatttggatgcatttatcaaagcttcaccttacatattgatgaccatacatgggtccttatctcctatgcttaatgtgaagcatggcttgaaatcaatctttatctggatagggaagactatttttacagaacttttttaatgttttatttagg

SEQ ID NO: 202210 - DNA, 420 bp, Glycine max
tatcgcacggcgtggctgatatgactagcctatattatttatgtggatgaaattaacggtcaaattaactacaataaacgattaatttgtctgttaatttatcaaaattaaccaaatgacgatcttataatttgtttcatctatatccctagacatatgtccctaaattaattacttataatctttgtaaaacccgaacatatattaatattatgacttaaccctgatgttgttgcatgtaactttagactaaagtgggtgatgatcaaatacagttttcagtgactgttttaattgtgtttattctaatcgtacattattcaccttatcattttttttcttcttttcgcacatcttaccagacattgagaaataaaatgcccagaaaatattattattccaatgttcgcgcatcaacca

SEQ ID NO: 202211 - DNA, 382 bp, Glycine max
  unsure (1)..(382): unsure at all n locations
tatgtaaggaacactcccctcaaccaaacagataatgaagtagcccaagggacccaacctgcaattggatctggaggccagtataaatattatttcaatattggaagtgttgagtctcttgaggagaaactagaggaagcgcaagaagctctgggcatttactctcatgattttgtgcctgtcacatattcttttgaactggggtaccgggaatggattacgttggcttcaatactgttgcttttgggatttctcgtgtgtgcggtagggtttataaaaggtgcaattgatgctgctcgcggcaagggtgcccctggaatattcaacatangaaaagctccagttactaaagtagacagaaatgccaaaaacaatgttggga

SEQ ID NO: 202212 - DNA, 430 bp, Glycine max
ttactgatttgtatgttcaattgggtttaaattgtgttatctattacaattcaatggtaatcgattacccgtgtatctgaacattgaaattcacatcaattgtgaagagtcacatcttttcataaaatgcgttgtgtaatcgattacatgattatcgattaccagtgacaagttttgaataaaaagtcaagagatgtaactcttccaatggttttcaggtttttctcaaggttataactcttccaatggttttcttgaccagacatgaagagtctataaaagtaagaccttgacttgcatttcaacaattttttttagaacaacttcttagaatttcttgaacaacttttgagaaatcttgaaacctttgctacttatatttcttcttcttcctttgccaaaagtttctaagttatctgggttccaaacc

SEQ ID NO: 202213 - DNA, 446 bp, Glycine max
  unsure (1)..(446): unsure at all n locations
taatactaagcttgacatgttaaatcaatgatgctttagtgactgctttgtttgtattgttnaaacctgagccacacacgttgtatttttctattggtgatagcacattcacactctacttgatttacacattgacagaagaccggtttctaccccaacatattatgtatggaaacaaacgtgtgcagaatatataagggtctttcctcaaagaattcacatgtgggatcaacacttaaactaaaatggttaaaagaaaatatgttgagtctcccagcaaaacccatactacaacaattattagcccattgtagggcaccattttatggttgattggtggggtgctgaagccatacaagtcatagaacggagttcacctgatgtatctactactgggggttcaacatgtttaccacatttgtacagagaattgtgtatggcaattt

SEQ ID NO: 202214 - DNA, 357 bp, Glycine max
  unsure (1)..(357): unsure at all n locations
attcagaacaaaaactcttgaccaaatccaacgacaataactttttactcggatgttcgaatgaatctcgtaatatatcgagccgctcgtaattgaaaacagaagctctgagcaaattcaaacgacaataaacttttacttgtatgtccgattggttcccgtagtataacgagaccctcgtaattgaaaccagaagctcgtagcaaactcaaacggcaataaatttttactcggatgtccgaatgaatcccataatatatcgaggcgatagtaattgaaaacagaagctatgagcanattcaaatgacaataacttttaactcggatgtcggattgagtctcgtaatatattgagac

SEQ ID NO: 202215 - DNA, 400 bp, Glycine max
  unsure (1)..(400): unsure at all n locations
gacctatnatactaagcttgataacgaacatgtgttctccataaacatctttatttttctacactactgagtggggggagtgatgggaaaggaaatgatgctcctgaattctaggtcaagaatgcctcctaatacttataagaagaagaaatttggtgaattttatggtgcccctctcttttatgcatagtagcatttatatagaacttgcctacataatgacaaatgttaacggtcttgccacctcacgaatgaagattcgctacatagattcagagaatgcacgcagttttctataacgatctaaggcacatggccctgctacatggcactaacggccagaatacataatatgaaaactcttaaagggggaaatcctgctgtggtgagccttcttccc

SEQ ID NO: 202216 - DNA, 428 bp, Glycine max
  unsure (1)..(428): unsure at all n locations
attacattgatttaatcattntcatcttatggcatgattctctntgcattgcaccaaatgttatatgagcattattttaatgttntggtcattaacactatcacgaatttagtggtataatctgaattgaattgagcaggaacttttctatagaggatacatgcaatttctgaaaaaataatgtactttttaaaattaattattttcaatataatgctaattatacattacttatttattttgaaaaaaatacaagaaaaactcgtataaaagatttaaacctataaaagaaagggcgccagtttccaaattcgagaatgggaatggggtccagcttgaacaacactagtccaatatattatccgttccgttcataaattaaaaacttggcacttacatacccgtttttttctatgaaacaataaaaa

SEQ ID NO: 202217 - DNA, 451 bp, Glycine max
  unsure (1)..(451): unsure at all n locations
ctatacggacctataaaactaagctgngtaatgttgcgcgtactgatgggtaccatgaggtgtttgctgtggtttgacccacgcacgcgttgaagagacggcatgggcatctccttccttcctttgtgcccccgntgtcccgattcttttggcattcgcactcgtggaggaaacgtaatcgaactttcctcttttcaaccctacctcgattctttccccggcaaacactaggtccacgaagctggacggcatgtaacctactagcttctcatagtacaacactggcagagtgtctaccatcatggtgatcatctccctctcaaccatgggaggagccacttgtgctgccaggtctctccaccgctgtgcgtattctttaaaggtttcgccctctttcttgaacatattctgcagctgagtgcgatcgggagccatatcggaattatactga

SEQ ID NO: 202218 - DNA, 312 bp, Glycine max
tctcaaagaagccacaaggaagcttctagaggatttctctttatgaagcttctagagaaagctacatgaagctgcctcggtaaaaacgcttcccagccttcattaaccggtggatcttctcgaaatttggtctgcaacttcacaaaacacatttccatgatctgaccgttgggatctttgagcagatgtctggagtgtgctaaaaacctcttaatgaagcttctggaggaagcctcttaatgaagcttctatagaagactacatgaagcagcctcagtagaaacgctgcccaaccttttataaccgttggat

SEQ ID NO: 202219 - DNA, 426 bp, Glycine max
acggaacttaaaactcagcttaagaaaaaaatggcctcagcaagcttcttattttctaatgaaattcaatcaataggcctccaatctttaatggagagggttaccactactggaaaacccaaatgcaaatttttattgaggcaatagacttaaatatttgggaagccatagaaatagggccttatatacccaccacagtataaagaattacaatagatggaagcacatcaagtgaaagcataacaatacaaaaacctactgatagatggtctgaagaggataaaagatgagtacaatacaatttaaaagccaaaagtataattacatctgccctgcgaatggatgaatatttcagggtttcaaattgtaagagtgctaaggaaatgtgggacactctacaattaacacatgaaagaacaatagatg

SEQ ID NO: 202220 - DNA, 352 bp, Glycine max
taaagtatgcccgagtcattcatccctattagatgtttctgaagtattggccatccgaattgccattccttggattatacggttgaaccaagctcatgtctttacaaaaaggctcatttattcgagttgaaatatggaagtaaccgccttgtcaaactggggcaaaaaaaaaatcaagtctgtcccaacctacccttacgctggagggccaaacgtgactcgcgggatgcctgttccaccaaaagaatacacgccgagtcgacacccacgtatatttgaggaaaacgtccgaaaaaccggaaaagacgccatctacgaactttttaagtgaaaggctctgggagtgtattta

SEQ ID NO: 202221 - DNA, 419 bp, Glycine max
cgagcgtctggacatataacgggagtcaatcatacatccgagttaaaagtaattgtcgtttgaatttgctcagagcttcagaattcaatttcgagccgctcgatatattacggtactcaatcagacatctgagtaaaaaagttattgtcgtttgaatttgctcagagattcggtattcaatttcgagcgtctcgatatattacgggactcaatcggacagtcgaataaaaagttattgtcattagaatttgctcagaggttcggtattcaatttcgaacatctcgatgtattacgggactgaatcagacatctgagtaaaaagttattatcgtttgaatttgctcagagctacggtattcaatttctagcgtctcgatatactatgggactcaatcagacatccgagttaaaacttatt

SEQ ID NO: 202222 - DNA, 440 bp, Glycine max
  unsure (1)..(440): unsure at all n locations
tgttacaattacaaacatggtgaatttgagtgtcccaaatagactatttgtatatatntgccagttgatcattggagccaacaaatgtgttggatcaagtggcctcggaataattaaaaaaggggggttgaattaattattaatgtgtcttgactaattaaaaattatccttcttaatattactagattcaattagactttactactaagttataagaaacgtaagaatagaaacaataacttatacaaaagctaagtgtaaattaaaagtacacagcggaaaagtaaagagtgtatggaagaagaaaataaacacaagtttttatactggttcggcaacaacctgtgcctacattcaatccccaagcaaccacctgttcttgagattttcaataaccttgtgaaatcctttacaagcaaagatccactacggatgtacc

SEQ ID NO: 202223 - DNA, 430 bp, Glycine max
tcaacttattagttggacattgaattttgaatgcatgttgttatatgtttttttagtttaggctaagtgtagatttctcttaggctcttattcacaaaagaccctagggttgggtaccttagtctctttttttgcggtaggaactgagattgcttgtaagaattttatatgcatagtgaaaatctaattcgaatttggattacataactagattagcttctctagagatagagagtgagctagtataaaaattagtgtacattttctctagatcatatctttctttctcattctggtcttgatcaatttactcaacgttaaagaaaatatcttatctctctttgaaataaagaactttaacaaaggattttgtgtaaaggatgattgattgattattgatttatccaagatttgtgataagatctgcaca

SEQ ID NO: 202224 - DNA, 434 bp, Glycine max
  unsure (1)..(434): unsure at all n locations
nttaactcggaggtccgattcaagcgcataatatatcgagacgctcgaaattaaccaacggaagctctcgagaaattcaaatggtcataacttttaactcggaggtccgattcaggcgcataatatatcgagacgctcgaaattgaacaacggaagctctcgagaaattcaaatggtcataacttttcacacggaggtctgattcatgcgcataatatatcgagaccctcaaaatttaacaacggaagctctcgagaaataccaatggacataacttttcactgggatgtccgattcaggcgcataatacattgagacgctccaaattgaacaacggaagctctccagaaattcaaatggtcataacttttcactcggatgtccaattcaggcgcatcatatatcgagacgcccgaaattgaacaacggaagct

SEQ ID NO: 202225 - DNA, 368 bp, Glycine max
caaaacattcatttcaccgtgtcctaactcctcaccctcatgcaccaaaatggtgttgcctctctatgacacattctttaacacatatgctcattaaccaaatgcacccacagtggcaaaatccaattgacataaaaactacccctacaccaagtccctgctaacaaaagcttccttttattatatagattaagcgagttgatactctaaattccctttacactatacattagctgagttcgattgatatgtaactacgatttcaaaatatctgactatataagttataatctataggcttggaagtgaaatatatgggccctaaattaaatttgatgaggcggggatggggataatgctcatatcac

SEQ ID NO: 202226 - DNA, 430 bp, Glycine max
tctggtgggacatcttgacttgctttccaatctgacattcattttagattctgccttcttctatttttagattgggaatgcctctaacagcacctttgtcaatgattttcttcatgcctcttaagtgcagatgtccaaatctttgatgccatattttgacttcatcttctttggagaatagacatgtggaggagtgactggtttcttgaggtgtccatagataacagttgtcctttgatctgctgcccttcattagaacttcactcttctcatttgtcaccaggcattctgactttgtgaagtttacattgaatccttcatcacacagctgactgatgctgatcaagtttgcagtcagtcccttcaccagcagtactttgtccagactaggaagtccatcatggactagctttcccattccagtgatctt

SEQ ID NO: 202227 - DNA, 326 bp, Glycine max
  unsure (1)..(326): unsure at all n locations
nctaaacaanggannagcaagatcgacactaccttatttatcattgtgcaagggcgtaccctagacaatctactcaaggatgtaaatgacaacatcctgccacgaccaacaatcgccactatgcaagccattcagacccaattgcaatctatgtttcaatcgaagatcctcggcactttgaaaaatattcttggcttagaaaaagctaaatcccacagtggtatctcactcccccacagaaagaacactctatctcttttagaagaagcatgattcttggccatgccaacctttcaattgaatcccaacctgaagccaatcttcat

SEQ ID NO: 202228 - DNA, 248 bp, Glycine max
taaaactcaacccgtgggacgcctctagccataacaggaaatgttttcttaataccggccctaccctatagtggcataaggtaattaatataactactaaacatttccctctcaatactaggttattgtacgctaaaccggcaagtaattggcccattatcaagaaaatgaaacaaaaataaaaaacgatattttacaaactggttagttaaaaagaaaagaactataacactttcctctcgtttcgc

SEQ ID NO: 202229 - DNA, 334 bp, Glycine max
  unsure (1)..(334): unsure at all n locations
ntccctctntgaacaaatacccctcagccaaatataattcttcttgggcctttttcccacaactctcataaatgggagagaaatgttcatctaaagcatataagtccctaatattatcaaatcctaaaatttgagctcctatggagcaaaacaatgtgtgtctcctagagagggcataagctaccacatttgtttttccctttttgtatttgataacatatggaaattgctctaggtactctacccattttgcatgcctcttgtttaacttgctttgccctctaatgtacttaagtgattgatgatcactatgaatgacaaattccttggaaac

SEQ ID NO: 202230 - DNA, 427 bp, Glycine max
  unsure (1)..(427): unsure at all n locations
tgtaatcgattacacaaatactgtaatcgattaccagattttattttcaganaatattctcaacagtcacatctttntatgtggttcttgaatggctatcaaaggcctatatatatgtgacttgagacacgaatttgctaagagtttctgagaacaaaaaggtcttatcctcttaaaaagcaaaatcgttttatcctcttacaaattccttggccaaaacacttgtgattcaataaggaattatttgagtgctcaaattgttcaatctatctctttcaagagaaattacttcttctcttcttctttattctgaaaaaaggattaagagaccgagggtctcttgttgtaaagaaatctgaacacaaaggaagggttgtccttgtgtggttcagaatcttgtatacgcttttacaagatagtggaactc

SEQ ID NO: 202231 - DNA, 392 bp, Glycine max
tgtgcattcaatatcctggtgagggtgtgtcttatgttctcaagaccggacttatacatttactgcccaggtttcatggtcttgcaagtgaagatcctcataagcatcttaaggagttccatattgtttgttccaccatgaaaccccctgatgtacaggaagatcctatctttttaaaggcttttcctcattctctggagggaggggctaaagattggctatactacctccctcccttccagaatgctgctggtccaagcaagccatatgttcctcctccaattcagctacatctacaacaaagacaactagcaactgaggccccttctcaaccttccttacaagagttagtgaggcgaatgacaattcataatatacaattttagcaagag

SEQ ID NO: 202232 - DNA, 384 bp, Glycine max
actaagctgtacggcatatgatgaaacgctagctatcttgaactggtatggtttgtgacggcactccttaaattatgacaaatgatgtgcatccatgtacagcctgtatgccttggagcctcttatcaaaggagtcctgctcgtctataatatcaatggctgtggcatggataaggacgaaaggatcatgcatatgccagttcattgagaagactatgacttagctatgacaccgccataggataccacggataatagcttgaacgctggagaagatgatgttatggagagggagagagggggccacatcattgatgcctcttatgatgcctcgaaatggaagtgtaatctgtcacatgatcgaatgtctcaaacatgcgcaca

SEQ ID NO: 202233 - DNA, 450 bp, Glycine max
ggacctatgaatctaagctcggtatctccttcttcactacgtcaagaatcaccgggttgagtcttctctgtggctgtcttgctggtttagctccatcctctaaatttattcgatgcatacatgtggatgggctaataccaggaatgtccgccaaagtccagcctatagccttcttatgcttcttgagaactgacaacaacttctcctcttgctcatcagcaagggaggcagatataatcactggaaaactcttgctatcatccaagtaagcgtattttaaatttaatggcagaggcttcaattctggtgtggtcggctggacagtggtagaaagagatggtttctcagcctttacctcataaagaaagtcagaggtatgtgtactttctgaaacatggttagtcctatctgactctataaaatcaatctcaagaggtaaaacaccaccac

SEQ ID NO: 202234 - DNA, 440 bp, Glycine max
tactaagcttgtatggtaagaaaagagcaacacacacaatcatctaataagcatcaagtatataaaaaaaactataagtataaaaggaaagtgtgtgtgctgctatttaagaaaaagaaaagctaagtgcggaaaggcaagtaatagagatggaataaaaagaaaaaggttgatctatggatgaatgctctcttagaacctaagcttttgcatcctagaaaaatcatgaattgattgcagcccagcctcgttacaagcctagtaaagtcctttggtttcagtttgtgtgttcttaactgtatggcatgagatgaattgcaaagattgagacttatgttagttgttggttgttgaataagcctaaacacttgtatttgagtgaaacagtagttgtgaggctttggttaatgatccttccttgatatctgtcgctcttacta

SEQ ID NO: 202235 - DNA, 434 bp, Glycine max
  unsure (1)..(434): unsure at all n locations
ntgcttctacaacaatcctgtgagcctaagatacaaaaaatattcttctattccaggaaaaaatatttaccttttgttgaataaaaggaaagctaaaattcatcttaaacccgtgtaggaagaaatgtcacaagtcacaacatctctattgagcaatttgcatgatggaatgcctataaactctctttaaacaaatgtgctctatcaatcaggcaaatgttacaatatcatcttattacatttgctgaaaaaagttgtgaaactcactagacatagacttactggttctaattgccaaagaacaataatacataactgaaaggacaaaatattggtggagaagtcttttacataccaaagatcaatcaaacaccacaacttaaatctttaatgaatatcaatgtcaaatcatggctctaatntaagtgcaaatt

SEQ ID NO: 202236 - DNA, 441 bp, Glycine max
tctttgagaagattcctagagaagctagagcttagctactctcacctctctaatagctaagctcacctccttgagatgagaagctagagatcaactacaccccccttataatagctaaactcaccccatgccaaaatacatgaaaatacaaaaaagtccctactacaaagactactcaaaatgccctgaaatacaaggctacaaccctatactactagaatggccaaaatacaaagcctaaaagaaggaaaaacatattctaatatttacaaaaacgtgtgggcccaaccttggtccatgggctcagaaatctaccctgagggtcatgagaaccctagggccgttcttagcagttctagcccaatcttcttggagtcttctatccaatacccttgtgggggtaagattgcatcattggctttcaatgagcatgcgtgtggg

SEQ ID NO: 202237 - DNA, 423 bp, Glycine max
  unsure (1)..(423): unsure at all n locations
tcttatccaaggcanatattggcggtgaagctccttcttccttggcttattccctagtggatggtgcctcccctctcctcttctcctttgccttccgctgcatctccatggtgaaaaatcaccattgaaggacctcattgaagctcaaagatccagcctctatagaagctccacaagcaagctttcatcaagtggtatcagagcacaagagctttaagtaggtgctccttaaacctccattaattttcttgctttaccttctcttccattgttttttcttcatttttctccatgtatctcctcacatgtcttgttctaaatgtttctaacatgattgtttatagtttgcaccgattaaacttgctatagaagttagatctgattttctatggttcaaatctcttgttcttgttcttgaaccat

SEQ ID NO: 202238 - DNA, 401 bp, Glycine max
gcttggaggggttgatggggacccggagctgagaggtactattgttttgtctcctacgtgcacgtgagccaaatataaaggtgggcaactggggatggtgtgcttatgcctggcttgtacaaatgggatatttgagttgtgccatcgcccgatcgccacctattaccacatatgacgggtgccccataatccaataagcttgatgtgagaaagcgtggaagagtcagtctttctacttttatttgttgaccacaaagtggtacctggagatatgtcccgggggtcaggagaccttatggacctcaggtggggtgctattgcccaaaaccaagcttggctatcccgaccaaccccggcatagtcagtcagtgagaacctgtgacgtacctaatcaagcgagc

SEQ ID NO: 202239 - DNA, 325 bp, Glycine max
ctagctttaccaaggactacctgataatccttgatttctttgacctgtttccttcctggttgagcccctacagccttaatgaaaaccagatatcaccaatccttaagaattggagcttgaattgtttgggaaaagagggggggggttttttgttcattggaaacttgttttgtggctatcttaagatgtatttgggcattcatgagacattgatattggaaaatgctggactgccgatgaaatgttgttctcaaggatatagagcaaaaaaaaaattcaaaatgaaaaaaaacaataaggtgaggaataaaacttaatggcaaag

SEQ ID NO: 202240 - DNA, 414 bp, Glycine max
aactaagcttcttcttggaagttgaacatatcttggcggaggctttgttatataattgctttcaccgggaggttcctggtatgtactgagaatgcttgggaggtttgccattggtaacctcatatggggttaaatcggtagtggaatgacatgttgcattttaacaccactcggctaaacacaagaatttttctcattgagatggcttggtatgcataaatgcccttaaatactgttttagtacttgttcaacaccttaatttggccatcactctgagggtttttgattaactgggaggaaagtctagagataccaaaaaaaagaaaaaagccaagctgatttattgatctgaaaactagttaagatagtacaatccagtattttaaacctttatccaccgaacaactattata

SEQ ID NO: 202241 - DNA, 428 bp, Glycine max
tctagccaaatggacttaccttgaattaattcctttgatagccctttttagccttgtttccctttccttgttttgaagctcactacaagccttaagtgaaaaaccatgatattaccatatccttaaggaattttggagctttggaattgttttgggaataagtgtggggggtttttgtttcattggacaacttgttttgttggctatgcttcatgatgtattttgggccatacttgatgtacattgtatattggttaaatgttggacatgctgaatgaaatgttgtttctcaaaggcaaaaaaaaaaaaaaaaaagcaataaagttgagtgaataagatcttaaatggcacaagaatgatgaaactcttggttctactcttcatgtttaatttttaacttaacttctttttagtttcctaattttttc

SEQ ID NO: 202242 - DNA, 393 bp, Glycine max
  unsure (1)..(393): unsure at all n locations
taggcaggcctaatcagaggacattgactatacaagtttatggtcaatncaaagaattgaattgtggatcttgtatcatgcatgtgctacaatgcacaagtaggttcatttattcattcattaatttataattattatttgcaaatccttgtcaaatttgcttggttggatacatatatatattgacaatgacttttcagatcaatatttaatatttgattagtttgtgtttaaatgtttaagctctactgaaggtaataaattgatagattaatanggggcaatgtactttgaaggattgattatatgttcggataaagctgtgcataatctggtaattgctggaatggacaagaacaaatgtagtttcttaattatcatcacaaagaaaga

SEQ ID NO: 202243 - DNA, 412 bp, Glycine max
  unsure (1)..(412): unsure at all n locations
tgtggcagatngcaaaggtcatggcagggtgtgtaacacttctgtatatatatccatatattattagccattatgtttgaagtttgaatatttgttgcgctattttcattcgccattatttttaaggaagttaatatagttaatacacgggtggatagataaggatgtagcttttcaaaaagcctcttgagaaagcttctcacagaagcccccaagaagcttctagaggaagcctctttatgaagcttctataaaaagctacatgaagctgcctctgtaaaaatgctgcccagcctttattaaccgttggatcttctctaaattttggttgcaacttcaaaagacacttttccatgatctgaccgctggatctttgaaagaatttcgagtgtctacaacctctaatgaaact

SEQ ID NO: 202244 - DNA, 409 bp, Glycine max
  unsure (1)..(409): unsure at all n locations
ttccatcatatcaattttcagaatacatatgtggcatattctatcataaactcaaagaataactagaaggaatcaaaaacgctctttgaattttttttccagacttcccatctctttatgcccgtgatcattgctaatttactacataatgtaataaacttgattcattagaaattcaggagctgaactagttntcatgtgaccaaagaatgaaaaaaatttatagcacaattacttcagtttcattatttacaatacctggtttcccaaccgttactgaaattgtaattgaaaaaaaaaaaagaatatcagcacttgcaaatacaaaattaaagtatgagttataaggtcgaccggaaaaaggggagagagattctggtttcnaatccctattactataaaaactaac

SEQ ID NO: 202245 - DNA, 434 bp, Glycine max
  unsure (1)..(434): unsure at all n locations
tgcccatcctcttgaccaaatntcaaatgcctcatcctttttactttgaagctgacaggatcaacaatggttggttgaattatctccttagctgggaagacaccccatgtcacagcattaacatcagtttgacccacattagatttccagctcccgtctttattcacagccatataagttaaagatgttcgatccttgcatttatcaacaagtgcatccagcttttccttagagcagaagaactctacatatgccttctggtaaacatacccgcctggtccaccccagcctaggccaaatttcaaacaaaaatgatttagtgtatctcatatccaccaaccaatatggacaagatatgaataccctcagtcacaaattgcacccttntgaatacttctcaatcttcattatttggtttacaaaaaaatatagat

SEQ ID NO: 202246 - DNA, 387 bp, Glycine max
acagctatcggatgtcgctggatatataagatcaaatatcgagccgatgggtccatataaagatacaaagcacgcctggttgccagaggttacactcaaacagaagggttggactaccttgacaccttttttccagtagcaaaactcacctccgtacgaattcttctagctttggccgcactcgacatatggcacctgcagcaactggacgtcaacatcgcgtttctccatggggaccttgaagaacagtatatatgcaagttcccccgggactttcacttgataacccgcagctggtctgtcgtcttcaacgttccctctacaggcttaatcaagccaaccggcaatggttcacaaaattgtcaagcttcctcacctcccatggct

SEQ ID NO: 202247 - DNA, 421 bp, Glycine max
actcagcttcttttagacctcgaacggtcgactttcctggccgacttcttctatcatgaatttctatcaatatcggagaataatatttttttgccgaggtgggctaatgttttcctggccaaagaaatgggaacatgccagtttctgccgaaacgaaacatcggtcgagctctcacgataaaacctatccgacctacattgttagttttttatgtcacaccgaaacaagaaaacttccccagccgtaagaaaaaacattatcggccagtgagcgttttttttttataaaaaattgcgcaatgttggctaaaaaatatcaatcggggccatatcacgaccgatgtcggctattgagtattgtattcaatccctgaatgaaatttgcattattgtccatttggaaattgttgatcggcgttat

SEQ ID NO: 202248 - DNA, 419 bp, Glycine max
ctagtcaaacagaataatccgaagatgtcaaagaattgttcttttaaaaagcataacaaaactttctgtgattggtttaaagatacaatctttgcagatgagaatgcttcagaaacattaagaaaactagcagatgggcctaaaagaaatgttataacctggcaaggatacgacataaacaggtattcattttacacaaaagcacaagatgacaaaagtacaatgcagaacagcggggtcaccctaagggctgaatctcaacactttgcaagtgtcaatgacgccaatccctgtgtagcttccatcccttactttgggttcattgatgaaattcgggagcttaattatgtgaaatttacagtatgtgttttcatatgtaaatgggtagacagcaacaccgtggtgcgcaccgatgatat

SEQ ID NO: 202249 - DNA, 169 bp, Glycine max
ctgggaactctagaggatggacgagaccaccctggcccagacttggagagtatcatgatactataacctagggcgctctctttacgtacgaccttaatattgatacggcgacggtattgcatgggctagcttataaacgacatggttgtgggcttctcatatacatcaa

SEQ ID NO: 202250 - DNA, 300 bp, Glycine max
  unsure (1)..(300): unsure at all n locations
tgtccacgtacattgcctgcgtgatgatatgttttttatggttacggnnaactgcttgaagatcttcgcggcagagtagaacggattggctgtggtggcgacggcgcccatcctggaggcatcgcggaaggagaataccaactcggtggagttctggagaaagatcatgaccacgtcgcccttgcggattccgaaggtggacaattccgcaggcatcttgcgtgaaatgaggtgtgccttcgagtatgtgtacgttttggcggcgggcccacgacgatgcatgggccgtcggagaattgg

SEQ ID NO: 202251 - DNA, 432 bp, Glycine max
  unsure (1)..(432): unsure at all n locations
tctaaggtggaacaataattgaagagaaagagtgtcatgatgaggagttcatctnaatttcactctcatggttggaaggacaaaaataagaaggagggaaggtcatcaacaagaaatcccaatgttatagctcaaagaactgaaaataagtctaatgaggaacttaagaaagaaagaagtaatgagataaagtgcttcaagtgtttggaaagaggttacatagcttctcaatgtccaactaagaagactatgttacttaaggataatggagaaataattagtgaatctttgtgagaatcttccccatctatcgatgaaaaggagcatgaagaggaaagagagttataacgagatttgttcatgattggagggatgttgggtagtcaagcaattgaattggatgaaagtcaaaaagaagatatttctcatgcc

SEQ ID NO: 202252 - DNA, 339 bp, Glycine max
attcggccttaatctaactgaaaatgccccctgaaatagatgaacaattttttgtaaatctttgaaaaggaccttgactaatttgctctaaaatatgtgcccattaaatataattgtggaaccctcattccggtttaactatctgggttaactggcacaactaccattctgcttacatgttttttttctttttaataaatactgctatctgtattcaaatgaaacccacctcggaatatagaaaagcatctttatttctgatctaaaaatttacaattattcatctttataaggacacaggcttccattttttctaaaagaaaacttgctatttatgtt

SEQ ID NO: 202253 - DNA, 380 bp, Glycine max
  unsure (1)..(380): unsure at all n locations
ctcagctgtatagttcccaattatggttatgtggagtaatttttttattatcttntttatgtgaaagctgctctagaacattccttggattaatgatgaaatctggtattttaggtaaaaagagctaagttttgaaatcaaaaagtncagttgggctaatcatatccatcgaagcgcgcttatgcaaagatattggcgacatagcatcaacctgcgcctagcgcgagatcagtgcgcaagcgccgaggtgccttcaccaggctcattaagactggtctaagcccaatttccttactccactaacacggggtggtgttaacgcaagtgcaatctgaccttttaagctatttggcaaattaggacccctttgaactggccaa

SEQ ID NO: 202254 - DNA, 396 bp, Glycine max
tactaagcttgggccagtgataggaaagggttagtgtgtgagagatattttttatttgcatgaaagacaagtttcgcaaggcacgcgtctattatgatggttttccaaagcccgtctatggaggcactcttcaatgatgaatttttgaaatactgtccctaaacctcaccaatccttgacaggtatttgaaaaaccgcttccgtggccattcatctaattacaagatgggctccatgttatctttaatgatgatgtctgattaccatcgttgatggcgtgtcgtataaaatattatttggagtaatctctttctttttccaatcctcatttaatcttaggatgtgtacctattcaaaccctacctcttattattattcgaattactaccaaagtta

SEQ ID NO: 202255 - DNA, 413 bp, Glycine max
  unsure (1)..(413): unsure at all n locations
actcaagcttctcaaaaggacatagactctgtggtgaccttttgctttatgcatntgaggagtagaggaagaggcttaccacctctcttatcatgcagccaccaaattgggagcacctatatgagctcatgtgtgatgcctctaacttcgcacttggggctatttatgcacatggagttggtagactatcccatgtcactatttatgcatcacgcactttatatgccacccatgttaactacaccaccgccgagaaggagcctttaactaattgttttgctttagataaattcaaaacttatttgcttttctctcatatcactatttttactgaccgggcacctttaaatacttgtagaagaaccctgatgctaaaccttgaatgatttggtggatgtttattcttcacgagt

SEQ ID NO: 202256 - DNA, 427 bp, Glycine max
  unsure (1)..(427): unsure at all n locations
tgtaggattatggngtacccatcacaagtggtactatgtggctgtcgggcgatggtgcacaacaagttttccacatccacaaagcgcgcataaacccaccatcccctgttgcccacctccatctgagctcacgtactcccacgtagcccatatcctcgtttctctcaacaccgggtccccatcaatcctcccaagcttccacaacatccaagtaatacaacattcaaacagcacaagctatcacagccaagcaaaatagagcaaaggcagaaaactctgccaaaacaccaaccaaatcacagcttttctcacttaaagaccccagtaacaattccttcattccggttcattaaccgttggatcgactcgaaaattntactagaagtctttagtacataagcctacattttgaccgtcgggatctact

SEQ ID NO: 202257 - DNA, 344 bp, Glycine max
ttctgttactttgagggtattgctctttttttctttgtcgagagaaggttttgttttaataaacaaggccttgcagttgttatttcgaatgtaaccaaagaaaagattgtgaccttgcgagaaagggattctttattagagaatagctttggctaatttgccccattgatttgtacagggttatgattgtcttttattatttgtgatttactatggggttgctgtgttttttttctaatgaaggcaactgtacatgtcaagaatggaagagaaattggagagtgtgccttcccactggtgctggaacaactgctgtacttttcctttgccggataaacgtgtgg

SEQ ID NO: 202258 - DNA, 376 bp, Glycine max
  unsure (1)..(376): unsure at all n locations
ggaccttaaaactaagcttatcaaagnataagctttcatgtataaacttttattatctattatcacaaggtttgctccctgcctaacttcaatcattagttatttaataagttgttgcaaagcaaggaaaaaaatgcaacgaacaatttgtaattttaactttttaccatgtaaacctacaatttcacttaattcgatatcaattttatttttcttcaatccgaaaacatctttagaacattgacagcatcaacgaacaacaaaatagcacgagtttcagctttcaacgtgctttatttaatttcgtaaaacgaatactatgtcctaccggtggaaggatcgtaacgcgaccaaagcttggtcttcaacgtgtact

SEQ ID NO: 202259 - DNA, 352 bp, Glycine max
ttgatcaattaaccaattattagtttcagtaatcgattattttacacaattttagaaggagggaggctttatagcttgagataattgattaacatgtactataatccattagattacttttggaaacttaaggtgctccttgtgtgatgaataatcaataccacaattgctaatcaattattccaaaaagcatgagaaactctttatctaaaagagataatggattacaaatttttttaaaaagttgaacaaatacgattttggagaattattcgattaccatatttgacaattgattaaatctgttttaccggtaaaaatataaatatttgttaactccttggcaagtgta

SEQ ID NO: 202260 - DNA, 387 bp, Glycine max
  unsure (1)..(387): unsure at all n locations
tgctgccacggagctatccgactatgctcttgtgttgtgtaacaagctacaaaaggagagagcaaganatgaagagccaatggttgatacatggacggagatgaaaaagatcatgaggaagcggtatgtgccggctagttattcaaggaacttgaaattcaaactccaaaaactaacccaaggcaacaagggggttgaggagtatttcaaggaaatggatgtgctcatgattcaagcaaagattgaagaagatgaggaggtaactatggctagatttcttaatggtttgactaatgatatccgtgatattgttgagctgcacaagtttgttgaaatggatgatttgcttcacaaagcaatccaagtagagcaacaattaaaaaggaa

SEQ ID NO: 202261 - DNA, 420 bp, Glycine max
  unsure (1)..(420): unsure at all n locations
tgtaggctacatttacaaccatacattggctttgaacactatgangaaattcacacanaanactgaattagagacatggagttacaagatttgctaccactttcttaactttgcaaagattgcataagcaaaaggccaatcttagaaggatgtttaattcacatgaatggttgaagtctaaggcagctaaagagcccaaggggaagcaagcaacagatgttgttcttatgccatcattttggaatgatgttgtttatgctttaaaggctatggggccttttgtaagtgtgttgaggttggtggataatgaaaaaaaacctacaatgggtttcatttatgaagcaatggataaggccaaagaaacaattcatagagctttcataacaatgaaaggaagtataaggatatccttgcaatcat

SEQ ID NO: 202262 - DNA, 433 bp, Glycine max
tctattcggaaaatcaaaaggctcaacactcacatgtctttcatgttgggctcacaattttcttgcctaaccaatctaaaaactcgctttcagattgttgttgataagctagtcttgtataagaagataaaatgctacaatgccaaagaaatattgattgaagatgaagaagatgttgattatattcattttgttaaagctcgacctggtcgtttgttcaaacatgagcttgaagcactcaaacacaagttcgagctcccatccctagatggatatgccattaagaagttctatggactacaagcatgctcctctagattggaacctaaggagaaaccacctattgatgcttatcatcatgaagttgagtgtttttatcaaactctgaaccacttcttcttcactcaagaaactcccttcaacatgatctaca

SEQ ID NO: 202263 - DNA, 439 bp, Glycine max
  unsure (1)..(439): unsure at all n locations
ggacaccagatactaagctttcntcacatcatcatctactgctacaattctaatgcatgttcacattcttctcggtatattagagatatccattaccaccaagtctgtcgggaagataaaatgttttactctgaccaacacaattttaattactccatatggcctgggtatagagcgggcagctaattgtaaagtcattcgagtgagcattatttccaactctcccaatattctgcacatggagagtggcatcaaattgatactggctcccaggtcaataaaagcctttcccacattgacttctccagttgaacaaggaatagttacactcccaggatctttatgcttgggtggaaggatcttctgaatcacagcactgcaatttcctttcactatgatgttttcctgatgaatatatttatgctttccctgtaaacac

SEQ ID NO: 202264 - DNA, 429 bp, Glycine max
tttctttcacaatcaatctatctactgactaacaattcttaatgcttgttcacattcttctcggtgtatttagagatatccattaccaccaagtctgtcgggaagataaaatgttttactctgaccaacacatctttaattactccatatggcctggtaatagagcggtcagctaattgtaaagtcattcgagtgagcattatttccaactctcccaatattctgcacatggagagtggcatcaaattgatactggctcccaagtcaataaaagcctttcccacattgacttcttcagttgaacaaggaatagtttcactcccaggatctttatgcttgggtggaaggatcttctgaatcacagcactgcaatttcctctcactatgatgttttcctgatgaatatatttatgcttccctgttaacaca

SEQ ID NO: 202265 - DNA, 423 bp, Glycine max
aattgcacttgtgcacccatatcagatcacctatgctgtcctcatatatataaaacagtcccacaatgctaattatacaaaaatcacattcatatgtcattggggcatttcaccgatcacttggtgggcgcatgtttatacataaattgcaagagaacggtggcaatgtggcatgcctcattgcttcagaatacaacacaagcctaaagccttcccctacaaacccttaactcaacaaaacaagcatggattcacacgtgaattgcttcacgaatttcgcataaaatgagcaatttaaagcaccaaaacacatcaatggagagccaaataaccaaaggaaattgtacttacttgtggggagtgaattaaaccgcgaaaagagaactaaactcactacagaacttgggggctgtgttctgtatt

SEQ ID NO: 202266 - DNA, 400 bp, Glycine max
acagaccaagacatggaggacattgacttttagtatcgcaattgcgcgacgcacctatcagaattcatgaaaaatgtagcaattattttgacacattgacatgtctaacgacctgggtccacgtcgtgataagaaagacacaagcacgaaaaaggtgatcaagcgggggacaagtgtctagaacgacaatactccaataaggaactcaatcagaaagctgctagttacgcatgaattacagggcccccaaaaaaaaccaaccaattgatattatctgcgagtgcttggaaatattttttgaagcaagccacaaaggtacaactcccagaatgcgactaaaggggattgttaggcacgctgtaaagctctgaaccctacttcatgcactaccgataataat

SEQ ID NO: 202267 - DNA, 422 bp, Glycine max
  unsure (1)..(422): unsure at all n locations
actaagctgaacaaaaccgggagagtgtgaccttcactgtgatgattgtcttctatgagnaaaaaatttgcatgaatctctgaagtttagaatgaaatgtataaactagaacatgatgaaggccatgattgttcatacacaagccttttgaccaaaaagcttaccttgaatgataattatatcctttgtaccatttctgagctgaatgatattgtcaaaaatttgaaccctgaacttaaataaatacctcctgataccttgcttaaattctaagagagcatatggttcaaggcaaatttaccccaaatttgggggagtggaactaattgggatgcaaagaaagagagaaaacattagcacacacaacaaataagttgtttgttaaaaaaagaagaaagataagaattaagtgtgtgatgtac

SEQ ID NO: 202268 - DNA, 413 bp, Glycine max
gctcactttgatactttgtgcttgctgtgtcatttttgttcccatagctcataggctagttaagattgtgtataatcaactacttttgcattgactatgccatataattccatgtcaagtttatgctatattgaaataaattttcattgactatgggtgtctctgggaagtggattaaagcattggttggtctaaagaaatcagaaaagccagagaaggatggaaatgtgagtctctctctcataacacttcttactcatattcctgagtttcagtatttattttcatgttatgttggcaaaaataatcatcacctatggcgcttttaactaaggttctgtatcatcatgtagttatgtctacccacactaccccaaagaaaaacaaaaaattttgttgcttggtttcactca

SEQ ID NO: 202269 - DNA, 418 bp, Glycine max
  unsure (1)..(418): unsure at all n locations
taacgcaatcatctggttctaaccataatcaacaaattttttcattaatatcaaataatgtcatcgttcaaataatagttgactntcatatttcaaaacatattttttcatactattactcaaaaactaactaacaaattaattaaaaaatcttctaaaaccctactatattattaaatgtagtatattttaacaaatgtaataaaaaaattaaattaacattaaatgattaatctagcaaactaaaatacctcatcaaaatcaaactacaattttattttaatttttttataaattacaatttatttattcataaataaagatttaattatattataaatatttatttaatacttttatatattcataaatcaatgtagaaaatggttttttagttttttacttgaaacactaatct

SEQ ID NO: 202270 - DNA, 416 bp, Glycine max
  unsure (1)..(416): unsure at all n locations
ttgggctaatatgttctatagacacactttatttctgtatttcttcnntacggcaaagtactgcaaatccatatgcttagcacccgtaaagtacttgtcgttcttagaaaaaaatattgctgcggagttatcacaatacatttttagcgggctagcaatactgtcgacaattccaagccctgatataagttctgcaaccaattagcctaaattgtaacctcaaaacatgctacaaattcagcttccatggtggatgcagcaacaactgattgttttgcactctttcatgatatatctccttcggctaagagaaatacaaagctcagagtggatgttcttgtatccacacatccagcacagtctgagtctgaatatccaaacacctctaggtgatcagaacctctatatgtaagcat

SEQ ID NO: 202271 - DNA, 417 bp, Glycine max
tggcccagaccattaactgaatcccaatctatttattttttaccgtgcaagcatgagagttgatctctaatactactttctgcaataatatctaacagtaatattgcggtcttctttgttaaatgagatctttctctttgcattttatatgtgctttttcttaatgatggccaccccaaacaaaataaaatatatagcacagggtacactctatgtattaaaatgcagatgaatctcttacaatgcactaataaactcactgctatctatgaatttgtaagatctccttcatatatttatcaattggttgactacttgcacttatccaaactgttgaagttttcctttgtgtgttggttaacctttgatagtccacatgtgcctcactttatttttatgggcgttgtgcacaatttt

SEQ ID NO: 202272 - DNA, 425 bp, Glycine max
  unsure (1)..(425): unsure at all n locations
tttgccatgttggatatattaaaccgtaagattagaagattaatctatttatattttntataagctcagattaacatgtgtataatattttttaaaaaaaatcctttgtagaaggtttttttgaagctgctctaaagaagttaatatgagaaactttataaattaatttatgtgtaagttaattctaacttatattttttttttattctcccaaaaatccttgcgaaaaaatttatctaagcaagcctatgaaattaatcaatttactaaaggaatcttgtaataatactcattaaccatgtgggcctcattagtgactcgcggatatgtaccagtctaatgcaccttagaattttctcaccatttcacatttttccaaatacagtggtgagaggaaaaaaattaaaaatacttttaaacataat

SEQ ID NO: 202273 - DNA, 406 bp, Glycine max
  unsure (1)..(406): unsure at all n locations
tgcttctacaaaaggaaatattaaaggtggctggaagttatggatgcttgngcagttttgaaaacgtccagcaattatgacacttgcgcttaacgagccctggctgctaagctcaccaaagatgacgtccctcggtaatcccccaagaaattaaatttaaaattacctatgtgcttagcgtagaggcctctcttagcgtgtgtttcatcagcttggcgcttagcatgataaccttgtcagcctaaccatcttgttgcttcctgcacccctgaaatcaatatagacaattgttgggccttttttttttacaagaaatgaaggacagaaaaaattgttgggttgcctcccagtatatagacattcctgtatgaagaagggagaggccccacaaagtcattcccctatc

SEQ ID NO: 202274 - DNA, 349 bp, Glycine max
  unsure (1)..(349): unsure at all n locations
tggtgtagttcttaaaagagtgcacaacacacttgccctctttggtgtgtgcactctgcacatcgtagtggtcggagaggaacagttccttatccncgtggaactgtctcctaccaccaatcgactcttctggccggtagtaccacctcacacgcaccttcacgttgctcctgttgtcctgctcgatcttctccacgcgcgccacgtaaggcggcttcgacgtgtacgagggccgcatcagaacacagtctccagctgcaaaacccaaacattctgttaacgacagacgccaaccacaaaacgacttcatgggcagccaggaatactgtgaaatggaccgtatttaaca

SEQ ID NO: 202275 - DNA, 434 bp, Glycine max
tcctcggggccatttcctgcgagagcaaacatttggaattttatttttaccaagaaatgctactcttaaaacaaaaatggcatacaacatacaaacatcaatgtaaatttagagtaaacttatgcacatacttttttacgaacgttcacttgcacaagacattcttataactaagaaaaatgcacccatgtacaatcaagacacatccattacctagattatttatatgtacttccaaggtgtatttgctacctacatcacatgcactctcttggctaaatttacatacatgcatactcaaagcatttggggtaccaaaaattgcacatgtgcacattccggaatttctaatatttatgcatatacaaactttgtgatgaaatctggctatctacacaataaggtgatacatttcatgctttattcaagtgttt

SEQ ID NO: 202276 - DNA, 430 bp, Glycine max
tagaagacaacaacctcgagcatcgaaaccaccatttctttctttcctttgcaactcaatcaccatatgccctaaacaaacaagttaatactataatttattccctctgtctcaaaatggttctgcttttagtttttgaaaaaaaaatctaaattgattgatattttcattttttaattaaatatttaaacatctattttaattttgtcatctaataaatattattatcttgaaatacttaataatacacttattaaaaataaaataagtatattttaataaaattattttataataaatattaatacttattctgttgaaatatttattttcttaatctttgagaaaaaaaatgttaaacaacaattattttgaaatgaagagaatagtgtaatatttggaaatgaagagtaaaagaatgacaatattt

SEQ ID NO: 202277 - DNA, 415 bp, Glycine max
taaagtatgcccgagtcattcatccctatgaaatgttgttgttatatcggcgatcacaatcgccattccttggattataggggcgaacctagctcatgcttttacaaaaaggttcaataagccaagctgaaatatggaagtaaccgtcttgcacaattggggcaaaagacgaatcgagtcacatcactgcttcgtctactgccaaagatatttacgattgattatgaccttgttacttccagcttcaccttgacaaagaagtcctggaccatgttgataatctaaattgatccaaccccatatcctgcgtaaaaattcgcaatactacaactgtgcatcattcgcatacatccatgcttttcattgggagcattgctcattgcatttctttcgttgaaaatataattcaataata

SEQ ID NO: 202278 - DNA, 416 bp, Glycine max
tcttatccaaggctcatcttggtggtgaaacttcttcttccatggcttatttcctagtggatggcgcctcctctcacctcttctcctttgtcttccactgcatctctatggtggaaaatcaccattgaaggacctcattgaagctcaaagatccaacctccatagaaactccacaagcaagcttccatcaagtacttgatcattgtttcgggggaggaagatgttctggtaagctgcccctcttctatgccatatgtggaggccaccgaagagtccttggaaacggctttccagtcctttgaggtggtaaacaacacttccgtagaatccctcccgatgtggccccgcatgtctggcatggcaatgatggtggtccgtgtgatagttgggcaccactattaaccccgaatgggctt

SEQ ID NO: 202279 - DNA, 407 bp, Glycine max
  unsure (1)..(407): unsure at all n locations
tagcaaattgacctgngtgttgcccagcttcatcatatcttccataatacttatcacctctatgatatttaataattttcacatttatgtctaatttccatcttacttcattgtagtaaatttctaaagcatccattgcttaagaaatctcggacagtaagtagacataaccgtaacgtgaataatcatcaataatggtgataaagtatccttcctttctgaaagaactaacatcaaaaggtccacaaatatcagtatgcacaatttcaagaagttgagtgcttcttgtagctcttttctttgtatgttttgcttgttttcccttaatacaacccacaccaatatttagatccgtaaaatctagataaagaagaatttcattctttattaatccttccatcctttct

SEQ ID NO: 202280 - DNA, 416 bp, Glycine max
ctaatacaataaagaaaaacggacagggtatattatgtttatggcaaaggtttcacgttttattactgataactcttgggagttgctacttgcacccagcattattgttagggcacccaacaaatagtgaagtggcgaaactgcccttcaacaattcttgttccggaagaagattttttctggaaacttttcggaaaacctctttccggaaattttccggaagaaccttcttccggaagaagaatttgtgacttccggaagtactcagaaactacttctggaagaacgtcatccggaatgttttcggaagaagcttctcccggaagatatctcatttcttctggaagaggttctttctgaagttatgttttttagaaaaaaatattttattttgtaataatttacttttaatggat

SEQ ID NO: 202281 - DNA, 425 bp, Glycine max
  unsure (1)..(425): unsure at all n locations
tctcccctatnttgctataaatagggggagaagtgaagaggaaaagggttcagccctttaggcacttctctctctctcgaatttgctgaggaaaattatttccgtgaagaaaatccaagctgaggcgcttccgtaacgtttccgtaacgtttccgtgagtaattacgcgaagattctcgaccgttcttcaagattcatcgttcgttcttcgttttcttcagtcttcaacgggtaagtacctcaaaccaagcttttcaattcattctatgtacccgtggtggtccacattttgtttcatgtatttttattctcgttttcatttactttttatacccccttttgacgtgcttaagccatttatttaagtcatttctcgcttaatctaaaaataaataaatttccaccgatccgttgaattgtatcat

SEQ ID NO: 202282 - DNA, 368 bp, Glycine max
tgctgcacacaactcttgataggtatcagtgtcatgctttttctttcaatcttatttggccacggaaatgggaagaaaatgagaactgattcataaccccctgcagaaaaattgctcatgaccgaaatcttaatggctgttgcaccatgcaaacttgcatccttggtcctcttgagcaatccccttagtacactacattacttcctctttcgacaagccaatctttaactcaatattggccatgatgtaaattttgtattcctagccagcactattcctaaagccagtgcaactccaaacatagcatgcagcctcacacaaaagtacttagccatgaaaaatttatatttgtccttgtagaataccac

SEQ ID NO: 202283 - DNA, 439 bp, Glycine max
  unsure (1)..(439): unsure at all n locations
catgaagcttgtagacaatcctacatgaacttttattgcacagnaaaagtagctatctaagaaacttgagattttaacagaaacactttgtaagttgccaactaaaatgtctattggtcaaccttcgcattcttctgttttgcaggttacaatttgtaccatctatggtgaggctcatgaaacaggccaatgtattcccattgaagaaaacactctaaaaattcattatatgggaaataaaaaatgacaagggtatactcaaggaggattttcaggctttcagcagggtttctataatcaacaaggacaatggaggtcgctccctattaatcaagtcaacaaagactagggtggaccttttaacaggccaatccaacaaaggcctaacattnttcagatgactactaagctggacgagactntgacttaatttattgca

SEQ ID NO: 202284 - DNA, 438 bp, Glycine max
agctactaaggggataactgatgtacacttaatttgaccttcctatcggaggcaaaattgtgtatttgatcctccaatctatcttcagtttcggatgtggtcccctactaatttaattcatgaattgggtcctcctattttgtaaaatcgcgctatattgatcacccaggccacaattggacgttgaccgtaaacaagtgatgttgactgccacgttcttataacaagatgactgtcaagtatcgatgctctgtaaagctatcctatatgttgaaagcatgatgacctacaaacttgacaccaaccagtgaaatcactcccacatgataaaagctgattattcttgtttttcttattatgcatggataattctaatattcactactagaaaatgcaataacacgtatccaggttgatttttacatactaacttcctta

SEQ ID NO: 202285 - DNA, 386 bp, Glycine max
  unsure (1)..(386): unsure at all n locations
tattacgcaacgtggcggacaaaaatgggcagntaaattaatggtcattattgtcaatgcggaaggattttgcgcttcactatccatgttcacatattatngcagcttgtggttacgtgagcctgaactactaccaatatatagatgttgtttatacaaatgagcacatcttanaagcttactccccacaatggtggcctcttgggaatgaagtggctattcctccttctaatgacgcatggacacttatccctgacccaactacaattcgtgcgaaaggttagccaaaatcaataaggataaggcatggacgcctatntaattcttcttancaatagattagacataagacaactaatcatataagcctaatttggtgtattcta

SEQ ID NO: 202286 - DNA, 446 bp, Glycine max
agcttgtaggattatggggtacccgtcatatgtggtactaggtggcgatcgggagatggtgcaaatcaactctcccacatccacaaatcacacatgaacccaccatccccagttgcccaccttcaactgagctcgcgtacccccacgtagcccttatcctcgttcctctcaacaccaggtccccatcaacccctccaagcttccacaatattcaaacattatgaactaccctaaaccaagaaaacagggcagaggcaaaaaaactctatccaaaacacattccaataccacatgcttccctgctcaaataccccagtaacattctctttgttcttatacgctaaccgttggatcgactcccaaattttactggagggccctagaacataagtttacattgtgaaccgggggatctgctataaaatgtccacaaccccatatgtact

SEQ ID NO: 202287 - DNA, 400 bp, Glycine max
agctttctccactaagttgcctgatgcctgttatgtcttttctgatggcagtggtcctagatgcagggaagaatttctccaagaacaccctcttaaggtcatcccagctaaaaatggaccttggagcaaggtagtatagccaatcttttgtcactccctctagagaatgaggaaaagcatttagaaagatatgatcttcctagacatcagggagcttcatggtggaacaaacaatatggaactccttaagatgcttaagaggatcttcacctgcaagaccatgaaacttgggcagcaaatgtattagtccagtcttgagaacatatggaacacccccatcaggatattgaatgcacaagctttcataagtgaaatcaggtactgccatcttccttaaagt

SEQ ID NO: 202288 - DNA, 428 bp, Glycine max
  unsure (1)..(428): unsure at all n locations
atcaagaattattatgaaccaatcaatcaacaagcatacattgaaaattggtcccacattctaaaaatggtcatctcagtgcttcaaaaaaatttcccaaaagaaatagaaagtacaaaatcatacataacagcttagaagcaaagtntgaggggtntatcttacttttgatatcctgtgtccacacctttgctggggatgaaccaatttcttcatctccctgagttttattccaattggcactttctttcttcaaattttctggggatgaaccaatttcttcaagctcgctcaacanatattcagcattgacgtaatggcattccctccgagtcttccagacaaggagttccacanacaagaggcgtngccttntcattctctttagcatctatctgaccaaacaagtcagaaaatcaactatacct

SEQ ID NO: 202289 - DNA, 453 bp, Glycine max
agcttcacgccagtagaactggcagcattcttggccataacagaccctccttacaatttgtttaaaaacaaaccttgtttggtaaatagtttttaaatgaagccccctacagtaaatttgcctatcttgcctatcttaggacatccttttcaactctacaggtaatctgtcacacatggtttatatttatttctcgagaattattcaatctgcagccaacccaattcaagaactaagcaccatgacaaatttgcttcaaaatgtagttattatatttgtcttttaattagatcctgcatttaaaacggcaaatagttctaagatttaattaaaaaaattatcaacatttgtagggaatattcttattctcacttctacatgtgctaaactctaatattttcttagattctacaactactttagagcatacaaatgtgacatagaataacaatt

SEQ ID NO: 202290 - DNA, 409 bp, Glycine max
  unsure (1)..(409): unsure at all n locations
aagcttcttggccctgacttctcttgctagctgtagacctacaatgtattcctcgtactcaacctaattctttgaggctttgaagttgagtttaagagctttctccagggttacattttcagggccttcgaggatgattcttgccctactccctttcacattggacgcaccatcaatgtagaggctccaccagtctgatgtggtttgaccgttcctgatgaattctgccaagaagtttgccttgactaccacttggtgactctgaaagtatggcctaaggcatctagccaatgtgatgagtgctagcaccaccttttcccctcctcttgtacgaaggttgctctgacagctntgtcagccactaacagaaggtaggctcaagactagcggtgtggcaatggtcttcttg

SEQ ID NO: 202291 - DNA, 365 bp, Glycine max
  unsure (1)..(365): unsure at all n locations
atttgattttttactcgnacggatcacatcccaatatagtcattttctgggccttcatgtccactgagactgactctacccctgaaaaaatcaccccaaaaacattcaattttgtgaccatttggttttttaaccttgaataattagcttagcataaaaaaagatgtatataattaacatgacaattgacaaagattattggatgctgagattccatacctgaaataccagatactgccttcatggcccttttcttgattttgtcatcatggagttccacctttagcaccactttctgtcggacaaatattatttgacttttaggatctatagtaatattcatttctaagcatgaacgttccaaa

SEQ ID NO: 202292 - DNA, 423 bp, Glycine max
atgagctatggagaaaaagagaaccaaatctgaaatatcttaaagtgtgggggtgtcaagcaaaggtaaacatcctcattaataagaaaggaaaaatggaccaaacactgctgaatgtgtttttgttggatactctatgcatagtactacttatagatttctggtgtgtaattcagaagtgtctgaaatttctaatggtactattatggaatctagagatgctactttctttgaaaatatttttcctttgaaaaataaattgtctaaatttgtttgtgatacttcttgttctaattcgtcttcttgtagtaattaataaatacattgtgtttgaacctatgaggagtaaaagatctaacatagttaaggaatttggttctgaaatttgctcttttttgcttgaagatgatcctaaaacttatg

SEQ ID NO: 202293 - DNA, 355 bp, Glycine max
agcttatttctatattttgcatcccacgttatatatagccatatgtactccccattattaatggcaggataagctcttaatatttctatgttcgttatattttcatttttcccataatcattgagttacatatcagtaaggaataaataaaaaatgagtcacaaagttatggcccactgttcaacaaaaaaaaaaaaaaaagaagttcccttgatacttgattggatcttcatctaatcagtttaattcccaatttctggttcacaaaaatggtaatttacaaccttggcaactggttagaaagatttccctctctacagagctacttaggagtgcgcttgctttttcctaaaaa

SEQ ID NO: 202294 - DNA, 443 bp, Glycine max
  unsure (1)..(443): unsure at all n locations
taagatgaaaaaatgcacttctaacaaacgacgtgacaacaacctttgcagcctggaaatattgggttagttgattgaaatntcattttaaaacattaacattgtaattattacattctgaaaataggggaaagggagcattgaatagctagttagccacagtttaggtcaatcaaatttgagccaacaagattaatggataacctcaagagaatgattagagagagctgcttcctgtaagacttcatctatcaggagcacgtcattccagataactcctgtaattacaaatttaaagaaatcatagtccagtcaggaagagggaagactggtttaacaattaanataatatacttatggaaaagtgagaagtttaagagaagaaaaaatggctgggacacacaatatgtgaaatttgcatggataatggtaaagacaataat

SEQ ID NO: 202295 - DNA, 410 bp, Glycine max
  unsure (1)..(410): unsure at all n locations
agcttgatttgtgagtagattttagctatattttcactnggttattnctcaactcattaaaagagaactttcaaagtaaatgtctggttgaaacttgcctttctgatgattaaccaaggttacaacataaacaatcgattgaattttattttaaaggtgataaaatgagattacaacacaaacaattggtcgacattaattttaacattgattaagtgagattatggcttaaatgatcaatcgaaatttgcttaaaatgaagaataagaaaactgaaagtagacgagatgaagatgaaaacatacaaagcaagaatggacccctaagggtgcatccaatgaattcaacagttccaaattgaaaactaactggttgaagatcatcaaactatgaataacagaccaagaatg

SEQ ID NO: 202296 - DNA, 401 bp, Glycine max
  unsure (1)..(401): unsure at all n locations
tccaggaaaatcatatatttctaacaataaaatccttctcctattttataaaacagtataaaaaaacgaggagggatgaaattatcttaagaataatagttactctttatttcaaccattcattttttaaaattcaataatcttatagaacgatatggtataatagatttagagttgttaactagtgatataaaattattatcattagtcgtgaaaaataattaactcatttgaatctatctaatatatctatctatgtaaaggaagtttgaatttgtatgaatcgttagatcaaaatttttaaattaatttatagttactcttaaatcgaagacactgtgttcttgcatcctgagatctgacgagtactatctctatattgtnacacaatatgatactct

SEQ ID NO: 202297 - DNA, 399 bp, Glycine max
agcttgatggtagaagtgagaaacatgtgttcattggctatgatgctagctcaaaaggctacaaattgtacaatccaaacaatgggaagacaattgtgagccaagatgtcgagttctatgaagaaggcacatggaattgggaggagaaagaagacacttatgattttttccggtactttaaagaaagagatgaagaaaccttgactccaaatgattcaactccagctccttcaccaactccttcaaccaatgaagcctcatcatcttccgaagggagttcaagtgaaagaccaataagaatgagaaatattcaagaattatatgatgaaattgaagttataaatgatttgttttgtctttttgttgacagcgaacccttatactttggtgaagcaatga

SEQ ID NO: 202298 - DNA, 480 bp, Glycine max
  unsure (1)..(480): unsure at all n locations
gaccataaaactaagctgaagcaactggtgcgtggtcaactggtacttatctggtcttgaatnanaaatctgtacctgtcgcaagggtttgtggtttgtgctcctctgctgaccaccatacagacctttgcccttccatgcagcaacctggagcaattgagcagcctgaagcttatgctgcaaatatttacaacagacctcctcaacctcagcagcaaaatcaaccacagcagaacaattatgacctttccagcaacagatacaaccctggatggaggaatcaccctaacctcagatggtccagccctcagcaacaacagcagcctgctccttccttacaaaatgctgctggcccaagcagaccatacattcctccaccaatccaacaacaacaacaaccccagatacagccaacagttgaagcccctccacaaccttccctcgaagaacttgtgaggcatatgactatgcagaacatgc

SEQ ID NO: 202299 - DNA, 441 bp, Glycine max
  unsure (1)..(441): unsure at all n locations
agctttatgacttgatctttntacaaatatgttgccactgattttttcagacccttttaaatcacttttttttattggtaataaaatagaaatgtcatgggttgtacccatgcctgttgaatgttacaccaacaaaggtaagaagaaaagacaattatttgggttctctaacccaaaacatcaagaaataaaaaataccacactcaccaagaagaaataaattagatttgtaatgtaccaagcttcaaaatgttcaatcatgtctcttgctttctcttcttctcaactgagttgaagttgaaaatgttcacattaagatctattggaataccaaacaatttcataaaacttcatttggatcttcaacccccctccccccaaataagaaacaaataagatataattttataaggaatgccaaagcaatacttgtaggaacac

SEQ ID NO: 202300 - DNA, 116 bp, Glycine max
atcacttcaatattttgcatcactttggaaaacaaaagtcgggtgcatgtggataggctgaatatttaaagaaaataacatttgcctttgttgttttcatgaaagttgattataaa

SEQ ID NO: 202301 - DNA, 383 bp, Glycine max
agctttgagccaaaatcctgactcatcatttaccttgacccagggtgagaatgtcaatccttaccctcggaagcaaaaaagaaaagaaggaaaatttccaatcaaagagaatgcaaaaagaaaagatggaaaatttccaatcaatgagaaagctctatgaaatgaaagaaatttcccaatcaaagaatgggagaaagtaaaaaaggaagaagaagaaggaaagaaagctcctgatcaaggatcgaaagaaatcataagaaatgtgcataaaagtctttggaccagacaatatctgaacagttcaaaattgtcaccaatttaacaaaaaaggaaaggaaaccacgacctgaaagtggtcttcttccttttgataccaaccaaaa

SEQ ID NO: 202302 - DNA, 472 bp, Glycine max
  unsure (1)..(472): unsure at all n locations
gctgtaggggagaatttgtaagacttaattcacccctctcttaagttatagagggcacttggccaacacaaagatcaagaataaagctaagtcttagtctatctttgttaaaagagtctcttagtgattggaaagatttggcctcacaacatagtttttaaattgattataaaaaggttttagaatacttttaacattntttgataaagacattttttcacaggtaattgattaccagacagtgtaatcgattaccagaagtaaaattatcttaaaaagatatttcaaaaagtctgaaatttgaaatttgaaatttaaaaatctcagaagaactttttgaaaagacacatctcttcaaatcattttgaaaaggcacaatgggcctatatatatgtgtgtttgacttcgaaaagaagagagagattctaaagaacttaattgcagatgctctctaacaactattgtgcaaaac

SEQ ID NO: 202303 - DNA, 426 bp, Glycine max
agcttgacaagctaccatagatgcaactatgtattctgcttcacatgaagacaaggctaccacaccttgcttctttgagcacctagagattggtgttttaccaatcataaaaacataccctgttgtgctattttgatcacttttgtcatcacactcattagagtctgaatatccaaacaactttgcctttgtatacctctcatcattaggaaacattatgccaaaatttaaagttcctttaacataccttagaattcttttgcctgccaagaggtgaggtgtccttggttcctccataaataagcttatcaagccaacacttttgaccaagtcaggtctagtgttgcataggtatcttaatgacctttacaatttgtttgtatagtgtagcattaactagttgctcacttccttccttctccaatt

SEQ ID NO: 202304 - DNA, 373 bp, Glycine max
  unsure (1)..(373): unsure at all n locations
ttaagtcaccgcggctgcagcttgtggctaatgtattgttgatatgttcttctttaaatacgtggntattgccacctgattctcaggcttgatcttggttcatggtactaatactgcttgatctcttacgcctggcattttttatttattggaagtcttcatttaaagtagtacttagtttacggtatacgggaatggcttaaggaaatcataactaatagtattaattatggcagctttctacttaacatttaaaggttcgattattaatttcacaagtatttgggttaaactaactaaatttactctgtccgttatgtcacaaattacaaatgctattaagtaaaagcttatattttgttttccaaaaaca

SEQ ID NO: 202305 - DNA, 465 bp, Glycine max
  unsure (1)..(465): unsure at all n locations
ctaagcttcatccttcgaccccgaaccatccaagtcaaatcatactcttcttttttctccaatatgttcggctctggtttttgcagtaaggctcctagaccacaaagatcaggttcatggtggtggcggcaccgccaaagtagcacgtcggcgagtccacgcacgagagtccactgggtgtcgacatcttcatgattntgtaaagggtgatgctgctacagtgagtagtgttagtgagagccatgtgaggatgcgctgtttctgagcgtggaatggaaagtcttccaccattgtttggaagtaaacctctgtttctttttaaatcttattttggtnattaatcaaacacaaaacacaaaacacaaaacatataataaaggacaatagtaatattgattatgagaagacgaagaagaataaacatagaccagttatggacagcgatatacatagctcattggagct

SEQ ID NO: 202306 - DNA, 434 bp, Glycine max
agcttttgttttcaattacgagcgtcttgttatattacgggactcaatcaaacatctgagtcaaaagttattctcatttgaatttgctcagagcttctgttttcaattacgagcgtcttgatatattacgggactccctcggacatccgagtaaaatgttattgccgttagatattttttagagcttcccttttcaattacgagtatttcgatatactacgggacacaatcgtacccccgagtggaaagttatggtccgttgaaattgctcaaatattctgttttcaattacgagcgtctcgatatattacgggactcaattggacatacgagcacaaagtttagtcgtttgaattttctacaacttcagtttctattcgagcgttttgattactacgggaacaatcggacatccagtaataggttttgctgtt

SEQ ID NO: 202307 - DNA, 399 bp, Glycine max
  unsure (1)..(399): unsure at all n locations
ctcagcttgggcanancaaacgacanaacgatgactcggatgttctatgtatccctttatatatcgagacgctcgtcattgaaaacagaagctctgagcaaattcaaacgacaattacgttttactcggatgtcccattgagtccccgaatatatcgagacgctcgtaattgaaaacagaagctctgagcaaattgaaacgacaataactttttactcggatgctcgacagagtcccgtattatatcgagacgctcgtaatagaacacggaagctctcagataaatcaaacgacaataactgttaactcggatgtcggattgagcaccgtgaaatatcgagacgcccgacattgaaaacagaagctctaagcagattcatacgacaataacatttcact

SEQ ID NO: 202308 - DNA, 488 bp, Glycine max
  unsure (1)..(488): unsure at all n locations
atactaagctaagttcaggcactaataggcatttcaattcatctctctatacaacgntctttcttacaattctagtggcttcatgtgcatgggatttggacctgaanatatgtcgttgtaaaaccagctactcaacttgtcctctatctgaacgtgtgcatccaagtacaaacgaaactagctaggttntacaagttcattttgcaaggtacacgtagcatgtttaaatcctgaatatatatggttgcatcaaatactcatataaagaattatattgtttatgataatttcatttgattcaaataaaaataataataaaaaatacgtatagactaaaagaaaaagaatactatttatttaatgaaacaatttttttccaaatcacatctatcttttaaaaaagaaaatttcattcaactctgcaatcacaaagctcatctaaccatntggttntagtatatatatgacttataataaacaagggtata

SEQ ID NO: 202309 - DNA, 422 bp, Glycine max
  unsure (1)..(422): unsure at all n locations
agcttggtaagataaatntgatgcaggaatatattatatattggcatgaattttaggtaaagttaatgctaactggtttcttcctttgttttcaaggattagtaattacatattcatgatttttttgcaggtagatacaaacatacaacaacttgatcagtatctgaaaaagtttgatgaggagattcggcgtggtactgcaattcctacctttttgtgcaactcgtaatctataaatgatgttaatagtcttctgataaggttgaaatatattgtatttgataacaacttaatcccatttgtatgaatgaaacctaattttatgacttatgacagaaagagaaaacgctgcaataactggagtacctgcttcaggtcctgaaggtaatacaaaatctggaaggggtaatgaaagtggtact

SEQ ID NO: 202310 - DNA, 428 bp, Glycine max
  unsure (1)..(428): unsure at all n locations
tttacaatatcaacataattcgattccatttgtcatgaaactactatttaattttagtggaagcagaaatctttacacatgattcattcaaattccacagagttnttcctactcacatacctcataaaaatcttcttcgttctgattcgataaccgttggatcgccttgaaaatttaactgtgggttcctaatacagaaatctaagttttgaccgttgggatctgctaaagaatgtatagaacacgagatatactacctttcccgtgacagcacatacaagcattgcacaaccatgtttttctgcataattggcagttgtgctacacaatttaacagcttattctgcataagtttgcagatatcgaaatccaacttacatgcatccaattccactcaaattggatcctacaagtcctacaccatgtat

SEQ ID NO: 202311 - DNA, 359 bp, Glycine max
  unsure (1)..(359): unsure at all n locations
agctngtaaataacactacgagggcattatttcattgctgaccttttccaacctccgtcacccttgttgcccaaattcctttgatctctaagtacatcagccaatacacgttccatttccaaattccatgtaaactaacttcttgtttcctcattattttttcctaaaacttttcttttgtccgccattttttcattagatgacttcattgaagttaatgtcacttattcaacctgcacatgacataacaaatagtagatatgacctactgtattcatttgactagtccactgcacaatcatagaaaatatttcaagcaatagttttatgcaatagcaaagtacataaaagtctatctt

SEQ ID NO: 202312 - DNA, 322 bp, Glycine max
  unsure (1)..(322): unsure at all n locations
tatgacactacttattataccctacttttaccaacaaaataagtataacctattgtgttaactcctgagtgaatgagacataggaatgcctatagaagtttctatcttctttctagaattaaacattgctggcttagtcgcttcgcttccttcatagcctaccaatcatattaatagttattccaccccattcggtgctatacaacctgaaaagttctgaatatgcttgatacggaattagttaagtctaaaataatagaattacaaacaatntcgaacattagttaagtctaagatactttacatcattttaatccgctga

SEQ ID NO: 202313 - DNA, 444 bp, Glycine max
  unsure (1)..(444): unsure at all n locations
ttcatttaactgtctttgggcttggcggccacgcttaacaaagtactttcgacacctactgtacgttgatttcaccaatgttgttatgtgaatgttgcgacaatcctttaaaaccttattgatacattctgagaggttcgttgtcatgtggccatatcgatgtccttctctatcataagccatcgtccatttttcctttgagatgcgatcaatccatgttgctatggctggactcagttcacaaaatttttctaaatattgataaaaaatgtgcttgcaaggagtgtaggctgcataaaattagttatgaataacaattttaagtataaatgaaagtaaaataaacgtgaccatcatatatgatatcttacccaatttcttcaacatttctttnntgttggcattattgcaatttcgattgaagttgcttgctatgtgtcacac

SEQ ID NO: 202314 - DNA, 433 bp, Glycine max
  unsure (1)..(433): unsure at all n locations
agcnataccccttgtgagtaaacaaattattttattcgntctatttcatgcgagagaagaagaagaatagcataacgtgaaagtccgcccatattatatacttgactaatactagtacttgcattttctgaggctaacttgcattatcataaaacgctgtgcggttttggcattcccttcattgattatatcaatatgcagggaatgttcctcaaaatgtcaaatcagcatttatttacttaaagaatcagaggcattatccgacacgtataggttattcgattcttcatgtgtggacacaataacctccatgaatcattatataaaacattataagcaactatgccttgtcattaccagagacgccaatataatgaatgtaataacttaaacttaagtgtgctactgcttacctttatttcttcttattaat

SEQ ID NO: 202315 - DNA, 417 bp, Glycine max
agcttgaccaatcctgacccaacccgttcttattctgtcagtgagaacctgtgatgaacctaagcaggtgagctcctgtaagtcaacagataaaaggaacaaagaccacaaagcaaggaggctagtggtggctggccaactgtgaactttgattgatatgtgggttatggcctctggtaatcgattaccaagggtgggtaatcgattacaaggcttaaaaatgaagacaggaggctaagatggtctctggtaatcgattaccaaggggtgtaattgattaccaggcttgaaaaactaagtcaggaaactaagggagcctctggtaatcgattaccagcctgtgtaatcgattacacatagggatggggcacttggttactgattaccaggtatgtgtaatccgatacacaatgcatt

SEQ ID NO: 202316 - DNA, 447 bp, Glycine max
tgttggccacgattgacaaagggtgcagaagacgatgtttgtctctgcgtgctatcatgctctgagtcttagagatagcaaaagaaagtttctacggataaccactcgggtatctccgcatgtcacgtgactccactgtcagtatgacataatttgtctgcgcggaagatgacgtaaatctccgtgtgtcaacgggcttgttggctgccattgacaaagggtgcagaagacgacgttagtctctgcgtgctatcatgctctgagtcttagagatagcacaagagagtttttaccgataaccactcgggtatctccgcatgtcacgtgactccagtgacagtatgacaaacattgcgggggggcggccaacaaaagcgaggttcttgctcctacgtatcctcaatgaggaactcagacctacgtagttctggctaacctgtgagacta

SEQ ID NO: 202317 - DNA, 418 bp, Glycine max
agcttgttagaaaaaacattaccctttatttgtatggaaaattttagccattcaaaaaaattaaaatacatgccatttgaattagatgtaattgaattttcttcattttcaaagtatttgttttgacaagtcattttaaatttcttgtatagtaattcaatttctactatgcaaaattttacttttaaatatttatttagaaattaaaatttcaatattgaattttattgaaaataaatattaactattttttaaatatttaataattcaaaaataatttttatattaaacatattaataattgtaaatatttaataattcagaaatacaaatatttaatagagaaattacaactaacaccatataagagccttcatttataaatttacaaattagtcctgatacaaatcagatcatg

SEQ ID NO: 202318 - DNA, 344 bp, Glycine max
tagattatatatatcagacagttaattatgagagcatattttatattcatttagatatcagttacataaacacatgcttcttgaaaatttgtaatttggaggtttgaattgatagtgtacattacattcacaaagcaatcatgaaaatgaagacgagttacgctcgcagcaattcgaggatcagattgcagagcctgctgaacaacactgcgcacaatggaagacacgttggggcatgtgctggagtagaaggttgaactcaattgagcatttgatggataaagaaagaatgttagcactaaaaaaatggtggtgaataggtaattaacagaaaacatgttaat

SEQ ID NO: 202319 - DNA, 419 bp, Glycine max
agcttgaatctcacgacaaatgtttgacattatcatgaaaataaaacaactcagaagaaaatatggagggagtcccacaattcgatttgctaagctctcaaaagcagaaaggtactggttgacaaatctggactgggtgagcttgaagaggggcacatgacacctaatgagtcacatggttcctaaattcaaagaatctaaatcttagtgaataaaattttcccatcctataggtctcttgcttatgcccctgagcttttccctggttgcatcatcattcgtatgaggcccaacatcaacaatcgtacttgtaacattgaggattggcccaataggaataaatgtactatcatcacaataggtgtactatcatcacattagtcacaatttctcacactgtcaaagatagcaacgaaatg

SEQ ID NO: 202320 - DNA, 424 bp, Glycine max
  unsure (1)..(424): unsure at all n locations
tgcctgacattgtcaacgaaggaggaagatggtgtatgccatattcacagaggaagggtggtaacttgcggagtcactaaagaaggggacaagtcttggaagaggaaggnggaggtgagcgattctagtttgagaaatatttgggaaaatgttataatggttatttaggagaaacattgaaaaattgggaaacagaggggtgtgtataaattaacggaggctagtatatcgacaagaaaagattaaagattctaattagacaatagacattcaactaataaagaggtaaaattagtgtaatcttaaaagtaagagataaaatgacagacagtaaaaatgctatcacaaaatttataagacaaaatacgcatgaaaataaggagataaaatgtattaagcctatttataacttattgcggtacat

SEQ ID NO: 202321 - DNA, 53 bp, Glycine max
agcttatataaaaaatgtcactttaaaactatatttttctaatatcacacccc

SEQ ID NO: 202322 - DNA, 438 bp, Glycine max
  unsure (1)..(438): unsure at all n locations
acactatgaaactcagcttggctgcccantaattttcttcatgttttttctctattcttgcatcatgttcctaaaagagttgaattttttttaattctatggcaaaattaaaatgatataaaatcctattatttcattaaaaaacaaaaggtagaaaattataataatcttagtcaaaactgctatcaattaacctgaatttcacaattatcagctccgcaattaaaatctttgcttgtcctcaagcaaaataaaatttctaaaaagttctaaatgtgccaacacatgagataactacgaatcatttcaaacctttcaatgactgaccctcgagccttgcattttcatgatattgtgatgaaaaaatgaaggagtgcatacagagatggaaaaggttagcacgtaaaaacttcatcaaggcagacttaccacccttca

SEQ ID NO: 202323 - DNA, 436 bp, Glycine max
  unsure (1)..(436): unsure at all n locations
ctgcaagcttgatggtgcgagaagaaatacatgtttgtatcatcaaaaagggggagaaggtgaatgtatgtatacatgattttgatgatgccaaagaagaatctaacaaggctgcttcaaatgataagcatttgcttcaagaataattgaagattgcttcaacaaacaaagccttgtttcaagattcactaaagaccaagccttgccttaaaacaaagtgctttcaagacatgcaaggctctggtaatcgattaccaggaagtgtaatcgattaccagaagacagggtcgagaaatagctgttgaaaaaggttntgaatttgaattttcaacttgtaatcgattaccatatgtctgtaatcgattaccagcaacaaaactttggaaattcaaattcaaaagtcataacccttcaaattataactgtgtaaatcgat

SEQ ID NO: 202324 - DNA, 465 bp, Glycine max
  unsure (1)..(465): unsure at all n locations
actcagctgtgcattcatatcctgatgagggagttccatatgttctcatgactggactaatacatttcctgcccaagtttcatggtcttgcaggtgaagatcctcataagcatcttaaggagttccatattgcttgttccaccatgaagccccctgatgtccaggaagatcatatctttttaaaggctgttcctcattctctggagggagtggcaaaagattggctatactacctccctcccttccagaatgctgctggtccaagcaagccatatgttcctcctccaatacagcaacatctacaacaaagacaacaagcaactgaggcccctcctcaaccttccttagaagagttagtgaggcaaatgacaatccagaatatacaattntagcaagagataagagcctncattcagagtctgacaaattgccttcacaaactggtgcagaatccgaaaatgtgag

SEQ ID NO: 202325 - DNA, 439 bp, Glycine max
  unsure (1)..(439): unsure at all n locations
cggcatgcaagcttggaattcatcctcttatagaaatttttaatgctagaagaaaacattgatctgaccttcgtagtagatgttttagtttcatcctccacctcgcatctcaaagcatctgtgttgatttcatccaacaaatcttctgcatccaagacagcatctttcaattcttcaagccattccttcactgcaagatcagtgatttgtttctcctcagcatcatttagcacagcattaagtgccaacaacttcatcaactcatccaacacagaaatattcagctttctgctggagaagaaatctcgaaactctcttgaagctatcctttttgttaagatctcaacagaagcagaaataagtgcctctcctaccatagctaaggccatttcttctcttgtnttcaaaatggatcaaaagaacactgaagctcttgcta

SEQ ID NO: 202326 - DNA, 252 bp, Glycine max
gactagaccaccttcttaatgaatgaaggagcatgcgccaaatctctgagttgacttgttgtagatagccttccgattcagagagtatagtccaatcagaaaggggactatgatcaaaacaagtgatgtactttcccaaactttgtagacacatgacacagaactgatttcaagtgtctgtatctttacactcttagctagatgtgagaactcttgactgtagccagactttatatgatacttgttttgaat

SEQ ID NO: 202327 - DNA, 412 bp, Glycine max
  unsure (1)..(412): unsure at all n locations
ttaagtcacctgcggcatgcaagcttgnncttggtttaggtatgaattatattttatttangacttgtaagatccaatttgggcaaatttggatgatggcaagggggatatcgaaacctgcccaatttgtgcagcaaaaagctgtcaaattttgtgcagcagaaaattgtgtttgtgcaaaaatgtttgtgttgctggttagggaaagattagtacatattgggttatggacattttctatcagatcccaacggtcaaaatgtggacttatgtactatggacctccagttaaattttctagtcgatccaacggtgaacgaattggaacaaacagattgttattggggtatgtgaataaggaaagctgtggtattggtttgtgttttgggcagagttatctgcactctgccct

SEQ ID NO: 202328 - DNA, 372 bp, Glycine max
attctcaacagtcacatcctcttatctagttcttaaatggccatcaacgcgttatatatatgtgacttgagacacgaattccacaatagttcctcagaacaaacatgtcttatcctcttattaagcataactcgtttatactcttacaaacttcttggccaaattacttgtgattcaataacgaaatatatgactgtgcatattcgtcaatctatctctatctcgagagagttcttcttgtcttctcctatattctgactacggattaagagaccgatggtctctatgttgcgtaagaattctatactcaaaggaatgattgtccatgtatgttagaacctgtaataggacttacaagatagtggaactctc

SEQ ID NO: 202329 - DNA, 450 bp, Glycine max
  unsure (1)..(450): unsure at all n locations
agctntccaatggcgcacgcaacagctcatactataaagtataactcaagatacaacatgggtgttctagagttttcatcataaaactaaccctactttctcaagcattctaatataagaacttagtacaacacttttctaacaccaaatataataaccacaccactaacataattgtaaaacaacaacaacaaagattttacagatagtataacgaaagagttctaataagtatatttctaatactttgaaatttgggatgttacaactaattgaagtttaaagaaaaataagaaaattcataaaagagttgtaggaaaataaatttaacattataaaatattatacatataaaacaatactcataattttaactggtattttaatttttccaacattatattttaaatattataattaattatatcttcaaccaactatntatattgg

SEQ ID NO: 202330 - DNA, 501 bp, Glycine max
  unsure (1)..(501): unsure at all n locations
ctaagctgtgacaagggaacacgtaaaaactctcttcaaagtactatcgttatttctacttcanaaccccttaaactacttcacattgacttatttggtccctctagaactatgagtttgggtggcaattattatggcttagttatagtaggtgattactcaaggttcacatgaactttgtttttgagaaccaaaaatgaagcttttgatgctattcgcaaacttgccaaggtgattcaaaatgaaaatggtctcaacattgtttcacttagaagtgatcttggaggtgaatatcaaaatgagtcttttgaagaattatttattgttcaaatatatgttgatgatattatatctggtgctactaatgaaattttgtgtaagaaattttccagttgtatgtagacagaattaagatgtgtatggtgggagagttgaacttctctcttggactccaagttacgcaataaacacgaaacctctctatgtcataccatatactat

SEQ ID NO: 202331 - DNA, 395 bp, Glycine max
agctttaaaattaaattcaaatttctaaagactgttattaaacgtttaaaacttctggtaatcaattacaagccttgtgtaattgattacaggcttaaaatttaaattcaaattttgtaagagcatttccaaaattattttggccattggtaatcgattacagcctctggtaatcgattaccagagagtaaatatcatatttaagaaatcttagaaatttttttggaaaatatcctttggccaaacctgtgcatcatcaattaagaaactctttcttagattctaggaactaagttcatcaattatcttgaatttctggattcttgacttgaattaaacttgagaagcgcttatctttggcatcatcaaaacttcatagcatacatgctactaca

SEQ ID NO: 202332 - DNA, 379 bp, Glycine max
  unsure (1)..(379): unsure at all n locations
tgtgctaaagggggtcttcgtcattggaagtgcggtagacaggctttgtggttgatttacggatggcctttgtggataactgggtggtgggtaaggaggaggtttgttattgactgagtaatgacattgttgggtttggtgggaaacttggccgtacaggaatggcagtcacagcatgggtttctccctcatccttaccctctttatttgccccagttttctcagtcgtctaagcaggatgattaaatatgcctcttttcagatccacttcgatcctttcattggcgaagaccaaatccgcanagctctgagggtgtgtagcccaccatcttttatagtggagtatcgatatgtgttaccatcacgatatcgtctccct

SEQ ID NO: 202333 - DNA, 280 bp, Glycine max
tagacaaatgtgaaatgtcttccacattgatatgcccaaaatttacttatgctcaacaaaatataatccagaccttcaacatataagacattgtctatggaggctagagaaggaataccacatttacctatactattgatttttccatatcctatgcctccaaaggcaacttcctctctttcaagtggctttaggtcaaggaacatagacctttcccccatcatgtgtcgtgagcaactactgctcatgtaccaacttaaaccatggcctcttcctacca

SEQ ID NO: 202334 - DNA, 300 bp, Glycine max
tgcttggaatgaatattgcactgtccatattctctaatatggtgctatttgatcttcatagtagataggacttgacttcttctctgtttgcagtgacataaatcggttaactcgttcactcatgcgcatcgagatggatgatatagggatttggcgctaagaagagccaccgtcatgggctcaactgcttggagataatcatgacttcaaaacaataaggaattcatgggttcgtgctctgctaattaaaaccatctctttcaaggaaagaaagtcactctctgccgctctccaaaaaat

SEQ ID NO: 202335 - DNA, 406 bp, Glycine max
  unsure (1)..(406): unsure at all n locations
agcttacactaaatatatatgatgtttttatatatagattaagnttaaaatacattagacttataagatgggtctcaaaagtattaatagaatgaaattttaattagcatgttaggtcaagttaattacggtattgaaaacaaaaaaaatgtaaacattcccatagtgcgcaagttaattacggcggtcactttatttttaactgtgcatgtggtttccatatataatgaaacagattaatttgaaaatgtgcatggaggagagttgtttccaacaaagggaacggagcagatgggtggtggaatgtagaggctatttaaatgttagcctctctgcctctatatagaccttagtaggagtaagattttttaccaaacctatttgatttctatagatagagataaat

SEQ ID NO: 202336 - DNA, 411 bp, Glycine max
  unsure (1)..(411): unsure at all n locations
ataggtgcattaagagataatagttatacctattcctagctataaatctatttaattcaaaactctgcctttatggattatacgatatctctttctattttgctctctgcttggtttaataacaaattttcatcgcaacagcttaacttagtttctcgtgtaatattaatataacctactcattttcttaaaccccctgtacttttctgactctcccaggctgcttctatgttgcttctttttgtgtcttttactaggaaggtccttgctccatattctggcacccttgcagtccttgggactgtcctgtaagtcatatttacatttgtcagtaaagagtatttccatacactgaaaggctagcatgtgttattngttntccatntctcatttgattagactctggtctat

SEQ ID NO: 202337 - DNA, 447 bp, Glycine max
  unsure (1)..(447): unsure at all n locations
nnagcttttggagtagaaacatgggactcattttattttatttcaaaaaggaagtcgtatctagtcaaggtcttagagaccatacaagtttcctaacgatttctaattatgtgggccattaagtctatcatatgctgacaatagccgagaagcccatgaatctcttcgggggcggagtaggtgtctgccatcgccttggccttggctaacaatcggggaagttcttgactcccgttcaaggtaagagcaaaccgatccatccacatggttgcctcttggtgtaaagagtcgatcacccttcctctagcctctttttccgcgtatacttgggcatattcgtccgcaatcctatgctcgtgggccgcggctagacctaactcttcttggtacttggcgatgatagctagcatgttggtcttcgtctcgcataaacgctgagacaagctt

SEQ ID NO: 202338 - DNA, 475 bp, Glycine max
  unsure (1)..(475): unsure at all n locations
tgtgtattgctgcattctactaatatatggaattgttcattgctttgcctgagaataacaattgcttgaccacaacagcgctggtggcggcaacggacaatggtctttcaaataaacctgttgtacatgaacaaacattatatcatgcgttgaccgtgccaaacgaaccagcgaagtcattgcataattgttacactaactatattcaatgtacctgaacaaaatgatttccaaacacgtgaccgacacatatgatgcggtggccagaagagtcaggtggtggttgacttctaagagggaaaaatgtcatgctntgttgttgggacaacgatacaaggattacgttataccgtgaagcaatcacatatcccatgtctgttatatccatccacttgtccacactaacctgaatgaatcaaacatacacatgtaagtaatttaaacattgttattaaaaatattaacctaaaaacat

SEQ ID NO: 202339 - DNA, 445 bp, Glycine max
agcttcagattacataaagcaaaagataatttattattcgggaactccaaacatgggagctgaaccagtcccttgtgttatacactagttttagccttctagctgaaataaacacacacaaatattttcaaaattgaaatcaaaacaaaagtcaaaagtagtgattagtgaagcaaagaaggagcttttgtgtagaggcaaaaatccccattaaacttttgcaaaataaacatttgtgctcattttttttgcaaacacataaggctttgatgacaagtctctcaatgaccaaacatcccaaccccatagcatccaaaaattcaagcttttttggtttcccatatgtgtattccttcaaagacaatccaattagagacaccatcagatactaaacgcgggcatctcttccaaaagttaagcttttgagactatatacaactaccaa

SEQ ID NO: 202340 - DNA, 402 bp, Glycine max
tatcttaagaaaatcctaattaccttctagctccacataaagcgttaaaattaaaaactccatcaagttcttcgaatacactctataacaccttttgataaattcatttgtttcttgtataagattctcttcaaattggctcttgcattattattttgaccaaaacatcttaattattttataatttgtatagctgataaacaataaatgctataaataaataatggtattaatataaactctcttttgtttcttatgaagattggagaagatgaataacatatgttaattaagttcacaaaataataagtctcaattatctaaagaataatttaagagaaatagtatacattcttaaattctaatgttacacataataatatattaacaatttattatttt

SEQ ID NO: 202341 - DNA, 362 bp, Glycine max
  unsure (1)..(362): unsure at all n locations
agctntttcctcaaatccctctggttggactagacttacaccaaacaacatatttaaaaccaaaacttaatccgcagatccctcttgtaagactaagtttcaattctgcttcattcaagttctaaggcaaaaatcatttcccaatgctaaagtcatctaactaggcacacaaatggttgattagaccaaaagcatacagaatttaagcactgaaagaatcattgaacacaagaaacacaatcaattagatattagaataattaaatcaattgttatttagaaatctccatcaagggtgtttagccagccattatagaagaaaccctaacaataatgagattacaaaacctaggtatctctgc

SEQ ID NO: 202342 - DNA, 378 bp, Glycine max
  unsure (1)..(378): unsure at all n locations
tctcgaaccctagcctgtcccaaagatcaaaacacatataatctacaaaaganaacactaaccaaaatcacaaactaataggatgaatatgacaagaggaccataaaaaaatagaaaatgcaacacacacagggttttgaaaccttcaacatgaagaaagatgaaaatctaaggttgcgaaatgtgagacttttttcagttttttgatcattctacccctccctttttttacactgttttgttttgttgccattgccattgccgcgttgcatatgaagtttcgaacatatgtcactccctggttggcggatttcaactccccatttaatttcacttaataatcggaaatgtcctctctctccccgtttctccgccacg

SEQ ID NO: 202343 - DNA, 429 bp, Glycine max
agcttgccttgatttaaacagttgtgttgttgtttttttttgctatagtaatcttgtttgtaaaaattcaacacagggcatattgtttccacttttctgattttaaaaccaatgtttaaatctaattttggaatcaacaacaatataggtctccacttgtatgaaatttgagaaggcaatttgatattaggaagtaagaatgaaatttaagaagcctagttgcttaagatgttaatgtgagaggtggctctgaccccaataattaggcttatatagacaaggaaaactaggctaatttttttttttcaaattcagctcctaactttatgttggttaaaagatgtttaaatttatcggttggtttagttaaagaagaaagttagatatagttactagattactacctaactctcctaaaaaacaattact

SEQ ID NO: 202344 - DNA, 445 bp, Glycine max
  unsure (1)..(445): unsure at all n locations
tctatagaaggttccttcctaatttctctacaattgcatcacctctcaatgagttcgtgaagaagaatgtggcatttacctgaggtgaanaacaagggcaagcctttgctttgctcaaagaaaagcttactaaggcacctgttctagctcttcctgacttttctaaaacttttgagctagaatgtgatgcctctgaagtgggagttggagctgtatcgttacaacgtgggaaccctattgcttattntagtgaaaaacttcatagtgccacccttaactaccgcacctatgataaagagctatatgccttaataagagccctccaaacttgggaacattaccttgtttctaaggaatntgtcattcatagtgatcatcaatcacttaagtacattagaggggcaaaacaagtaaacaagaggcatgcaaaatgggtagagtacct

SEQ ID NO: 202345 - DNA, 431 bp, Glycine max
  unsure (1)..(431): unsure at all n locations
agctngtatactgaatggagtatggcgcactctttgcatgtctgatatgccttttaaaggcttgaatagtgcgagaaaatgagctgcattttctggaaaacgcaatgaactcgctaagcgagcatgctgtgctaagagagttcatcaatactcattgtatgtaagcgtttctctaaagaactcgctaagcgcgcttaccgtgctaagcgagttcatcttttgaggatgaacactcatcctcttgctgaactacctgtggctaagcgacgctgaattgctaagcccaggtaacttaaccaaattttttttgtaatagacatgcgctaagccgagcattcctgagccaagcgcaatnggttgcggcatccgctgagctaagcgagcttcactcgctaagctcccataacatagtgaaatttttgctcagttta

SEQ ID NO: 202346 - DNA, 463 bp, Glycine max
  unsure (1)..(463): unsure at all n locations
tctatgattagtcaggattataaagtggtgccctaaaagatactggtctccatttctaacagcagtggtgatcgcaacgagatcacgaacataagtggaagaggtgagtaacctgngacaaaactgtntgctaaaaaaagctatcagatgtcttccttgggacaacaccgcacccatacccgaacccaaggcttctgtctcgaccatganaggttntgtgaagtcaggaagtgctaagaatggagaatgtgtcatagcatngcttcaattgttgaaggcaacgtcagcttcaagggtccaatggaactcttccttggttagcaggcttgaaagtggtgctgccaaagtagcgtagctccttataaatcttcgataaaagccagcaaggccgaggaacccacggagggctcgtgtcatgcccgtggtgtggccactgtggatggttcgcacctttgccaataat

SEQ ID NO: 202347 - DNA, 374 bp, Glycine max
agtcacctgaggcatgcaagcttcacacaggcaagtgtttcatctcaatttccattcacagatatgtcaaattgactttgcaagttatttcccatcaaatcaaggataatgtgcataatcatcatggatcaataggactttttaaggttggacttgtaggaaatcttggctttggttgctctggtcttttttttttttggtgtgagttggagagcaggcataaagatttggttaataacttaaacgggcaatcacttcctatcccctcatgtcttgaccatgttactatcattccccttcctttttactctttagaataactctatacatggtttagacattgtttgctccaaagaacttgtttattatttcta

SEQ ID NO: 202348 - DNA, 391 bp, Glycine max
  unsure (1)..(391): unsure at all n locations
atggagaattgcactaagcaatcactacgcatggctccaagctccagggtgaaggacgcatgaacgaaatcgccattcatggngctccgaaaaagggttgaggatggcgaattgcactaagcaatcactatgcaaggctcccaacctctgngtggaggacgcatgaacggaaacgcaattcatggggctccgaanaagggttgaggatggagaattgcactaagcaatcacttcgcatggctccaagctcgtgggtggaggacgcatgaacgaaaacgcaactcatggtgctccgaaataggattgagaatggagaattgcactaagcacattactgcacatggctccaaactcatgggtggaggacgcatgaacaataacgccattcatg

SEQ ID NO: 202349 - DNA, 451 bp, Glycine max
  unsure (1)..(451): unsure at all n locations
agcttccacatagcagttgcatacgacttctatatattntacaattcagattccatgtcatacatcatatatacaaatcattccacctcccaaaatcaacactccaagcataaaatactcaaacaaagcattcaatcaaattacaacttccctcaccctatgttacttaccgttttcttggaagagaattgaaaaggaagaacttttaggtctttgagagttcttttctctaccctcatagtaaattcagctagtagagacctagatcaataccaaaatgaatttcaatcaaacttggatccttcaaacaatnttgcttttatgaaattcacttatcaaattctcggtggaaggagagaaatgaactatataatgaaaataaagaagagatgacttctccactttgtaacttacaaagagacaatataagttaaaaaataaagcttcattg

SEQ ID NO: 202350 - DNA, 450 bp, Glycine max
  unsure (1)..(450): unsure at all n locations
gagcttggaacgtagtaagantttccgtttcttggttaatggnnttttgaagatgtcagcaatttgatccacagaagatacatgacagatttggagcaatttggattcaacaagctcatgaatgaaatggaaatccaaagcaatatgtttggacctagtgtgtataacaggattcttggtcagacaaatggcgctgacattatcacataacaataatggaggacgtctaagaggaacacaaagatcttgaagcagttgttcgatccacaacagctcagcagcagtgtatgcgagtgaacaatacttagcttcggtgctagatcttgcaacaactcgttgttttcgagaagtccagctgataagattggatccatgaaagatggcataaccatactaagacctgctatcttcagtgtctaaaagccaaccagcatctgaataagcgagaag

SEQ ID NO: 202351 - DNA, 389 bp, Glycine max
  unsure (1)..(389): unsure at all n locations
agcttcaaacttggtaaaaacaaccagtttttcaaattattaaaganaacatgacagaagaattaactcgcaaagaactaggagggtgcaagggaaactaattaagctagaacagataaggtagaaaaatgaacattttaaagtgacacactgactctatcaccctgtaaagccaatctctagtctcaatgtgaactctcaattttttaaatgacttgccaatactacacaaaaactgcacataaatgtttccacacatacaaaaataaacttgatgctattgctcacacatgcttcagttagagcagacttccatgcatgcactatgtcgatcttgtcttcaaatcgatgttcatgcttaaagaatacttctgcatatgtctcattct

SEQ ID NO: 202352 - DNA, 404 bp, Glycine max
  unsure (1)..(404): unsure at all n locations
gctcactcaagccttaatgaaaaccatgatatcccatatcttaagaatttggagctctggaattgttttgggaataagtgtggggggtttttgcttcattggataacttgttttgttggctatgcttcatgatgtattttgggccatacttgatgtacattgtatattgagtaaatgttggacatgctgaatgaaatattgtttctcacaggctatagagtcaaaaaaaatcgaacagaaaagaaaaagataagcaatatagttgagtgaataagatnttaaatggcacaagaatgatgaaactcttggttctactctttatcgttaatttctatcnttacttctttgtatgttcttattttgtttcttaatatgcacttattctacattgctcctctattcct

SEQ ID NO: 202353 - DNA, 389 bp, Glycine max
  unsure (1)..(389): unsure at all n locations
agctnangnggaggctactacggtgcaactctttttatctggtgcctccttgatggaggcccgagatatgctgagggatgggtataaccccacaatgggtttaagtcggaacggtgatggcatgaccagcttggcaaggttcattgaaaactgtgcacggttcggataggatacgggcctacacatgccaacaaaagaagggtcaccttaaaaaggaaggaaagaaacctagcccatttataagggcggggaccacagatggagaggagccctatcggccacattatcaaaagctttgtcagcgcgggggggaagcatgaaaatcatggtcgtgtgctagacaaagaaaccaacacaaagcaaacaacgtgggcgcagccgcgcccccc

SEQ ID NO: 202354 - DNA, 411 bp, Glycine max
  unsure (1)..(411): unsure at all n locations
ctcagcttagacacttctgtatcgttatggaatgttggattgtttttttctgatcnatatataactctacaagctctagaaaacttgtgtaattgatcacgataagggtgtcatcgattaaaacacagagttttgtcttctgaagaatattttctaacttagaaaattttcttctcacttactaatgatgatgcatgatgcacacaaatatgatctggaataagatgcaacttttaatataacaaccaatacaaatgccactcaagggagttgggcatgttaaagagaaaacttctttaagctgtcctctatgcttcaagctctaatcttcatgatgtttatgtggctccccctatctctaaaacaaaagactgaccaagtccattgctaatgcagaccttgggctagaca

SEQ ID NO: 202355 - DNA, 350 bp, Glycine max
ctgcagctaaactggttgaaggaatgagttctatcttttatagcctctataatatagatctgaagtattacattatgctcatttcatttatcattcactgcatttgactaagacagttagctttagaagtttgcagactactttggatttatgcctcgacatatcgctgttaatagtaatgtgggggagctgctttctcacatgcctcatgtacactagggaattgaagctatagttttctgttttccattgagagatacaccctttttatatataataaacttgtaggccctgtgtttgtctcttagaaaaggaaagattggcgcttgataaacgggataatttaataa

SEQ ID NO: 202356 - DNA, 443 bp, Glycine max
caggtaatagaaatttaataccaaagtgtttagactctgattaactaattgatacctctcatcatcacaaaatttgcatatattgcaatagtactttgccattgaaaacccattacatgaaggtgtcatgcatatgggccctattggctgtatattcaggcagcgcatacacatcatatctgatgttgcttctctgtaatgatcaaacagacgattagaagtaaatactattatcaaatataagacatatgaaatcccatgagatatttacctatccatagagtgatcactgacattgtcctgactaaatctgccatgtaataacttgccacaacatgcacgccgcagcttgcaattttcttatatggctacacccactacatgttctctgggtctgaatgatgggaagacttcattttacactgtagagatcctcgataagc

SEQ ID NO: 202357 - DNA, 313 bp, Glycine max
gaaatacaccatcttattaaacaaaactgtgtaacaaccgggcataaatagcttagcatatcatccaagggcaagaaattgagaaatccaacggtaaccaatcctgaacaatgtatcaacagagaatcagaacaagccacaaggcacaatccacaatataagcaattactcccataaaataatctgaaccaagtactcaaactacatttaagggagcttatatatagattatttagcctaataataacaaagaatgctatacgcggatataacacaggtcatataagtactcaaatatgctaccttttatata

SEQ ID NO: 202358 - DNA, 491 bp, Glycine max
  unsure (1)..(491): unsure at all n locations
ngacaattaacaccaattgattacgttctgcgcatattacattttttgtacaangtgaattaaatttcattttcatattaatttgttgttgtattgtgacttacttctattatcttgtttgtctgatgagaagttgtgtttgttttaatggtcttttgagcatgctttcaagtgcgacaattgttaattgtaatttggttcattacataaaaataccttatattcaataaaaatattcttatatgaattaaaatataattctacttcactaatttttcaaacacacacacatgacaatattcaactaatgttattagagtagtatctatataaatatataaataaactgagacttttcttataaagtatatattaactattatatttattaaatataataaaatttatttaatttaataaatttaatgatactatatgtacattaagtgtatacttctttaaatgagtctatatatgaagtgatacaaatt

SEQ ID NO: 202359 - DNA, 408 bp, Glycine max
agcttcacgtttccaaagaaccttgtatagtaggtagaaatgcaataccacactacatccacaaacttctcacataggccaatatcctacagagtatcatggataaacttccatttcaatctattgtaagccttttctagatctattttgatcgtcatccatcccttcgtccccaactttatcttcatagaatggattaccacttgagaaataataacattatatctcccttacctacccagaacaaaaccacactaggtcgggtgtacaagatccgccataatcaccctcaatctctgagccatcaccatggttaacacattgtaagacacattacataaactggtcggtctaaattggcttagctttattgctccatcaaaaaaggctcaaataaaccatcgtctt

SEQ ID NO: 202360 - DNA, 405 bp, Glycine max
gaatattcaagatttccgcacctctttgcagatgagcaccgcatatcactctcagatagacggtgaaatagaggtgatgaaccaagcgattgaacaacacctttgttcttttgatcatccacgacccacttattggcacaagttctcggccttagcggagtggtcctgtaacactttgttccattccaacacaagagagacacaatatgaagccacctatggcaaacccccttcctctatacctcactatatcggggggtcatccacgaatgaggttgctgattccctgctcgccacacgagaggtcatccatgaattgcttaagtgtcgcctcctcacagcccatgagacaatgaagaaacactcagatatcacgcgccatgacgacaaatctggtattggaca

SEQ ID NO: 202361 - DNA, 441 bp, Glycine max
agcttcggaaaatacttccaaaatggtattttgatgtacctccaaattaattaatgttattaatgaagatagtgaccaaaacttatataacacaactgagataggatcagtgtcagaaaagaatataaatccattaaactccaaacactggaaaaccccctccaaattatattatcaacgtccaactgcccctgaccttctattataagaaagaggtgaaaacaattttaaaagttttagtgcaaataacatctatgaatggaacatagatgcacaaacggagtataacatcatgaatacactccaacatatgaccatggtagccacggcttaccaaacctcccatgaatgttcggaagaaaccattatagatatcttagtggcaggaatttccggacaactaaaaggatggtgggataattatctcacttatgaagagaa

SEQ ID NO: 202362 - DNA, 445 bp, Glycine max
agcttcaagaaaaagatggcctcaacatattccttatttccagaagggaattctatcaatagacctccaatctttaatggagagggttaccactactggaaaacccgaatgcaaatttttatcgaggcaatagatctaaatatctgggaagccatagaaatagggccttatatacccaccacagtagaaagagtttcaatagatggtagttcatcaagtgaaagcataaccatagaaaaacctagagatagatggtctgaagaggatagaaaacgagtacaatacaacttaaaagccaaaaacataataacatctgccctaggaatggatgaatatttcagggtttcaaattgtaagagtgctaaggaaatgtggaacactcttcgattaacacatgaaggaactacagatgttaaaagatctaggataaatgcactaactcatg

SEQ ID NO: 202363 - DNA, 409 bp, Glycine max
cttgaatgctctattcaatggagttgacaagaatatcttcagactgatttacacatgcacagtggccaaggatgcatgggagatcctgaaaaccactcatgaaggaacctccaaagtgaagatgtccagattgcaactattggccacaaaattcgaaaatctgaagatgaaggaggaagagtgtattcatgacttccacatgaacattcttgaaattgccaatgcttgcactgccttgggagaaagaatgacagatgaaaagctggtgagaaagatcctcacatctttgcctaagagagttgacatgaaagtcactgcaatagaggaggcccaagacatttgcaacatgagaatagatgaactcattggttccttcaaacctttgagctaagactctctgataggactg

SEQ ID NO: 202364 - DNA, 442 bp, Glycine max
agctggaactaccctcacaatacaatttcttagaaatggaataagagaaaaacaaaacatagaacaaaatacaacgtctaaatgtaaggaaatggagaaactacgataaaaaaggagtgaggaaggagaaacaaactcaatgtttggaggcacagttagtagtgaatggattcacagagtttatgatcaatttaaaggagaaaataatgagagaagtgaataaaaaaaagtgacaaggagagtgaatttaactaaaatattaaataagaataacactttttaattaaaattgagttgaccttccaccaaaacggtttaattgatgttatttcatatgagttattgatcctttcttcctaagtagtgcgtggggaccattactctcaacgaaaatatttttttataataatatctgagaataatctttatttacaatatgtat

SEQ ID NO: 202365 - DNA, 438 bp, Glycine max
  unsure (1)..(438): unsure at all n locations
ttgtccgcaaaaaaatcactaaaaccgtttcaaggttcaacgccttaaacgggcccttttgcttttatcggntaacatggaccgttcaaaagcataaaatcaacatgtaactttaccgcttntgcaagaactacgtaggtctgatttcctcatcgcaattgaggatacgtaggagcaaaagctcgacttttgtcaaccaccccaagagatcgttaatggtccaataccttaacgtttctctcctttcaaaaaaacaagagatcattaatggtccaacgccttanatgacttttatttaatcaaaatctatcttttgataaaagataaaaacaacttaaccaacgttcagttttcaaagaactacgtaggtctgattttcttatcacaattgaggaatacgtangagcaagggaaacacccttgtcgaccacataaaga

SEQ ID NO: 202366 - DNA, 431 bp, Glycine max
agcttcttagtttcagatgatgcagatgagtttgtggctacctcatgcactcctctaatgactatagcctcatttatggcgctaaactgttgggagtcggaagccatcttctcaattaaattcctggcttcagcaggggtcatgtctccaagggctccaccactggcagcatctatcatacttctctccatgttactgagtccttgataaaaatattggagaagaagctgctcagaaatctggtggtgagggcaactggcacatagttttttaaatctctcccagtattcatataggctctctccactgagtttcctgatgcctaaaatatcctttctaatggtcgtggtcctggaagcagggaaaagttttctaaaaatactctcttgaggtcttcccagctcgtgatggaccctggagcaaggtaacat

SEQ ID NO: 202367 - DNA, 474 bp, Glycine max
  unsure (1)..(474): unsure at all n locations
ntntggagtagaaacatgggaccaactcattttattntcaataagaaagtcgtatctagtcaagatctgagagaccatacaagtttcctaacgatttctaattatgtgggccattaagtctatcatatgctgacaatagccgagaagcccatgaatctcttcgaaggcggagtaggtgtccgccatcgccttggccttggctaacaagcggggaagttcttgactcccgttcaaggtaagagcaaaccgatccatccacatggttgcctcttggtgtaaagagtcgatcacccttcctctagcctcttttttcgcgtatacttgagcatactcgtccacgatcctatgctcgtgggccatggctagacctaactcttcttggtactcggcgatgatagctagcatgttggtctccgtctcgcataaatgctgagacaagcttcttttggaccttgaacaggcaactaactcctc

SEQ ID NO: 202368 - DNA, 432 bp, Glycine max
  unsure (1)..(432): unsure at all n locations
agcttctnggaggagggtggcaaggtttctattgtgcatgtaatcgtaaactaggagtctcatgtcaggtggccctgcatagtaacctctgagaactgttaaatttcggttcttgactttgccaagtgactcggcttcttttctaaacatgttctcatccaatgatccatcttgcagcctgcgaatggaaaggaccattccatcgttgtagcaggccttgaacactaatccatgccttgttctgctcagcacgttctcttcgtcgaattgtcttgttgcttcaatggtctcagcaagtgtaattttggtgttgaacatcactagttttggtcccccactctgagtactgctgctacgagctgcacttgttccagaactggctctagcgggactctttttctttcacccgatactccttgtttcagtctttta

SEQ ID NO: 202369 - DNA, 486 bp, Glycine max
  unsure (1)..(486): unsure at all n locations
tactactntgtgataccaacacagactacacttatgtttattatttatatcttctcgttgnnngactattatgcttctgaaaaacaaaaatctggcactcgattaacacaatgctngtttgtcagcgtgaacactggttgttttcagacatggaatctcanacaagtcagcagattataaattggtgacatgttgtctcgttaagggtgtcaagttatcacctcttactaggcactagacagtcagacataaatattttcaaatctgctagttcaattcaatcagacaatgtgaacaaattgcataaacaatgaaatttgatcaccattaacctaaaaacaaaacaataaatgaggaccgcccaattgtgtgtttactntattagctaaatataaacccgtggaaggcctgattatggagtcatggccccatgccaaggttttctttgttgaatntagaatagatttggagagagagagagagaga

SEQ ID NO: 202370 - DNA, 414 bp, Glycine max
  unsure (1)..(414): unsure at all n locations
gctgcttagctacctactattgggtatgttcgcttaacganctggctgcaatcctctattaagcttcttatcaaataattccttagccattggcaagttccccatcttgcaaaatcctctaacaaaagtcgtaaaagtaaatacatcaggatcaggcccatgtttgatcatttcatcttttagccgcatggcaacatccaagtcccccaatctgcaaagaccgtcgataagtgtattataggtcacaacactgggagcaagacttctgtatcttaactcggcaaacaagagagaagcctcccctatgtttcccaatctggcgtaaccataaatcagagtgttatacgaaaccaaatccggcatcagattcttattaccaatacataagcaacttctagcatactactctcccca

SEQ ID NO: 202371 - DNA, 366 bp, Glycine max
  unsure (1)..(366): unsure at all n locations
agttgagtggcaatgcatagtttttaatacaagataagtggtacgctagcttttgtgtgtatagtataattcactattatctatatttatatagaactattcagagtggaagatactatccaggggaagatggctaaatctttataacaatttctagatttctagatggcgtcgtcgatctgaccagataaatcgagtaagaacaaagaatactatacaacaattgactcaacanattagtgaagaatttaatgatntaacagattcaatgtttcgtactgtttaaaatagttcttttgattctgtcaaatttgagtagaaatttatgcccaagtctccatgtttccncgattacactattattcc

SEQ ID NO: 202372 - DNA, 448 bp, Glycine max
  unsure (1)..(448): unsure at all n locations
agctntatatattaaggttgtaaatacatttattaaatattngatacatatgtttaaactgaatttttaaatgaaatatactaaaaaactttttaacaaaagtggtaaaattttaattaaataaataaattatacatataattctatagaatataacaaatgaatttattcgaaacttaacaattagatttgtatgcaatcttaatttaagtataagcacgtagtttaatatttgtatttatatttcaattgtgtaaactattttgtttttaaaagaaagatgaagaatcggcatttaatatatttcataaaattgattgagtaaacaaagaaagtgttagtaagagtttactttccattattttagttaaatcaactagagatacaccttatatcaaccatagtataaagctcttcactctaaagtagtcaaaatctttcttttttt

SEQ ID NO: 202373 - DNA, 399 bp, Glycine max
  unsure (1)..(399): unsure at all n locations
gataccagcaggtcccaataactgatttggggattgcaggttngttttctttcccatgaaactctcaacagcaagaagacatgatagaagtgttgaaaccactgcagcattactcccagaaagctgagcaaccccaaacttgtcgtctttacgtgagcaggcagtcagtgagacagcagtccttgaacaccatgcatatagctgcatttaagcaaacagatgcttttaatatgtatctacaaattcataatgctgggatgtgatgctctgttgccccactactataaggtttcttcagagttcagagaaggtgtaaacaagtgaccttttgaacatntattattaattgaaatgaaattacagggtttaagtcaagtcatgacccacataaatattatg

SEQ ID NO: 202374 - DNA, 442 bp, Glycine max
  unsure (1)..(442): unsure at all n locations
agctngatngngaattcaatcagataggaattatttaactatgaggaagaaaggaaacctaggttttacaccttcagtncttaggtattgtgatacaaatatccatgtacctctatttatactaatatttaatattcatcaacattgtgaaaatatttggagtgactgagtcatatttagtgaggctcattttattttattctgctttatctttttatgagttaacttgtgattgtgatctctatggctttccactgtccaatgtatacttcatgtggtctgctaacaaaaagcacagaatgccttcttggctgaatggtttccaactgaatgggagaattgttacactactgtgaaggaaacctcgctataaaataggtttacattgtcaacacttaaaaattgaaagagaaagattcctctgctagagcttctaatacag

SEQ ID NO: 202375 - DNA, 277 bp, Glycine max
agcttagctactattaaacaaaaaagaaatgacgagtttttttttttgctctatatccaaaaatatttttgtaatgaattttagctaagaataagttaaaaggacaggataaatccctcgaagatagctataggccctactgcttggtccggttataagttaagttgtgtatccgaaaatgataaacaaacttgactggcaagggtgcagaggacataactgttggctaagctgactgaagacttcaattttatattcactggcttgggatggttat

SEQ ID NO: 202376 - DNA, 448 bp, Glycine max
  unsure (1)..(448): unsure at all n locations
tccttatataacctgcggcatgcatgcttgtaaagatactcgtgttcataaaatgtttttgactattcgnagttcttctattagagatgaaataactatgattagaagttagcgagttggaaccagtttatctttactttatttggtttgaaatttcggtgtagtaattcatttgaatccaaatttgatccgttcataacccaataatgggataagattggtccaatcgatttattaaggtaatatatcttaataattcaaaaaaacaaaataagtatacaactttacatatatgttacaatacataatgaacatattttaaatcagcatttatgtataataaagcaaactatttaaataattctattatagaaaaatcaaagagacttaacatatatttaactattcataatgctcattggtaaataaatagacttaattataactc

SEQ ID NO: 202377 - DNA, 216 bp, Glycine max
cccatttttttgttttacggcaactgcttaggatgctaggattgtgcagacactccggatgcaagagatctattcctataaacgttcatttagcatgaaccggactcaagctacataattatgacagttaatgatgatagtgagtggatgaacctcactcaagcatgcgcggtgagctcaatcgatgcaccgcactcgtatatgattgactgatgg

SEQ ID NO: 202378 - DNA, 440 bp, Glycine max
  unsure (1)..(440): unsure at all n locations
agtctgttgcaagacacagaacagaattattatttctaaactntnaattgatacaaaaaaaaaattataattgtgtttcaaagtagctgacaactttgacctgtctattcaacaacaatatgaatagtataacatacagttaccttctcgtcctccttatatgaaaatttcagttgaaaatatagttggatcagacagaaacagaatctgggtctgatcgaaatggcccatataaaatcctcaacaacagtgcccttcaaagtttcgagcaaacacgttacattagcaatcgagtttttttgaaaaaaaaaaagtgggttgcagaggaagagagagaaaaatcttaaacttgacaaggtggaaaaataaacggaggaaaaagcaacagaattttaagaatgaaggagagggatggtatatgttaacgaaagtggaaattg

SEQ ID NO: 202379 - DNA, 416 bp, Glycine max
  unsure (1)..(416): unsure at all n locations
tcgatatcatcgagtcgctggtcacaacactaaaagattgcactacccttaaggataaaatagaaaaaataatccaaatgaggcatccaaaaaagttcataaaagacccatcacgtgataaggactatgaaaaggagcaagatagaagctgagaacgcggtgggacttgtgagacaacaaaaactgtgccagggcaaaaatcccctacctgaaactcggcttcgaggtataatcaacacagtagttggaggattcgtggggaaggaagtttaaactcggaacataagtgttatgtccgtaaccttaagtctattgacttggtcacagtcgaacagaggcccacaaggagcctacctnccatcactttcacagatgatggatttganggatagaccgatgtcgcaatgatcccatgg

SEQ ID NO: 202380 - DNA, 424 bp, Glycine max
ctacaccgggatccttaagcacctgcggctgcagcttggattgggggtaatgtgattttgcacaggacctgatgccaactgataagggtagataccctgaggtatttgtgaaggctattctggggaatcaggccttgaggactagaatctctcaaagtaggagtattaatccaatgtggaatgaggatttgatgtttgtggtggcagaacagtttgaggagccgctgattttgagtgtggaggatagagttgcgcctaacaaggatgaagtgttggggaggtgtgccattcctttgcagtatgtggagaggagactagatgagaaacctgtgaacacaaggtggttcaatctggaaaggcatattgtgatagaaggggagaagaatgacaccatatttgcaagcaaaattcacatgaggatttg

SEQ ID NO: 202381 - DNA, 486 bp, Glycine max
  unsure (1)..(486): unsure at all n locations
tgtgaccaaccncattcctcaagttcactcccttctattcttctatcctaccagtattagctataattaaatctacactattaaacattaaaacataaaaataaatgttaaaagagtaagaaagttgggttgcctcccagtaagcgcttctataacgcactagcttgatgtatgtcacctctaggggtcttgtaaatgtaggatggtggttaacctctcaatgcttccaccatgataaaattttaacctttgaccattcactacccagtttctctctagagtatttgattgaggatgcaccaattccactgctccataaggctntacttcttgatggtgaagggtccaaaccacttggacttctacttgcctgggaatagcttgagtcttgaattgaaaagcaagacttgctgggcctggctaaaattcttaacaacttttggcatggtaggcctcaccttctgttatacaactcggatgactata

SEQ ID NO: 202382 - DNA, 419 bp, Glycine max
  unsure (1)..(419): unsure at all n locations
agcttgtaaactaatacaaatcatatatattttgtgttacatcgnaatctcttgagcgaaaaacccttttgtgaggagaaatatatctttatgccgtctgaacacataaaaccttttgttgtaaaagtttagcaagtgactggaaaaagctgtaatcagtggtgttgttggtctagtagtggctaggtgtgaagtctactggggttactggtaagtagttgaaatccaatggttggctagtccaatagtgactggttgcgttagtaaaatctcattttgagaggtgaagaatccacatagcctaatgttggggtgaaccagtataaaaatcattgtgattcatcttcctccccctcttgctgcactaatatctgctattgatctgatatatgggttttgaaattgaacctttcttatca

SEQ ID NO: 202383 - DNA, 500 bp, Glycine max
  unsure (1)..(500): unsure at all n locations
ccatanatactaagcttacatgcaggtgctaattggttaaaccgaaatgtaatcattctctcataaaaactagagtaaataacccatctcgtaacagctgcattgcttgtagtggaagattaattagatcgcccaatgcattcacgaatcgaagatgaggatgtcagcatgttcttgctttccttcatcttgcatgttgacgtatgccatgttaattaatcaaaagcttgaattacaaaaaaaaactgaaagctttactttggaagactatgatcttataattcattttagataaaataacaataataataataattttcttttgatatgagaataanaattattattgaaattaagtgcaagaaataatcaaatccaacatgccacaatatgaagagtgtactcagcaacttgttaccaagtactctctctgatctcaattataaataanatcatactatattattaagaaaatatgtcacgcgtaattttgttatctc

SEQ ID NO: 202384 - DNA, 371 bp, Glycine max
  unsure (1)..(371): unsure at all n locations
agctngagaggattcagactgatgttgagcttgtttctaaggtatntttgcagatgctactacaaggcaagcaaaagttgaagtggctctaattcctaaagacttggaccccatggaaaataaatctcttgaagatgttatggtcaatctatcgttgaagcttctctcaatgagtttgaagacaacataattgagaagatcctggtgtgaaacttgttagatcaaggccagtgtctaacgctgatgaaagacaaattggcactactagaaagaatggttttaacatcactatgtaaacatcggttttatcaaaaattgatgttaaccaaaaccgatgttaatgtaatcatcttaacattcaaggcaagaaa

SEQ ID NO: 202385 - DNA, 340 bp, Glycine max
  unsure (1)..(340): unsure at all n locations
tctgtattcaatttcgagcgtctngatatattacgggacttattctacatccgcgaaaaatgttattgtcgtttgaatttgatacgagcttctgatttcaacatgaagcttctggatatattatgggactcaatctgacatcggagtaaaaagttattgttgtttgaatttgctcagatcttctgtttcaaatttcaagcgtctcgatatattgcgggactcaatcgtacatccgagtaaaaagttattgttgtttgaatttgcccatagcttctattttagatttcaagcgtcttgatatattaccggactcaatcggacatctgagtaaaatgttatt

SEQ ID NO: 202386 - DNA, 371 bp, Glycine max
  unsure (1)..(371): unsure at all n locations
agctncaanacgtgctgctgattatatttattgtccttatcctacgggctctgcattaatgacaaaaactgaggtcttatagtactcccaagatattactggtcaatctgaacaatctgaacccaagatatgcctaaaaagtcttggccttttctgttttaactgcaacgtcccttggcatatgggtatgacatgtaatacttacaaaaggatgaatcctatatctcctgcaaaagatttgaagctgacatttctggcatcaaggagcctatggcaacagagtctgaagtgctaccatataattgaacctgctgaaggttgacttcacatgacctgccggattcataatcactatgattttgatataacct

SEQ ID NO: 202387 - DNA, 397 bp, Glycine max
aaaacatgaatgcgttcaataccaacatttagtaagacaataaatgcattaataaatcttaatcgtatgttaatgtaagctcatgaagttaatttccattataagtgaaaagaataattattgtggatgacttaccgcagaccatgcgaagaaagccaactgaaaagcattctgttatgataaaacagacaaaacaagcagggagacttcaattgatcataaaaaaaggtgaactcataaaaaaaacattataaattattctaataaaaacaaataaatctattaactattgttctgaaataaccttgaacaacttttgtcttagatatacgtcattcaaaaatgtcatattactcccgatatatttctactcattaaatcttatatagcgtgatgt

SEQ ID NO: 202388 - DNA, 443 bp, Glycine max
  unsure (1)..(443): unsure at all n locations
agcttctcctcttgctcatcagcaagtggagtcatatataattactggaaaaattttgctatcatcaaagtaagcatattntaaatttgatggcagaggcttcaattctggtgtggccggctggatagtggtagaaagagatggtttctcagcctgtacctcataaagaaagtcagaagtatgtgtacttcctaaaacatggttagttctatctgactttataaaatcaatctcaagaggtaaaacatcaccagacatgtaatcaatatcaaattcatattcactctcagcatcaaattcagacatatgatcaagtacaaattcatattcaatgcatgaagagtgacagacatgcaaattagaatgaagattagtcatgtattcatcaacaacatggtcaattattctaacatgaaatacaaaagatcttcaggtgggtgttc

SEQ ID NO: 202389 - DNA, 478 bp, Glycine max
  unsure (1)..(478): unsure at all n locations
tgaagatgcaagattcgttatacgcgctaagcgctatccactcgctaagcacgcgatccaacagaagcacacgctaagcctgtggcaggcgctaagcacatgatctaaacgcgctaagtgcgaggtgtcacactaagcgcgcctttgaaggcccaaagcccatttctgcacctataaatagagatccaagccaagggagaacgcaaacctcgcctcagagcacttctcttagcattctaagcttgagctctcccttttctcttcacattcttgtttttattacccattctttctttcacccctagttctaaaaccctcaatggccatgagcggctaatcccctagctagggcctggcaggcctaanaagccaatgatgtatggtgtacttcaagagttatcaaagcaaagaggattcattctaggttnttatngtctaaatcctttcttnttatcttgcatttatgtcttgaattctt

SEQ ID NO: 202390 - DNA, 348 bp, Glycine max
ccgcatgcaagcttaaaaatctaaagagagatcaagcatctttttctttgctcatcaattcatgtagaagacatgacataaagcaagttagatatatatatttatacacctatatatttagacggcgcccaactttttcctgatatgcacggaagaaatatgtgcaagtataggggtgaggcccctcactccatagaggaacccactttgcatagcatttctattatcatgtcaacacaaaaaccaaaaaaaatgcttcagaaaccaagcaagtgaagtgcctccccgtcttctcgactgatacatcacaggcggacctaatgtttgccggctgtgcgttacaaaaaa

SEQ ID NO: 202391 - DNA, 419 bp, Glycine max
gcaagcttataagaacaaaattgcctcaatcatttctaaatatgcatgtgaattaggacgcatcaacaagaatcaagccaaggctattgtgcaagcaatcaatggggcaaaacacaccaaatgattatgatgatggatggctcaaattctcacaaaggtaaaatcatcactttcaaattgagctttcaaaactatcatgacatgtagagaagaatcaaggatttcaagtcacaaaatgtcaagaacttttattttcaaaacaattacccatttcttgaacatatcctataattcaaagaaaaacatgcaaagtcgtacgtgcacacaaaattgacccaaaatattaaactaaaaatccgacgaaactatcaacattaacaaattaacacgactaacaaattaacaaaaccaacaaaact

SEQ ID NO: 202392 - DNA, 495 bp, Glycine max
  unsure (1)..(495): unsure at all n locations
ctcagctaagatgcccagtcttcatcctatgagatgtgtgtatttttgcgatcagaatngccattccttggattatagggttgaaccaagctcatgctnttacaaaaaggttcatcaagtcaagttgaaatatggaagtaaccgtcttgcaaaattggggcaaaagatgaatcgagtcacatcactgcttcgtctactgccaaacatatttaggattgttgatgtccttgttacttccagtttcaccttgacaaagatgtcatggaccatgttgaaaatctaaattgattcaaccccatatcctgcgtaaaaattcgcaatacttcaactgtacatcattcgcatgcatcaatgctnttcattggttgcattgctcattgcattctttccttganaaataaaataaaataaaataaaatgaacttaatcattggtatcaaaaagaaaaggacacgctntacggcgcccttaccgaactcgtgctagagcaagagt

SEQ ID NO: 202393 - DNA, 434 bp, Glycine max
  unsure (1)..(434): unsure at all n locations
agcttctntcataagctaaaatcaatttatgtgcttttcttctccaaaatctggcatgcatatgctgattttagtttgtgggagaagcacaattntaacttctcgttttattcttagaagttcttatgaacagatttttccaaatacggtcaaggttaagtccttttccacaagaaaaagctccccaattgtaacaaaacattttttcttgtcatttctacggcatagggaggactccaattataatttttagataacttacaaggctcattagaggcctagcccttggagcacgtctgatacaaagtgtagctgccaagaccatcctttccatctcttcatgatcataagtctcacccaaacttggatctaacatttgtaacacctttccactatataagaatggacttgcctgcaaaagttatttatccatt

SEQ ID NO: 202394 - DNA, 319 bp, Glycine max
  unsure (1)..(319): unsure at all n locations
gatttgtcgcgtgaagaactgccgagaccatagcttgaagcaggagccagtttgagagcttgagatgagtntgtgagtgattgtgagatcctagaggtgaaggagacatcctcaccacttgtatttttgcaatctttcatcttggtcttccctatgttggtaagaaggcttcctggtatggaaagctaaatcctctgttggatcttccctgtaggtacctgatgtaaatatatttatatctatttaaggatatttngtgtgttctctgtgtcatctacttggcattccagtatgcttttaccttgatcacgtagatgca

SEQ ID NO: 202395 - DNA, 442 bp, Glycine max
  unsure (1)..(442): unsure at all n locations
gcgtctgttaattggttccctcgctagaaggattgaagaatcaggattctatcttcatgcgaaggatgtcccatgagaggagtgccatcagatgaaagcatcacgcctttcatcgcacggggtttcagtgaccacaacgcgagggtactccaaggagttcgcaaggcatgggatgcggcgtgaagaaaggacagagagcttaggggaagtagtaatgggatcatcggaggctatcataagtggctgagaatccggacacaaggattggattggctcccaaatctaaagactgtgagagacaatgaggttaaagctttggaagaaagtgatgaggtacaagccctaaaggaaaagcttgaaagagcccgggtagtcaaagagaagttcaagtccatagccatcanagtctgaagagagtatgatgaactaagggacgtcaata

SEQ ID NO: 202396 - DNA, 477 bp, Glycine max
  unsure (1)..(477): unsure at all n locations
actaagcttgcttctcaacaatcctgtgagcctaaaatacaaaaaatatccttctattccaggananaatatttaccttntgttgaataaaaggaaagctaaaattcatcttaaacccgtgtaggaagaaatgtcacaagtcacaacatctctattgagcaatttgcatgatggaatgcctataaactctctttaaacaaatgtgctctatcaatcaggcaaatgttacaatatcatcttattacatttgctgaaaaaagttgtgaaactcactagacatagacttactggttctaattgccaaagaacaataatacataactgaaaggacaaaatattggtggagaagtcttttacataccaaagatcaatcaaacaccacaacttaaatctttaatgaatatcaatgtcaaatcatggctctaatntaagtgcanatgggcatcttacntttgtngattctgtttgggtcttggc

SEQ ID NO: 202397 - DNA, 452 bp, Glycine max
atccttaatcaccgcggctgcagctgctctaattacattgatgtttgtatttattggagggggttgtatgccatttttgttttaagggtagcatttcttggtaaaaactaactttccaaatgtttgccttcgcaggaatggccccgaggaagcttgcctcaaagaggtccaggaaggacaaggcggccgaaggaactatttccgctccggagtacgacagtcaccgctttaggagcgttgtacaccagcagcgcttcgaggccatcaagggatggtcgtttctccgagagcgacgcgtccagctcagggacgacgagtatactgatttccaggaggaaatagggcaccggcggtgggcatcactggttactcccatggccaagttcgatccagaaatagtccttgagttttatgccaatgcttggccaacagaggagggcgtgcgtcacatg

SEQ ID NO: 202398 - DNA, 446 bp, Glycine max
  unsure (1)..(446): unsure at all n locations
ctaagcttaagctttctttgttgaatgtgcccttattataaggattaatgattttgtttcanattcttatctntctttcctctttaatttagttaaacacaaatccactcaaggaagaaccattaagaacattatgacccctatcaaggatcatatcatgtggtatctagagcccgaatcctagagttggtagtgttcttctgtttttccttatttcatcatttttgaattgtcttgatcatgtcataactatcataatggcatcatttatcgtcatcatttcgtcatcaattatcattcttttgtcataattcactcatatctgtccttatattgtgatatttgttttctaaatctgtgcaattaatttggcaatcatgcatttaatatcattatatagactctcagtttgaaagctagtaattcctattagttgggcatattaa

SEQ ID NO: 202399 - DNA, 389 bp, Glycine max
agcttccatgcagattatatcaacatttattttttatccatacatacctttaataactactcgtctacttcagttggactgatgttttacacgcacgaatagtcatgatatctctttggtgtgaacccggttaaggaatgaaacaagaggttaagtcactacatgttggactaataaggaaaaaaatagaagaaaataagattgggagtgtctaacgacacagtccttacggatttagccacacgcaagataaattttaatagtacgaaaacctattgagatattacagacaccaatatgagaaaagttgtctaaagaatctagttcagttagttgaacaagatctgtgagttattgtatatagtttgacagagtcttcgattcacaca

SEQ ID NO: 202400 - DNA, 390 bp, Glycine max
agcttctagccaaatggacttaccttgttttaattcctttgatagcccttttgagccttgtttccctttccttgttttgaagctcactacaagccttaagtgaaaaaccatgatattaccatatccttaaggaattttggagctttggaattgttttgcgaataagtgtggggggtttttgtttcattggacaacttgttttgttggctatgcttcatgatgtattttgggccatacttgatgtacattgtatattggttaaatgttggacatgctgaatgaaatgttgtttctcaaaggctaaagagtaaaaaaaaaaaaaatcgaaaaaaaaaaattctaaaaaagaaaaagaaaagcaataaagttgagggaataacaacttaatgg

SEQ ID NO: 202401 - DNA, 467 bp, Glycine max
  unsure (1)..(467): unsure at all n locations
tctaatttctaagtttctaagccccgcttctctcctcctttggctacttcaaaaagccaaagcatgtgataagcaacataaggcggaagaataataatcaaatagaactaaagttcacataatcattcataagtcaaaaccaaatagaatccagtcataaaaaactaagtgccaaataccgaaatataactaaagttcagagaatgataacttanaaagcatagccaaatagacggcttaaaataaaagataataataatctaaatctaggaaggtggtggaaggtcgaaacgccgacgaagataactcacatcctcttcaagctgattgatgcgggtatccattccttcaaagaaagcatcaatggcatctatgcgaccatccaaggaatcaaagcgttcaccagcataggtgcgaaggcctcgtaattccgaaagaacttcattcatgagggatgaggaatcatc

SEQ ID NO: 202402 - DNA, 432 bp, Glycine max
  unsure (1)..(432): unsure at all n locations
agcttgtagatccccttgcaggactttttcttgttccatattgaccaaaacaatacattgtgaaaaatattaaacaaacctgtgctacacatagatgacatgtgttggatacctacaaattatattatgtattgaaacaaaggtcatttttatactctgaatccttaatataacctcttatacccttttctttaaaatttacttagcgagtattttttttccagtgatcaagatgattatgaggttgtacaaaaagtgggcagggggaaatatagtgaagtttttgaaagcataaatatcaatagaaatgagcgctgtataatcaagattctgaagcctgtcaagaanaaaaaggtactcctttctttgcttggttttatccttagtttactcagtacctgcagactgtgaattaagccaagcaatgatgct

SEQ ID NO: 202403 - DNA, 457 bp, Glycine max
ggcctaattaacctgaaattgagagaacatgattattattttcacacaatggaagtactaagtgcttattacctatacttaacagagaatacttattacactacaaaataaccataaattggaggagtttgatacaatttacacatgttttatacacaaaagatagtcgtattcatcgactaataattattcatggaattataacaaatgaaataaaacctcatgccccaatggcacatttatcaaagcatgtatatggcacaggctaaggctctccatctccagcatagaacaaaatgacattcaacccaaacacaaacacacattgggaatgaattatcacatttgtacaaaataaaacactagagcaggtgaaacatataatacttagagctgaattacataaagaacctcgctcacaaaatcacatacattattgacacttattcaagtcaca

SEQ ID NO: 202404 - DNA, 433 bp, Glycine max
agcttatggtaattatggatatcacactttgttttgatgattatatacacctgttgggtggcatagacaaatataaggagttaaaacgatcgctacttgttgatggattatccatgatatgaggagttaaaacggccttatatctcatttagaattagtcattttctcttattgattgattcaatcaaagcctgttattctttcgcatctcttctaattccttaagttctctcaaaattcaggtattttgttccattggaattattcaacacccacatgtataactagattttggatacaaacccaagatcccaattggaatcattgaccacttaagtatagtagtatcctgattattgaaaacctacatgaaaaaatgtcacctcttctgccccgaggaagtaagggtcaattgaatcccaacaagtgtatt

SEQ ID NO: 202405 - DNA, 355 bp, Glycine max
  unsure (1)..(355): unsure at all n locations
nttaagactttctagnatatgggagatgcataaagttttttttttgaatctgaattanatgaaagataattctctatgcattgaagttgagtttgctatacgaaactcacttattgaacaaaattttattgaaaaagtcccgctatccacacattcatattgcattatgttccacacaatgtagatgtacggattcgacctcctttagtcagataaggatgacgttcaaatgcgacctcttttattttttagcataaagcttatgtccaaattcgacctcttgttggcttgaaaaggctacggctcggattcgacctgtagtttgctggaagaagacaaggttcaattttgacct

SEQ ID NO: 202406 - DNA, 422 bp, Glycine max
  unsure (1)..(422): unsure at all n locations
caagctttgaaatcaaactgtatcactggtattctattacaggaaactggtaatcgaataccagagagtaaatactctggtaacttanaaaattttgagaaaactctttggtaaaacaaaactgtgctatgtttgatttttgaaaaatcttttcaatacttcccttgtgaagacttcttgatttcttctcttgaatcttgaattcatcttctcttgaatctttgaaatcaacttctcttgaatcttgaatcttcttgatttcttctaatgaatcttgaaattaatcttgatcttgaacttgttgacttaatcttgaaatcacttcttttggctttttgtcatcatcaaaactacttgattcatcatcatgaagcttgctttacataatacgtgaaagctctaaagaggttgaaatcatgaac

SEQ ID NO: 202407 - DNA, 376 bp, Glycine max
  unsure (1)..(376): unsure at all n locations
ntgaagatatgaagtatgaatttgaagcgctcattatttcattctttatgtaaaaagctctctatgtaaattcttgtaaagtttagaataactctcaaaacactttgttcatcttgagagaaaaaactaaaggttgaaactacttatccatctataagatgatagagtattagtcattgtgcaattaaaccaacaaatattttttatttgtgtttgagccaacagtggcttgggaggacaaanaataccgattgtaacaagtttggagtaaagcttgagttaaggaacttggtgaagttccactaactgatgctttcttcaaaatttgtcactcattctgtaactttacaagttacagttacaagtatttgcacta

SEQ ID NO: 202408 - DNA, 367 bp, Glycine max
  unsure (1)..(367): unsure at all n locations
agcttcgcaagggcctcaacactcatttgttctttaanaacacattagcgaatattcatctattcattccgatctaataatgctccatcacagaatcagataaacgaatgaaatttttgtgagcaaagcaactcggaatcttcggctttattgaggggatcggaatatgaagtgttaatacgaaaggaagaaaaaccttgcggagcaaatcatggtgagatggatcgcgaagcgattggctcatagattgaagatcggcgtgcaactctttgagtacgaccttcgtattgctcccgaattaataacagcttttatacaagcgcccgattttgtttttatcttggaaaattgggattgcagaacgctg

SEQ ID NO: 202409 - DNA, 344 bp, Glycine max
tctaagcccagcttaccactctttaactataggagcctgaatatggaatctgcaccaattatgccactaaggttcaagctctcaagccttatagttgtacatcttataccgttcaacttgaccatgcacggatgtgatggtgacccaatccatgtgatgctaaacacgttatgggaattgggatcaacagacatgtactgtactgaacattctacataaagaagagaaggacaacgtagaataccagccttctaagaaatacaacaaaatcgtcgctcatgcagtcctccactgatgataaggacttgctagtgctgcatgcttcttcatatgtgcatatgata

SEQ ID NO: 202410 - DNA, 440 bp, Glycine max
agcttaagctccttcaactgcacaaggctcttaatatttgaagagtatcattggggaaccttcacccgacgaagacactaacaaaaacttttcttctccttcttggacaaagtatggcaggctgggggtaagtaaattttcttcccatcagaccttggatacaactgtgatcatatacccatatcaactagatcttgacgggtattcaagtcatccttcgtcttgccttgaatgttaaggagcgtctcaatcacactgtcacaaacattttttcttcttttagttattttgtgtttaaggaaattagatgggttgttgaatttgttgtattagcaaactgtcagaccctttaattgttataagatgaagtggattaagtgggctgctattagaaagcttaattcaaagtataaagtggatcttgtatgcctacaggaaac

SEQ ID NO: 202411 - DNA, 482 bp, Glycine max
  unsure (1)..(482): unsure at all n locations
nttganatntctcttgtagggttcaagggataagtatattgttatagaatcgcttgtgtatagtgtttgtcctttggttntctaatagtcgaatgtcctaatagatcttagaacaactagatgtaggtcttcttgaggactgaaccagtataaattcagtgtgtgattctttctttccctaaccctatgatttgtgaatcaatattgatattggaattgatatgtgtgggccattaaactttgttttctaaggtttttgaattcattagtctattgtgttgttaatattttttacaagacttttgagagaccctctatttcataaggggattgattctaatcgaatctaaaaatgattaggtaaaagttttgaaaacaatctattcaaccccctttctagattctcgactaatccaacagttattcctaatctagtacctgagatatcttctttgataattccaaatattcctagacatgat

SEQ ID NO: 202412 - DNA, 453 bp, Glycine max
  unsure (1)..(453): unsure at all n locations
agcttggagaggattcttcaatggaggaaattattgagggagagaaagagggaggggggagcacgaaattgaaggaagaaaaagggagagaagttgaactttgagttgtgtctcacaagactctcattcatcaaagttacaacaagtgttacacatgcttctatttatagactaggtagcttccttgagaagctttcttgagaaaacttccttgagaagcttctttgagaaaacttccttgagaagctagagcttagctacacacacccctctcataactaagctcacctccttgagaagcttccttaagaagattcctaaagaagctagagcttagctacacatacctctctaatagctaagctcacctccttgagatgagaagctagagcttagctacacaccccctataatagctaagctcacccccatgacaaanaacatgaaaataaa

SEQ ID NO: 202413 - DNA, 386 bp, Glycine max
  unsure (1)..(386): unsure at all n locations
tatgctgtctctacatacataaaacagtcccaccatcccaaattttgcaaaccatattcatatatcnatggggcatttcaccgagcacttggtgggcgcacgtttggacataaatngcaagagaatgggggcaatgtggcatgccccattgcttcagaatacaacatangcctaagggccttcttattcanatcctcaactcaagaaatcaagcataaaaacaaaccaaaattgcccccacaaatataagcacgttctcacaatttaaagcaccaaaagatgaagaaaatactccaatgggaagcaaaanaaactcaaggattgaatactntacttgtggagtgagtagaaacaccaaaaatgaaagcaaaatgcaaccaaaagtg

SEQ ID NO: 202414 - DNA, 436 bp, Glycine max
  unsure (1)..(436): unsure at all n locations
tgcagctctattaagctgaaccatttatcattttcacaagtngagttttattcagaaaattagagtttatctcttttatcttagtgagagtgattctcctaaattcttgagtgattcaagaacaccttggctgtatcaaaggactttcacaacctttgtgtgttgccctcgctggaaagagtgattctttccttcctttcatcatcacccttgttctttcaaaccacaattccagaaaatccacctctgcccagaattatctcgtggccataacttccattttacgcactcaaattaagtgattcttgagcctaaattgaatttcaaaacgagacctttcacctcgttttggaatcacctcatttggagccctgtagcttcagttattgccatttctatatttctgtccagccaccacttaacctatcgtttacca

SEQ ID NO: 202415 - DNA, 349 bp, Glycine max
  unsure (1)..(349): unsure at all n locations
cggccttcaagtgtggagaagttaactttttgcctacaagatngactcgcctagtgagtataatgtaagtgccactttcaatgtgtctgatctatctctttttgatgcagatggaggagccttggatntgaggacacaatcctttcaagaaagagggagtgatgaggacataaccaatggcaaggaccatgaagcacttgaaggtcccatgaccagaggcagacttaaacaagcccaacacgtcatagagacaaggctggtcatttgtatagctgccattgatgatgattgaaggcccaagtggagaaagatgaaggcccagaggcagaggcactaccaagactactaa

SEQ ID NO: 202416 - DNA, 453 bp, Glycine max
agcttcttacaattaatatagaacctatatctctaatgtcacatcctattagagcgttgtgttctcgtgtcctctagcatgaggttcttcatagtcatccacctatttatctgctcccccgaacacaagttcaagatcatcacaggatccaaacacaacaacacacagggagtgagttatcacattcctagctaatagagaaacaagacaattaaatatacatattatataaatgatataccacttgcttaaacatagctcacgtaatttcaccactttgtcattcaaaattcacttttcaatcatcaatcacattacgcaagaatcccacactccgatcaagatataatcacacatcaatttcataataaacaattagcaagcgtatgcaacagttatgctaagactcaatcctatatgcaatgtggtaccatgtcagtgaaaaaccaccct

SEQ ID NO: 202417 - DNA, 442 bp, Glycine max
  unsure (1)..(442): unsure at all n locations
tcccgagagcatatcttatttaagcatttcagcctttgctttctattatgctangaaaaatgccatttcttcttctttctttcttccaaatcaatttctaaagttccaagtactttctccatcacccacatncaccattagccaccacaaaccatcattgttctccattgaaaacccacaccgagaggaacccttcaaccgaagcagaatttccaacttggcttgcggtttcggtagagaacgaaaaccctaatctgatcttttgttttctttcgaggtaaccatggttctatgcttgtttcttgttagttccatctattctttgcatcttttctaacttngcaaccgccattgcatgtcttatgattcctttgacaaaccttagagaaagagactttgtaaacgtatccttcatgaatacatgttatttcgtacctacact

SEQ ID NO: 202418 - DNA, 474 bp, Glycine max
  unsure (1)..(474): unsure at all n locations
tatcgaatcctcttatccatcaactcttgtatctcnttaaggattctgatgagaccatatattctactgagcaatgtgggggcttctttcctaatgctagagctaatgtctttggtagcacgattgatgtgtcgttcttgtttgatgtttactccatcagtagttttttcacttggcaaaaaaggtgtagaaataatgttatcatctcccgtatgttggataaatgcttgactagtgatacttggaagaatatgtctcctaatgcttatgtggaggttctttgcaggatgcattcacatcataatcctctattcttgagatgtgatcgccaagagaatacatgtggcaaaccttttatatatcaagcatcgtgaaccactcacccacaatacatgattgtgggtgctagagctttgggaagacactttgatgatgctaccaaacacatgtncttttgggtatcttttatgggtt

SEQ ID NO: 202419 - DNA, 414 bp, Glycine max
  unsure (1)..(414): unsure at all n locations
agctttaggaattntntattatttactttgtgtctctggagacaggaaaaattatgctgacattcattgagctccttattggggttgtggttattgtgggtgtagctcgctacatcattaaagggtattccgccactggtgtgttatttgtcggtggcctgttattgctgattatcagtgccattatggggcacaaagtgttaccgtccagccaggcttcaacaggctacagcgccacggatatcgttgaatacgttaaaatattactaatgagccgcggcggcgacctcggcatgatgattatgatgctgtgtggatttgccgcttacatgacccatatcggcgcgaatgatatggtggtcaagctggcgtcaaaaccattgcagtatattaactccccttacctgctgatga

SEQ ID NO: 202420 - DNA, 464 bp, Glycine max
  unsure (1)..(464): unsure at all n locations
tgcgccgccagcaccacatccnctgaagtcggtgcgagaattattgtcgtcggngaggcacaaatggcagcagctgcgccacgactgataccaacgtttaccatcaccggaaatagggttgccatcagcaaaacacccagaccggttgcggaagagacggccagagacatcagacaggcgacaaaatatgcggcaatcatcagcaggtaaggggagttaatatactgcaatggttttgacgccagcttgaccaccatatcattcgcgccgatatgggtcatgttagcggcaaatccacacagcatcataatcatcatgccgaggtcgccgccgcggctcattagtaatattttaacgtattcaacgatatccgtggcgctgtatcctggtgaagcctggctgganggaacactttgtgcccataatgcactgatatcagcataacaggcaacgacaataacaca

SEQ ID NO: 202421 - DNA, 441 bp, Glycine max
  unsure (1)..(441): unsure at all n locations
acctgcggcatgcaagcttagtgtgttgcaaaggtacatgttcttatttgtcaactntctgcaggtttatctgagcttatctatgacccaagacctgagattaggaagagtgcgttggaagtcctgttagaaaccttacgtaaccatgggcatctcttttcactacctttatgggaaagagtatttgagtctatcctatttcctatattcgattatgttcgacattctattgatccttcagggagtagttcaccggtcaatgaagtataggctgatggtgagcttgatcaagatgcttggctttatgagacatgcacataggctctccagatggtctgagatctattttgtaacttttatgacactgtcaatccactcttaataaaggtgctgatgcttctggttactttaataagcgtactcattaaagacctgctggga

SEQ ID NO: 202422 - DNA, 449 bp, Glycine max
agcttgtggcacgctgggcgagcacatctctggctgatcctcttctaggatttcccaacacgctaagcgagctatgtgccttgcttagcggatgtcactcgctaagcgcatatgcctcgcttagcgagacaccagcggcaagaaccttttcttcttttggcctgaaattgaagtggtttcaacattaattcacaaaatgggagtatctactatataaaatcaaactaaacatgaaaatatgtacaattcctacaaaaagaatcataaattgggggaaagaggctaatttcatgtaactattcaatacaaaagttagtcgtaaataacgactaacagtatacaaagcacactcatagtgaagtcattgaaggggatctttacataaagattgcaaaaaatgcaatcatacacatagaaatagtccctcaatggcactaccttggcagatg

SEQ ID NO: 202423 - DNA, 491 bp, Glycine max
  unsure (1)..(491): unsure at all n locations
tgtaaatatttattggtataatntgcctggtccattaggctcttaatgtctntggaggttacttcctcgttgacatcttttgtcttgaatggaattgccatgacaggtttattgttactgtctttgacatttggtagttgatattgtgttacaggaggtaattccgattggattaactcaccatccttcatttngccaattgttatgacatttgttgttggatcacctatgatatcttgtttccaagggtaatctatatcctttctgatggtataagcatgaaaccaatcaaagaaaaggacattaattntgactctttcgacaaattcgtagaacttgtcttggatttgttttctgtttgtacccttgtaatgttggaaaaaccatctcctttgaggctcattctccggagaataaaaatctntcctaagggtttccttatncaatgctaaagtgtcagataacatcataagggttcatagaagagtatg

SEQ ID NO: 202424 - DNA, 444 bp, Glycine max
agcttcaacctagaggagacggaccattcttgtgttggagaagatcaacgacaatgcctacaagattgacttgcctagtgagtataatgtaagtgccactttcaatgtgtctgatctatctctttttgatgcagatggaggagccttggatttgaggacaaatccttttcaagaaggagggagtgatgaggacataaccaagggcaaggaccatgaagcacttgaaggtcccatgactagaggcagacttaaacaagcccaacacgtcatagagacaaggctagtcatttgtatagctgccattgatgatgattgaaggcccaagtggagaaagatgaaggcccagaggcagaggcactaccaagactactaattgttgtgaaggcccaaactaacttgaagggcccaagttaaataagttttagttataatttatttttattg

SEQ ID NO: 202425 - DNA, 480 bp, Glycine max
  unsure (1)..(480): unsure at all n locations
cttgatttcctctgttccgganacctttcttttctcatgtgctcccaaacccaatctccgggttcgaagacaaccttctttcttcctttgttggcttgtttagcatagcttttatttttcctctcaatttgatctttgactctcccatgaagcttcttcacatagtctgtctttgcttgaccttctttatgcttaaaaacagaaacattaggcataggcaaaagatcaagaggagttagtgggttaaaaccataaacaacttcaaaatcatcaaaagtattagtggtcaaaatctgatttttgcaaaacaagatatatagtgactgtttagcacgaaacaacctcttgacctcactttttgtggctaaatagctctccctcacttcaagtggttcactcttcttttgttcactctttttcctctcaagtgtntccttcttttctcactctcaagtggtttgctcactctttctttttctt

SEQ ID NO: 202426 - DNA, 320 bp, Glycine max
gaccaaaactagctgtagcgaactataacctgaggaagattttgttatcttctttaaacatgtgcaacagagactctccaacttgctcaccctccaacacaactcattatgtgctactcccattactagcatacacgtgtttcacgatgacaactcaaactcttcattaagaatatgatgatcacgccaaaacatacattattgcaattcataattcacctatatatgtacaatctacattcattacttctcacaatgtacagatactaatgagttcatgttcaccagttcccacatagatagatctcactacattactg

SEQ ID NO: 202427 - DNA, 431 bp, Glycine max
  unsure (1)..(431): unsure at all n locations
gatccttaagtcacctgaggcatgcaagctngcaaatctaaattaaattgctttaaagttcctctgtgaatgcatcaggttttggtaaaaaaaaaaaaaaatttaactcattctttgccccctcccctagctcttttactttttgtcattgatctcaaggaccaggttttcaatgaggttatatataattttacatgggacaatgtcatgacagtgagtaagaaggaattgcaaattcatttccttattatattaaattttctaatttcatgattttttcctacttgtaacaccaatatcaaattctctgggattcttgctcttccatgctttatggtggtatttaacataaccattttttgataatctagaatttttctgtacgattctatggtgacaataacattttttgttcatgattgacattggaa

SEQ ID NO: 202428 - DNA, 392 bp, Glycine max
  unsure (1)..(392): unsure at all n locations
ntacaacaagtataagatggtttaagataaatgggcttaatgtttaacaacacataanaaataacattctaccaccccctcaagttggagcatgtaactgatatgcaccaaacttgttacatatataatcaatcctaggacccctcaaaatcttagtgaaaacattagctaattgaaccttggaatttacaaaattgatcttaatgtaaccatatatgattntctcctgaatgaaatgacaatctttttcaatatgtttggttctttcatgaaacaccgggttggaggaaatgtgcaaagcaacctagttatcacaaaatatgatcataggtgagacatatgcaaacttgagctctttaagtagttgntttagccacacaagttcacaatta

SEQ ID NO: 202429 - DNA, 270 bp, Glycine max
cgcttgacgatggccaggagcatttactcttctattaatgagagtctgaactaaattcaggctatccatttcccatcagactctgacaagcctctctcgcaaactacgttcaaaccatgattgagtgcaacctgcagggattatatccacatcttacacgccatcaacactaattacatagttcgaaaaaaaatgtgcgatggatagcttaagtccttccgcaaagaatggcgagaaaatctactatcatgggtgctatgtttgaggaga

SEQ ID NO: 202430 - DNA, 359 bp, Glycine max
agcttgaagtgtgtaacccactattttcttagtataatactggtaatgtgtctactatcattgtcatcatttttcgtcattgaggtgccacttgagctgccaggttctccatttttgggcgtattctttgaaagatccatgccccctttttttgcacatgatttgtagttgcatcctatctgaagccattataccaacactgcctaacgaaggcaaccattatgtcctcccaggaatggactcggaaaggttccaagttagtgtaccatgtaacaactaccccagtaagactttcttggaaggaatgtatcaacaattccttatcttttatgtatgcccccatcttccgaccatacatc

SEQ ID NO: 202431 - DNA, 435 bp, Glycine max
  unsure (1)..(435): unsure at all n locations
gggttcgaggtacttacccgttgaagatcgaagatcgatgtataacgaatgaagaacgtcgaagaatggtcgaaagttcgcgaaattcctcacgaaaacgtttcggaagcgcctcggtttggattttcttcacggaaacaatttttccaagcaaattcgaaagaaagagaagtgcctaaggggttgaaccctttttcacttcacttctccccctatttatagaaatttgggggagaagcttgccacccagctcgcccaggcgagcagggttgcttcctccagaagcaacagccttctggagaaaccctctggagggcccaagtgggccttggtgctatttgcacccccatttttactaagtacaccccctgcctttttcttggtgattnncttttttcgtaagtaccgaacttacaatttcgaacgatacttgtt

SEQ ID NO: 202432 - DNA, 444 bp, Glycine max
agcttgcacttcttcgctttcctcagggactttatcttctttcccacttaggccttttagctttaggagccaagttatcccttgcgtccaagacttcaaccacttgtgatagccgtcgatgacgccattgctacttcccttaagctccttatctttcctttccactgtattccacgctttatgaattctttgaagtatcttcgcattggcttcatcgatacctcacgcgatgaaaggcgcgatgatctcctccgatggcgcacctctcatagggtagcctagttgtcttatggccaacatgggattattataattatacaacccctcattcccatcaaggggatgtttgggaatccttcacccgagcataacagtgctgcctcttcttctttccatcaggggaaccaactaatggacgcccctaccatatctgccaagagttct

SEQ ID NO: 202433 - DNA, 459 bp, Glycine max
  unsure (1)..(459): unsure at all n locations
tttgctccccctatctctaactcatctaccatgaaagactcttccttacattttgtttgggatcaaatggtgggcgaggagtcgatgctccatctcaaggttgactttacttgggagtggtggatacccgatgtgataaaaaatgttaataacttcctgggtacctttgttatatgttgatgtttgttgacttaagccttntgtgtagttttcacatcgtgttaggtgttagagatcacttctatgagtctagaacctttttcttttgtatgtattcgatctaagtaggcctaggctntagtatttttgtttatgtgtatattcagtcatctactttgtcctcatatacagttgtaccttgaggctntatacgctactttacttgnggaaacacttatgcatatntatatattctgtaattttatatgnnttagntcatntattccactnntagttttt

SEQ ID NO: 202434 - DNA, 445 bp, Glycine max
agcttatgctgcaaacatttacgatagacctctctatcctcagcagcaaaatcaaccacagcagaacaattatgacctctccaccaacaggtacaatcccgggtggaggaatccttccaaccttagatggtcgagtccttcacaacagcagcaacaacaacaaccttattttcagaatgctgctagcccaagcagaccatacgttcctccaccaatccagcaacaacaacaacaacaacaacaacagccccagaaacaacaaatagttgagactcctccgcaaccttcccttgaagaacttgtgaggcaaatgagtatgcaaaacatgcagtttcaacaagagaccagagcctccgttcagagcttaactaatcagatgggacacttggctacacagttaaatcaacaacagtcccagaattctgatagaataccttctcaatct

SEQ ID NO: 202435 - DNA, 216 bp, Glycine max
ccgggcatagtcagtcagtgagaacctatgacgtacctaaacaagcgagctcctggcagtcaacccgatataagaacaaagaaccacaaagcaggaggcttgtgtggtggttggccagctatggatcttgagtgatatttggaatatggcctctggtaatcgattaccaagggtgtgtaatcgatttcaaggcttaaaaatgaaggcaagaagtta

SEQ ID NO: 202436 - DNA, 434 bp, Glycine max
agcttcttatccaaggcactctcttggtggttattctccttcttccatggcttattccctagtggatggcacctcctctcacctcttctcctttgtcttccactgcatctccatggtggaaaatcaccattgaaggacctcattgaagctcaaagatccagcctccatagaagctccacaagcaagcttccatcaagtggtaatcagagcacaagagcttcaagtaggtgctccttaaacctccattaattttcagctttaccttctcctccatttttgtttcttcatttttctccatgcatctcctcacatgtcttgtgctaaatgttgttaacatgattctttaaaattccaccgattaatcttgctatagaagctagatttgatattctatggttcaaatttcttgttcatacgaacttttaaaaatacta

SEQ ID NO: 202437 - DNA, 492 bp, Glycine max
  unsure (1)..(492): unsure at all n locations
tgaaagttacccatcatctaaggatgaaccactcctctgtgaactctcttgtggcatcttcttcgntgttgattactagaattgcaacaatttcgctcttctatggtgccattgtcaacaaagattataaaaaatttatacaagagatgagatttttgagacttgatttctcatatgcaaacagaagtatacaaagttatgagaattcaaggttccaaaatggtctcttgaatgcctgcctgcacctttgatcatgttttgaaacaagagagagaaaggaacaaaaatgggtcaaattactttattttttttttaaaatcattntacaatcatggtgaaaatagaaatgcacaccttctttataaaaaaaatctagttataatctttgagaacacatnttcccttccatctatatacacttgagcacacatcagtcccaacagattaatgaaagactataagatgatgacnatcgctaagacaatgcaacat

SEQ ID NO: 202438 - DNA, 437 bp, Glycine max
  unsure (1)..(437): unsure at all n locations
agcttgttggttctagaacaatgaacatgtttatattctccatagatgagtttatcatgctgcacagataacaaaatggagcttataaacatgtttaggcaaaatgtttttattaagtgaagctgaaacattagggtgtgtttggtttacattttcattttctgtttttattttctgttttcattttcaaaagattagaattctgaaaacatgtttggtttgatttcttgttttctgttatcatgaaataaaaatactgaaaatttatgatatattgacttcttgtctttttgtatttttagatttacttaaaattacattcattgccaccgcaatttcattttacccaaaatgaggtttctgttctcaactganaacaagaatttattggtttcattttctgggtgttcctgtttcaatttcactgaaattttttc

SEQ ID NO: 202439 - DNA, 425 bp, Glycine max
  unsure (1)..(425): unsure at all n locations
tactaagctgagcttccctcagaacccccactcatcttcatctcaatctcgttttctcttctccttccagccacaaccctcagaaaccctcttggaacgaccctttcacttcttcaggtgtgtgttaagattctcaatctctcgtttgtttccagatctggtccaatttctttacgcacttcccttttctcttttactttaaccaggcacctactagctcgcttatttctcaaaaaaacaaacgcaccttagcggattaaccttntaattacccccttttttctctttccgttcttgcttttcatttccacaacttttgcagtttaacaatcattttcacttcttttcacgcctttcaagctcattcagagcttcctaattttccccatccccctcttcttacttcatactttagtatccaacat

SEQ ID NO: 202440 - DNA, 442 bp, Glycine max
  unsure (1)..(442): unsure at all n locations
agctntagagatagatgactcttatcatggtcacttcctatccttgctctccaaagcttcaattcatgccctctttatggctgtcaatattatgaaaaaatatatggcaataatatgaaccaaatgcaattttgaaattttgctaattgcatggttgcaatttaattgaaaatttgataattagcctaaccaaaatggttcactaccacttccatgatctatactagcatatatntaaatagctatttgtaaccaagatctatgaagatagatattgttgcgcaaccgaagggtaaataccagagagattttacaccaatgagtcataggtaactatataaacgaacttgacacaacactataactcaaaactttaagggttgtatgggtgtgttcttcacttatatgatgataacacctcttatttctacataatgtggga

SEQ ID NO: 202441 - DNA, 423 bp, Glycine max
  unsure (1)..(423): unsure at all n locations
gcattacggacctatgaaactaagcttagcttcccaggaagttttctcaaagattcttctcaaggaagttttctcaagaaagcttctcaaggaagctacctagtctataaatagaagcatatgtaacacttattgtaactttgatgaatgatagtcttgtgagacacaactcanagttcaacttctctcccttttttcttccttcaatttcatgctcccccctctttgattctctccctctttcttttcctccattgaagcatcctctccaagcttcttatccaaggctcatcttggtggtgaagctccttcttccatggcttattccctagtggatggcgcctcctctcacctcttctcctttggcttccgctgcatctncatggtggaaaatcaccattaaaggacctcattgaagtcaaa

SEQ ID NO: 202442 - DNA, 427 bp, Glycine max
agcttgtatttaaaaatgtattaaaaatacttttaattaatattttactttttattcctttattaatatatatgtgaggggtagagggtgtcacatacatgatcttagctagtatgagtgttgagaccaaaacccctgtgagtgatataccattggtgagagagtttccagaggtgtttgaagaggtgtcaggattaccacctgagagagaggtcgagttctcaatagacctagtgcccggtactggacccatatccatagcaccttataggatgtcccctgtggagttgagtgagcttaagaaacagttagaggaacttttagagaaacaatttgtgaggcctagtgtgtcaccctggggagcactgtgtgttgtagttaagaagaaggatgggaccatgagactatgtgtagattatcgtcagtt

SEQ ID NO: 202443 - DNA, 160 bp, Glycine max
  unsure (1)..(160): unsure at all n locations
tacacanatgcctcgccaaccttcgtgatggaagcatagatgtggctcttgntaacgaatcttatgctaatttatacaccatagaggaccaagcttctaagcaagccagagttagacgatacctggataaaattgatgccaacaagctgaatgaatttct

SEQ ID NO: 202444 - DNA, 386 bp, Glycine max
ggaccttaagcacctgcagctgcagcttgcctgaatatactgggatttttttccaattcttgaaagggatattaaccatggagaggttatatggaacactgccgtcgttattggaaatcatggcactataattgggaaacacaggagggtaattgcctaagctctctgcttctaattttaatgccaaattgctgcccttttaccaatctcatgaacacataacatttggcagaaccatctaccacgagttggagacttcactgagagcacatattatatggaaggaaacaccggccaccctgtatttgaaacagcattgggaaaaattgccattaatatctgttatggcaggcaccatcctctaaattggatagcctatcgcttga

SEQ ID NO: 202445 - DNA, 324 bp, Glycine max
  unsure (1)..(324): unsure at all n locations
ngaaggagctatacncatggtacgattggcaagccgttcttattctgtgaggtacgcgctgacagtgctagtctgctgcagcttgaataatgcaccttgaggatcatcataaaatgaaggcgcaaaacgcgattcaagggcttgcagcatcgcggtccacgaggggaagaatccattgcggtacatccactggtaccaggacagtgcagcgccttccatatagaatgaggccaccgtgacacgttcttgctcaggtatgccctgatactcaaaatattattgaaatttgaatatccaacccaatgcatcatgaccttcagatct

SEQ ID NO: 202446 - DNA, 403 bp, Glycine max
  unsure (1)..(403): unsure at all n locations
agctngcatcaactgacctggagatttcaattttntttcactcgatttagggccaaggggaccatcttaaacgagctctcctccccttctcataaacagaagctgtaaaagttgggttttctctcgactagtgaagagaaagcaagttctaaaagagaaattccaatataaaaataatatatgatgctctctttgaaaccaccaatcatttcattatacacaggaccacgataactggaacatacaacagttacgggcatatgttactcgtacacagacaatatagaaagaaattacggtgtaactatataataaatgtcaacacaaaagaaagttgctccatgacagagagacaatatgttcgctttcggtcctaagcacaactccaaatttccatgtttat

SEQ ID NO: 202447 - DNA, 385 bp, Glycine max
  unsure (1)..(385): unsure at all n locations
acatnaatctcagctttgctcaatggagtggatgagcctggtgtttttttttttaagctaccaaaatgattacctgagaaatcaaagtgggggcctacctttatgttgaagcctgagtggatagaaagactccatatgtggtgaaatgtgaagtggcttcatatcctcgtgtgatgttgtgcctcacaaagctaatagttatctggaacgtattatgagattcaattaaaataattgctgtgtaataccctaaattattaagtgcagtgcaagaacatattatgctgtttgtttggtgcaacgtcattaaaattcatcatctcttagcatataaatgtaaataatatgaaaaaaatgcaaaatgtgtgctgaagtgtatgccatg

SEQ ID NO: 202448 - DNA, 438 bp, Glycine max
agcttcaagaaaaggccaaactcctcttctttatctgatttccggcttaaataggtggttttgttcgtgcttgcacgcttagcgcgcattagtgaattttggcttagcgcgtgcttttctcgttcagcggatggactgaagcggtgtgcttcgctggatgacccatcgcttagcacaaatgcacagctcatccttcttccagattcttcctcacgctcagccgaggagtgttgcgctcagcggatgactcgctaaggcagaagattggcttagcgagagggtaaaaattagcacttcacaaacttgcctaattaacttgaaattgagagaaaacgattattaaacacacaaaatggaagtattaagtatttattacctatctttaacaaaaagtatttacaacactacaaaataaccataaagtggaggagtttgata

SEQ ID NO: 202449 - DNA, 399 bp, Glycine max
  unsure (1)..(399): unsure at all n locations
tgaacttngaaatatattaatttgtgattgaagtttttgtgtgccttttcttaagacatgtagatcaattagtaaccaactaattcgatcactgacccaatgagtgtcttgatcgggttatcaggtctagttttaaaacactagatccaagttccaaccctaaccttataaattaaatttaaataataattaaaaataaatataaatttagagactcaattaanaataataattcaaaacttaattcaaaatttcaaataatttaaggaccttcagaattaatttagtacatgtttgattttatgttgaaatttctagaataatggtaaacataatcttacatataagtatgcatgtgtaattntatggtgatgaattcgatatgacttttgaagttga

SEQ ID NO: 202450 - DNA, 288 bp, Glycine max
  unsure (1)..(288): unsure at all n locations
agcttgcaaactctagcaagagacttgtttattgaatgcgtngtaaaagaaattgttctatctgcgcttattactttttatcttaattaaactgttagcatttttttggttgcagagttctttgatctttcttttcttgagggtgaaactgttagggagtggctcttctttaacaagcctagaatggcatttgaaagtttaaatagaaaacagagatcacttccggattacagtgggcatggttggcatgattcaatgaagcaggtaatgaaggaacatgggggacaa

SEQ ID NO: 202451 - DNA, 362 bp, Glycine max
  unsure (1)..(362): unsure at all n locations
tacatgaggtgcctatgtataggctaagcatatcttcttcttgttgcacatgtagngaattcacactaacatttccactaggcattaattacccactaagcgtttatttgctgccaaaatttacttctgtcaaccctctaactatcataatgtcctaagaagctcagaaacactcaaatcagacctaaaaaagatgaagagacatctgaacttattacctcataattaagcatgaaaattccatggaaaataagataattggtcttaaataacaattcgaaccatacaactaattaactccaacccatgaatacttgtcttgtgtattcacgaatttgtcatgttgtcttcatgttgggctc

SEQ ID NO: 202452 - DNA, 356 bp, Glycine max
agctactggatacccgctcggtctttctttctcgagcaccgccgactatgacgataccggtttatcgcccatctcccactacggccctcttaccctatccaccttatcgcatgcccacccctagctaagccacactgcgacctcaacccactttgaaaaggctctcaccggaggagattatctcccacagatgagcccatagggttttgttcttggctgctacaaagaacccaacagctgaggttaatctataggaactggacccaagaccccgcccacccgcaacccatgaaccggtagcggacaatagcatttcaatattttggcggggaatcatccccgaaaacgctccgact

SEQ ID NO: 202453 - DNA, 417 bp, Glycine max
agcttgaaggcaaactggatgcattggttatcttggtaacccagctggccttgaatcagaaatctgtacctgtcgcaagggtttgtggttagtgctcctttgctgaccaccatacagacctttgcccttctatgcagcaacctgaagcaattgagcagcctgaagcttatgctgcaaatatttacaatagacctcctcaacctcagcagcaaaatcaaccacagcagaacaattatgacctctccagcaacagatataaccctggatggaggaatcaccctaacctcagatggtccagccctcagcaacaacaacagcagcctgctccttccttccaaaatgctgctggcccaagcagaccatacattccttcaccaatccaacaacagcaacaaccccagaaacaaccaacagttg

SEQ ID NO: 202454 - DNA, 351 bp, Glycine max
  unsure (1)..(351): unsure at all n locations
ggaccttaaatctcagctattgtcatgtgatgaatcagatgattcctatgtgatcagatgatcaggtgtttgtgatacaaaatgatgacaangcccatgaaatgattcaagattgagtcagacaattcacgaataagaaaagattaagagaagtttcagtttcagttctcagaatcagaacatcagatcaagattcagaatcagaaaggctcatcagataagtacaaagttttcaacattggtacactgagtttcacaaagcttaccaagagtttactcttgtatcgatccagttatgtattgttccataccagatgttcaaagctcactgattacagtccattgatcaat

SEQ ID NO: 202455 - DNA, 318 bp, Glycine max
gctagagcttaactacacacaccctctctaatagctaagctcacttctttgaaaggagaagctagagcttagctacacacacctctctaataactaagccaccctcctggagaggagaagctggaccttacccacaaccccggaataatagctaagcccacccccaggcccaaaaccatgaaaaaggaaaaaaaggccccacacacacaagaacacctcaaaaggcccggaaatataaggcaaacaccctatatcacaaaagggccaaaacacaagtccaaaagaagaaaaaacctattcaaatatttacaaagaaga

SEQ ID NO: 202456 - DNA, 359 bp, Glycine max
tggtatatcagaaaggcgtaatagaactctaatggatatgcttacgagtatgtttttacttgtatctttgtgaatgtatgccttgaaaactaccatgtatttattgaatagggttcctagtaaaatagttccaaagacaccttttgaactgtggacgaataggacacctagtataaggcacctgcatgtttgaggttgccaaacagaaataaggattcctaatccgcaagaaagaaaatttgatgcaagaacaatcagtgaatatttcattggttatctagaaaagtcaaaggggtatatgttttattgtgctaatcatagtatgagaattgtcgaaactggaaatgcaaaattcattg

SEQ ID NO: 202457 - DNA, 330 bp, Glycine max
atcgattctaagcaaacaatagaatcattcattcgattattattattttttccttgcctttcttagccgccaaacacacaacatcatctcaggagaaaagaaaggtgtttagaaagagagttcatttttcggattaatttatggcatttattcaattcaactcgagtttattttgtttttattctcaccttgaatatttgcgaaaagcgcattatactggctatctttaataatctggaaatcctgaatattaaacactttgcataaatttagtgtagctaaattaggtatataacttaataacatatttacacatcattaaatctaatt

SEQ ID NO: 202458 - DNA, 388 bp, Glycine max
  unsure (1)..(388): unsure at all n locations
ggctggttcagccatcaagattcttatttagttttgctccttgncctcatttctcaagaagtcaagatactggtttcttctattgtatgaaacataaaatttgtataaattattgtttgtaatttttccttctatcatcatgtcagctatagccaatgttccttgaaagatctctccgtaaatcaatttccaacaaaaaataaagtgcacggaaagcaagcatggaatgtaactatcatcaataagtgttcatgtgttcaaaagaatgtgatattaaattgtaaaagtttttaatctgttaaacccgtaaaatcttcacttttaaagatctcacacaatatttatcttggtaatggtggtcaagtcatttatggatttcctgtcaaat

SEQ ID NO: 202459 - DNA, 339 bp, Glycine max
aacagccttctggaggaatcttctggagggcccaagtgggcctggttgctatttacacccccctgtttactaaatgcacccccctttctatatttttgttattccttttccgtaatgatacgaaactttacgaatttcggaacgatacctattttccttccgcaaagttacgaatccttttggattatgtatttactctcttttagtttttgaagaaattacgaaaacttacggattgcgcaaaaacacctcttttcgacttccgtcacattacggaatttcacggatcacgcaagcctgcttcctttagatttctgagactgtccgggactttattta

SEQ ID NO: 202460 - DNA, 417 bp, Glycine max
  unsure (1)..(417): unsure at all n locations
aactcaagcttcggagaanacatgggaccaactcattgtatgtcaaaagaagttttatttttcaaggtctgagagaccatacaagtttcctaacgatttctaattatgtgggccattaagtctatcatatgctgacaatagccgagaagcccatgaatctcttcgggggtggagtaggtgtctgccatcgccttggccttggctaacaagcggggaagttcttgactcccgttcaaggtaagagcaaaccggtccatccacatggttgcctcttggtgtaaagagtcgatcacccttcctctagcctctttttccgcatatacttgagcatactcatccgcgattctatgctcgtgggccgtggctagacctaactcttcttggtacttggcgatgatagctagcatgttggtctcc

SEQ ID NO: 202461 - DNA, 354 bp, Glycine max
ctcagacagggtgaataacctagaccatgatcaagacaaggactaaatgcagatattatggatagaactgaatactacaggtcatttcccttttccgctaaccaatctaccaagaaagaaaaacattagtcaaaacaacaataccgttctatggccaatccaataataattcaaaactgaaaactgatttaaaggccatctatgtttcactatttgcataaaaccttcggatgttattcttggaagcataaatctctctttttgaacacctcaacaacagaaatcaaaaaaaaaaggctgtaactttttatatttaccccagatgactctagacctttatcccatagtatatat

SEQ ID NO: 202462 - DNA, 408 bp, Glycine max
acgcatctgtctgtccccgaaagaaagatgagctcaccttgtcacattccaaactagagaacgacccaatgaaaattttgaaagatcttccaaacctccgatcattttatatgcttgcagaatcctacgagggggaaaaaatgatctgcaaatctaaaagttttcctcagctctatgtctcgaaagtttggaatttgaagcaactaaagaattggttgataaagcaacaagcactcctctctctcagacaactggaaatccgatcatgtcctggcttgacaaatcttccttttggactgtggcatgttaaaagtctccttgaggtgacactgacaaacatgtcaaaggaaatcaatattggcatatatcgccttccggacaaattgaaagaccgcacagataattctc

SEQ ID NO: 202463 - DNA, 414 bp, Glycine max
  unsure (1)..(414): unsure at all n locations
agcttgctcctacaaaatctaacttacaggtcatagatacgtagagcnttttattctacataataactcccagttctaactcatctggtgaaggcttagaaattctggccactttatacttgtaaaattgttcaattatttagggagacaaaattgatgcaacaattcttaagtgatttatttatattttttggtctaagtttganaagaaagagatgtacgcactatgtgttccgtgataattttgattgcaatcactttgttgttttttttttaattttttttatcaagcaatgattttgtttatttcaaataggttagtattgtttgatcaaaaactactagccaatcaagttattgcaattcaaattatcacaaaacacattactataaggtgaatttaattatgttatg

SEQ ID NO: 202464 - DNA, 366 bp, Glycine max
tctccaccaccattaccagaaagaagaacctcagaaccatgatagacaacttttgcattgccataaagccccacacttgacttaaaatctggatctttctgaaaatctgcgaaggaaaaggaagagagtggatcaaaagcttgggttttgaggaacaagatgaggaaggtgaatgctgtgaagtggtgggaagaggaaaatggagccataattgaagtgggcatgagctaaatcttgaagggtgtggctctagagttggaggagtgatcccatttgcatcaaaagggggattttgctgtttctagggtttgagagggaacaagaaggcggaggaagaaagtaaagaatattgggtaagttggtgga

SEQ ID NO: 202465 - DNA, 407 bp, Glycine max
ctgctgattacattctcccctttctaagcaaattcttaattctttttgacatcatcaaaatcttcatcatcaataatcttaagagggataggcttaaaatacagaataagcaacaacaatcaatttaacaatgttctttaaacatgcaagacacaattgattgcaaaaaattaaataagataagggaagagagaatgcaaacacagttttatactggttcggccacatcccgtgcctacgtccagtactcaagcaacccacttgagatttccactatctttgtaaaatccattacaaagtctgaaccacacagggacaacccatcccttgtgttcaggaatcctttacaacaagagactcacagtcccttaaccaatctcattgaataagaagaatggaagaagaat

SEQ ID NO: 202466 - DNA, 389 bp, Glycine max
ttctggatcatacaatggcataagccacccattctataatctacgacagatgcagtgatctctcataaaaaaaccttctaatactagtttacattcaacattccaactatcacaaccatatagtataattggctcatgtcaaacttataaaaagaattacctgaacaaatgaagcaatatacccatcaaagtagtgcaactgcatacaattttcatgattgctttcactatcacaactaaagtaaccattaactaattccatggcattagagatcttgattctataaatgtaaggaacataaatacatttgatctttataagtgcacattcaaactaaaaacaatgggattttctttttcggcgcatggaaataaaaaccattccttgt

SEQ ID NO: 202467 - DNA, 336 bp, Glycine max
tgaattgaggatttgcctaaggtccaacagaagcttgtctcagcggttatgtgagaccgatattttcatgttagccatcatcagcaaataccaagaagaattaaatatagccacggcccacgagcacaaagtggcggacgaatatgctcgagtgtacgtggaaaaggaggctagaggaagggtgattgactcgttacatcaagaggcaacgatgtggatggaccaatttgctcttactttgaacgggagtcaagaactttcccgattactggccaagtccaaagcaatggcggacgcctactccgcccccgaggagatccacgtactcctcagcta

SEQ ID NO: 202468 - DNA, 435 bp, Glycine max
cttaagtcacctgcggcatgcaagcttcttatccaaagctcatcttggaggtgaatctctttcttccatggcttattccctagaggatggcgcctcctctcacctcttctcctttgtcttccgctgcatctccatggtgtaaaatcaccattaaaggacctcattgaagctcaaagatccagcctccatagaagccccacaagcaagcttccatcacctctccaaaggcaagccttccgcatagtgtacggaaagattctagatttgaccgcggtggaggtatttacggaagctgtcgtatccctcgcccaatactatgacaagccgttgaggtgtttcactgttggggacttctcaatggtatcgactattgaagaagttgaggaaatacttggatgcccttcttgggggagaaaatcgtatattttctccggg

SEQ ID NO: 202469 - DNA, 407 bp, Glycine max; identical to SEQ ID NO: 202465

SEQ ID NO: 202470 - DNA, 309 bp, Glycine max
aaacagaagctcttagccaattcaaacgacaataactttttactcgggtggccgaatgggtctccgaatatatcgagacgcttgaaattgaaaactgaagctctgagaaactcaaaccaacataaccttttgactccggaggtcgaatggggcccgcataaattcagacccttcgaattgaaaacaagagatctgaacaaaatccaacgaccataactttttaccccggaggccgaatgtggccccgaatatatcgagacgctcgaaatgaaaaaagaactctgagaaaatcaaagacaataattttac

SEQ ID NO: 202471 - DNA, 401 bp, Glycine max
  unsure (1)..(401): unsure at all n locations
tctctttattacagcgctgaatatacgcgaccatcgttttcttgaaaaagntattggccgttgaaattgctcacagtttctgttttcaattcgagcgtcttatatactacgggacacagttagacatctgagtcaaaagtaattgtcatttgaatttcctcagagcttttgttttcaattaccagcgtctccatatattacgggactcaatcggacatccgagtaaaaagttattgtcgcttgatttctctcagagcttcagttttcaatttcgaacaactcgacatatgatgggactcaatgggacatccgcgtaaaaagttatcgtccatagatttttcatatagcttctgttttgaattttgagcgtctcgagatactacgggacacaatcggacatc

SEQ ID NO: 202472 - DNA, 362 bp, Glycine max
tacagcgggtgaaccagaagctgaagtttctttggtgaggaagccctggaaaaacagagcgtttggaatgatttcttaaatctcagaaaactattgggaaatgctggtaaaaacacgaatgcccagcagatataaatttgaatgaaaaatgtacaggggcgtgtgaagcaacggtcgaatttgctttgtggtgaacgtgctattaatgttaagtgattcgtttgggcacgttcagattgcagtagctgctataattcctctagcaacaaatgcccagcttgcccctcagtttttcaaactgatttgcatcccaagcctttgtgagaatatctaactattgttcctcagtgtcaacatgcttc

SEQ ID NO: 202473 - DNA, 399 bp, Glycine max
  unsure (1)..(399): unsure at all n locations
tgtgcacgtgagattacgcatcttcggctcacagatctgttttattgactttgagtcacgctgacgggcggaaatacccgagtggttatccgtataaactttntgctgtctgtaagacgtaaagccttataacacgcagagactaacgtcgtcttctacgaccttcgtcaatcgcggccgacaagcccatttaaaagcggtgatttacgtcatctttcgcgctcacaagatctgtcatactgacttttgagtcacgctgacgggcggaaatacccgagtggttatccgtataaactttttgcattctgtaagatgaaaagcgtaatagcacgcagagacaaacgtcgtcttctgcgcccttcgtcaatcgcgatcgacaagcccggtggcacgcggaga

SEQ ID NO: 202474 - DNA, 254 bp, Glycine max
tccgtggtcaatttcgaccctctcacatatatgcgcccgaatcggacatccgtgttaaaaggcatgatcaattgaatgtctcgagaggttccgatgtttaatttcgaacgtatcgaattattgttaaccctgaatcggacctcagtgtgacaaggtatgaccatttgaatttgacgagagcctccgctgttcaatatcgaatatcactatatgtgacgcccctaaattggacaccgggtgaaaagatatgacca

SEQ ID NO: 202475 - DNA, 396 bp, Glycine max
atgctcgaaataaacatcggaagctctcgagtttttttttggtcataacttctcacatgaatgtccgattctggcgcattatatgtcgagaagctcgaatttgaacaacggaagctcttgagaaattcaaatggtcataacttttcacacggatgtccgattcaggcttataatatatcgatacgctcgaaattaaacatcagaaactctcgcgaaatttaaatggtcataacttttcacacggatgtccaattcgggcgcataatatgtcgagaggctcgaaattgaacaacggaagctctcgcgaaattcaaatggtcataacttttcacacggatgtccgattccggcgcataatatgtcgagacgctcgaaattgaacaacggaagctcttg

SEQ ID NO: 202476 - DNA, 366 bp, Glycine max
  unsure (1)..(366): unsure at all n locations
tccatgcatgtatctcgggtgatgcatttatcatgtacgagcatgctatcaatgaaattgctcctaatgcacacatggatggtgaaaaataaaaatgtgtcacactacaaatttaggaatgacacggaacatgtacctccagctgcaacaagtttttctacacgaaagacaatgtgctntccataagtgtactttttcaatgcattcaaatgaaccttaattcgggaaagaatcagctcgcgctgttgatcctcacaagtttccagcaccttttgtacaacgtaatttgcaaattgatctttcatcatccgctgtatataaagaatctgatttatcatttcgagaaactggcgaggaaggaaaagc

SEQ ID NO: 202477 - DNA, 415 bp, Glycine max
  unsure (1)..(415): unsure at all n locations
caccagctggacctatcatacaatcgtnccagtctcacagtttcaccgtttctttgtactccgacattgcaacacttggtgttctcctattctctgtcgttgataatccattcatatgttgacgtcatgtccctcaaaacttatgatcatccgctaaaaccttttcttgcattcttttttcctgttactgcatgattttatcgtcgttactagttgcgatcgatgatctttttctcttaattatacttttgagatcatctggaaattataattatgcgattttaatattttcataacttttttttttctcaaaaaagaagaagctgtttgcaggataaatgttagcatttttgctttaaaacactatgttttgcttatatatttattatacagacgataattaccatgcagtccc

SEQ ID NO: 202478 - DNA, 348 bp, Glycine max
acacataaaaacatttatgtggtttattgcacaatgactagcaattcatattcttatagacggatagacaatcttagcacctagtcttttctctcaagataaccaaagtgttttgagagcaattctaaacttaacaagaaattacatagtgagctttttgcataaagaatttgaatatgagtgcttcagttggttcttaatgtcttcaaagcttttggtatttataggcctcttcaatcaagtatttgttgtctctaaacatatattttttttcttaagcttgtgttagaagaatggggtcggtggggcattaaatacatgtacttcctcatgctggaaaatcattct

SEQ ID NO: 202479 - DNA, 386 bp, Glycine max
agcacatgagaggattgttatcaaattgcacataccttaagtccctatgaacattccctacctcaaacctctccatcacctttttatctactccctcagcattggccacaccctcccctacaataactgtgttttttctcctcaccaactcacttaacacactagttacatcatcattgttaacatggtctaaattacgcttcgtgaaggagccagcagtaacttgaccaaaaggtccagatgatggagacacattattactaccaccaagaacaacatgatggggcttggtgatattttctttggcatggctcctatcagaagaagccttttttgaataaacttccattgaaacagcttgttcaacccttgttttacaaaggtgc

SEQ ID NO: 202480 - DNA, 333 bp, Glycine max
catatagtatacaatataaattacgtgtaaccttatcaatactattaaagtttccaccacaactacctgtatttaaggaccttccgcataaagagtagaaagagttacatatagtatacaatataaattatgtgtaaccttatcaatacaattaaattttccagcacaacaaccacaaccacctgtatttaaagaccttccaaacttgtcaatacaattaaattttccaccacaagaaccacaactacctgtatttaaggaccttgcgcataaagagtacaaagtgtaaaggtgtgtgcagaaccctaagattaccaccctccgttgactata

SEQ ID NO: 202481 - DNA, 361 bp, Glycine max
tgcactcctctaatgacaatagcatcacttctagcactaaactgctgggagttggaagccatcttctcaattaaattcttggattcagcaggggtcatgtctccaagggctccaccactggcagcatctatcatacttctctccatgttactgagtccttcataaaaatattggagaagaagctgctctgacatctggtggtgagggcaactggcacataatcttttaaatctctcccagtattcatataagctctctccactgagttggctaatacctgaaatatcctttctgatggccgcggtcctgaagcagggaaaatttttctaaaaatctcttttgagccatccccacttgtgat

SEQ ID NO: 202482 - DNA, 363 bp, Glycine max
gtgcatactccaaatggagtttagtaggtgatctctagggcctgactaacgaagataggtcatgtaaacacaaaagcttaaattatctacaattctcaattaagctcaatcattttccttaaaccacaaatgagttaatgtgagagaataagaatcagagagatgtccctcaagctaagaacaatagaaaattgttaaattataaatgctctattaggaacaagatgaaaaatcattaagagcttaggaatgctttttatcacctgattagtttatctatgacaaattatttttcttctgtcataatgcttacttaatttctaaaaagaattttgattatgaggaggatgacctattatttac

SEQ ID NO: 202483 - DNA, 373 bp, Glycine max
acagactgttttgtttgaaaatgcaatggtttaagagattaacattcaacaacataatttaaacctgatctttttattattttaacaatttacgatcagtattttttaaaactgatttttatctatttttcctttcgttgagttatatatgacaacagtgcagaccaatgattttttttttcaaaggcaaaaaaacgacagttatgtagactgttcacaagctaataatgaatgattaattaaacacggaaataacaataatcaagacaaaagcttgtgctgaaagcgtaatgctaaaatttcgcttttaattaattaaggaaaattacattattaaacccacctaataccagtccttgacagcatccagctc

SEQ ID NO: 202484 - DNA, 429 bp, Glycine max
  unsure (1)..(429): unsure at all n locations
gcttcataatcctagcacagacaaaagcagtttcttgtttttgttagnccacttgaaaccattggtcattttgataagtcaagtgctctaagcatatcatagcccatagcgttaaacttaaatccatgcacgaaaccatagattattaaaatcacattcatcgctcaccaaaccaaaacatcacaatgcctcatcttttgcaaaaacaacaaaagaacaaactaaccccctgctagttttaaaaccaaaactccacagcacgcacaccataatctacattctacaacatcacaaccaagtgaagcaacagcaaaaaatgcgaaatcttcacctaatctaaagtcacacaagaccagctcatctaaggcgagcacctccatatcaactgacaacaaccattcagaaaaaacagccacagataaactgatc

SEQ ID NO: 202485 - DNA, 399 bp, Glycine max
  unsure (1)..(399): unsure at all n locations
ctgaaaacaagcatctgccttattggcgaggactatataaaanataacagaatgaactgccataaggattttattcacagcccaacaatccaccaccttcaactaacatccatataaaacaaaaactgcaccctccaagcatacatgaacttaacctcaacaatcaacattgagcaagcttaaacaatgatcaaacttactctttggaactggctttgtgaacatatcagctggattgtgcagagtgctgatcttatgaactttgattcttctttctgaccgaatgaagtgatatctaacatctatatgcttggttctatcatgatgaacctgatccttggccaagcatatagcactaaggctatcacagtagatgttagcatattcttgaataattct

SEQ ID NO: 202486 - DNA, 316 bp, Glycine max
ccgaagaattgttgagggaatacattacaaggttcaaaaaagaagtaaggatcaccattctttgtgtccatataaaaaatgcgactctccacttgtatttaccacaatttggagtcgactgacattaaggtaaacgtggcctggatggtctctgagaattcacatgtcggacgataggtaccctctgttaggagaacacgaggggggacctacaaaacaaatgactatgatgcttgagtaaatacgtgaatgagttgatattggaatgaaaagggtgagataaaatctgacatttataacatggagatagagcttc

SEQ ID NO: 202487 - DNA, 393 bp, Glycine max
  unsure (1)..(393): unsure at all n locations
ngaagtgagatagtgtggaagagtcagtcgtcctacttttattcgttgaccacagagaggtacctggagatatgtcgcaggggtcaggagaccttgcggacgttaggtgttgtgctatttcccaaaaccaagcttgaccaatcccgacccaacccgggcatagtcagtcaatgagaacctgtgacgtacctaaacaggcgagctcctggcagtcaaccgattagagaacaaagaccacaaagcacggaggcttgtgtggtggctggccagctatggatcttgagtgatatttggaatatggcctctggtaattgattaccaagggtgtgtaatcgattacaaggcttacaaatgaagacaggaagctaagatggtctctggtaatccattacc

SEQ ID NO: 202488 - DNA, 52 bp, Glycine max
gccggggtgcgcgtctttgcttcgccattcctcgggggcgccacccccccct

SEQ ID NO: 202489 - DNA, 378 bp, Glycine max
actcagctcatctgcagatcctcaagaagaccaggcagaacgtacatatttttatcatcacagcatatttagaacactaaaacccacaaatccatcccaagcaacggaacaatttatatctgctccaaacaaggactaaggcaacaggacatttcccaatgctacctccagagcattatctcaaaccgtgcgcaaaagtatgaagctctgatccccaaacatcgacaccctaacactgacaatccaagcttaaataggctctgatatcgcgacctcgcgcttaacgccagcaagtggatatgggcttggagctagacgagcgctgagcctgacaagagacaaacattgcacttagcaaggggatctcgcgcttagcgc

SEQ ID NO: 202490 - DNA, 352 bp, Glycine max
tgcttctttagttgcgcacttctaccggatgaaaacatttcgtctttttccggggctctaaaggccaaaaccctatgatattggcactttgataattcttgtatttgatttctcaattgtccgctatctaaaggaggctttaatactatgctgaacctactaattgctagcttttgataaagttttgcacaaataaacactgatctatttttttatatgtataaacatcaattagggagaacatataataaatataagggttttactaacatgtgaacacacagttaagtatccaatgctgttttgattttcaagtaaggacccttacatgtgccctcgatactgctgtaaa

SEQ ID NO: 202491 - DNA, 360 bp, Glycine max
tggcatgtgtgtaaaggaaaaacaactaaccctcaagatcccgaataggattcggatatcaaagaagtgaaactaatggtcaggcagggaaagatttgaggaaggcgaggtctcggagttcttcatcggtcagatgctttttggagtacttgtcatactagccaggacattgttgctaataaacgggaacaacggtttccctctcatgtttaagaaaaagtttttcctagtaaccagacttattgttactttaaagtagttgctcttgaattatttttttgtatgaaaaagtgaatgctcgatagagggggtgagacagaatccatattagagacatccatcacgcctttttgtgtggct

SEQ ID NO: 202492 - DNA, 371 bp, Glycine max
cgaacttttaaacaatgaaaacgtcgagaacgctaaactttgggaaatcctccggaaaacgttaccgaaacgtttcggaagcgcctcggcttatattttcttcatagaaacaatttctccagccaattctaaagagagagaattgcctaaagggctgaaccctttttcttctcacttcctcccctatttatagcaaaataagggaggtggttgccgcccagctcgcccaagcgagcttagctcgcccaggcgagccaggttgcttcctccacaagcaacagtcttctggaggaatattctggaaggcccaagtgggcctgggtgctattagcacccccaattttactaaatacaccccctctgcttttttt

SEQ ID NO: 202493 - DNA, 403 bp, Glycine max
ctctggaatcttctcaggaagcttctgaagaagtttcttttgattcttctcaaggaggcgagcttagctattagaagggtgtgtgtagctaagctttagcttttttaagaagcttctcaaagaagcttctcaaggaagctacctacgctataagtagaagcatgggtaacacttgttgtaactcggatgaatgagagttttgtgagactcatctcaaagctttacttctctccctcttttactccttcaatttcgtgctcccccctctctctttctctctctctttcttttcctccattgaagcatcctctccaagcttcttatccaaggcacattcttggtggcgaagctctttcttccatggcttattccctagtggatggcgcctcctctcaccttttct

SEQ ID NO: 202494 - DNA, 373 bp, Glycine max
aaaagataccttagatatgcatgtatgttaacaaaaagtatacctcacaaaatatgtatatatgtatgtctaggtagcaagataccttagatatgcatgtatgtagcaaaaagatacctcacaaaatatatatatgtatgtttaggtagcaagataccttggatatgcatgtatacaacaaaaataccttacaaaacatatatatgtatggttaggtaacaagaaaccctggatatgcatgtttatagcaaaaatacctctctaaaaaaagaataaggagaaacataaaagtattctgctagctaaaaaccgacatgcttttgaaaaaagacaattctcactttctttgaaaaaattcattggacacaaccaa

SEQ ID NO: 202495 - DNA, 398 bp, Glycine max
tgagtcgagagtggaaagtatgatattatatgacttgttgaaggcttgtcaaaggtcaaagaggagcttgactgaacagttgagtatgacggaagagtacatgtaggctatcattgaccagtataaggagaagctaaatctagctgctagccatgagcaaaggctagaggacgagcatgcaaaagtatcggctctgcaagcagaaagggaagcacgggagagagtgatagatttattacacagggaagctataatgtggatggataggttcactttcactttgaatggaagtcaagagcttccaagactgttagccaaagcgaaggcaatggtggacatgtactcggctcctgaggaagttcatggactttttgattatttccagcatatgatcaagt

SEQ ID NO: 202496 - DNA, 376 bp, Glycine max
  unsure (1)..(376): unsure at all n locations
attgggncggtaccttaattaaaaatattgaggctcattttcttgtttcttctacgtacaactaggcagttcccatgcacaacatctttgtcgttaatattgggctctttcaaatctataactacttgattctttccatcattaacaattatatgatttgaattttcaatatgtgtaactgtcacattaaatgaattggaatgccatatgtcttcgctgttgttgtagccatcgaaccatccccgttcaccgccgtcaccgaattatgttaatccctctcaccaacaatagtttgaattttgcagtatcttgtgaggtgtccataacatccataggttgaagcaaattctatggagacccttatacttcacaccat

SEQ ID NO: 202497 - DNA, 360 bp, Glycine max
  unsure (1)..(360): unsure at all n locations
ccccacantatttccatgacacaaatgcaaaaatgaccacccccaactttattttatactggtcatgcatgcacctatgcggacactcaagtgtcaaatttttatggtcatgtgatgctagggctcaggattcatttcctctattntagtcaacccaatgtttccaaaatatgttcttttatccatttgtgcattcatccaagtccatttctggcgtccgggaaaatttcacagcattcacccttcaggtgtacacacattttttttttccaaaaactagctatgatcagcgaatttttcttcaaagaaaagttggaagtcatctcttttcaaaagcatgttggtttttcaactagacaa

SEQ ID NO: 202498 - DNA, 365 bp, Glycine max
  unsure (1)..(365): unsure at all n locations
gagacgagaagctanaggtgggatagctcctggatgtttctaaaacggcagggctagaaactaagactcaaaactgagaaagcgcacaccgctacaccaacgttcgaaatgacagaactacagatcaaatgagattgcgcatgttgctcgcgccagcgacgacttgcagcctgcagaccgcgccctcatcgacgacagcgtcggccaccttgatgggatgatacttttctccccatggaacgtcgcaagcatcgcttgatgatgacaatgacatgcttctgccaacggcgaaccaagggtttcaagcgccacaccacagccggaaataaacgttccaaagcccaaaccctatgtgcctaaaacca

SEQ ID NO: 202499 - DNA, 354 bp, Glycine max
aataaggtcggatttgattgtggcaattatagaactgctaagatctttctgaaagcttggttttcctaagtcacagataaaaccaattgtggagaacccgtgctctctataaatggaagggcttctggagttagtacagtgcaccattgagtgtcgttgaaaagaggtgatatagttcataatctatattagactttacattgttggtttataataggaccagaagaaacctgcaattttgctccatcagctggcaactgtctattttctatataaactacatgggatttggcttcattgtaacaagatttcccaaccactctgcttatttcattcaatcttaccactcacaag

SEQ ID NO: 202500 - DNA, 375 bp, Glycine max
tagcctcatttcttgctataaattcagctttcatggtagatgcaacaacaattgatgcatacagaatcgcttccatttgttttcgttccatatcatttctaggacattgtgtgagactaaattcgtctcttttctaaattggaataggtgatgaatacctttccatcatgaatctctctagtactttattgatatgttttttgagataagcctaacaatccttatgatctattatggaatatttatatccatatcacatagcttgcctctctctttttcttttcctccattgaagcttcctctctaaacttcttatccaaggcaccctcttggtggcgaagctccttctttcatggcttattccctagtggatgg

SEQ ID NO: 202501 - DNA, 474 bp, Glycine max
cctcctcttccatttattcttttatcccctcttccttggggggccccttgccccttttatatcgcctaacacgcgctcactgcgggacaacaaaacgcctattctttaacggggccctagctcttgccttgactgataaaccacttttagtgaagcattgaattgatccctgttttacaaagtaacaaaaaatcggtgccaatcaaaacttccacatctatcatgggtggaaaggatgaatgcttgaataaatgcatatgacacagatgcaatttatgaataccggagcccgggaaattgtctccgtatttaagaaagtggcaccgacccttcgttggtttgccaaagagagggggatcaaaacagaattcggtgtgaagcatatgcacaaagcgcaccacgggaatgtacaatatgacaatattcacaaatataaccaaaaggtatgtgacacttatgcatggctgggaaaat

SEQ ID NO: 202502 - DNA, 383 bp, Glycine max
  unsure (1)..(383): unsure at all n locations
aggtactgccatttccttagagtctattatttttgtaggntgtgccatgttctcagaatgtgcaaaatcagaatgctcacaatcgagggctttttattattatgctcaagaactcgatgttcaaaatcaccaataacagaatgcacacattcaccatcaatggaatgctcagaatgatcaaaaggtataaaatgatgcctaactaatctgtgaaatgtcctatatatctcacgatcaaaagggtgtaagtcagatggattgcctctagtcatacactacattcagcatgcacacaactagttgccttgtcatgttaataaaggtgtaggtttgaactacagctaccctcaaatgatatccaaatgacttgagatctgcgagca

SEQ ID NO: 202503 - DNA, 332 bp, Glycine max
  unsure (1)..(332): unsure at all n locations
aaaaaaagccacgctnggaaccacctacagaggagnaatttttgcccgcngcgacaaaggcccgaaaacaaaangccccccccaccatttttgttgtaccggaacacggtgactcaaccggaactcaacaagcacagatatcaatgggacatggctcgtaaggcgcaagtatactcttactagcactaacgtcaacaaaaaatttctatttgctagtcaatcatcagacaatggaacaaagcctaacaagaatcgagcccataaccaaaacaaacataatgagaccgccaatctggtaactataacaaaataacccgggaagccgattatga

SEQ ID NO: 202504 - DNA, 390 bp, Glycine max
tggttcaaggataaaagggatgccccacattatttccatgacacaaatgcaaaaatgatgatttggaaactttatgcaaaactggtcatgcatgcgcctatgcggacgctcaagtgtcaaatttctatggtcgggtgatgctaaggttcaagattcatttcctcttatttaaatcaacccaacgtttccaaaatatgttcttttatcaatttgtgcattcatccgagtccattttgggcgtctgggaaaatcttcacagcattcaccctttaagagtatacacattttttcaaaaactagctatgatcagcgaatttttctttttaagaaaagtttgaaatcatctcttttcaaagcatggtgattttaactagacaacttatttctttt

SEQ ID NO: 202505 - DNA, 412 bp, Glycine max
  unsure (1)..(412): unsure at all n locations
tcattctacaactggaaaagaggataagatagttgcacanttgagaatgcttcctaacaaaaattttcatgcaggtggaccttcttctagaaattctgacttacaacagtctcctatctctcttccattcccacctagagcaattccaaacaaaaagatgaaagaagcggaaaaggagatctttgagaccttcaggaaagtagaggtgaacatacctctgctggatgccatcaagcagattccaagatatgccaagtttctaaaggagctgtgcacccacaaaaggaagttcaagggtaatgaaaggattagcatgggtagaaatgtgtcaacattgataggtaaatctattcctcacattcttgagaaatgtaaggacccatgtactttctgtataccttgcattattggg

SEQ ID NO: 202506 - DNA, 388 bp, Glycine max
  unsure (1)..(388): unsure at all n locations
tgcaagctctaaaaagaatagagatgcattgttatgttatcattatngattaactaacactattatgatggatgaaactccagagatttacaatgcacccataattgatgaggttgtccatcacgacaaagaacctgcgtccatgcaatccataatctcaaattaagctacatcaagaaaaaagggtgaacctgatgttgtcattgtctattccaccagctcctttgaactatgcacctcatactgttgtaaccagagatcaagtgcaagaaaggattaggcaagccatgaaatcttttgtgaatgccaatgacaagaaaacgagcagctcatgctctccatacaaaatgctataacgacacagtttctcaaccttgggtgtattctt

SEQ ID NO: 202507 - DNA, 351 bp, Glycine max
taccctcggaagccaaataaaaggagagaatgaaaatttccaatccaagaaaaaaaagagaggaaaggaaattcctaaccaaagaatgggagaaagaaaatagaaaagaaagaaaattcccaatcaaagaatgggagaaagttaagaaagaaaagaagaaagctcctggtcaaaagaaccagaagaaatgggccgataggtctttacaccggacagtatctgaacaatatagaatcggcacccaatgaacaaaaagaatgaaaggaaaccatgacctaaaatggtctttctcctttaaaagcaaccaaaatagtgcgctagcgacttgttcgcctcgcgcaaaaccaaaca

SEQ ID NO: 202508 - DNA, 364 bp, Glycine max
  unsure (1)..(364): unsure at all n locations
actcagctttcggagagaacagggacatctcatggatttcaaaatgatgtcgatctagncaaggtcttagagaccatacaaggttcctaacgattaccaaatatgtggtctattaagactatcatatgctgacaatagccgagaagcccatgaatctcttccggggcggagaaagtgactgccatcgccttggccttggctaacaatcggggaagttcttgactcccgttcaaggtaagagcaaaccgatccatccacatggttgcctcttgatgtaaagagacgatcacccttcctctatactatttatacgcggatacttgggcataatcgtccggaatcctatgctcgtgggccgcggcta

SEQ ID NO: 202509 - DNA, 433 bp, Glycine max
tgcaagcttaacaagcctttcacaaacgtcgtgacagagaactattaaaaggtataaacctacgaaaactacccatgatatctcccaaaacccaatacccatgaacatttatgtgagaagaagtctacccaaacctgaaatctgaagtcccactatgtagaggtgcactttacgactccgaaaatggcttcttttcgcgatttggagcaaaaatggtgagcaaaggttggagctttgatggagcttcaatggtgaggaagaaaaagggaatatcaacgtgagagagagagggagagaagcttctgaattttcttggctgagtgagtaaggagagaaagaacatggcttttagcttaaaaagactctttcttttcttttcttttaaaaagatgggccacatgtcttctttgagtgagcaaaaggggcccacttt

SEQ ID NO: 202510 - DNA, 413 bp, Glycine max
gagacgcatgtgatcctttggcatcatcaaaacatcagcttgattctttgtctacagctcacactcatgagtggtaagttgaggtcaaagtggattggtttttttgcgggaactaacatttttccttatggtacagttgagatcaaaagtgaatccacagataagagcttcaagctcaatggacaccggctgaaaccattcctcacaaatccttccttagtggatgtcgtagtggaagagacctccttactccacccgacttcttttctgccatgatttagggagttttctttttctatctccttctttacttttgacgcacttgtccaattttattgattgatctgattgcttgaatcttatgattgtgccacattgaggacaatgtgttgtttaagtgtgggggggggggg

SEQ ID NO: 202511 - DNA, 303 bp, Glycine max
cactgagtgactgaacaattctgctgactaaactttgtggcatataagttcttaaccctgcaaagcgtctacattactgtccaatgagattttgcgtacaatctcaaaacttgaggtgtatctttacacggaaaaaatcttgcaaatattccttgtctgagaaccttcccacagctcgcttgatcttcttctacgcagatttttctttactataacccctatatgacgttcttcctctaaaatattaagacttctatttttgaggatgtctctatgttatactactccctaatatgcatccct

SEQ ID NO: 202512 - DNA, 365 bp, Glycine max
  unsure (1)..(365): unsure at all n locations
tatactcaagctatgcctctctctctctctctgtctctctcacttgagcgctacttaagcatataattgtnttattctcctacctcatattcttacttgagggtcagagtcctctatnttgcaagtttttttctttctatctaatggcatctntctaagcacgacgtgtgaagtctgagaccccatttcagccacatctaccctgacgtgtcacggttctggattttggcaagaacatcatttgtgccaatatttnntgggcttaactgctttaactagaatgaccaagtcccatgtcacccttgccgatggatcttaagcttggtatatgtgaagaaagaactgcagctatgactgattctagc

SEQ ID NO: 202513 - DNA, 359 bp, Glycine max
cctaaacaggcgagctcctgacagtcaacagataaaaggaacaaagaccacaaagcaaggaggcttgtgtggtggctggccaactgtgaactttgactgatatatgggatatggcctctggtaatcgattaccaagaggtgggtaaattgattaccacgcttacaaatgaagacaagagactaagatggtctctggtaatcgattaccaagggagtgtaatcgattaccacgcttgaaaacgaggtcaagaagctaggagggcttctggtaatcgattaccaagggggtgtaatcgattaccaggcttataaatgaaagcagcagggtgtggaagcctctggaaatcgaataccaagct

SEQ ID NO: 202514 - DNA, 404 bp, Glycine max
aatctgtctactgactaacaatgctatatgcaagttcattttcttgttctttctttgactaacatacacacttgctcaaactcatgaaaaagaaacacaattttcatcaaatcatgcactcaattcaaaataaagacatacacccatttttcacaaaaagataaaagtgttttacttccatgtcatcaaaaacaagtcaaactattcaaaatgcttcaggatgatcaaactaactacccataaataaaactagcaatgtatgtagacataaaggcaatactatactgaaaccataaatataataataaaccaaaaagcaaaaagtatcatcaagaatcaacaatctcaacagtgtctaaactggggaatcagtgagagcaacaacttccccagatgacgaatca

SEQ ID NO: 202515 - DNA, 264 bp, Glycine max
aactggcaacgccttaaccacaacaccctgaggggtggggtgacatatgtctctttctgttccccgtccatgccaagcaatttccattcaagataagggagagtctctaaaactatgaaagtctataattatgaaggcttaaacatataatcttgagaattgggcgcgtaataccttatacaggttagtgggttatttgaatttaccctctctggaatctattaataaacattactatcacttggactggtctatgcctataaa

SEQ ID NO: 202516 - DNA, 432 bp, Glycine max
  unsure (1)..(432): unsure at all n locations
agctagtgtntctctcacagataggacatgcatggtgttctttggcattatatccacttaaatttccatatgttggaaagtcattaatagtacaaaacaccattgaccgtaacctgaaggtctcctacagattcttatcccacacatcaaccctaacttcccacaattttctcaagtcttcaatcaacggagagagatacacatcaatatcattccctggctaccttggacccgctatcaacatacacaacatagtgtatttttggttgatgcacaaccaagtaaggaggttgtaaatcatcatcacaataggccatgaactatggtttgagcttaagttaccaaaaggattcatttcattcgaagcaagaccagtccttaagtttcttgactcgtcttcaaaatgtcgatacagacgatcaattgtcttca

SEQ ID NO: 202517 - DNA, 410 bp, Glycine max
  unsure (1)..(410): unsure at all n locations
tcagctctggacagtatatganaactggatatgtagaaatctccgactttttggcaacaaagaacaaggatatatattaactgtgagttaatacaagcctagcgcaaaatgagctattgttattacttatacctattctctaagtgatctttgaagtttaaacaaacacttttgagatggctattttcaatttattctaaaacatcttactccataatttaataacacatacaacaggtcttgtaagctatatttttgcttcctgataagtgataagctatatttaatacccacaacaagctcaaaataaataaatactgaaaacgaggctatccaaagaagaacttgacaattttggaagagttaaattcatgtaaaatatttcttggactgactgtctttttcttcct

SEQ ID NO: 202518 - DNA, 389 bp, Glycine max
  unsure (1)..(389): unsure at all n locations
gcaagcttaagctcattntccttaagccgcgatgagcagagtctactcatccttggtcgtgattgaaagagagccttcttgtcttaccacgtgaataacctcgacaagggtgggtattccttaatggattgtagttctcatttctgttgctgaatctgttgttaagcttatcgccaaagttgggttattacgttagtttactctgttgtgacttggttggtgatgcaaatggcaagtgcatggttaatgcagctgtgaggattcatcagttccaggaagttcatttttcgtgaaggtatttccagtcttttatcggtttttattggtactgatgtacttggttcaattgccctggtagttattggttggatgttatattgctcttttga

SEQ ID NO: 202519 - DNA, 389 bp, Glycine max
actcactttgagtgaacaggaccactatttatttccaaaggaagtcttatctagtcaagggctgagagaccatacaagtttcctaacgatttctaattatgcgggccattatttctatcatatgctgacaatagccgagaagcccatgaatctcttcgggggcggagtaggtgtctgccatcgccttggccttggctaacaatcggggaagttcttgactcccgttcaaggtaagggcaaaccgatccatccacatggttgcctcttggggtaaagagtcgatcacccttcctctagcctctttttccgcatatacttgggcatactcatccgcgattctatgctcgtgggccgtggctagacccaactcttcttggtacttggcgatg

SEQ ID NO: 202520 - DNA, 449 bp, Glycine max
  unsure (1)..(449): unsure at all n locations
ttttcatttctcgcacttaagcactgagctgcagctatatatattgtatgctcgacatgaacattgtaagctctcgagaaattcaaatggtcataactnttcacacggatgtccgattcgggcaaatcacatatcgagacgctcataactaaacaacggaagctatagagaaattctaatggtcaaaacttttcacacggatgtccgattaggcgaatacatatcgagacgctcaaaattgaacaacagaagctctcgagaaattcaaatggtcataacatttaactcgaatgtccaatttaggcgcatcacatatagtgacactcgaaattgaacaaccgaagctctcgtgaaattcaaatggtcataacttttcacactgaggtccgattaggcttataatatatcgatatgctcgaaataaacatcggaactctccaaaattcaat

SEQ ID NO: 202521 - DNA, 346 bp, Glycine max
gagtgtcactatatgtgatgcgcctaaattggacattcgagttatatgttatgaccatttgagattctcaagagcttccgttgttcaatactgagcgtctcgttatgtgatttgcctgaatcggacatccgtgtgaaaagttatgaccatttgaatttctcaagagcttccgttgttcagtttcgagcctctcgacatattatgcgcccgaatcggacatccgtgagaaaagttatgatcatttgaatttctcgagagctaccgatgtttaatttcgagcgtatcaatatattaataagcccgaatcggacatccgtgtgaaaagttatgaccattttaatttcac

SEQ ID NO: 202522 - DNA, 350 bp, Glycine max
tccttattttcataagggaactctatcaatagacctccaatctttaatggagagggttaccactactggaaaaccccaatgcaaatttttattgaggcaatagatctaaatatctgggaagccataaaaatagggccttatatacccaccacagtagaaagaatttcaatagatggtagctcattaagtgaaagcataactatagaaaaacctaaagatagatggtctgaagaggatagaaaacgagtacaatacaacttaaaagccaaaaatataataacatctgccctgagaatggatgaatatttcacggtttcaaactggtagagtgctaaagaaatgtgggacac

SEQ ID NO: 202523 - DNA, 420 bp, Glycine max
actcagcttaaggcacataacccaccatcttctaaagtagaacactggtaatgtgtctactatcattgttatcatcttcctttccatcattgggacttgagctacaagatccctctatttttgggcgtattctttgaaagattcatgctcattcttacacatgttttgtagctgcattctattcggagccatattagaattgtactaatattgcctaatgaaggcaaccattaggtccttccaagaacagactcgggaaggttccagattagtataccaagtgatggctgccccagtaagactttcctagaagaaatgcatcaacaatttttcatctttcgagtatgcccccgtttttcaactgtacatcctcacgtgattcttggggcaagtagttcccttgtacttatcaaaatccag

SEQ ID NO: 202524 - DNA, 450 bp, Glycine max
  unsure (1)..(450): unsure at all n locations
taagtcacctgcggcatgcagctnaataatgtgtgcctaactagcaaaaagtggttttaattatatttgcctacaaaggtggaaaagtgctttgaggatgtccaccataaatgagtaaccaagcaactctcacataaaagcacatcaccacaccttttgcattgccagtcatatgcaatattaaatttgtccaccagttcattcattaaactacaccacgacaaaagataaaaaaagaacatctattaatagcacaagcattcaaggttacacttttgaactgaaataatgttcatatttcttttcttgaaaatatatttcaacatcttgggagacatggagataatatgactattgaagggctagtcaattcaaactaaccggtcaacattttttatatagcaaaaagtgaaaaaaagtgttaagatcattagacaagataaaagggag

SEQ ID NO: 202525 - DNA, 409 bp, Glycine max
  unsure (1)..(409): unsure at all n locations
nngtcgaaatgccatgtttgngtgagttagacatacccactctgttttatggttnttgtgatgatgtttgtgatgtttatatgctgaaattgctgatggaaatctgttatatatgaagggtagaactaacccaaggttagaaagtgagaatgtgatgttatgagtggaaaaagagtgagactttgagagttggaaggctaagtctgaattctgtggtaaatggaggttaaagtgagttaatactagcttgaaatgtcatttangacatgtgagaaaggttaggctgagctagagagaaaaacaaatgaccaaagtgaaccaagagccaattctagggcaaattgggtgttgaagagtcaaattttgatttggtggaatatttggtgtaaattcagtttgagcaagttta

SEQ ID NO: 202526 - DNA, 407 bp, Glycine max
tcttagtctcagctgatggagatgaattcatggctacttcatgcactcttctaatgacaatagcatcacttctggcactaaattgttgggagtttgaagccatcttctcaattaaatttctggcttcagcaggggtcatgtctccaaggactccaccactgccagcatctatcatacttctctccatgttactgagtcggtcataaaaatattggagaagaagctgctctgaaatctggtggtgagggcaactggcaaataattttttaaatcgctcccagtattcatataggctctatccactgagttgtctaatacttgaaatatcctttctgatggtattccagatactcatgggatacttccttgcacataaacatgagtctttgaaggtctttgaaatattt

SEQ ID NO: 202527 - DNA, 379 bp, Glycine max
  unsure (1)..(379): unsure at all n locations
cccttatagtcctctcacgaagaggaggttgtgccatgttctcagaatgtgcaaaatcagaatgctcanaatcagaatgctcaaaattataatgctcaagatcaagatgttcaaaattaccaataacagaatgcacagattcaccagttgtggaatgctcaaaatgatcaaaaggtataaaatgatgcctaactaatctatgaaatgtcctatctatctcaggatcaaagggttgtaagtcagatggattgcctctagtcatacactacattcagcatgcacacaactagttgccttgtcatgtaaataaaggtgtaggtttgaactacagctaccctcaaatgatatcaaaatgacttgaaattttgtgagcaaccct

SEQ ID NO: 202528 - DNA, 175 bp, Glycine max
aggagaaaagccacgggggacacgaaaacttggggaccccaagtgatatgctatcgccacaagaccaagctagaccaataccgacccaacccgggcatagacggagaaagagaacctgcgaagtacctaagcaggcgagctcctggtggcggcagaaaaaagggaaacaccacca

SEQ ID NO: 202529 - DNA, 384 bp, Glycine max
catgcctaacttccttgagcggcatttgtattggctggtatcttggttgctgcatcttactacatttgatatttgtattgcattgggcatcttcatagtgtgtgtgaaaaaaagcttttaagttagaaaagtttctttagaggcaaaaactctctgttttaatcgattacagagttgtcataatcaattacaacaagttgtctaaagcttaaagagttaagtctcgtatttgtttaatcgattacaacagtattttaatcgattacactgttggttgagacaatgactaatttattcaggagtctctgctttaatcaattaccaagtggattaatcaattacttctcctttgtttagtttgtcaaaggtgaacaagaacacttt

SEQ ID NO: 202530 - DNA, 355 bp, Glycine max
  unsure (1)..(355): unsure at all n locations
cagagcggcacccggagatatgttgcggtggtcaggagaccttgtggacgccacgcggggtgttattgcccaaaaccaagctngaccaatcccgacccaacccggacatagtcagtcagtgagaacctgtgatgtacctaaacaggcgagctcctggcagtcaacagataaaaggaacaaagaccacaaagcacggaggctcgtgtggtggctggccaactgtgaatcttgtgtgatatatgggttgcggcctctggtaatcgattaccaagagtaagtaatcgattacaaggcttaaaaatgaaaacaggaggctaagatggtctctggtaatcgattaccaccgggtgtaatt

SEQ ID NO: 202531 - DNA, 320 bp, Glycine max
tcatctactcgataaagtatgcgttgattggctaaactaccatcaattcgaacgtctcgatttatgacgggactcaatcagacatccgagtaaaaaactattgtcgcttgaattggctcagaacttcaacattcaatttcgagggtctcgatatattgcgggactcaatcacacattccattaaaaagttattgtcgtttgaattggctcggagcttcaacattcaatttccagccgtctcgtatatgacgggactcaatcacacatccgagtaaaacgttattgttctttgaattggctcaaagcttcaacattcaatt

SEQ ID NO: 202532 - DNA, 354 bp, Glycine max
tatatcgagacgctcgaaattgaatgttgaagctctgagccaattcaaacgacaatatctttttactcggatgtctgaatgagtcccgtaatatatcgagacgctctaaattgaatgttgaacctctgagctaattcaaacgacactaactttatactcggatgtctgattgagtgccgtaacatatcgagacgctcgaaattgaatgttgaacctctaagccaattaaaacaacaataacgttttactcggatgtctgattgagtcccgtcatatatcgagaccctcgaaattgaatgttgaagctccgagccaattcaaacgacaataactctttactcggatgtctgattg

SEQ ID NO: 202533 - DNA, 348 bp, Glycine max
tccttcaccaccatacctaggtatgtttccgctccttcatgttgtcttctccttctcgctgacttcttcttcatctaagcattcctgctctctttgttgtccaattaccttgaatctgtctattctccatctgagaatccgctctgtctaagctcgaacatcgtggtcgtcgcactcaagcatcgcgacaactctgtgcttcttctccttcaccaccttacctaggtatgtctcgtctaatcctgtataaaaatctgattgcattcatgtatcgcacacttagtgaagtaaacatggctagggtatttcataattaactcgagcatcataattgctttgtattcatta

SEQ ID NO: 202534 - DNA, 420 bp, Glycine max
ctcagctttaccactgctcttccttcccgcgatgcttcttttcatgtccgccttatgtgggcttatagcctaaaccatacttcccacgatttcctgtggcatttatcaggctagttatgctgtcgttgtctttgcctaaacccatttcgggttcataaccgttccccaacataactcgggccatcattactgctacatcggacagacaaggctgcccagagagggagtccacggaggaaatgctgaccacctcaaaagactggaaagcggtttctaacgattcttctgcggcttccacataaggcatagaggatgggcaactcaccaggatgtcttcctcgcctgacacgatgaccaagtgcccctccactacgaatttcaacttttggtggagtgtagaggacacaactcccactgagt

SEQ ID NO: 202535 - DNA, 353 bp, Glycine max
aagggcatgacccttcgaacatctcgagagcttccgctgttcaccccccagcgttttaatatattatgcgcccgaatcagacctccgtgcggaaagctatgaccattagaaaatgccgacagcagccagtgagcaatctcgaggccccccccaatcaagagcctgaaccggacatccgagtgaaaagctacgaccattctaaatgcacaagagctcccattgctccacttcgaacggctccgacaattaagcgcctgaaccggacatcgacgtaaaaggtacgacccttcgaacatccgcacagctacacgtgagtcattcggagcggcccgacctatgaagaaccccgaacc

SEQ ID NO: 202536 - DNA, 412 bp, Glycine max
  unsure (1)..(412): unsure at all n locations
catgcagctngagaatatgagagacggagcacacgtggttctatgtggcggncgggcgatggtgcacaacaagctntccacatccacaatgcgcgcataaaccgcaccatggcctgttgcccaccttcaacagagctcacgtactcccacgtagaccatatcctcgtttgtctcaacaccggggccccatcaatcctccaagctgcccaacatccaagcaaaacaacattcacacagcacaagctatcacagccaagcaaaacaaagcaaaggcagaaaactctgccaaaacaccagccaacaatcacagctgttcccactcagagaccccaggaacaattccttcaaaccaatttgataaccggtggactgaccccaaaattttcggaaatctatagggataaccctacat

SEQ ID NO: 202537 - DNA, 401 bp, Glycine max
cacagccggatcgatgcacatatactgtaatcgatgaccagagcagattttttgtaaatattctcaacagacacatctttttatgtgggtcatgaatggctatcaaaggcctatatatatgtgacttgagacacgaattcgctaagagttctttggaacaaaaaggtcttatcctcttaaaaagcaaaatcgttatatcctcatacaaatgccttggccaaattacttgtgattcaataaggaattatgtgagtgctcaaattgctcaatctatctctttcaagagagaattcttcttttcttcttcctcattctgaaaagggattaagagaccgagggtctcttgttgtgaaagaattctaaacacaaaggaagggttgtccttgagggttaaaactcga

SEQ ID NO: 202538 - DNA, 428 bp, Glycine max
  unsure (1)..(428): unsure at all n locations
tctaagtcacctgcggcatcaagcttaaccagagggaggcgattcaagttcttttatgtataangacaatgcgtacaagagtgaattgcccagtgagtataatgtgagtactacatttaatgtgtctgacttaaatctttttgatgtagatggagaagccgatttgaggacaaatccttttgaagagggagagagtgatgaggataatgcaaggaataaggacaatgaacctttataaggacttggaggacctatggcaagggctataacaaagaaggccaaggaagttcttcaacaagtgttaaccatgctatttgaatttaggcccaagttacaagtggagaagcttcggattgtaattgcaccatgttccaagacaagtagagggtgccccttttgttgaggggttttattaacattctgtaagt

SEQ ID NO: 202539 - DNA, 398 bp, Glycine max
  unsure (1)..(398): unsure at all n locations
tcctgcgagaacaaacatgtagaagtttgttgtacaagataacgctnatcttaacgaaaaaaatgtcatgctaatccctctgatcttagaacgatctcatgtaacctatttatgcacacgcatatgtgtggaatatcctactatttatatcaacatagaggccatgcaacacattctaattgtcatacatatatatgcatttgaaaagaacatacattctcacgcccaaggcattgcgtcaaaactcacacttaattatatcctaaacatttgctattaaaaactaactacacacatttggaatatatatcatacaaattttattgtttctgcatattggaaagctaattacatcctgcacacactagcattcaaaaggggattccatgctatcatac

SEQ ID NO: 202540 - DNA, 345 bp, Glycine max
tgcagctctatatagcagaccatgtatctttatctcttgttgaggtctattcagaacattagagttcatctctgttatcttagtgagagtgattctcctaaattcttgagtgattcaagaacaccctggctgtatcaaaggactttcacaacctttgtgtgttgcccttgccagacagagagatcctttcctttctttcatctgcaccttggtctttcaaatcacaaattccagataaatccactttgtgcctcaaaaattatcctcgtggccataactcccgttttacgcactcaaattaagggattcttgagcctaaattgaatttcaagaccagaacctttc

SEQ ID NO: 202541 - DNA, 405 bp, Glycine max
tctactagccatggtggaacaaatgtggaatataacgaagatgatttatcagagaacaattcaacatgatggatgatatggttgcagatgctttaggggttgaattgttttactgtgatgatgctgaagatgatcaagaggaacaactcccgaatgagaaggcgcatagattttaccaattgttgagtgaatgtaatacaccattgtatgaagggtcttcgcactctaagctatctatgtgtgtgtggcttttagctcataagtcgaattatggtagtcctgatgctggtgtggatgatgttacgaagatgttgaaggccgcgactctggttaaagataatctgccagctagctattatgatgcccagaggttggtgatgaagttgggactagcaattaaaaaga

SEQ ID NO: 202542 - DNA, 297 bp, Glycine max
cgagtagtaaaataccaacgcattgacttaagaatgcttaaagcatgaaggagttatgaatctgtctctaacaaaaaatatcgtcaactacgagatctagccttttctatggaaaaaatatctgccgttggcttcgcaaaaaaagctataaaaataaccacattgcaagcacatgctccctaaaaattaagatcatcgctgatgaagaatagccacttccgactaaatcgaggcatcctctagaagccccatctatgttacattagacccaatgcactctcgcttgcctccaaaaac

SEQ ID NO: 202543 - DNA, 334 bp, Glycine max
ttcccttaaaatgcacgaagatagatcactacgagaacaatcggatttgtttaataaattaattctagatcctgaaaatatccatgtcactattgatgaagacgatcaagctctggtattggcgtgctctttgcctaagagttactctcatttcacagagactctattgtttggacaagattctatttctcttgaggaagtgcaggctgctctgaattccaaggaattgaatgaaaaaaggaaaagaagtcctctccagtggtgaaggctgcaacaagagcaagaccttccgaaagatagcaatttgaaacaagaacacacccgaaaatagaaa

SEQ ID NO: 202544 - DNA, 385 bp, Glycine max
  unsure (1)..(385): unsure at all n locations
ttttttaatgagaacgcgaatgggaagaaaggcttttgccangttaaattttttgacccttttgctgcaatgcttgccaggaagggatgaatggacattttttttattttaatattaattttcatttaaatttaaatttaattaaattaaaatatgatgtcatgtctgatgacacgtggtcaattacatgtcacacttaatccgacatggcattacatgtagcttgtcgacgtgtcaagttaacggtcacatcaactgttaataaaccccttctaacgacagggatctcanacaaaaggttttaaattttagagatctatctcaaaaaaaaatttatgaggaattcaatacaaagttcgagtattataagggattaaaaatattt

SEQ ID NO: 202545 - DNA, 414 bp, Glycine max
agctagtcaaggtaggctagcttagaaaaaccctctatgaatctacggttgtattctgctaagccaagaaagctcctaatctcaaacactgacttaggactctcccaactcatcattgtctctaccttggaaggatctaccgctatccctcccttagatataacgtgccctaagaagctcacctcctctagccaaaaatcacacttggacaacttagcatacagtctattgtctttaagggtttgcaacataactctcaaatgctcctcatgttcctctctcgtcttagaatacactaagatatcatctatgaagaccactacaaaactatctaggtaggggtgaaagatcctattcatatagcccatgaacacaccaggggcgttggtcacaccaaaaggcataaccaagtac

SEQ ID NO: 202546 - DNA, 356 bp, Glycine max
ttgttgtgagagaagaccaaaaactcgattgggctgaccttttctttatgactactcttccaaaacatttaagaataccccacttatttccacagctccctcttcctttcagggtctcttcccctctctctacgaatacatgttttgttaaaataaatttctttgtaagtactaataggataagaaaataagaaataaaattaaaattaatttctgttacaagttaaaattaacttatgtatgagataattcggaaaaattatcttatattagttcattgaaaaggtgagttttaacttatacataaactaattttaagtcatgagaaactgatgttattttttcttcatattttc

SEQ ID NO: 202547 - DNA, 401 bp, Glycine max
gagatactgcctgctctgagaagttaggacagatttgttctgtacatgcaatgggctaatggcaatgcagagttagataggttgagaagatcttgcattgcttatgagtatgttcaagcgaagaggattaaagacaatgctgcttctgaggtggaagaagtgaaagccaggatagccgagattgatgacgttgctaagataaataaggtggaaataaaggaaatggagaccaaaataactcagttgactgctgaaaaggaagcaaacatgggtggagaaatgaaatctctgtccgagaaggtagatgcactttcccagaatcttgtgagggagacatctgtactaaataataaagaagacactttgaggagtgaagaagccaacaaagcatatgtatgtca

SEQ ID NO: 202548 - DNA, 266 bp, Glycine max
tgcaagcttgggaattgcattgggcatttatagtgactatcctatgctgtctctacatacacaaaacagccccaccatcccaattctgcaagatcacatctctatatcattggggcatgtcaccgagcacttggtgagcgcatgtgttggacataaattgcaagaggatgtggacactgcggcttgccccatagctttacaacacagcattacgcctaacgccgtcgctcccgagctcctcaacctgagaaaaccaactttaaaac

SEQ ID NO: 202549 - DNA, 234 bp, Glycine max
tcttatttatcatgctatcatggaacttcttggtcttttctttgtagaactcggcattctcatacgcttctatgtggatctcatctaactcactcagttgcaactttctttcctcaccaacttgatccatagagaagacggaggtctttcctgcctcagaacgctctgtggcttatctcaactggaaaatgacatgcggtcccagagacgaccccgatgaggccaccttcctat

SEQ ID NO: 202550 - DNA, 398 bp, Glycine max
  unsure (1)..(398): unsure at all n locations
tgacatgacaactcacaagtagaaacatttatcttctaatgagacataattacattataattgcacattataattgccaaaaagcaacgagcgggctaatatgatgtttgatcaagtgggacaactgaaattatgctgacaccaggctgctgaaggattcatataaactatgcattctgttntctgcaggctgaagagcgtgcagtcttgaagcattttaattggccccagaggaaagctgatgccatacgtgaagctgcagttgagtatcgcgaacttaaatcattagagcaagagatttcctccttcaaggaagacccacaaattccatgtggagcttccttgagaaagatggctagcctattagacaagtgagaaaaacaacaaatcttgattca

SEQ ID NO: 202551 - DNA, 314 bp, Glycine max
  unsure (1)..(314): unsure at all n locations
atcggagagaggcgcacaaactgtctgttctttgcaccaggcacacattttgatgcgccaaaggagaaagccattattccccacgaattactcacacctaattgcgtagaccatcctcttgatgaatgctgcacacactgcacgaacaaaaatagaaaggtcgaactctaatgaccgagagcnnccacgaaacagatgcggaactaacctgaccccaagctctaataccaatttggtggcgctaaaactaagaacatatgccaataaatgataggaggagaagagagaccacaccacactggagatagcatatg

SEQ ID NO: 202552 - DNA, 268 bp, Glycine max
  unsure (1)..(268): unsure at all n locations
cacccccacccccccccccccccccccccnttgtaacgtgaaaacccccaagacgagagcagcgcggggagccccccatattgccgccangaaagccggaggcacccaaatcccgacacccaaccaaagaatgcagcccccgacaatccaagcccaaaaccacagtccaggaaaaatgaagaccgccgggcacaacacacaaaaccgggaagaaaggcaaagaacccgcaacgcaaaaaagaagacccccgcaaaacccgacacccaa

SEQ ID NO: 202553 - DNA, 417 bp, Glycine max
tactcaagctgggtggggttgatggtgacccgggctgagaggaacgaggagaatgcttcttatgtgcacatgagctaaatttaaaggtgcacaactggggatggtgtgcttatgcctggcttgtggaaatgggatagttgattggtgccatcgcccgatcgccacctagtaccacatatgatgggtgccccataatccaataagcttggtgtgagaaagcatggaagagtcagtcttcctacttttatttgttgaccacagagtggtacctggagatatgtcgcgggggtcaggagaccttggggacgtcaggtggggtgctattgcccaaaaccaagcttggccaatcctgacccaacccgggcatagtcaatcagtgagaacctgtgacgtacctatgtaggcgagctcctggca

SEQ ID NO: 202554 - DNA, 335 bp, Glycine max
taattgatgcatacactatgactgagcactgcttaacagtagccatgtgtgtcattgagaaaggaacagttcatctctcgcttcaagaatgaataaggggatacaacaccgacaccagatgggtggtggatgaagatccatgattttttattatttgattgaatattgtatgactatgaataacatatgccttttatttcgtatttgactattatgtttgatcaaaaacaacactttggtcattacgcaaatataattaggaaatgttacatgcattatccatggcattacaactatgttagttacaaacaagtattcaataacaaaaatgttca

SEQ ID NO: 202555 - DNA, 360 bp, Glycine max
agcacgaaattgaacgaataaaagaggtagagaagtggaactttgaagcatgtctcactatactctcattcatcaaagttacaacaagtgttatacatgcttctatttatagactaggtagcttccttgagaagctttcttgagaaaacttccttgagaagcttctttgagaaaacttccttgagaagctagagcttagctacacacacccctctcataactaagctcacctccttgagaagcttccttaagaagattcctaaagaagctagagcttagctacacatacctctctaatagctaagctcacctccttgagatgagaagctagagcttatctacacaccccctaatataact

SEQ ID NO: 202556 - DNA, 355 bp, Glycine max
actgagcagcaactggaagctacagagagaagaaggagtatatttttttcagaacccagacataccatttttaaagttgaaatgtttttcgccttctggggtctccctgcctccaattaagacctcatccgggatgaaaagatcttggaatagcagttccttcagcaaagaattcagggtctgaaaaagatctgtgaattgatttcatttccattgtgagtcaaaatcttctcttatggccccagcagtttttacagggacagaggatttctccaccaccaatctgtcactcttggaaacatcagcaatcaagcgtgctagcactctcccaataagtcaaatctggagcctttcc

SEQ ID NO: 202557 - DNA, 367 bp, Glycine max
gccagaacaacaacatggaatgtattacacaccgccggcattcacccaagaaccgcctttattccgtcgatgtattcatacccacatgattttcaaccagggtacaatatggcaggcatatttgggtcctctcctccttcaacgggaactccttcatttacccaaagtggtgaactatcgaccccaaatgccccacttggtggtccgtggagtcgcaggtgtgagaaaacacattatggatatgagggatctagcggcttaacttaagtcactccaggttgaaatttctgagtccttcatggtgcacctgattttgaattcactcccatcacaagtatgggcccttcaacatatcatacaacgcaca

SEQ ID NO: 202558 - DNA, 375 bp, Glycine max
  unsure (1)..(375): unsure at all n locations
ataagagaaacacataggtttaagttttcttatatctgcagaagagaaaagtaatttatgtctagatacaacttaagtgaactatgttgaggaagacttaacatcaacattgcttttgcaatctttgcagaaccattgatcattcttagtcttactaagatacaggtaaatttgcatctttcttcaaatatggaccagaaataatttcttttgactgaataacaggaaaactaagaaatatgtatccaggaaagatatgaaattaaatgaaaagacataccaatcaacaaaactaacttcagggattctgtcaagctgtttcccaanttcttgctttttcctggatattggcctgtcaggaatgaccaatacata

SEQ ID NO: 202559 - DNA, 409 bp, Glycine max
  unsure (1)..(409): unsure at all n locations
tcttatgcaactatcttanaggcacatatgactgctctaaagtatatatgaaggaaagacaagaagaagcctgcagaggcagataaaagagaagggagttcaaagagacttattaagtcttaaaataatctgccttgtgcgcctgacgttctgcgcaaactttgtttcctgctgactctgtttatgttcccccagttcttttttttcattagtaaagtgatcaatgaatgtgaaggggaaaagaagtgaagggaaaagggaaaaagaagagaaaggataattgaataatttttgcattttaatctttaaaaaaaatccattgaacgggcaaattgtgaaaattttctcagttccccagttggctataaaatgaatctttcaggatatatttcttttccccaattcattt

SEQ ID NO: 202560 - DNA, 406 bp, Glycine max
agcttcaccttcaggacctcctcatagttgttgtatgatataacatgctctattttcatctcccactccaagtaagcctccgaatcattctttcctttaaatggaggaatgttgagtttaataccatcaattctgttttgcctaggaacaccatcattccctcttctcctcctttcttcttcattatgatctctattctccatgtgatccaacctctcatggagcgcatcatctcggtgtttcattaacctctccaaatgttgcatcaaagcttgcatttggaattgcgaaagccccactccatcattaggattagtacctgacatctcaaaccaaacaaatcaaacgtcacaaagacaattatatgttgttggttgaatacctcacccacctcagtgtatcacac

SEQ ID NO: 202561 - DNA, 406 bp, Glycine max
agcagttccctgagtcgagcgcgtaattggcagaaaccttgttcgcataatcatacacaaaggttccatccaagacggtcctgttgtcgcccctgctgtgcgcgtatgttaaattcaacggcctctccccaaccctaaccgtgttcataaactgaaaccgaaagtcctaaaaaaaaacaacctcaaacggcttcagaaataattttttatttgatcttttttaatcttataagtaactaggattcgggaaagtagcgaacctttttgggaacgttgtagtcgacgatgaaggaaccgggtttctcgacggcgagcgccaaaccggtgaagctgggaccgttaatgaaagtggctttcgttaccgaggctcggaacttgacgtcgccggcgttgacggcgatgttgg

SEQ ID NO: 202562 - DNA, 461 bp, Glycine max
ccccccccctttttttgtactacgcgacctaagcactgagctgcaactatgatcatgaataatacgtgagagattataatttctttatatataataaagtgaaaaatgaaaaatagtaaataaggcaggattacggagtttactttttgaatatttaaattattctaattaattttgaatttataattgctaaaataatagaatttcttaaataaaattcatctaaaaataacaccttagaaaattattatttaacgaaaagcacccacctttattaagttagaaaaatattacttaggtagcactaaataaaatcttttaattctaagatatagatattgaatgatcaattatgaatatataataaatttaaatttatttctattatttatacttttttttcattctattggtggggaaaaatatttataaactttgttggtaattaatgtatgtttgag

SEQ ID NO: 202563 - DNA, 345 bp, Glycine max
  unsure (1)..(345): unsure at all n locations
atatctatttaatgatattttatgtgttctttgggctatcaanaccgcattttagtgtgcttttgccttgaccacgtaagtgcatgctttgttaagaatcatccacagtgaaaactggtctgattcttataacttgattggacaagtgatgtaagcttcattggagcttgtaggcctaagatctttttcatcaatggaattctttgcttcttggaaaatgaatggccgcggaatgaacaacgaagagaaagagaggagacctctcttcaaggagaagatgagtctagaagaagttcactaccataagacgtcatggataaaacttggaggagaaagagatgaatg

SEQ ID NO: 202564 - DNA, 390 bp, Glycine max
aatggaaaatctattttttaaaccctcattagcatgtttcttaaatatatataattatttagattcttgataggaagggtttagaatcagtgtaactctataagttttatgtggttggatggtatttgattatacatgtatactgcgtatcattgtttaaatggttaaattattttatttatgaataatttgattttcaagacgattattattgcctggactttagcaaattttcatgatattggtagctattctttgtgcgcatagtgacgtgattggattataaacgggacccattacctctatgcttttctttttctcctttctattcaagtaagtttcataacaactcaacctttaaatggacatactcttatattcaaatattcc

SEQ ID NO: 202565 - DNA, 407 bp, Glycine max
  unsure (1)..(407): unsure at all n locations
ctgttcgaacaccattcggtctgattgagatgtgagaggcacgcttattgactaaatcccacacttcattcctttgaaaatgaattaattcatcgtgcatagccaacaactatatgctcatcatgaaatgcttcatatatggttctaagttcaatctgagaaacaaaagttgcgttcaagatccttaaccttggtttcatcttcaagtgcaacttgcgtatcctaaaaacctgcttcttcattntccaaagcattttcttgaacaaaagagccagtttcctcacgaataatatttttaggttcttgcacacacaaagatctcctattaagcactctataagccttgctttgtaatgaataaccaagaaagattgcctcatcagctcttgcatcaaatttaaaaagag

SEQ ID NO: 202566 - DNA, 396 bp, Glycine max
  unsure (1)..(396): unsure at all n locations
tgcccgagtcatacatccctatgagatggagatgaagnattgtcgatcacaatagccattccttggatcatagggatgaaccaagctcatgcttttacaaaaaggtttattatgtcaagtggaaatatggaagtcaccgccttgcaaaattggggcaaaagatgaattgagtcacatcactgcttcatctactgccaaacatatttaggaaaggtgatgtccttgttacttccagttacactttgacaaagatgtcatggaccatgctgaaaatctaaactgattcaaccccatatcctgtgaaaaaattcgcaatacttcaactgtacaccatgcgcatacatccatgcatttcattggatgcattgctcattgcaatctttcccttgaaaataa

SEQ ID NO: 202567 - DNA, 347 bp, Glycine max
  unsure (1)..(347): unsure at all n locations
agagcaggaggaagaagattatatntttgctacaacatgctactccacgatgattatttctaaatgttggttgattgataatggttgtacgaaccacatgacatatgataagactctattcacggatttgaagccaactaatgtctcaaaggtcacaattgggaatggtggctatattccagcaaaaggaaaatgaattggtgcaatttcaacgcgtttatgtatccaactaatatcatatgctctttatgaacctaacattgaccaaaacttgctaagcgtaagccacttgattaaaaagggatttacagtgtcctttgaacatccacattgccttatctatgaca

SEQ ID NO: 202568 - DNA, 362 bp, Glycine max
  unsure (1)..(362): unsure at all n locations
cactccccacaagtaagtgcaatttcccttggtcatttggctctccattgatgtgttctggtgctttagttgctcactttttgcaaaattcgagaagcaatttgcatctgaatccatgcttgttttgtggagttgaggacttgaatgaggaggccttangcctatattgtattctgaagcaatggggcatggcacattgcccccattctcttgcaatttatgtccaaacatgcgcccatcaagtgctcggtgaaatgccccaatgatatatgaatatgattttgcaaaattgggatggtggggcttgtttatgtatgtagagacagcataagaaagtcaaaatagatgcccanatgcaatcc

SEQ ID NO: 202569 - DNA, 411 bp, Glycine max
  unsure (1)..(411): unsure at all n locations
gctggtgatgttgcgcgtactgatgggtaccatgagggtgttgctgttgtttgacccatgcgggtgttgaggagacggcatgggcatctccttccttcctttntgcccctgttgccccgattcttttggcgttcacgtttgtggaggaaacgtaatcaaactttcctctcttcaatccaacctcgattctttccccggcaaacaccagatccgcaaagctggacggcatgtaacccactagcttctcatagtagaacactggcagagtgtctaccatcatggtgatcatctctctctcaaccatgggaggagctacttgtgccgccaaatccctccatcgctgtgcatattctttaaaggtttcaccctctttcttaaacatattctgcagttgagtacggtcaggagcca

SEQ ID NO: 202570 - DNA, 426 bp, Glycine max
  unsure (1)..(426): unsure at all n locations
tactcaagcttatatanatctcttacaagattaccacataccgtaatataaccccattatttttctanaatcatccctcttgttgtcatcttccttttataccaccatcaccaccaaatcgacttatgttttacactcaaaccccttccaccgtaaatcctcaaagttctcaaacatttccttcaatcccaccaaacaatcccaccatggtttcaaatgatgaacgtggcttgcaattcccataattttatacccaaattacgttagaagacaacgtcgctgaggaaataggtaggtcttctacaaaaaggaagcctcaagttgcctttgcaattgaagaagatacaaacctcattagtttaaggcttaacatctaaaccgatccaattgttggtgttggtcaagcaaaagaagcgcattggttga

SEQ ID NO: 202571 - DNA, 221 bp, Glycine max
cgaatccttacatatgaaagacccacagcccctctccaactattattcaagaatcgctgttgcttcacatcaactaaaaagaagtggtgagaagctcgaagatgctacaactatggagaagataccaccctcattacatcccaatttgaccacatggctggcacaacctaggaaaccaaagatttagaaaccatgacaaaataacaacttccaggaatcac

SEQ ID NO: 202572 - DNA, 360 bp, Glycine max
agcttaatagacgaaactatctttatgcgtctaataaaaataattatctttagggatcttttcaaaatatctatctatagtgcacctaattaaagtaattacctttacaaattatattagaatttctatccatagtgtgcctaattaacgtgattacctttagagatcgtattaaaatatttatctatagagtgcctaattaaagtgattatctttaggagtttatagataagaagttagaatctgtaatttgtaagattggaaattcaggaggcattttacaaacgataagagattttgaaagaagaactacaccaggaacaattacgatcccaatctatacggttttcaatctctttt

SEQ ID NO: 202573 - DNA, 375 bp, Glycine max
  unsure (1)..(375): unsure at all n locations
ctgcagctgacaaaactcataaatagaatgctttggtctcttgagactgactcgcttgcccaggcttattcaacctacaaaggctgggtggcttagagagactaactcgcttagccaccaacaaaagacaaaaaacatcttagactgtggcctaagaaacacaacgcgctaagtgcggcatgctgacttagcgagttcatatgacacttaaacaaaacaggaaatttaaactctcgctatgcccaaggtgcaatggcttancgagttcatacaaacattcatatatgcaaacaaaattgatgaatacgcttagcaaggcaagactagcttagtgagttcatcccaaaacccaaaaatccacaaaaattgatgaac

SEQ ID NO: 202574 - DNA, 418 bp, Glycine max
ctcagctaactcatccaacatggaaagttaagatgctgtcaacaaatttcttcccaaataaccatcatgaaggagaaacttagcaaagctacccatcatatctcccaaaatcctatacccacgaaaatcaagagagaaagaagtccacccaaacctgaaattttgaagtctcacacgtagagatgcgcttcacgactccgaaaatgccctcctttcgtgatttggagcagaaatgatggccacaggttggagccttgttggagcttcaatggagaatgaaggagaaagaacaaaacaacgtaagggagagggagagagagcttatgaaaatgtggggctgagtgaggagagagagagttgctttttagtttcaaaaaaggctttttcctctcttcttataattctatttaagctatgc

SEQ ID NO: 202575 - DNA, 420 bp, Glycine max
ctagatactcagcttctccaggcataaattctcagactgtggatgctcgtgggtaccaatctaaacggacatatatgcatgccttggttgctactggtgcaatgatgaagccttgctagttttatttgcacagcagcactatgatcactatgtgcatgaaaatgagacatttcgaattgaagaaatggttgccaagacaataagtacgtgggagggtcagtaaatattgttaggccagtgagagtgctgtgggtggaaactttttactgtcaacatatatactttcacttcaaaaccacgtcaacttcccatttggtatgaaaaaaagttaggaagctattcttacactgtcgataaaattaatttaataaattatttaaaactattttaagtaatttagaatcaattctaaatctaaaa

SEQ ID NO: 202576 - DNA, 56 bp, Glycine max
  unsure (1)..(56): unsure at all n locations
ccccacccccccacgcgccntccccccacgcgccccccccacccccccgccccccg

SEQ ID NO: 202577 - DNA, 335 bp, Glycine max
cattgcgttagctataacctatgaccaaccacttctatttttataattgtacaacatactagcatatgccaaactatgtgaatcaattggatcaccaacaaaagaatatgacctcaaaaaaaaccacttttggcattagagctacgcatgcatctctatccttaaggcatggtgataataaacaagctgatgcaaataacaccaccatttgcaaagagataagccacctcacctgaatatctcaaatcgagaaggctaattattaacaacacaacaaaatataatcggaagatatcagggaaagcctttacaacgcaacataggaaaaaacagat

SEQ ID NO: 202578 - DNA, 327 bp, Glycine max
  unsure (1)..(327): unsure at all n locations
ttcgccaggcgagctgcagctcgctcatgccagtttcttgctcagggctgacgttacattttaacccaagccacttggatgctagcctangcaaatttacggccacaaagcttaaggaaaagaccattttgccctttctttgggctttggttctagatctaacaaacaagcatcaaaacctataaaatcattgatgaatctttcatatttaaacaaanatattagctaatgcacaatatatataaacaactagatctaagggtagtttataagaaagctattacaatcaaaggataagcgctaacacattaatcccaaaaaatcatt

SEQ ID NO: 202579 - DNA, 352 bp, Glycine max
gttgaccttgaattctattatatttctgctgctttggttcaattgctttctaacattaatactagttgtcggaaattcctagctcggtatacacatttctactcttactagttatggctactttggattgtgtggttgactataaattctccgattaaaggacttgtttgataaaactatgaaagactcaagagaacgttcatggcgttgagaaattcgactaactctagaataaatgctaaacttatactttctcacactattttatcaacaaatcttttactattagatggacctcacatactgtaagtcctactaaacaatagatgaatacccataacatatgaatatt

SEQ ID NO: 202580 - DNA, 362 bp, Glycine max
aaggcatccacaggctcttctacaataagtacaacgactcacttattacggtattcgttaatggtcaagaagatattcaacttttccaatgcccgatccaaaacatcgagagattggcattctgtgtctatccattcaaatcctcctctttgatcgatgtttaaaacctattttgcttacatgatttttcatttatggtcttagatacattccgaggggcaagccggatgccgggttttctcttttccacgctgaatggttgaaatggtctggatatgtagaggttgataatctacaaaaaaatgtcctaacttacttagcagaggaacgacccttcctcggtcctctatcgttctattcca

SEQ ID NO: 202581 - DNA, 370 bp, Glycine max
  unsure (1)..(370): unsure at all n locations
ctttgttatttgtacctacactacacagccacactttgttgaatntcaacccatttctattgcaaacaaaagcataaggatcaattctttattggtaaaatcttatctttaaatcatgagctttgaaatgaattttgaggcatagtgattccacactcgattataaagataagtgcattgaaaattggcaattaatttcttgagatattaagctcactcgattttttaatcattgttttatctattagaaaattattaaacaatatgaatactttataaatttaaaaatgctttcatctatgacttctaacaatatttaagatattatttataaaaaaaacttgaggtttaaaatgataaaggaaataaa

SEQ ID NO: 202582 - DNA, 396 bp, Glycine max
gatatgctacaattgcggcccctctagttcacatcaccaccatggagcatttcaatggacagcccaagcccagacgaccttcgaacaacttaagcaagccctctcagaagcccctgtcttggccctgttggactttcagctccctttcattgtcgaaacagatgcctttggtatcaggatgggggtggttctctcacaacagggtcatcctattgccttcttcagtaaaccattcagcccaaagctggtacgcgcgtcggcatatgttcccgagttatttgccatcacgacaaccatgaaaaaatgatgccagtatctgctcgggcactgcttcaccatcatcaccgaccatcataatctcaaaaagcttctgaccacaggtcatatagacgcccg

SEQ ID NO: 202583 - DNA, 353 bp, Glycine max
tcaaaatctctaaaagagtaaatgtgttctgttggcgacatacccagaagactattatcaagagcccattatacagtcaggagaccagcagaaaccaaccaaaggaagaaacttgctgcagaaaaagggggaaagaatcaattgacagaatatcccacattattaatgattgaaagaaaccctgtttcaaagacttcatttaccagaagaaaatatcaagacaaacacccaacgtggccgaccacatatataaattgctctcttggatgatggacggccacgaataacaggcctggaattcaaatagttgacaagcatgcataaacttccaaaagtcaaaagagaccataaca

SEQ ID NO: 202584 - DNA, 382 bp, Glycine max
agctttctttggaccttgaacaggcaactaactcctctttcaaaaccatgccatgtgctcgcgactggtccctttcttcccttcgcaacttgagttcactattgctaccccatagagctccgcgaaatttgttccggccatactcttccttgcgagccctcttggtctcttgttcaaaggctcttgcggtaattgcattctcttcccgtaacccggcgcactccttccgaacgtgtgtagcagccaacttgaacttctccttggcgagttttgcctttcctaactcgcttttgagagcttggacttcttcgtcctcttccggtgcttcaaaattctctttgctgacgacttttaacttggcgagccaatctaaacctcgtat

SEQ ID NO: 202585 - DNA, 414 bp, Glycine max
gctgatctaccgcttttcaatccaaattagatacaaaatcatacatgtttgtttctcttctttcaccaaatctttcatattatttatattttcaatactagtaaaaatataataatattccacctttttgaaatcaattaatcatttgatcatattaaattctctaatttaattaatcatcaaatattaaaataatttctttaatagagattaaaacactcgtttgtgtgtgaccccgtaggttcaatactaagccagtaatatattaatcaaattaatatactaatcaaggtaggcgtatagcaacactccttaacgtccagataacatgaagtagcattttactttcaagaactattagaagagtagtgtaataatttcttccatctttacagctctgggttaactctagag

SEQ ID NO: 202586 - DNA, 410 bp, Glycine max
agcttatcaaagacccaaggtccgcccttggtatatttctacaaaactcaaggtccacccttggtacacacttctaccaaacccaagatacccccttggtcaacttactcgcagcaactatgacaaccatcgtccaaggtctaacttcaacaaaatgaactgccaccacactattcggcaagacctttaattatgtcaaagtcatacttactcctcataaccattagaggagtagctttgcaggtcaagacgattcaccaccagattgcatgacaagaccttcaattaggtacaactcacatttacttctcataaccatcaaataaagaagcaggtcaagcgacctacccccaaactggttcgcaagaccttcaataggggcaagttcaacataacttctcacaaccatc

SEQ ID NO: 202587 - DNA, 426 bp, Glycine max
  unsure (1)..(426): unsure at all n locations
tactcagctggaagggagtcatacctcacanaatgtatatatatgtgtatgtttatgtagaaagataccttggatatgcatgtatgtagcaaaaaaatacttcacaaaatatatatatatgtatgtttaggtagaaagataccttgaatatgcatgtatgtagcaaaaatacttcacaaaatatatatatgtatgattaggtagcaagataccttggatatgcatgtatatagcaaaaatatctcacaaaacatatatatgtatgtttagatatgcatatatatataataaaggttggctagctaaaaaaacaacatgcttttgaaaagagatgacttccaacttttctttgaaaaaatttgctgatcataactagtttttgaaagaatgtgtatacacctgaagggtgaatgctgtgaaaacttt

SEQ ID NO: 202588 - DNA, 343 bp, Glycine max
gaccacactactctctctcatctccagaattttgctaaccatcggattcgggatgtttttttatatctcctcctttaggtcaaggaagccctcaattactatctcccacctaacatttctaaccattaaagcaactataaaaacaaaattattaatcagagcaaagatgggcttgtgtttcttaagcaaaaacaaaacgtcattgacaaaatgtacatcacgatgtgaatagtcattactaaaagagtaaatgcgaatactttactccccaaaaatataataaaaaaaactgctttcgcgatgctggtcatattattctgaatgcaaactttgactgacgagc

SEQ ID NO: 202589 - DNA, 434 bp, Glycine max
  unsure (1)..(434): unsure at all n locations
cactgagctgcagctatatcatcttagatgatagaaanagtcagtgtctttcttaccttaaacaaatttgnttgatttgttgaagcatgaagaggccatgtatcaaagaatacttgggttttggcttggagagaccagtgcaaaactactaaggttaagctacaagggacttatgaaagaatcttgtccttttgtagtagtgataatggaacttgatgcatttgttaataactggatgttaagtcaagatacatttgtttaagtcaaaaacaactttgatagaacttgatgcatttgttaataactggaacccaactccattttcattggatgttatcgggttcaaaaaaacatgcgggaaatccatcttacattttttttaaaaaaaaattatttgttcatatattttaaatatatcatagattaaattatta

SEQ ID NO: 202590 - DNA, 417 bp, Glycine max
atactcagctaagcactttgtagggttaggactatccatcagctctgataaatctaccatatactcattcggtattaggtctcatgagctttctcatattcaacagcttactggatttatcttgggtggcttcccttttagatacttgagtgttccccatttatcatctagattaaatgtatgccactgtgctcccttgctttccaagattagtggcttgatttagggatggagcacgaagtctttatcttatgcaggtaagctagagtttatcagagcagttattcaaggaattgtgaatttctggatgagaatttttcctttgcctcaatctgttatggaccggatcaacgcttcgtgctgtaattttctgtggggcaaagcggatattggcaaaaacaagccattggttgcttg

SEQ ID NO: 202591 - DNA, 363 bp, Glycine max
  unsure (1)..(363): unsure at all n locations
cgagcttnatgctttccaagcatataaatttccatttctggtaatatttagggttagcaattgtagcttgaattccactatgagtgctaatatcccaattatctttatgttataggttatctgatcttatgaacaaatttctgactgccagattaatattcctatggtatatttaaaattatatgggattcgggaaaagtttctcatgctatcattggtaaatttgaatgccacgtccatgtatgacctgcgttgctaatgattgttggacaaatagttatttgcctatatctctggatttttatggattgtgggcatacatgtgtttgggtgttttcttcgggtctgctttaaccgatatgt

SEQ ID NO: 202592 - DNA, 414 bp, Glycine max
  unsure (1)..(414): unsure at all n locations
aaaactcagctgtcttgatctatccttgaggcaaacaacgctcatctaagcttatgaccatagtctgatttctcctagtcttggaagtttggactatccttaggtgcttccagaatgatttcttcggttcgaaaagtctttctagacatggtgcaaccccaaggaagaacaacattgatgggacaaattagacccatcaattgttgaagatccaagggaatagagaaaagggcatctcaaatggttcaacatctctatttttctagacaatggcaccaggaggatataccattntttatgttgggctatgctcgaatataagatcgttgtgttggatcaagtggcctcagaataattaagaaggggggttgaattaattattcctaaacctttactaaataaaaattactcttc

SEQ ID NO: 202593 - DNA, 409 bp, Glycine max
  unsure (1)..(409): unsure at all n locations
gtcacgcggctgcagcttattgttgaataacacatggaatctactcatgcaggatagactaattaagggtactgcttttgttgacgagacctgtggtgcctttaagaccattgaagagctttgggatggtgaactctgagcaatatgcttcataaagatgttgacaaattcactggtcctcaagcagattagttctgccttttacctggtagcatcttaaagccaccagatatagcgattcaagtatgtctgaaattttgagaagtgttaccgttgataatcaagtaaccaagacttatntttcatttataactagcatgtgtacgcactntatcgttcgactgggtgcgtgtgcattcggtaatgtattaacagtatgcaatttaataaaaaaaattttttattcaca

SEQ ID NO: 202594 - DNA, 408 bp, Glycine max
ttgaggaagcctctaatgaagcttctgaggaagctatttgtttctccttgcgaaaaagggtgcctagccttcgttaaccgttggatcctctgcacacctgtctgtatcttcacaagacacttgtccacgatctaaccgttgggatcgttgagaagatgtctggagtgtgctcgaagcttccgttctcgagagcatttcttattaaagcatttcaacctttgctttcgtgtagctaatgaaaaacgccatttcttctcctttctttcttccaaagtcatttctaacgtcccaagcactttctccatcacccacagtcaccattagccaccacaaaccatcgttgttctccattgaaacccacaccgagaggaacccttcaaccgaagcggaatcttccaacttggctcc

SEQ ID NO: 202595 - DNA, 308 bp, Glycine max
tttgataacacaagtgctctaatcatatcctactccatagggttaaactcaaatccatgctctacaccatagactatgagaatcacaacgatagctaaccaaaccaaaacatttgcatagactcatctttggcttaaacaccgaaacaccacactacccccgtgctaattataaaagcaaaactccacacgaggcgcaccatagatgtacattctacgacgtaacgcccacctgcagcaacaactggaaatgcgaatttatcgactaatctgaagcttacacaaaacgcgttgatgtaaggcagcatc

SEQ ID NO: 202596 - DNA, 413 bp, Glycine max
  unsure (1)..(413): unsure at all n locations
gctntgacattatgatacatggggcctcctcgttatggaatggatattcttctaaattgacaatagacaagatagttctcagaaattttactctccctaaagcttcaaagttgtccaaggctgaaccactaaatttggtaaacgacaaatgacgagtcttgatatcaatcttagtttctttcccaagttcttctgatctaaaatagaattctccaccaagggatgttgctagatcatgtatgaggtcatgcataacaaagcatttgtgctgaggccaactacctgagcattggaaaaatgatctcgagaccaaataatcaaaatactcaagaccaacctcttctaaagtctttccttttcttggtgtccctaaaagatcttatgccatccacaacaagattagttcatctttg

SEQ ID NO: 202597 - DNA, 354 bp, Glycine max
  unsure (1)..(354): unsure at all n locations
gctatatatatcgatacgctcganatttaaccattgtttactctcgagaaactcagatgatcatgacttttcacacggatgtccgattccggcgcataatatgtcgagaggctcgaaattgaacaacggaagctcttgagatattcaaatggtcataacttttcacacaaatgtccgattcaatcccataaaatgccgagaggctcgaatttgaacaacagaatctcttgagaaatccaaatggtcataacatttaactcgaatgtccaatttaggcgcatcacatatagtgatattccaaattgaacaacggaagctctctgcaaattcaaatggtcataactttttacactg

SEQ ID NO: 202598 - DNA, 297 bp, Glycine max
atattaaaatagacacatctactccccatatctttgaagaaattgccgttctaatccctctacttttaacatagacactatacgtcttcactcttcgtaaaaattgcgaatttggtccttccacaatattgattggtaacagattaatctgatgacactcaaattaatgatgtgacacaagactattcgtttaatccatattacaaccaatgttaatctcttaatacccaaccctttaatttgactaaacgacccaaattgtgaatatgcaaaattggacgctcaaagcctttattt

SEQ ID NO: 202599 - DNA, 299 bp, Glycine max
ccttcctctactacccgggtcgtgtagaccttaaatcccgcccatatcatttcataacaaggatgagccaccgaaaacatctcttggtgtaaacactacaaaccaattcacataatattagccttcctacaacatattcatcattttattaaatcacctccagtcatgaacattattacctaagaagtatggaactcatccaaacaatcaacaagtggttcattcacaccaatattcttcttcactttccataatccatatccattttttcaggtattataccttcatacatcccactg

SEQ ID NO: 202600 - DNA, 357 bp, Glycine max
  unsure (1)..(357): unsure at all n locations
aaaaatangcagataagtgtagagaactatgcattttaaaaagtaaccattacaaatttgaaataatgtcatgaaacaacacaatctctaattatgtaagcatcatatataaaacttagaagtcatcatgggagtatatgaaatatcaatatctataacaattatttgagtaagccttgatgcatttttcaccaacatgttgagttgtagttaacttgtagatgttcttaaacaacacataaatatatacactataaaaacttttcatagggtcagagtatgatcggcataaatttcacaaatcctataatcattatgaagagtgagagctcaagcaattaaagtaccatatatatt

SEQ ID NO: 202601 - DNA, 111 bp, Glycine max
cccggcaacacacaaaccccaaaagagaaagaatccccccaacacaaaccaggaaaaagccccaacacacaaaacaccccggggccccaaaaaaaaccaaaccaccaaccc

SEQ ID NO: 202602 - DNA, 265 bp, Glycine max
  unsure (1)..(265): unsure at all n locations
aacaaagggcaggcagagaagggacacacagcanatatccagcaagactacccatcagaacgccgcaaaccccgaacccacgaaaaacaaaggagaaagaagcccacccaaacccgaaaattcgaaggcccactcggagccacgcactacacaacgccaaaagggcccaccatccgcgaaccggagcagaaaagagccaccaaagggcggagccgcgggtggagcccccaaggagaaagagggaaaaagaaaggcaccgcgaggg

SEQ ID NO: 202603 - DNA, 308 bp, Glycine max
  unsure (1)..(308): unsure at all n locations
ccaccgcaagccaccaaccagacaaaactgttaacaaaagcccaccacaaaacacgcaaatgcgcgaaaacaagacaaaacccacaccactagaatggccacaaaacaaggcccaaacaaaggaaaaacccattccaacacgcacaaatataagcaggcccatacttagcccatgggctcgaaaactaccccaaggcccaagagaatcccagggccttnccctggatccctggcccaatcgacacggaggccggtatccaacgccactgcgggggaggattgcatcagaacccacacaacagcaccaa

SEQ ID NO: 202604 - DNA, 321 bp, Glycine max
  unsure (1)..(321): unsure at all n locations
cgcagcatgcagctcgaacattncacgcgaaaaggagagagggagtttttttgtatgnggcggacgaacaaagataactatagatatatacatataaatctgggagtcacgcaacattctataccatagctaaacggcacccctcggggtttcgggatagggcgacacttcacaagtcggtataaatcagctgctctttttattttataaaaacaatgattcacacccatagagtgaataaaccctgggagggaagacaaagaaacgatagagaccccacaaaaagacaaaacaaacaaacgcccaaaaccgatgtaatca

SEQ ID NO: 202605 - DNA, 332 bp, Glycine max
tctccaaactataatgttattgatagtgagtgatgccacaaaacctccagatttgaatgtgtgatatactttagtatgaatttttttttatccttcaaaagtacaacactataccatgtatctttctagtgcaattttcaaagctgactactataaaaatggctggattgaagcaagtaataagaaacttcatcctgtatgctttctcttctttgaaccccttgccaccagagaaaactcctgtggcataccgtgaattggcaagcttccaaggacaactgctccaccagatttcagaacttcaattaattctgcaaatatatcttattctc

SEQ ID NO: 202606 - DNA, 290 bp, Glycine max
  unsure (1)..(290): unsure at all n locations
agcttagaacaatatacgtgggctgcggtaattgcttttgtgctngccgaccacgatcaacaaagtactttcggcacctactatatgtcgacttgaccagcgctgttattggaatgctgcgacaatctttcaacacccttattcacacattctgagaggttgggtgtcatgtgaccattatctttgtccagaagtatttgaaagcccttgcttccatttttcccttgaaaatgcgatacaatccatgttgttatggctggaggccatttgaagaatttttttctaatttt

SEQ ID NO: 202607 - DNA, 352 bp, Glycine max
ttggatggccttgattatctcagggtccacttggaccccatttctaccaactcacaaaacctaagataactatattatctacacaaaaggtacacttctctatatttgcatagagggtgattttcctaatgactgagagaacctgtctgagatgtcctaagtgaacatctaagctcctactataccctaaaatatcatcacaatatacaactacaaatctacctatgatatcccttaagacatgatgcataagcctcataaaggtgctcggtgcattactgagcccaaaaggcatcactagccattcatacaaaccaaacttggacttgaaagcacttttccactcatcacc

SEQ ID NO: 202608 - DNA, 357 bp, Glycine max
  unsure (1)..(357): unsure at all n locations
ttaagtcacctgcggcatgcaagcttcctcggggccattcctgcgaaggcaaacatnttttatgttagttttaccagtgggacattactcttaaagcaaaaatggcatataacctcctcccctaaatacaaacatcaatgtaaatttagagcaagcttatgcgcatatttccttacaaacgttctcttgcacaagacattctattaaccgaaaaaaatgcacccatatacaatcaaggcagcttcgttacctagattatttacacgtacttccaaggtgtatttgttacttacatcacacacatctccttggctaaattctcatacatgcatactcaaanattttggggtaccaaaa

SEQ ID NO: 202609 - DNA, 405 bp, Glycine max
  unsure (1)..(405): unsure at all n locations
gctcactatgggagggcggcttcttaccttcgtgctccactgcttctttgaccatngnncttccttcccgcgatgcttcttttcatgtctgcctgagtgggcttatagcctaaaccatacttcccacgattaccttgggtatttatcagtctagttatgccgccgttgttttttcctaaacccatcccgggctcataaccgttccccaacataactcgggccatcattaccgctgcatcggacagactaggctgcccaaagagggagtccacggaggaaatgctgaccacctcaaaagactggaaagcagtttctaacgattcttctgcggcttccacataatgcatggaggatgggcagcttaccaagatatctttctcgcctgacacgatgaccaagtgccct

SEQ ID NO: 202610 - DNA, 341 bp, Glycine max
  unsure (1)..(341): unsure at all n locations
ttaagtcacctgcggcatgcaagcttatgaaacaagtacgtgcgtgccactatttttttactttatattnnggaaatttcattccctaaaaaaaaaacttatatctaaatgagttagatattattgtagtcaataactgaatattccagcaacttttaaaaaaataaatgaatattccagcaacttttaagtaaaagataaaaaaatatatatatattacagtgaatttgatttcttttgttaaaaacttggcagtttcctaatccaaactggtaaccctgtattgccattcattatccaaaccactttaattttccagcattatttatgaattgataaaa

SEQ ID NO: 202611 - DNA, 332 bp, Glycine max
gaccccacagagaaaatggagctgctatcaagatggttgcatataccgctcctaggtagaagttgcccccactctgaacaagcctactggcggaataatggctggagaacgtcattcacatcctgtgcaaaaacgggttttccacccatgctcccaggaacatttgcagcacccatggtatattttttattttgaaaaccaacaccatcagcatagcttgaagctgaaattgaagaaacatcatacttttctgggaatgaaaatgcttcacccggcaaagaagctctctgtgaactccttgagctatttgccggccacagctccctagtctt

SEQ ID NO: 202612 - DNA, 391 bp, Glycine max
agcttgtactcagcttgctaaggagcttagatactttatatcagattgttcgattttgtgtggaggtggaatgggccacaacatataaggattattctttggaagattgcgaaaggaatccttccaaggaatgggcttataggtcacagacacatggcactaaacattttgttcccactttgtcatgataaacaggaaacaactctacattgtcttaaagattgtagttgggtatgtcaagtcaggagtaatctctggtatggaaatatgcctgctgtttttttttttcaagataacctttgtcagtggttggaacttaatctaagaggaggctaccttggaagagcagataactggagtgggctattcggagtggctttggatcgaattt

SEQ ID NO: 202613 - DNA, 408 bp, Glycine max
  unsure (1)..(408): unsure at all n locations
ctaagcttcgcggatggaagggagcaattgtttgttggtggctaccatgtntcctantattgacaactgttacattagtctnttggatttcagggacaagaagatggtgtggtgttggtctgatgtgggggctccttttgccgtggatgagaaacgggtcagggatgctattgccatggaggataataactccatttgtgtggtcaatgagtttgaagatttggggttcatggatttgagaagttctgctgccaatagcattaggtggagctccaggagtaggttgatgaaggggaagatgcctgaggaaccttgttatcctaaactggcattgcatgggggacagcttttttcgtccatgaatgattgtatttccgtgttctgtggccctgaatgggttttacgtct

SEQ ID NO: 202614 - DNA, 365 bp, Glycine max
  unsure (1)..(365): unsure at all n locations
tctgagtcacctgaggcatgcaagcttgtatntgtctggcatataggacatgcgttatgtcctttgacactatatcctcttaagttcctataggctagaaagtcattaatggtacaaaataccattgcacacaacctgaatgtcttatgcagattcccatcccacacatcaaccccgtcttcccacaatttcctcagtcttcaattaacagactgagatacgcaaaaatatcattccctgtctgcctcatacctgctatcatcattcaaagcattatgtactttctcttgatgcataaccaaggagggagggtgttaatcaacaacaaaaacgctatgaactgttggactacttaagttttcaaa

SEQ ID NO: 202615 - DNA, 352 bp, Glycine max
  unsure (1)..(352): unsure at all n locations
taaactntgaagtgtaattctcaaatgatcaaagtttaaaaaatgcacacacatgacctctatttatagcctaagtgtcacagaaaattggagggaaatttgaatttctatttaaatttcacttgaatttgaaatcgaatttgtggagccaaaatttcactaattatgattagtgaattttagctatgattcaacccactaatccaagatcaagtccaagattctccactaagtgtgcttaggtgtcaggaggcatgtaaagcatgaaggacatgcacaaagtgtgactatatgatgtggcaatggggtgtagcaagcaaatgctcacctctccctctaaaatttaattgga

SEQ ID NO: 202616 - DNA, 330 bp, Glycine max
  unsure (1)..(330): unsure at all n locations
agctntanaaaaatggaccagcatctttaacttattatctcttgtttttttagctttttacgcattaagtctctaacgatatattactcacttttactttttataactttaaacaatttttctcttcaactcaacaactttaaatagagggctatatcaagaataattctttgtgaagttactctcttcaataatttataattatacatacatacatatatatatatatatatatatatatatatatattacattaaattaagtttatttaacagagtatcaaataattgcaaattttataacactaattaactcataaaaaacttttat

SEQ ID NO: 202617 - DNA, 406 bp, Glycine max
  unsure (1)..(406): unsure at all n locations
gtaatgactccattgatgctgattgtgaagttntttgagaatttctgttgggtagaggtcatgataaggactttcatgaactcaactttcttgagtaatagagaatctttgtcaatgtctaggacctttccaaagttagaaattatacttgagaggcactttgtgttccatgtagagaaaatgatattgtagcatctaatccacgtcaatctattagttgtgtgagttgattcttcccatttttgcactgatttaaagattgaaatgaagtttctttttcatgttctatgcatagactgagaacctattcctcatacaagccagatacgagtaccaaatctccagcaatatatctcataaaaacctcttggtttccttccatgacatacaaataatctattttatc

SEQ ID NO: 202618 - DNA, 373 bp, Glycine max
gcttattgttgctagtagtccctactgctgcaatatattttttatagagaatgatacctctagaaaccatcaaaagagatatgactaccttgggggttatcactaaatgcctagttagttctctcccttataggtcccttaaataggggcacggagcaaacacgctgcgtgccatttttacactgccatgcataagtatcatatacccttttgcttatgttcagtgaatattatcatactgtgtacattcccgcattgtgtcttttgcataggcatcgcatatgggttctgtcttgatcccttttgtatacaaaccaacggagggtccgtgtcgccttcttaaaaacgtacgttggggcactttgctacccct

SEQ ID NO: 202619 - DNA, 398 bp, Glycine max
aaactctcgacatatctatactatgcctctttactattcaaaccggaaacttagattcctaggcatgagtcatccttttggcactttagtctagcttctacaaactacccacacactcacaatgcgcacaatttgtttcgcaaactaagttccacaatatcatgcgcaaatgccattgaggcatttcaccgaacacttggtgggcacatgtttaagcatgaaaatcaagggtatgggggcaatgtggcatgccccattatcttagaatgcaccctatgcctaaggccaccccctacaacccctcaattcaacaaaaacaagcaacaattcaaggataaatccctcacgttttgagcaaacacatgcaacttagagcaccaaaatatatcaatggaaag

SEQ ID NO: 202620 - DNA, 385 bp, Glycine max
gcaagcttcttggggttggctggctattatagaaagttcattgtttgattttctaaattggcattgcctctaactaagttgactcgtaagaacgagaagtttgtctggaatgagaagtgtgagcaaagtttccaagagttgaagaggcggttgacgacagctccagtgttaattttgcccgaccctaagaggacatttgaagtgcattgcgatgcaagcgggcaaggcttgggatgtgtgttgatgcaagagggaagagtagtggcttatgcttcacgtcaattacgtcctcatgaagttaactatccgaccctgtattggaactagcggggtggtttttgttttaaagattggaggcattatttgtacatattgctttgaattt

SEQ ID NO: 202621 - DNA, 353 bp, Glycine max
tggagatatgtcgcgggggtcaggagaccttgaggacgtcaggtggggtgctattgcccaaaaccaagcttgaccaatcccgacccaacccgggcatagtcggtcagagagaacctgtgatgtacctaagcaggcgagctcctggcacgcaacagataaaaggaaaacaagaccacaaagcaaggaggctcgtggtggctggccagctgtgaattttgcgtaatatgtggatggtggcctctggtaatcgattaccaagggtgggtaatcgattacaaggcttaaaattgaggacaggaggctaagatggtctctggtaatcgattaccaaggggtgtaatcgattaccaggc

SEQ ID NO: 202622 - DNA, 386 bp, Glycine max
ctgcagcttcatcaagggaatcagagcacagagcttattgttttgctccttaaacctccattaagtttttgctttaccttctcttccattggtggttctttatttttctccatgtatctcctcacatgtcttgcgataattgtttttaacatgattctttagactttccaccgattaaacttgctttagaagctttatttgattttctatggttcaaatttcttgttcttgttcttgaaccatgaattgtgttgagtttaggtttctttgagttttgccttgttattttttgtggctgaaacctaaaccatgaagttcttacaaaaatattaaagtataagaaaacctcaaaaatctagagtgacttgttcacctatgtagttttg

SEQ ID NO: 202623 - DNA, 350 bp, Glycine max
taataaacgggcgaagatccatgtgatattaacaaactactaattgttattcattattgtctcatgttgctggtgcatgtcagcacgtgtatcaagcatggactaaaataggtctcgcctttttcatctcaaatttacttcgaattaattgtgtaattaacttttttatctgtgaaatcaatcaaaattaaaacttaacttttgtttatatatccgataccaacttttgaaaaaattattatcacttaaatatactttaattgtacattaatttgtgcttatatatccgtcaccagcttttgaaaacattattataattaaaaatatatcttttcaatcaaaattacgca

SEQ ID NO: 202624 - DNA, 247 bp, Glycine max
gagaaggtcgaccccaagaaccaagagaagacgaatccaagactcaagagaagaagccaagaagaccccaaaagggaagtattgaaaagagcccccaaaaaccaaacaagcacagcctagcggtacaaaagagaaaccgcgaaacgggggaagggacagaggccccacaccctagaagcgaccaccagcggcaaagctcgaccacaaaccgtcacaacagaaaaagcaaccgcccaagcggaggcaa

SEQ ID NO: 202625 - DNA, 411 bp, Glycine max
  unsure (1)..(411): unsure at all n locations
ttaagtcacctgcggcatgcaagcttgttgatagagcacttcgattatataattagatttcttttaccaactgcatcttgactctctgatgttagtgtatcaatttagatttgttgaatgttttggtgccttaccatgtagttacgaagttttgtcaattactattactgttcactataggtctatggtctactgatggcaagatcaacttatgaaggcatgaaactagctaatgaaaagaagcgtccttttgttcttacgagagctggattttctggcagccaaaggtatgctgcaacatggactggagataatctttctacatgggagcatcttcacatgagtatctccatggtacttcaactggtaagattcttagncgcatggatgctactttccttgaacaatact

SEQ ID NO: 202626 - DNA, 360 bp, Glycine max
cttagctcgccctgtgtgctaagcgaatcttacttcgtgcgctgagcgagttgccacttgcgctaagcgcgccaacccccacccattggctgaagggatctcgctaagtgagacagttgcgctaagcccaaaaacctctctggaattgcaattaatggaattgggataagcgagccagctcgctaagcgcaacccagtgtttcgctaagcgcgtctatgcactaaatgcttattactttttgcctgaacccccatgttaattgggctaagcgggtgatacccgctaagcccaaatatctctctggaatggcattgcgctaagcgagacgatctcactaagtgcgacccccaccacaacat

SEQ ID NO: 202627 - DNA, 366 bp, Glycine max
  unsure (1)..(366): unsure at all n locations
ttaagtcacctgcggcatgcangcttcaataatatatatgtgcgaccaattcctcttttttattatagatatttgggtagattcaagcatgatgcattgtatttgaattgaaaagtaggagaaccacgattaattgctttgaaggaattttctttgacacaaattttctaggggacccaccaaaaaacacaaaaaaagggttacaaggggcaaatgctttgtcagaagttagctaaatgtcaataccacttccttgaaaacgaagtaaatgttattttaaatacttaataagccaaagtcgtgaacaagttagaaagcagatagccaatttattcgaaaaagggtgaacttgtagttccctttaaa

SEQ ID NO: 202628 - DNA, 339 bp, Glycine max
ataacatgttttgtatgtgacaaaaacttttacacaatattcttattaagtgtgagataaaaagatgttaaaagggagatatgtaataatagtcttagtttgtgggaaagaaaatgaaaaggttacatcacggcaaagaaaatgtagcaaactataatgttgcatattacattgtctaacatgtatgaccacattattaattcattaatttcttgtttgaacattgatctaaacaacattatcttttaccattagtcctacttctgacctggcaccacatgtttggaatctttctcaccattttcagtttctgactccgtggctgcattcctgtatctc

SEQ ID NO: 202629 - DNA, 390 bp, Glycine max
agcttgcttgtggagcttctatggaggctggttcttttagcttcaatgagggcctttaatggtgattttccaccatggagatgcagcggaagacaaaggagaagaggtgagaggaggcgccatccactagggaataagccatggaagaaggagcttcaccaccaagataagccttggataaaaagcttgaaaggatgctttcatggaggaaaagaaagagggagagaaagagagaggggggagcacgaaattgaaggaataaaagagggagagaagtggaactttgaagtgtgtctcacaagactctcattcatcaaagttacaacaagtgttacacatgcttctatttatagactaggaagcttccttgagaagctttcttgagaaaac

SEQ ID NO: 202630 - DNA, 389 bp, Glycine max
atatgcatgtgaattttgtctcatcaacaagaatcaagccaaggctattgtgcaagcagtcaatggggcaaaacataccaaatgattataatgatggatggctcaaattctcacaaaggtaaaatcatcactttcaaattgagctttcaaaactatcatgacatgtagagaagaatcaaggatttcaagtcacaaaatgtcaagaacttttattttcaaaacaattacccattttttgaacatatcctataatttaaagaaaaacatgcaaagtcgtacgtgcacacgaaattgacccaaaatattaaactgaaaatccgacgaaactaacaacattaacaaattaacacaactaacaaattaacaaaaccaaccaaactagcaaaacc

SEQ ID NO: 202631 - DNA, 240 bp, Glycine max
gcttcataagtgccggtgagacacctcattttgtgttaaccattcttattcatcaagcctaagaccttctcggcaccattgaagtctcctagcttcccataagtcgcgataagcatgaagaaattcattttaccaaaatcccaccagttctaagtcttgaaaccattcaagaatctagttatcatagaatattttggctattaaatatctgaatttttcaacgtttacttcttaaaaatg

SEQ ID NO: 202632 - DNA, 275 bp, Glycine max
ttttaccctctacgtggtgttgggaaaaaccatactcacccccaagcatcctatcgaccaatcaattcaacgatgggtgacaagaggagaccggacagagaaagccgacatgtggtctgaagacagaggcttcatgaggagccatgtggaatgagactcatggaaaaaacgggcaccgtgcgtgcatttggtgcgaacaaccacttttgaactgcgcacatctctcaaatattgacggaagacaactgggcacgaggcacctattgggaacaccg

SEQ ID NO: 202633 - DNA, 410 bp, Glycine max
cacctgaggcatgcaagcttcctggatacgtaccaacacaagggcatgggtttgcttactgaacaagcacaattctctcttgttgcccaggctcatgcttcttctttgttctccttccgtgtacaagttgacaagggaatctccagcatttttccatgtttacatattacttactaacaataaccttattaaaaataagagtaattttaagggtgaagtctcattaatttaaaagttaatacaaataagttacttagaagtgaatacaaataaaatgggtcgagcctgcttaattacctcgaacctatcaaataaaatgtataagattttttatttataaaaataaaaaataatgttagacaatttagaataatttttcaatcctgcattcaatactagcttttattggc

SEQ ID NO: 202634 - DNA, 355 bp, Glycine max
  unsure (1)..(355): unsure at all n locations
ttcaaaatttatctttattgtgataatttttttaaaaaaataccccttttagtaaatatccttaccatcctttttctcataaattcctttcatatgagaaagagagttgtgtttgtttctcgggaagatcatggaggaaagctaaagaaaataaaatgagaaaagtgtggtgactaaggggagaaaagtgtgctanaaagaaagaaaagacaccgcacctacgacaaagattttggagtactgtatgtgctagaaagacaaagccatccccggctaactatatgcctattctttatatatttaaaaaatgtagctntttagtattattttttatactaattttttatttgattaa

SEQ ID NO: 202635 - DNA, 410 bp, Glycine max
cacctgcggcatgcaagctcgtccttggttagacatgattggtgcatgatttgtgtcttgtaggattcaatttgggcaaaatcggatgagggaaagagtaattttcgaaatctgcactttatgcagaattttgctgttgaaatgtgcagcagaactttgtataagtgcagaaaaatgcttgtgcatggctggttgtgaaaagggtagtacatatggggttctggacattttttagcagatcccaacggtcaaaatgtagacctatgtactagagacttccagtaaatttttcgagtcgatccaacggttaacgaattggaacgaaggaaatgttactgggatatttgtatgtgaaaagctgcgattttgatttgtgttttgggcaaacttttttgcctttgccctgtttt

SEQ ID NO: 202636 - DNA, 382 bp, Glycine max
aatctgctggcttatgatctatccgctgagcgcaacattccttgactaagtgcgaggaagaatctggaagaaggatgagctgtgcatgttcgctgagcgaagggtcatgatgtacgctccattggagcttgtaggtctaggatcttcttcatcaatggattcctttgcttcttggaagatgaatggcagtggaatggagaaggaagagagagagtagatgccacttcaaggagaagatgagtctagaagaagctcactaccataggaggccatggataagagcttggaggaagatggagatgaatgaagggggaggaagagaagaccacgaaatcttgttcttaaatacagctctaaaatccgaagtttaattttcaaatga

SEQ ID NO: 202637 - DNA, 268 bp, Glycine max
atttttttttaacccacaaacagacccaaatatagtaacccgaccaacaggcacatactttcctagagccaagagccttaaaaaacgaccccaacagaagaaaaccctaaccaatcaacaacaaaacctcccccgatgcagatgagaccgaaaaatctaacctcaaatgaagttgaactctgaccaatcaacacaaaaccttactcgtgtcgacgagcccaaaaaatgagaccccaaatgaaggggaactcgaacaatccaacacata

SEQ ID NO: 202638 - DNA, 323 bp, Glycine max
tttaaaccatatacaggcttcaaaggagaacaattattggcgctatgaacagctctattgtaagcaaattcaacatggggtaaacaagcttcccaagtttttaatctatttctcaaaactgtcctaagcaaagttccaaaagtccctattacaactttccgttgcccatccgattgtgggtgacaagcggtgaaaataaaatttaatgcccaacttgctccacaaagtcctccaaaaatgcaaatcatcaagcctacgtataggatgcccatatttaatggtgatgttattaatggctttacaatcagaacacatgtctcatg

SEQ ID NO: 202639 - DNA, 410 bp, Glycine max
  unsure (1)..(410): unsure at all n locations
acctgcggcatgcacgcttttcgattcattctatgcacgcagtggtggtccatattgtttttcgngtatttttattctcatttcatttactttttatacccccttttgacgtgcttaagccattttacttaagtcatttctcgcttaacttaaaaataaaataaatttccaccgatcgtttgaattgtattatccgttaactttcgataaaataaattccgaccgttcggtcgtgccgtaaccatgttggaaatcaaaaaaagaggtaaaaaataatataataacacaaatataccttttagtaaaataaagcggaaaatcaaccggacattttctctttgggatttctcattcttaaccgaattgactaataactaaggtgaaactaaggctaatatcaactcgcctag

SEQ ID NO: 202640 - DNA, 386 bp, Glycine max
  unsure (1)..(386): unsure at all n locations
tgttgcttacgtagntntctaacattggtcatgtngagcaagcaattggaaacttcataaggcagtcatcaaactcttgcttagaaggacaatccaccagactttcccaggcttccatgacataatcccatgcatttttttaccaacaagggttttacatttttccttcacattcttatcaatgtgaaacaaacacaacaaattggtagactcagggaaaatagttttcactgcattcatcaatgctaaatctttgtcagaaacaatgactccagagtgtgtgcatcacgtctcaaaaaaatacttcgaaaccattcttgagctcaaacaacattgtttacacgttctccctccaagtaagaaaaagcagctgaaaatgtcatccc

SEQ ID NO: 202641 - DNA, 389 bp, Glycine max
ctctaactgcaagcatgcaagcttagtgacatccgtgactatgatcttaagcgaatattttcttattagacattcaagagaatgctcttttcatgttatcaattcaacattgaatactgacggcagaggaaagacaacccacaaggggcttattggtctgggtagatcaaagtctccggggaaaggtcacatcaatttttcgaagtgactttatctgtttgaattgttataagagaggtcactttaccagtcagtgcaaggcgccaaagaataacaatactcaccaaaaacaagaatctctattatgttgaatctgcttatgcaacatcttatgaatttgatgatgccttaatttgcagcttggatagtctctgtgattcatggattat

SEQ ID NO: 202642 - DNA, 382 bp, Glycine max
gactaaacatgttttgttatctaattgcattcattatgcgagataatttgttgtaagtcgttagtcaataaatagtaagtaattgttgcattaagaaataaattggttggtgcaaccaaaatcaattacacatatatgatacattgttgtcataattgacaacacataatgaaatgcgtgcgtattaaagtttgatcgtgacacgacattgactgacttgacaagacattctgatgcatgatacagcttgacaccacattggtttagtaggaaacataaacacgaaacatgttaatacgtgtctattttttttaaaaaaagtgaaccaatctgtcggtgaaaagcatctatatatatgaaacacgacaaacgctaaaaaatg

SEQ ID NO: 202643 - DNA, 371 bp, Glycine max
  unsure (1)..(371): unsure at all n locations
cttaagtcacctgcggcatgcaagcttcttggntggaagaatagggagcctatcaacatcttacagnatgctgatgatactatttttttttggagaggctgtgtgggacaacattcatgctattaaggccatcttaagaggatttgaattaccttctggtttaaagattaattttgccaaaagccaatttggggttattggtgatggtgttaattgggccagggaagcaactaataacctgaactgtcggcagctggaatgtccttttctttacttaggcatacctaatggggctaatccctctaaccagctggtgtgggagcctatcatcactaaattcaagtcaaaattagccaaatgggctcagaaaa

SEQ ID NO: 202644 - DNA, 352 bp, Glycine max
  unsure (1)..(352): unsure at all n locations
acaacatgntttggtgagaggaaaaagttgtgctcgaggtcctcctcccaatataagggaaacgaacttttttgggacaatctttgatctcgagaatgaaaaaatttgtaaggcctggaactaagaatgtagtgattctaagaaataagttgataaaaagacaaaaatggaattgtactactcggagtcaataagccttcatattcaatgactgacggagtagatatcttattttagttcattaaagtcacctcatctatatcaagaaagagaaaaagtttatctctactaattatacaatgaaagattaaggtaagatccaatacatattatcaataagataagatataat

SEQ ID NO: 202645 - DNA, 342 bp, Glycine max
  unsure (1)..(342): unsure at all n locations
ttaagcaccgcagctgcagctgngtcactctttgtgtaatatattatttgtttcccttctttagggccttgtattttggccattctagtagtatagggttttagccttgtatttcaaggcattttgagtagtctttgtagtaaggacttattttatattttcatgtattttggcatgggagtgagcttaactattattagaagtgtgtagctaagctctagcttctcatctcaaggaggtgagcttagctattagagaggtgtatgcaactaagctctagctttttaaggagtttttcaaggaagcttctcaaggaggtgagcttatttattggaggggtgt

SEQ ID NO: 202646 - DNA, 384 bp, Glycine max
  unsure (1)..(384): unsure at all n locations
cgctnggncntacaaaagagagttgcatcatatgctttgtgcttgaacgatcaattgacaaccatcgcagagtaaaatgaacctcaatatgtctctaattttgcaagaatggactaagagagttagctattcagcgaatgtttatgcccactaagaaccatttgttattaatcgggaaacttctttacccgggacaaaaatccataaaaaagataaagagaggcccgcataaataaactctaaatttacattgtaaaaaaatatgtcatacataccttaacaaagaataaaaacagttaggagtcaggcttacttccctcagtaaaaattctgtttaacccaaaataaaattgtaatataaacacattaatagtataattcatc

SEQ ID NO: 202647 - DNA, 416 bp, Glycine max
  unsure (1)..(416): unsure at all n locations
ttaagtcacctgcggcatcaagctnaggactcgcccgccattccttatattcagaaataatatacaattcaagaatttctctttgtcccttaatcatttctaatttctcaaatgggcaatgcagaaaatgcttatttcaaacatatccaatatccatctcctcaaacaacctccaaatgttcttaatctccaaaagtttaggtaactaaaacaaaggatattttttaatatgaagatatgaagaaaaattgagattcctatcatctagaataaaatcgaaaatagggtgtgcgagcatgtttgcacgggtggacagacattacaaatatctcacgacttaacttccaatctgttaaaagattgtaagtcccatcataaatcacatgatagtcttttgataaaagaatctaatcttt

SEQ ID NO: 202648 - DNA, 397 bp, Glycine max
  unsure (1)..(397): unsure at all n locations
ccttccgctagccatttctggctnagtagtgtccgctaagcgcaacactcttgggctaagcgcgaggaagaatccagaataagatgagctgtacaagttcactaagcgcaccacttcagttcatccgctatgcgagaaaggcgcgctaagccaaaaatcactaacgtgcactaagcagtccataagtgcgctaagcacacgagcacaaacaaggccatctatttaagcctgaaatcagattttgtgaagggagtttggactgggattcagagctttgcatgtctaaggtttctagagagagaaagggtcaagttctagagagttttgagagattttgccgtgcaaaaatctgcaaagaccagagcttgaagcatgagccggtttgagagcttgagaa

SEQ ID NO: 202649 - DNA, 373 bp, Glycine max
  unsure (1)..(373): unsure at all n locations
agcttangaacccaaactggtagcttcaatgcatggaaacatgcttatggctaggaatccaaaatttggttttagaattagaaaaaacatgaaaattaggatttgcttgtgagagtttttgcaatagtggtatacataggtaaatataaggagcatgaaattcctagcaaagtgtgaatgattgtcttcctaaatgaatgtatgaaagtgtgggatgccttttgaatgcaagtatgtgcataatgtaaatagcttgccaatatgtgtaagtgggagcgaaacaatgaaagtttgtatggtatattatatttctagtgtgtgtaagtagtttgtgatagcaaatgtttaggacatagttaagtggaaattttga

SEQ ID NO: 202650 - DNA, 404 bp, Glycine max
  unsure (1)..(404): unsure at all n locations
ggaagtgtggaagggtgagacttcctgtctttatggttgactanctagtggtacctggagatatgtcgcgggggtcatgagaccttggggacctcacgtggggtgctattgcccaaaaccaagcttgaccaatcccgacccaacccgggcaagtctgtcagtgagaacctgtgatgtacctaaacaggcgagctcctggccatcaacagattaaaggaacagagaccacacaccatggaggcttgtgtggtggctggccaactgtgaactttgattgatatatgggatatggcctctggtgatccattaccaagggtgggtaatccaatacaaggcttaaaaatgaagacaggacgctaatatgggctctggtaatcgatttcaaatgggtggtatcaattacc

SEQ ID NO: 202651 - DNA, 391 bp, Glycine max
agcttgggagagatatacagatattgtggtgcctaagaaactactatcggagaggaatgtagtagtttacttcactgagtttgacgagttcaaggaggaactcgagagaagacactaggatgagaagttaactgattttgtacacaaaaatatagacattgctattgtgaaggaattttacgcgaacctctatgaccctgtggataaatcaccgaagcaggtgaaggggagaggtcatctagtgaaatttgatgaggatactctgaacacattcctgaagacccctgtagttctcgaaaagggggaaaatttgtgttcttattcgaggtttgcactcctgaggcctgatcctcaggagttggctgctaagctctgcatcccatggagggga

SEQ ID NO: 202652 - DNA, 372 bp, Glycine max
tctgtgtttggtcggcagaggagcataaaacaaagagtttggcggtaggtgcagatttttgattcatggccagttgggttaccaagttaaccaaggcatctagtttaccttcaagcttcttagtctcacctgatgaagatgaattcgtggctacttcatgcactcctctaatgacaatagcatcaattttggcactgaattgctgggagttggaagccatcttctcaattaaatttctggcttcagcaggggtcatgtctccaagggctccaccatgggcagcatctatcatacttctctgcatgttgctgagtccttcataaaaatattggagaagaagctgccctgaaatctggtggtgagggcaactgg

SEQ ID NO: 202653 - DNA, 349 bp, Glycine max
ccaagcaccgcggctgcagcttcatgaggctggatctttaagcttcgatgaggtccttctatggtgattttcagccatggagttgcagtggaagataaaggagaataggtgagaagaggcaccatctactaataagccatggaaagagaagattcaccaccaacagataagaagcttagagaggtagcttcaatggaggaaaagaatgagagagagagatttggggggcacaaaattggagaaaaagagggacagaagttgaactttgaagtgtgtctcacaagactctcattcatcaaagttatgacaagtgttacacttgtttctatttatggcactaactaaatga

SEQ ID NO: 202654 - DNA, 392 bp, Glycine max
gctttgagccaattcaaacgacaataactgtttactctgatgtctgattgagtcccgtcatatatcgagacgctcgaaattgaatgttgaagctctgagccaattcaggcgacaatatctttttactcggatgtctcattgagtcctttaatataacgagacgctcaaaattgaatgttgaacctctgagccaattcaaacgacaataatttttttctcggatgtttgattgagtcctgtaatatatcgagacgctcgaaattgaatgttgaagctctgagccaattcaaacgacaataactttttactcggatgtctgattgaggcccgtaatatattgagacgctcgaaattgaatgtggaagctttgagccaattctaacgacaataac

SEQ ID NO: 202655 - DNA, 356 bp, Glycine max
ataggcaaaagatcaagaggagtgagtgggttaaaaccataaacaacttcaaaaggagaacaattagtggtgctatgaacagctctattgtaagcaaattcaacatggggtaaacaagcttcccaagtttttaagttattcctcaaaactgtcctaagcaaagttccaaaagtcctattaacaacttccgtttgcccatcggtttgtgggtgacaagtggttgaaaataacaatttagtgcccaacttgctccacaaagtcctccaaaaatgcaaatcatcaagcctaggtataggatgcctatatttaatggtgatgttattaagggctctacaatcagaacacatgcgccatgt

SEQ ID NO: 202656 - DNA, 316 bp, Glycine max
aatttcttatctcattataaccccacccacctcgaatagattttctttctgagataattcaagaaaaaagaaatgctctgatttattaaacacaatccaatcaacgaagatatttgtacaaaaccaaattggttaactaaactcgctctcatttgaatattttatttgagaaaagaaaatctgaaaatcagtttaaaaggaatctgatccttataattagcttaaaactaactcacaatcacgtcagaatcaagtctctataactaattcgctactgaagcaatttttaaatttcctcattcctttccttctaaaa

SEQ ID NO: 202657 - DNA, 420 bp, Glycine max
  unsure (1)..(420): unsure at all n locations
atctctaagcacctgcagctgcagcttaaagatgcccgagtcattcatccctatgagatgttgntgaagtattggcgaacagaaatgccattccttggattatagggttgaaccaagctcatgcttttacaaaaaggttcatcaagtcaagttgaaatatggaagtaaccgtcttgcaaaattggggcaaaagatgaatcgagtcacatcactgcttcatctactgccaaacatatttaggattattgatgtccttgttacttccagtttcaccttgacaaagatgtcatggaccatgttgaaaatctaaattgattcaaccccatatcttgcgtaaaaattcgcaatacttcaattgtacatcattcgcatgcatccatgcttttcattggttgcattgctcgttgcattctttacttg

SEQ ID NO: 202658 - DNA, 353 bp, Glycine max
gaagatgagttgtacaggttcactaagcgcaccacttcatctctctaagtgcaccacttcagttcatccgctaagcgagaaaggcgcactaagccaaaaatactaacgtgcgctaagcagtccatacgcgcgctaagcgcacgagcacgaataaggccacctatttaagcctgaaatcagattttgtgaggagagtttggactgggattcagagctttgcatgtctagggtttctagagagagaaaggtccaagttccagagagttttgagagattttgctatgtgaagatctgcaaagaccaaagctcgaagcaagagccagtttgaaagcttgagatgagtttgtaagtga

SEQ ID NO: 202659 - DNA, 415 bp, Glycine max
  unsure (1)..(415): unsure at all n locations
ctcagagtcacctgcggcatgcaagctntaagaatatctaacacatgattcatctctcctttcttctagtatgatacttggtatttcacttttgcacaaagctttaagtgtacttgttatttcatgtggaatatatgttttaaagtacatgaaattgtgggatggtgtgacaaaattcaataggaagacatgccctagattacacatcgataaacatttcatgtatatctttttacccaatcctgtggatattatattgcaatagtattagtaagggtgattaagactttcctacatgcataacttaattatatttgcacatagtgaaattcaaacatttctggaagaatatgtctattgatgggctcattattcttaaaatattattcagattatgctttgaaagaggttgtgt

SEQ ID NO: 202660 - DNA, 414 bp, Glycine max
  unsure (1)..(414): unsure at all n locations
actagctgaacattaagtgatccgggacctctcaggacttggtcatgatgtctactagctggntggtggagttaataaattcggtactgatttctttggaccgtagcttttcccaaacaaaatggaatcaatctctatgtgtttagttctctcatgaaatacaggattagaagcgatgtgaagagctgtctgattatcacaatacaacttcatctattgaacaccacaattttaattcttgaagaagttgtttaatccacaccaattcactagtaacaagagccatagctctatattctacttctgcacttgatcaggcaacaacactttgtttcttgcttttctaagggacaatatttcctccaaaggatacacagtatccagtggtggatcggctgtctattggacaacctg

SEQ ID NO: 202661 - DNA, 338 bp, Glycine max
  unsure (1)..(338): unsure at all n locations
agctntcactcggaggcccgattcaggcgcataatatatcgagacgctcgaaattgaacaacggaagctatcgagaaattcaaatggtcaatacttcgaactcggaggtcctattaaggtgcataatatatctagacgctcaaaattttacaatggaagctctttggctatacaaatggtcataactattcactcgaaggtccgattaaagcgcataatatatcgagacgctcaaaattgaacaatggaagctcttgagcaattcaaatggttctaacttgtcactcggaggtcccaatcaggtgcataatatatccggacgctcgaaatgaaaaagg

SEQ ID NO: 202662 - DNA, 405 bp, Glycine max
agaggttccatcaaccgccctaattccttgatgctggtggtatctgggcttttgaccttgacttggtagaacctcttaccggtttgatttgttcccatgcttactaaagtgagataaaagctggtgcaaatcaaaactccgatatctcatgggtggaatggatgaatgcatgatggaatgcatatgacacagatgcaatctatgaatgcgggggtccggggaatttgtccccttcttagatacgatgtctaggggtagcgaaatgccccaacgcacatttttaagaaggcgacacggaccctccgttggtttatttacagtagggatcaagacagaacccatatgcaatgcctatgcaaacgacacaatgcggtaatgtgcacattatgacaatatttaccgaac

SEQ ID NO: 202663 - DNA, 409 bp, Glycine max
ttaagcaccgcggctgcagcttacagcagatttagtaatgacccactatcctagaattaaaataacttaatgccattaacctagggaattaaaacaaacttaatggctgagtgtaactgaaattgtggcaaccaaaagtcacccccaacagccaacaagtcagccaccatttggtctcccaaaaggctgatgcctaggttgccaattgggcccttattacaacttgaactaaagcccttttagttgattaacccaaaacatatttttggtcagccaactttacaaggattgggccattatttagacaaacaaaacactctaaaattgaaataaagtggtgtcatttagtcctcctccatttgggccatgatacaactcacaaccttggacttttctccttgaaacttgg

SEQ ID NO: 202664 - DNA, 421 bp, Glycine max
  unsure (1)..(421): unsure at all n locations
agctatacgctcatgccagctaactntgcggatctcgtcatcgccggagtatgtatngaatccggactacgaanaggcaagttcgaatatgctgccaatatggcccctaacaacaacagaagagccccagtagtgggcgcgaggaaaaaggaaggagacgcccacgtggtcaccaccgccccgacgtggatgaaagcaccccaaaatatccaaagctcatactagccaaatcccccaaattttttaatccgagtcgggaattccctcccgactcaagtaaaaggaccagccacagcagaaagagcgtcggcccaacgcacagctccagccgcaccccggccagttaataatacagcccccggcgcgacctataaatatgcacagcacccgcccccgaaagacaacttccctcctattccca

SEQ ID NO: 202665 - DNA, 420 bp, Glycine max
  unsure (1)..(420): unsure at all n locations
tcttaagtcacctgcggcatgcaagcttgcnccaacattcattaggtgaatacacttcttttatatagtcatcatccatccgcaattccaatcattcatgctcaatatgatgcatgcacctgacctcaactctcatatgcaatgtggtaccatccccaaggaaatagcctaagcgtgtccacacaacactctcacttaggaaaactaggcagtaaatgtcgaggtcaccctgtcgtgcacaggaaactccctcccccctccacggtgatcagcctgagtcttaagggagttccaaactaagtgacatgccctcaagtacaagtattcctccttatgagaaactacaagtacttactgacaaagtttattactatttccatgtcatatgaagtatgaaacatgggcaccatcaaatgcact

SEQ ID NO: 202666 - DNA, 389 bp, Glycine max
  unsure (1)..(389): unsure at all n locations
gcttctcaaggaagctacctagtctaataatagaagcatgtgnaacacttggtggaactttgatgaatgaaagtcttatgacacacacttcaaagttctacttctccccctcttttattccttcaatttcgtgctcccccctctctctttctctccctctttcttttgctccattgaagcatccttccaagcttcttatccaaggctcatcttggtggtgaagctccttcttccatggcttattccctagtggatggcgcctcccttctnctcttctcctttgccttccgctgcatctccatggtgaaaaatcaccattgaaggacctcattgaagctcaaagatccagcctccatagaagctctacaagcaagcttccatcaagtggt

SEQ ID NO: 202667 - DNA, 266 bp, Glycine max
  unsure (1)..(266): unsure at all n locations
agctntactatgcagagaatatccaagaaaaataccttcatctgacttagcatcaaattttcctaagttatcttttccattattcaatacaaaacatttacaaccaaagatatgaagatgtgagatgtttggttttctgccattgaataattcatatgaagttttctttaaaatgggtcttattaaagccctatttaaaatgtagcatgcagtgttaacggcttcagcccaaaagtattttggaagaggagtatcatttaataaag

SEQ ID NO: 202668 - DNA, 405 bp, Glycine max
  unsure (1)..(405): unsure at all n locations
acctganattgagtggaaatgattattaagtacaaaaaatggaagcactaagtatttattacctatacttaacagaaaatacttataacacaaaagttttatacacaaaagttcctacttcaccgactaacagtcactagcttgacgcatcgtcctgttatctaggatccaacagagttcctacttcaaggaccttcttctcaggtcttttttcctccatcacatgcactttaagacagacattttggctaggtgtatctttgtcctcatggaacaaatcaaagttgttcttctgatcttctattcccatctacagtatcttctttcccatgtccaccaggcagcttgcagtagacatgaatgggcggccaagaatgagaggaatgtcaacatcctcttctatgt

SEQ ID NO: 202669 - DNA, 374 bp, Glycine max
  unsure (1)..(374): unsure at all n locations
ttaatcgaccgcggcatgcaagcttctcaggaagctagtagggattttntattcttgtgtcacacttggtgnaactttgatgaatgaaagttctataatacacacttcaaagtgccacttctctccttatttcattccttcaattgtgcgctccccccttatctctttcttttcctccattaaagcaatctattaagcttttatccaaggcacattcttgggggggaagctacttcttccatggcttattccttggtggatggggcctcccttcttctcttatcctttgcctttccctgcatctccatggaggaaaatcaacattgagggacctcattgatactcaaagatccaacctgatgcaatcctacccc

SEQ ID NO: 202670 - DNA, 418 bp, Glycine max
  unsure (1)..(418): unsure at all n locations
ctaagctttatcaccatggctntttagcatgggtcatgattagaaagctgtttttattgagtcgcaatcgggcattttagttctgtactcccttatttgaattttgcacctttcattgtatatgtattttggaatgtttatttcaaaatgaaatttttttgaaatagaaaagcaggcacaatagctcatgatctttctcctagtggctggcttaagtgggccaataaagcacctgttaagcgaggtcaatgaccttccaaagttctccatactacatccagttatggaaatattttcagttaggctctattgcagtacaacttgtattttcataaagggacgcaatcccagggtctcccttggcgaaaccatgtcaaccaagtcaaggctaaccctaaagaaaccaagttgatatatt

SEQ ID NO: 202671 - DNA, 293 bp, Glycine max
  unsure (1)..(293): unsure at all n locations
acctgangcatgcaagctttgatgatatggtcttcatcgacgaaaggatctttggttgtttaaaaagaggcaaatctgatcatcatgctttgataaatgcaaaaaaaaaaaaactagggcaaatgaagagggtgagaatgagggaaaagcccatgttgtgactgccattcctatacagccaagtttcccaccaacccaacaatgtcattactcagccaataacaaaccttctccttacccaccgcccagttatccacaaaggcaattcctaaagcaaccacaaagtttgtcta

SEQ ID NO: 202672 - DNA, 412 bp, Glycine max
  unsure (1)..(412): unsure at all n locations
gctatgctactatgatggcnaacttattactgttgttcaagacatattttgagctcgtaacaaatcttctacacttggagtgatcacatgcagtcctcttgaacccttaccacccactctgtcatcatgctgagactcaggaagcccaacaggtttagctttctctaattattctgaacaaaattcaatggcttcttctacaatgtacctttcaacaatagatgcatctggatgatatagattctttgtatacccttttaagatcttcatgtatcgcttaaccgggtacatccaccgtagataaacaggaccagaacatttgatttctctgaccagatgcacaatcaagtgaatcatgatgtcaaagaaagtgggggaaaaatacatctccaactggcacagtataattgcg

SEQ ID NO: 202673 - DNA, 409 bp, Glycine max
acctgaggcatgcaagcttgtaggcctaggatcttcgtcatggagggatttttttgcttcttggaagaagaacggccgcggaatggagaaggaagagagagaggatacgccgcttccaggagaagatgagtctagaagaagctcaccaccataggaggccatggataagagcttggaggaagaaggatatgaatgaagggagagggagagaagagcacgaaattttctgctctaagagagctttgaaatctaaagtttaattttcaaatgatcaaagttgaaaaaatgcacacacatgacctctatttatagcctaagtgtcacacaaaattggagggaaatttgaatttcaattcaaatttcacttgaatttgaaattgaatttgtggagccaaactttgcagccaaa

SEQ ID NO: 202674 - DNA, 403 bp, Glycine max
gatggatactaaactctcaacactcgtatatacctttttatttaagaataaaagtgctgagtgaattaactgtttctaatacgattacaacttaatcattgtttaaacttccaacaaatcttgttgaattgtttaaagtcagcagtggcttgataggacaaagaatattgggtttaagtcaagcatgaagtagaacttgcatgtgtaagagtcaaaagtgacagtaaaaaatacttgtaactttgataagttagtaaaaacttggtggattgtcaagaattgaacgtagtctcaagtttgagatgaatcgatataattctttatgtacttccttttattgctttaactaacaaaaagtttgaatttatttttagattttatatcttgttttgatcataaagaa

SEQ ID NO: 202675 - DNA, 378 bp, Glycine max
  unsure (1)..(378): unsure at all n locations
acagagcagcacagaagaagcgcaacggacagaggcaattttatttataaggccnncccgccaaaaacacaacaaaacgacgcaacaaatgacaacgatattgtacccgcctaatcaccaaattacgaaacacaccgactaataaggcgaggacaccgacacaaaacacgactaccacgctggggcgtagaaccaaaacaacagcagaaaacgaaccaatgcattgtatatgcaagaaaaagacacaaacgaggcatcgaacactatcaaaaccaacacccaaaaaagaacacagaaaccaaccaatacgccgccgctgaagaccctccctccacatcacaagcatcatgacaaaacacagagcaaataaatgaagag

SEQ ID NO: 202676 - DNA, 342 bp, Glycine max
  unsure (1)..(342): unsure at all n locations
gagactctttgggctcacacctctaaccctgcttccttccaaggggatggatgattcatctctcttccttctcaattcccttcactctcttcatactttntttttcttttactacttcccttgctcatgaattttcactacctcaacttttctgtcacatgtatacatacatacctaccaaggtttttaaaaaacggnctaagtcacaacatcaagcttcttgtggtttccatgaccatattctgaaaggatcgccaccgcaatttagaaccttgatacatatatattaaaataaacaaactaaccaattggcttttttttctttatgggaaacttgaaagt

SEQ ID NO: 202677 - DNA, 328 bp, Glycine max
ttcaccatgagcgccccctcgcagggcttgcaccaccctaagaactctccatttgaaattgggatttatggacattttgaagcaatcctatcccccaagggtattggatagaagactccaagaagatcggaccacgaatgtaggagatagccctaaggttgacatgagccttaggatacattttgggcccatgggctaagtatgaacccacttatctttggacatattaaaaaaatatatcattaattttgggctttgcatttaacgtgccatagtgtagggagggcacccctaaaacgcaggatttttcaccccttggattttaggg

SEQ ID NO: 202678 - DNA, 394 bp, Glycine max
ggcacgatggttataaggctcattttatgatgatttggatcgcacttaaaatatcgtcttataaagatatacatttctaacatggttgtgaactaagactcatcttagaatattactcttctaaaatagcctctcaagtgaaaatcgccttgacatttttttagcatacaactgtcttaaaaagacacttttcgaagacggttgtatgctaaacaatgccttagaatgtatttaaaaacacatatgaattctaacaatggtcttgagagaaccgtcttacaatcattttttttaattttttttacttgggatgtattggttaatcagcgacattttcttattaaattgtactattataaattataaaagcatatccaagtattaattatgtacc

SEQ ID NO: 202679 - DNA, 343 bp, Glycine max
tgggttgcattagggcgcctattagaattccttattctgtccctatatatatataaaccagccccacaatcctaattttacaaaatcacattcatacgtcattggggcatttcaccgagcacttggtgggcgcatgtttagacataaattgcaagagaatgggggcaatgtggcatgccccattgcttcagaatacaccataggcctaaggccttctcacacaaatccttaactcaacaaatcaagcataaaaagcaacccaaaactgccccacaagccatgagctgttcctcacaattttagaacaccaaaatgaaacaaatgcaccacacaaaaacaaaaa

SEQ ID NO: 202680 - DNA, 435 bp, Glycine max
ctaagctggctctacatctctcccttttgatgatgacaacgtgtgaaatcatgtattctcactcacacacaactttgtcctacgacgatcactctttcataaatttccatctctcctcctttgtttttgcaatttatgccttctcttaaaattaagtttgattacctcatgtgaagttccttgacttaattccctattacgtctccccctttggcatcacaccaaaagccaaagtgcgtaacaaatttgaagcatgcaaatacaacgaagcatccatacaatattcatgggataatttaaaccaagtcatgaagcatgaatcatgaagcaagaaccatgaatagatcatatttatagaaaccctatagtcgaataacataatttatatttgtccaacataccatgcctaattaaaaaatagtaaattggtcaaat

SEQ ID NO: 202681 - DNA, 405 bp, Glycine max
  unsure (1)..(405): unsure at all n locations
agcttctacatcctcactttaatattctctacacagaagactagatgatgttattttaacaattatctgctcaaaaaataaaaaattagaagagaaaaattacaaattcctctataatttaacccccaaaatatactcataattagtagttatcagcttccagatagtggtatcttaagtttaatgatactattacgtggtatggtctcctagagaacaccgttgatcggtgtatctacatgaaggttagtgggagcaaacttgtaattntagtcttatatattgatgatattttgcttcctgctaataatgttgctatgttacataatgtaaagaagtatctctctaataactttaaaatgaaagatatgggtgaggcattctatgtgatacgaatagaaatat

SEQ ID NO: 202682 - DNA, 256 bp, Glycine max
agatggacgatcgatctacccacggatcatcgctcctgtgacgaaaatctatttgacagacgttggataaaatcacccaccgcttcattataacgtgatgacttatgcacttgcccaagaactgctcttcctggctaacgcctacaatactcattggcatttttatctccaagtattcttttgcatcacgcacattcgacacttgataacagcctgatcgattaactaagggcattcgccttggatcccctaactt

SEQ ID NO: 202683 - DNA, 419 bp, Glycine max
catccttaagtcacctgcggcatgcaagcttcgacaccattaagggtaaagactcttcctgttttcttcggatgtccagtttggtcattcagacccccaccattctgctccttcttgggatatgggcaatctctctgaatatgcctcttttgtctatagttgaaacaggtcattcctttatcaacacaatttgaggagatgtgccctggcttaccacacttataacatgtgatcagagttgagaaagtagtgggtttgctaccactaccaccagcaaaccccatagcaacagtcctctaattgttgggatggttaccatattgcttaggagggtcgagtacggttttccccaatgttaaggtccattcattttgttctttactgggcctgtactcctataatagggtgccctgtctcaa

SEQ ID NO: 202684 - DNA, 411 bp, Glycine max
  unsure (1)..(411): unsure at all n locations
gcttgccctaaggcttgtacctcatcactttcttgcgaagctntaaccttattgtctctcacagtctttagatatgggagcaaatccaatccttgtgtccggactctcagccacttatggtagccgccgatgatcccgttactgcttcccctaagctctctgtcctttcttcacaccgcatcacctgccttgcgaactccttggagtacctttgcattggggtcactgaaaccccgtgtcatgaaaggcgtgatgctttcgtctaatggcgctcctctcatggggtagccaagctgtcttatggcgaggacgggattataattaatacaaccccttgttccatcaagggaacatttggacatccttcgcatgaagatagaatcctgattcttccttccttctagcgaggga

SEQ ID NO: 202685 - DNA, 335 bp, Glycine max
  unsure (1)..(335): unsure at all n locations
agcttgaattcattcttgctttggatgtttttatcttcatctcgnctacttttggtattctttttctttgtttaaagcgagtttcgaccgatcgttcatgccataatctcgtttaatcattgataaaataaaattcaactgatcgttagtgttgtaatctcacttaacaactgtttaaataagtttcgactgatcgtttgtgtcgtaaactcttttcatcaatgtaaaataagttttaatcggtcattaacgctgcaagttatcttagggattgaagattaatgagccaaaaccaaataaaacccactcataaactctttatttcataaaaaaaa

SEQ ID NO: 202686 - DNA, 414 bp, Glycine max
  unsure (1)..(414): unsure at all n locations
ctaagctattgaatcgatacacaattatttttgagacagtgatagattcgttcatgtgtctntgctntaattgattaccatgtgatataatcgattacttctctttctataagtgtttcaaaagtgatcaaaaacactttaatcgattatattgaggagttaatcaattacattgttcttgagaggtttccagttttttgggaagaattctttaatcgattgaaatgataatataattgattacttcattgaaataattgattacattgtagattaaatcgattacaggcaattataattgttttctctataaatagtcaccttgtgttttttgttacaacaactccacgaacttctaatagttctctgaatgagctagaatcatgtgctgatattaggaaaagatagaagaga

SEQ ID NO: 202687 - DNA, 403 bp, Glycine max
agcaccgccgctgcagcttatagaagtattgccagtcggattatttctctttatctggctttggaaataatacaatctctttggcaatctattgttgtaatgattgaaaaagagacctggccaacttggatgctccaagacttttggttatgtcttcaactgcaccaaagccattgttcaataggttgtaggaatatcatggccattgttgtaaacctaataatatgcagccaagtacatgttctcatattctttgactctcctccctcccccttttctcctattatcaggtttgcaaaatgattaaagcattattttccttcattggggattcctcatcctcctgctacaccttttatgagcaaattattgttatttaaccttacataaaatgataaaatgg

SEQ ID NO: 202688 - DNA, 411 bp, Glycine max
gctcacacttatcaaacatctctataagcctctataataacattactgtttcttatccaacaggagccttgtcgtgagagaaatagaacccacaaatacgatttaatttgcaaaatatcatggttaaaagtgcataatatattttcctggtagcaattaattaaggtgcaagtacaatttaaaatgcacaacagtcatgtagtaattcatatttagaatatgtaataattcatatatcctacattcataagacaaaatatagtaagtttttatgaaccatagttaggcatcctacaccgaaacaggcttcttagaaagtgtttatatattttgcaactaatcacatctactcaattttaacatgctttgctaatttgttggatgaaagttgagcaggtgaaatctatgaac

SEQ ID NO: 202689 - DNA, 286 bp, Glycine max
ttatgaaggaatgactcttacaattgattttgaattttaacgttcagatacattggtaattgattaccaatatcttgtaatcgattacaccattttgaaatcaattggaacgttgcaaattcagttgaaaacttttgaaatcaaactttgccactggtaatcgattacaggaaactggtaatcgattaccagagagtaaaaactctggtaacttacaaaattttgagaaaaactcttttgaaaaacaaaactgtgctatgtttgttttttggaaaaaattttacaa

SEQ ID NO: 202690 - DNA, 407 bp, Glycine max
gagattactgaatttgaccgttgcatgttagaagttgttgtcttaaagctagttattgcctcattgcttcaattctaaaattatagaggtttttttgtgaacattgactttggattcttgcatttgatactggatattttaacaggacaaatatttgtggacaaaatgctagttaatgcctagaaagaaagtaaaaaaagatataaaacaattggtgtgaaaaagcttcaattttgaaattgctttcaaagacggttattagttaataaccgtctttgaatgtcgaagccaacatagtaatcaaagatggttattatcttaaatgtcgattctgacacaccaatctaataaccatctttgaatgtcgattctgacacaacaatcaaagacggttattagctactaac

SEQ ID NO: 202691 - DNA, 338 bp, Glycine max
tttttatatatctctaatcacctgcggcatgcaagctttaaacttcacaaagatgtcaacaacatcagatttaaacttcatagaataaatccaacacattcttgaataatcatcaatgaatgcaatataatacttactgccattcaatgatggtgttttcatgggtcctcccacatctgtgtgtactaactgcagcttttgtgaagccctccaagtcttgttttgttgaaaaggaagtctggtttgctttccatattggcaagcaacacattttggaagtaaatcgtctaattctggcatatctttcactatgttgttttttttcatgaaaagtatgc

SEQ ID NO: 202692 - DNA, 360 bp, Glycine max
gagagtcttgggtggaggaaaactcctcctccctcgtttgttatttgcaagtgcatgggtgctcgcccaggcgagctaacctgttttttttttgggaagaaataagtaaggctttctatatgtcggcgttcgcttactcaaaccccctcagggcagatatccaatatttactttaaagacacagtagtaattactgtaaatttaaaggatactaggctgccttgcagcggtgctttccatttgtccaaagctaggcaagggacgacgacccatcggttgtgaccctagcctttacttgcgtccgtccctaagtacctgaaagtacgaaacaacattgcatgtgaaaccgtggccgcgtta

SEQ ID NO: 202693 - DNA, 399 bp, Glycine max
ctgagctgcagcttctaggggccagggctgaaaagccccaatattacccttttgcccttctttagaatattttgcacatttccttccgaaatgtcacaaaactctatggattgcgcaactattagtgttaagttgttcaattcggctggcaagaatccaaatgtttgcaaatgatcattcctggatgaaattaaggtatgacaataggacatgcgtgatgtcctttgacactacaaccactcaaatgttcatatgctagaaagtcattaatggtaaaaaaaatatcattgcacgcaacctgaaggtctgccggagattctcatcaaacacatcaacctcgtttacccacaattttctcaagtcttcaatcaacggagtgagatataaatcaatatcatt

SEQ ID NO: 202694 - DNA, 417 bp, Glycine max
gctttgcagctggatcattatcctatctccgatagccgatgggtgagtctcttttatgtagtcccgaagaagactggcctcacagtgatcacaaatgagaaggaggagctgattcctactcgggtgcagaacagttggagagtctgcattgactataggaggctgaaccaggttaccaaaaaggaccattttcccctgccattcattgaccagatgcttgaacgcctggcaggtaaatcccactactgtttccttgatggttcttctggctatatgcaaattactattgctcctgaggatcaggaaaagaccacattcacctgccccttcggcacttttgcttataggaggatgcctttcggcctgtgcaatgcccctggtaccttccagcggtgcatgattagtattttcagtgat

SEQ ID NO: 202695 - DNA, 404 bp, Glycine max
cacgcagctgcagcttcaatccagacacttgctgggtggagaagctttcctcttccatggctaattctttaggggatgacacctcctctcacctcttattctttatcttcagctgcacctccatggctgaaaatcataatcgagggaccttattgaagctcaaagatccattctttaaataagcttctcaagcaagcttcatcaagtggtaatcagaacacaagagctccaagtaggtgcaccttaaacctccattaatttttagctttaccttctcctccattggcgtgacttcatttggacccatgaatctcgtcacatgacttgtgctgaaagttgttaacatgattttttagaatttccaccaattaaactttctatacaagctaaatttgattttctat

SEQ ID NO: 202696 - DNA, 356 bp, Glycine max
cagcctcgcttagccacaagcatctcaacaagaggatgagtgttcatcctctaaagctgaactcgcttagcgccataggcgcgtttagcgagttcttccgagaacacgtatattcaatgaatactgatgaagtcgcttagcgcagcatgctcgcttagcgagttcatcgcgttttccaaagtgcatcttctaatttggttgaccaatcttttctggttgacgccactcaattttctagtattttctttaattctctgttggatacttcgacttgcccattagtttgaggatggcagggggacacactctatgattcacatggtattgactcaacaccttttgaagttgagtattat

SEQ ID NO: 202697 - DNA, 247 bp, Glycine max
  unsure (1)..(247): unsure at all n locations
aaacacacgcccgaccacagaagagccaccaccaaaacatttcgttgcaccaacacaangataaaccgcggactatcctataaggccccaacacctccccacaaaaattaacccaatcaagatttgttggaccgaacaacggcaaaccatccacactcatacctaacaacacaaacacgactcgtagagcgacaaacaccctccccatcccatgcgaaacggatgaggacccggcccccatatctct

SEQ ID NO: 202698 - DNA, 362 bp, Glycine max
atcgcatgtccacttgtaactccaaagtatcaaacctttcaccaacaaaggtttaaagaccatcgaacctgtccaaaatcttttgaagaagagaggaatcttctccaccatgtaaatgtccttcttcatcaatgggttgagcaccctttttcacccaagagccatcatgctctttacgggaaccaaaggatgcaatcacaacaccgcctattagaaaggatctcttgattggaacattaggttcataatcaagaggaatgttgaagtgttgaaggaagatagtgactaggtgtggatatggcaatggagcatttaatcgcaatgccttatgcatgtgatatccgactaagtgtgccccatca

SEQ ID NO: 202699 - DNA, 296 bp, Glycine max
tagcttgatagagctcgggtagtcaaagagaagttcaagtccatagccatcaaagtctgaagagagtatgatgaactaagggacgccaatatggccaccgatgaagccttggaatgaggaaccaagaaggcccgaaaggaagaacacgaccaaaacaagttttgaggggctttatagggcagctatagtgagctcatgctcccaagaggtgaaaggaatcatcacgggtcaaaggcatgatcttgaagaacgagcttaaggcttgccttagtccgaaaagaatttgtcccaacatt

SEQ ID NO: 202700 - DNA, 401 bp, Glycine max
  unsure (1)..(401): unsure at all n locations
atatttgatgagatggccttcatcatagtcagtatcatataccaaccacctggcatgggctcaatgaacagaaacccacgctgtaaatatatgtagcatagaggggaagccattgagtcctcttaatggaagttatgtcccacgaagatgtggagtgactctgagcacgccacaaggttggcacacctccatggatgtgaacaggagacaatggatacacctatgatatgtgggacacaactgcnctgtggttctactnataaggaagaaatggcgggtctactatgcctctctacgtttcacaggatttggtactttgcacagcgaagagggattgcaggtatcgctctgagaaaggaggcaagttcnaattatgttcgcttcctggccannacacaagc

SEQ ID NO: 202701 - DNA, 409 bp, Glycine max
atcttaagtcacctgcggcatgcaagcttcaagaataatggcctaacaaactccttatttccaaaggaaattcaataaataggcctcctatttttaatggagagggttaccactactggaaaactcgaatgcaaattttcattgaggcaatagagttaaaaatttgggaagccatagaagttggaccttatgtacccaccatggtggctggaaatacaacaatagagaaacctagagaagagtggtctaaagatgaaagaagattagtgtagtacaattggctaaaaacatcattacttctgccctaggaatggatgaatattttagggtttcaaattgtaagagtgctaaggatatgtgggacactctacaagttacacatgagggaacaactgatgtcaaacgatct

SEQ ID NO: 202702 - DNA, 415 bp, Glycine max
gctttatgctgcatgttagagatcctgatgtgctacaatcgaggtgtttaaagaattaaatgaaagcttcagaaatgtcaaggactcacaggaaaagatgtaggggcaaaactcgaaactctgtctgaagcttaaatttagagatactgtaaactgctgaacattgtgcagcacagcatatttcatcagcctattgaagagcttgggctcccataccgcgacgcgtgaattcaagattgagcagggaaactgaaccatctcggccagacagaacgcgagacactaatttgttgaatttgacaacattgttaaagagggttgtattgaatccaagataagttagacgcttccaaaggtccttccatcttttagacaagacacaagtttgtacagcatattttgtgtccataaattc

SEQ ID NO: 202703 - DNA, 405 bp, Glycine max
  unsure (1)..(405): unsure at all n locations
acctgaggctgcagcttggactctgggcattgcgttaaactagtctttaaanagtggggacttttgaaaaaatcttcagaaacaagtaactagaagaattgtgacttttggaaatttatttttcgaaatcagtcactggtaatcgattaccattaagatgtaatcgattacacatcagcagatgtgacttcattttaaatttttgaaaatcaaaatgtttagaagcctctggtaaatcgactacaagtattgggtaatcgattacacaagttgaaaatgctaaaacacaagttgtaactcttgaaatttgaaatcttaatgttttaaaacactggtaatcgattactaccttctggtaatcgattaccagaaaagaaaactctttagtaaaagaatttgtaaaaa

SEQ ID NO: 202704 - DNA, 414 bp, Glycine max
  unsure (1)..(414): unsure at all n locations
gctaagcatgcccgagtcattcatccctatgagatgttgtcgaagtattgtgtgnatcataatcgccattccttggattatagggttgaaccaagctcatgcttttacaaaaaggttcatcaagtcaagttgaaatatggaagtaaccgtcttgcaaaattaaggcaaaagatgaatcgagtcacatcactgcttcgtctactgccaaacatatttaggattattgatgtccttgttactttcagtttcaccttgacaaagatgtcatggaccatgttgaaaatctaaattgattcaaccccatatcctgcgtaaaaatttgcaatacttcaactgtacatcattcgcatacatccatgcctttcattggttgcattgctcattgcattcttttccttgaaaataaaatataat

SEQ ID NO: 202705 - DNA, 394 bp, Glycine max
  unsure (1)..(394): unsure at all n locations
gcaagctttaattcattctatgtgcgcgtggtggtccttattttgtttcatgtattncttattctcgntttcatttactttatatacccccttttgacgtgcttaagccatttatttaagtcatttctcgcttaatctaaaaataaaataaattttcaccgatcgtttgaattgtatcattcgctaattttggttaaaatgaattccgaccattcggtcgtgccgtaaccacgttggaaatcaaaaaagaggtgaaataataatataataataaaaaaataccttttagtagaataaagcggaaaaatcaatcggacgttttctctttgggatttctcattcttaattgaattgactaataactaaaatgaaactaaggctaaaatcaactcgc

SEQ ID NO: 202706 - DNA, 412 bp, Glycine max
  unsure (1)..(412): unsure at all n locations
gctaggcncagagagcatctcctagataactctttcataattattcngatgtgccatcattttcttctattttctaaaccctttttgcaccattttaattattgattggtcttaattgtcaattaattacgcagttctattatttgggctcatttagctaatttgatgttnttaatctaatttcaggaattaatgaaacattgggcttaatccggattttagttgtggacttgaagagggcaaataaagcagcgcttaccttagttaatttctaattaagaaattttgcaattttattttatgttgttcagtgtttatttcgttttgggccagagtattgtaatagggccccagtgactttgagtgactctttttaaatagctgccttgggattcgtgcaaggcatttctgt

SEQ ID NO: 202707 - DNA, 353 bp, Glycine max
tactagctacattaatgtaaattcgttttgtttggtagagctaatataacatcttgtgtaattgtaaatagaaatagagaaaatattagaaaaagcataaaaataagtagatagcgtttccgttttatcaaagttgttgtaaccgcgtggctcccaaaacccaaaagaaaaggatacgatcgataccaacgatttaaatttgtacatgatagctgcgtccactccacccaaaagaagaaaaggaatactatctcaagacctattctgctattcatgattctatttgtataatccagtgggtagttggttcagccttcaatgcatttttagaggcatattaaccaaccacttcc

SEQ ID NO: 202708 - DNA, 383 bp, Glycine max
agcttctcaaggaagctgcgcgagtctataaatagaagcctgtgtaacactcgttggaactttgatgaatgagagtcttgtgagacataactcaaagttcaacttctctccctttttcttccttcaatttcgcgctcccccctctctctttctctccctctttcttttcctccattgaagcctcctcttcaagtttcttatccaaggctcatcttggaggtgaagctccttcttccatggcttattccctaggggatggcgcctcctctcacctcttttcctttgtcttacgctgcatctccatgggggaaaaccaccattaaaggacctcatcgaagctcaaagatccagcctccatagaagcttcacaagcaagcttccat

SEQ ID NO: 202709 - DNA, 418 bp, Glycine max
  unsure (1)..(418): unsure at all n locations
ctaagctcagaccnagcaactcanaatctaggtatctaaaaccgctcaatttaatttattntcaaggtttgagaagtgaaattgagaatggggtaaatttggagcaaactctcacttcacacaagtctataacatcaatttaaacttgctcaaactggatttacacctaaaattccaccgaatcaaaatttgactcctcaacacccaattttaccctagaaatggctctttgttcactctggtcatttgtctttcactctagcacagnccaaactttctcataagtcctaaatgacatttcaagctaggattaactcactttaaccgccaaataccactaaatccagatttggccttccaactctcaaaaactcactcgttttccactcagaacaccatattctcactttctaaccct

SEQ ID NO: 202710 - DNA, 293 bp, Glycine max
ctgcagcttctgttattactggaatagagtggaagattattgttatacaaatgacgcatatgactgggataacttgtgatatgacacatatttactaatgggatatttaactttggcttggaggtctagttcatatttagctggaggttgaccacgattagagctgggtggaagattatattggacaataatagactcattgtttggtgtgttggtggtctcacacagacaaggatcactttcatgatcgtttcatctaaattagtattattaagggtaggatcaacagaaac

SEQ ID NO: 202711 - DNA, 349 bp, Glycine max
  unsure (1)..(349): unsure at all n locations
ttatattnnaaacttcaattactacaagttataaatgaacttaaataaatattaccttcatttccatgcttttttgaaggtggagtaatttatttgtgagctggggatgttacatgatggtcaagtgtattttagccgatttgagttagtcttgtaagggatttgtatttatctcatggtggtaaatatggctgttactttgtatccatcgtttgcatgtttaatttctatactttgcttgtggtaaatgactatatatgaagacacaactaacttctttatatacttgtggtaaatgactatatatgcagagacaactaacatctttctctttgattttggcgctatt

SEQ ID NO: 202712 - DNA, 344 bp, Glycine max
  unsure (1)..(344): unsure at all n locations
tcacactgcangcgtgcacgctttgatgatatggtcttcatcgacgaacggatattttgttgtctaaaagaggctaatctgatcatcatgctttgataaatgcaaaaaaaaaataactagggcaaatgaaaagggtgagaatgagggaaaagcccatgttgagactgccattcctatacagccaagtttcccaccaacccaacaatgtcattactcagccaataacaaaccttctccttacccaccgcccagttatccacaaaggcaatccctaagtcaaccacaaagtctggctaccgcattacaatgaacaacaccacctttatccaaaccaaaaacaccaa

SEQ ID NO: 202713 - DNA, 107 bp, Glycine max
gataaacaggaccagaacatctgatttctctgaccatatgcacaatcaagtgaattatgatgccccagaaagcgggggaaaaatacatctccaactggcacagtata

SEQ ID NO: 202714 - DNA, 398 bp, Glycine max
  unsure (1)..(398): unsure at all n locations
agcttgngttaacgatgatttgcagaagatatgaaaatcaattacataaggtagtcattgagccaattcagaaagagttaatggaacatcaattctattatttcttcaacaaacttcattgcaacatactaactaaagggtgtaattcaacaaggacagtatcaattttcaacatccacttgtgcactatgcatgtcttctgngnttttctactacgagcaattttcttttgggaatacatcatacaagatgcttcaacaaaccagagaaaatgattctgtaattcattttccaaataaagtttaaaaggatttgctggaccaatgccactatattttttccaaaatacaggaggccaaccaaaaacgacagcagctgatatatgggtaaggctcttt

SEQ ID NO: 202715 - DNA, 342 bp, Glycine max
attaagacactcaaattttaatgactcaatccgaatcaatccagatataaccaaaatatttcagttctagttgtaaagaataatttaatgaatctaaatcaacctaaatcaattaacattgcttaatttaaatttaaacatctcctaaatccaaatcaactcaactgatgctcacgccatatcaaatggggcctaaggtactcacaaggtgtagcacaagtggctagtagcgtgggctctttaagcgtatgattaggggttcgattcttgattatgtgaatatagtaacatttatgggaaaaggatataatactttacttcctaagggattaatctcatgac

SEQ ID NO: 202716 - DNA, 334 bp, Glycine max
  unsure (1)..(334): unsure at all n locations
tttttnnacggattccaaggtttgagaagctaaattgaaaatggggtaaatttggagcaaaacctcacctcacactactctataacatcaatttaaacttgctcaacaggattcacacctaaaatttcaccgaattaatatttgactcctcaacacccaattttaccctacaaatggctttttgatcactttggccatttgcttctctatcttgcccaaaccaaactttttcaaaaagtcctaaatgacatttcaaactaagataaactccctttaacctcccaataccactaaaatcagatttggcccccccactttaaagtcttactctttt

SEQ ID NO: 202717 - DNA, 300 bp, Glycine max
gcatgatatgcatgccacaatgatgatttacaaatttatgccaaactgatcatgcatacacccatgtagacactcaaacatcaagttcgtggccatgtgacacctaagcttaggatttattgattccctttaaataaacccaatggtacttaaagatggtcctttatcaatttatgcacacatccaactccatttatgcattcgggagaacttctacagcatttaccccagaggtgtacacacacatttttcttccaaaaatctgtttgtgttctgactggtgaaatttttaaaagaaca

SEQ ID NO: 202718 - DNA, 161 bp, Glycine max
acaaacacagcacagctaaaagcttactccgcacaatggaggcctctcgcgaatgaagcggctattcctcctgtcgaggacgcagggacactaatcactgacccaactacaaactcgagagacaaggccgccaaaatcaacaaggcaaaggaatgagatgg

SEQ ID NO: 202719 - DNA, 306 bp, Glycine max
  unsure (1)..(306): unsure at all n locations
agctncatgaggatgaatcaagtgtgagtcatgttgttttgatgatgacaaaaagcccaaaagaatgatgtcaagattgagtcaacaagttcaagatcaagattaaagaaaagacatcaagatgaatcaagattcaagaaaagataaattcaagattcaagagaagaaaccaaaaagcaacaagtcaagacttcacaagggaagtaatgaaaaagatttttcaaaaaccaaacatagcaaagttttgttttacaagaaaattttttccaaatttttctaagttaccagagtatttactttgtggta

SEQ ID NO: 202720 - DNA, 402 bp, Glycine max
tgcatgcttgcaagcttaattaagcatcatggtaggttgctagtgtgtttcttggagccaaagctgtatggtggacacgtcctatcatctattttggatgggcatgacgaacattgatgttttagagggtgaccagcaccctgggccagctttttataagcttatcttgctatatattcctatgggaccctgaatagctacgagtgacacagacgctcagagacttgactttatggtaaagggtgataggttttaccagctgcgccgctgtatttcatgatttacttaggtcattatatgtgtagaactacgcacatactactcttattcagatacatacacgtggcatagtcctgttagagcacggaatctatttagacaaactgacttatatatactaac

SEQ ID NO: 202721 - DNA, 353 bp, Glycine max
ggaattcctagaaaaaaactcacttctataaaatccaatagcaacacgacaacttaagagaaatgctagttattatgtcataaaaggaggagacctgtacaaaaaaggcttcacagcccctctattgaagtgcctaactcgggatcaagtaaagtatgtgaataacaaaatgcatacagggatttatggaatgaacttgggatcttgttccatgactacccgagtactcagagtcagatactatctgtcaacaatgagaaatgactaaacaaaatacatgaagaatgcaaaacaattgcaacatatcccacctattagcttaagaagtacatggtataatcactccatggccc

SEQ ID NO: 202722 - DNA, 399 bp, Glycine max
taatcaccgcggctgcagcttacatcaacccttgagggtgctgtatcttcttcacatggacttgatggggcctatgcaagttgaaagccttggaggaaagaggtatgcctatgttgttgtggatgatttctccagatttacctgggtcaactttatcagagaaaaatcatactcctttgaagtattcaaggagttgagtctaaaactttaaagagaaaaagactgtgtcatcaatagaatcaggagtgaccatggcagagagtttgaaaacagcaggtttactgaattctgcacatctgaaggcatcactcatgagttctctgcagccattacaccacaacagaatggaatagttgagaggaaaaacatgactttgcaagaggctgctagggtcatgct

SEQ ID NO: 202723 - DNA, 345 bp, Glycine max
  unsure (1)..(345): unsure at all n locations
aatcaaaagatgtaactcttcagagagtttttgactttttcaaactggttttaaggttttctaaaagtcataactcttctaatggttctcttgaccagacatgaagagtctataaaagcaaggctttgttttgcatttcatttatcttgaacaacctttacaatacaatcctttacaacctttgaatctctttgaacttcttcttcttcttcttccttttgccaaaagctttccaaagttttctggtttttccaaaccttgaaaacttgtgctattcatctttntcattcccttctctctttgccaaaaagaatttgccacggactaaccgcctgaattcctttt

SEQ ID NO: 202724 - DNA, 350 bp, Glycine max
ttttctttatagctcgtgcattaatctagtcgattggacatttctgactaatatataactcgcctgcaaagccagtcaacttgttcttattagatgagaacaagcttaacttcactttcaaaagctatcttaagagaggaggattgttccccgattcttatcaggagaaggcatgttaacagtatttttgggcttgagtgccattctgacaatcctgatggggtcgaagtgtgttttaacaacccctccaaaaaaaaagcaactcccagtaagcgtttatacaaccctattggtggttaatctgaaacctttaacacatacatttgggaaaagggatacaatctcattcc

SEQ ID NO: 202725 - DNA, 277 bp, Glycine max
tggctatgcttcccttatgagagaaacgcataagaactttgaaactcacaccgaaggaatattatactacatgagagttcaatcttttgaaatgatctgtcagtgcttaaaagttccagaagtcttggatgaatttgatgaagattgaaggaatgtaagatcctgaggagcgcggagattagggaatctcttagaactttcttaaaatccaaagttggtacactatgatgagggaacttttgccatgccaaatgcggctcgctttaagatgaatgac

SEQ ID NO: 202726 - DNA, 385 bp, Glycine max
agcttgtccgtgggttagacatgatgggtacatgtatttggactcgtaggattcaatttgggcataattggatgagggaaagagtggttttcgaaatctgcactttatgcagaattttgctgttgtaatgtgcatcataattttgcgtttgtgcagaaaaatgctatgtatctgctggttgtggaaagagtacttccgaatgagtttctagatgtttgctagtagatcccaacggtcaaaatgtagacttatgtactatagacttccaggaaaattttcgagtcgatccaacggttaatgaattggaacgaacgacatgttactggggtcttttagctaaaaaaagctgtgatttggtttgagtttcgggcaaagttttcttcct

SEQ ID NO: 202727 - DNA, 347 bp, Glycine max
  unsure (1)..(347): unsure at all n locations
aagctacagnnaaagtctttaggctaatttaagacaagaaaaagagacaaaagatcaaggaacttacttggacggtgtatgattgatgcttcaaagtcgaaaatgcacaaagagagtacaaatgcaaaatgtgcaaatttttggagagagagaatgtagaggcgaggtttctgtaatctggaaaatgtgagtgtaactgctgttacattcacttaagcagtttcgatactttcgcttaacggaccgttgcgctaaacgagcaagtgagacatttggtttctaaccaggctcgcttagccgacgtttcaaatttcaattttttttaataaaactccgctttatgtgaa

SEQ ID NO: 202728 - DNA, 413 bp, Glycine max
  unsure (1)..(413): unsure at all n locations
aaacttttttttttgcgcacctaagcacgagctgcagctgagaaggtagacatgaacatgtctggtttggnttggntcaaggataaaagggatgccccacattatttccatgacacaaatgcaaaaatgatgatttggaaattttatgcaaaactggtcatgcatgcgcctatgtggacgctcaagtgtcaaatttttatggtcatgtgatgctagggctcaagattcatttcctctattttaaatcaacccaatgtttccaaaatatgttcttttatcaatttgcgcattcatccgagtccattttgggcgtctgggaaaatcttcacagcattcacccttcaagtgtatacacatttttttcaaaaactagttatgatcagtgaatttttccaaagaagagctggaagtca

SEQ ID NO: 202729 - DNA, 401 bp, Glycine max
  unsure (1)..(401): unsure at all n locations
gctctctgananacaacaacaaaagatatctagtgatgtttgtatgatctatgccataatctttaaccaagaattagatccagaaaaaccttagaatggattgaaatatcaaaaaccatcgatcgaaaaattgcgtatgaactccacgatgaactgattgcattggtgctttactttgaatctttcatatagaactagaaccatcatagtttcctcatccaattcggaggattgaactcgttattctagtgtgatgccaatggttctcattgaaaaaattaacagttgaagtttgtcctttcatgctttttatgattctggatctatggattggtaatgacaaaactgcatcaagattatgcgctcatcctgttcactagttcaccagaaactccttcacg

SEQ ID NO: 202730 - DNA, 383 bp, Glycine max
taaatagagcctatgtcctagtgttcttttctatcagagcgttgtgttcccgtgtcctctagcatgaggttcttcatagtcatccacctattcatctgttcccccgaacacaagttcaagatcatcacaggatccaaacacaacaacacacagggagtgagttatcacattcctagctaatagagaaacaagacaattaaatatacatattatataaatgagataccacttgcttaaacatagctcacgtaacttcaccacttcgtcattcaaaattcacttttcaattatcaatcacattacacaagaatctcacacttcgatcaagatataataacacatcaattagcaagcatatgcaatagttattgctaagactcaat

SEQ ID NO: 202731 - DNA, 319 bp, Glycine max
tagctcgcctatgttttttctttcatgcgatatgtagcaaagtcgttgatcctgtcaagtttgatgagctagaaaatgaggccgcaattatacagtgctagttggagatgtattgtccccctgctttctttgacatcatgattcacttgattgtgcatctagtcagagaaatcaaatgttgtggtcctgtttatctgcggtggatgtacccggttgaacgatacatgaagatcttaaaaggatatacaaagaatctatatcgtccagaagcatttattgttgagaggtacattgcagaagaagccattgaattttgttc

SEQ ID NO: 202732 - DNA, 291 bp, Glycine max
  unsure (1)..(291): unsure at all n locations
tctcactactattattaatatctccatntctctcaggggggtttctggtttctttggcttctctagcttctgcagatactttatgtaatgcagaagctgagctttccattaattgcctttttactcttttcttctctggctcctgttaagcctatactggataatatatataagtatggatctactatcaaataagaaccattacatgatgcaggatcatcatttattttcctgaccataaacatacatgtatgggtattgtatatgataaaaaaattaatttaaatagat

SEQ ID NO: 202733 - DNA, 359 bp, Glycine max
acagcgcctggaaatcgattacaagtggaaaaacccttattttaacaatgataaaatatcttaaaaactttttgtaatcattttgaaaatcatgttttgaggccaaacctttttaatcaataagagattcttttaacaacaataaactaagtcttatcttattttgttgatcttgaattttgacttgaagtactcttgtgttgcttacatcttggaatcatcaaaaccttcatacacatacattcacattctccccccttttgatgatgacaatcatatgaaagaatgtacaaaaaatattttttgcgatacgagcacttctccttaaagttgcaatcattgcttagtagaataaatat

SEQ ID NO: 202734 - DNA, 409 bp, Glycine max
caagcaccgcggctgcagctctatagaggtctgtcctagattcactacatttgcatcgcctctcaatgagctggtgaagaagaatgtggcatttacctggggtgaaaaacaagagcaagcctttgctttgctcaaagaaaagcttactaaggcacctgttctagctcttcctgacttttctaaaacttttgagctagaatgtgatgcctctaaagtgggagttggtactgtattgttacaatgtgggcaccctattgcttattttagtgaaaaacttcatagtgccaccctcaactaccccacctatgataaagagctttattccttaataagagccctccaaacttgggaacattaccttatttccaaggaatttgtcattcatagtgatcatcaatcacctaagtac

SEQ ID NO: 202735 - DNA, 382 bp, Glycine max
tgtcggcaatggaggacgacgcgcgcgtataatatatacctggacgcggggtgaagactgttggacgcgtggagctctggtcgcggaagaagaataactcaaaggtgaagaagctttgggtcgcggaagaaagtttcaaacaaaacgggggaaagacttttttattaaaaattttaatttattaattttattataagggacaattgtgtaacttcacataattgctgggtgcacctagcaacagcctagttccaaagtgtcccttgaatctttttagcctgctaccaaacctgattccttgaaaatggaccaagtattaagcccaataatttgaaccaacattgatcaaaacgcgggcttggctgaattgccactaccccac

SEQ ID NO: 202736 - DNA, 348 bp, Glycine max
  unsure (1)..(348): unsure at all n locations
tcaaatganagtttgaaagagcaattgagcaagacaaaaaagaatatgttgataatcattgatcaatataaagaaaaggtgaacctagctgctattcataggcaggtgctgaaagatgaacaggcgaaggtgtcagcctagcacgttgaaagagaggcaagggaagaggtgaaagttattgcatgaagaaggcatgaagtggatggataggtttgctctcactttgaatgaaagtcaagagcttccaaagctgttagccaaagccaagacggtggctgacacatactctactcccgatgaagttcatagtcttttcaattactgccaacacatggtcgaactaatgac

SEQ ID NO: 202737 - DNA, 339 bp, Glycine max
caagcttcgaacaatagacttgcgcggcatttaactgtttttgggcttggcggccacactcaacaaagtattctctacacctactgtatgttgattcaacccacgctgttatgggaatgatgcgaacatccttcaaaaccttatttatacattcttagagggggttgtaatgtggcctataccgaacgccttttttataataaaccacccgtcctattttttttgagaggcgaacaaatcctggtgctatggctggactcacttcaccaaattttttaaattttgaaaaaaatgtgctgcaaggagtgcagctcgctccaaatagttatcaaaaaaatt

SEQ ID NO: 202738 - DNA, 351 bp, Glycine max
  unsure (1)..(351): unsure at all n locations
agaagagcaacagactaaggtagagctcataccttgttaactggcagcgcacaaagctttgagctttgagcacccacgactattccaagagcagtgtagggttttcttcgacccacagttccaacagcaatgtaaagttttcttcgacttttcttccatagaaagttctgtgggtttaaacgagcggtnttcgacagtattgaaatgaatgtgggtgtctaccgagcggtttccggcagatttcgggtgggaggagaaagagaagagagagtgcaacatggttttctagtgcgcgagttgtgaaatttcaacacgttttaacatattaacataacaacatcaacatcggtt

SEQ ID NO: 202739 - DNA, 381 bp, Glycine max
  unsure (1)..(381): unsure at all n locations
aagcaccgcggctgcagctagcctggaggaccaggacgtcctcttttttagctatctcttcttgaaaatctgcgtactcatcgtccctgagttggacgtgtctctctcggaggaatgaccatcctttgatggcctcaaaacgttgctggtgctcagcgctcctgaaacgatggctgtcaaactccggagcggcaccggtcccttcagtcgcggcgtccctcctagatcttttcgcggaaagctttctcggagccatttcttgttggagatgaataatagagcaaaacggaatccaaaatgccaaaaatgggacctagggntcacaaatccctgcagtgccgcgatcttctttttttgaatagaggggggggcgattctctt

SEQ ID NO: 202740 - DNA, 411 bp, Glycine max
  unsure (1)..(411): unsure at all n locations
gctatcgcggggcngaagctatcacccttactggcgattganatagtanttaatggaagtcaagagcatgatagtgcaccgacaccgctaattggtgaataggttcttgagtgggttgacaacaccaatactgtatttggaaagactcaaaagaaggaaaaaagtaaaatttccatatggaagaagaggtcgatattgtttgatcttccatattggtctgatctacatgtcaaacattgtattgatgttatgcatgttgagaaaaatgtctgtgatagtgtcatcgacatacttcttaacaatcaaggcaagacaaaggatggcttgaatactcatcaagatctaggtgacatgggtatacgaaaccagttacatccaaggtctgatggtaaccaaatatacttgccttta

SEQ ID NO: 202741 - DNA, 289 bp, Glycine max
cttaacctgcggcaatttcttcttgacactcccagcttgctctgttttataatttgaaagcttaattttctgcaccaaattggaagatacgagatgatgaacgatcatatattatgtctatagcttgatatattttcacgtttataggttggaatgaatagtttgaagagcataaacgatgaattctggagaacaattttccctagcattacaattttggctcttcctcgtactttttttttaccctgtataaaatagtcagagaaacgtttggggaacaaattgttgg

SEQ ID NO: 202742 - DNA, 363 bp, Glycine max
  unsure (1)..(363): unsure at all n locations
gttgaggcactgtanttcttttatatctacagcttcaacaaaatctaccccacggttactgcaaaacagctcaggctcacccatggtgttggccaccatttcaccagcaaaagggtaatagtataccagagcctgagccagtgcatttttcagtgaccccaccatggttccaaagcaataatatttttcaggcaaaggttttttgtagcaaaagaatacactcacgtccactgggggaatgagtagatcaaggtttgatagtggcagccattgctctttcattggaagctctggtaccactatctcctccttggtcacactcacaatgaattctacttctccaaccttaccattcatttttta

SEQ ID NO: 202743 - DNA, 394 bp, Glycine max
  unsure (1)..(394): unsure at all n locations
agcttcatccgcagatccctgatgtaagactatgcttatcttanatagcttacgaaagtttagactaatttaacctaagcttcgtccgcagatccctcatttaagactaggcttagatcaaacagcattattgtaacaacatatttgaaaccaaaacttaatccgcagatccctcatttaagactaagtttcaatcctgcttcaattaagttctaaggcaatagtacatttcccaatgctaaagtcacctaactatgcacacaaatgggtgattagaccaagagcatacaaaatttaagcattgaaagaagcattgaacacaataaacacaaccaattagatattaaaggaattacatcagttgttctttagaaatccccaacaagagtgtcta

SEQ ID NO: 202744 - DNA, 408 bp, Glycine max
actagctatacctactacatgaaaagctttatggagtcagatattatactgcgccgatactgttaactggtcaataggttcttgagcgggttgagggcatcaatattgtatttggaaagacccaaaagaaggaaaaaagtaaaacttccatatggaagaagaagtcgatattgtttgatcttccatgctggttcgatctagatatcaaacattgtattaatgttatgcatatggagaaaaatgtgtgtgatagtgtcatcgacatgcttcataacattcaaggaaagacaaatgatggtttgaatactcaccaagatctagttgagatgggtatacgagaccaattgcatccaaggtttgatggtaaaaaaatatacttgcctccagcttgtcatactttgtccaaaa

SEQ ID NO: 202745 - DNA, 416 bp, Glycine max
ttttgtctgctcttaagcacgcggctgcagcttcgcctagatccgtgtgttggactaagcctattttagatagccctcttaggtttagactaacttaaattgagttttgttcgcagatccctcttgtaagactagactcagctcaagcagcttatgaaagtttagcgtaatttaacctaagattcatccgcagatccctcttgtaagactaggcctagactaaacaacattattgtaaaagcataattaaaaccaaaacttaatctgcagatccctcttgtaagattaagttttgatcctgcttcaatcaagttctaaggcaacagtacatttcccaatgctaaagtcacctaactatgcacacatatggatgatcagaccaaaagcttacaaacattaagcattgaaggaagcat

SEQ ID NO: 202746 - DNA, 394 bp, Glycine max
gaaagctcatactgcaatgaaacagtacactgttgtctatcgagaagatgtaacctttattgtaggacaatgggtctacgtaagactcaggcccttccgtcaacgtttggtcgtgggactaacccatccaaagctattgaagcgattctttggaccctttcaaatcactgctcacgtgggtcaggtcgcatatcgactccagctaccggacacagggcgcatccacttggtcttccactactcccttttgcgtgcccatcacggtccaccacactactacacaagcttctatttacgacacgccatctacgacgggtattgagaacccaattagaatatggcgtggtggcaattttgtaaataggggaacaaaaatttgtttttacgttgtaca

SEQ ID NO: 202747 - DNA, 393 bp, Glycine max
  unsure (1)..(393): unsure at all n locations
ngcttataagaacaaaagtgccttaatcatttcttaatatgcatgtgaattaggacgcatcaacaagaatcaagtcaaggctattgtgcaagcaatcaatggggcaaaacacaccaaatgattataatgatggatggctcaaattctcacaaaggtaaaatcatcactttcaaattgagctttcaaaactatcatgacatgtagagaagaatcaaggatttcaagtcacaaaatgtcaagaacttttattttcaaaacaattacccatttcttgaacatatcctataattcaaagaaaaacatgcaaagtcgtacgtgcacacgaaattgacccaaaatattaaactgaaaattcgacgaaactaacaacattaacaaattaacacaactaaa

SEQ ID NO: 202748 - DNA, 309 bp, Glycine max
  unsure (1)..(309): unsure at all n locations
agcttgtaccctagaataagacccagaggaatatctttttagtagtaacaagcaatattcacgtaagcaaccacagcctgccaccctgcgccaacagcaacacctgagagaacgggttgcacgttgttgatgacaatgcaaagggccaacatgggcgtgagctctaccacaatctttctcacttctgaatcatttgaaaacaagaaagggtactggttccggaagattatcagcaccatcgagagcatgacaccgatcagagttgaagtaatcacagcaacaagaagtgaaaacttgttgttnttgggt

SEQ ID NO: 202749 - DNA, 418 bp, Glycine max
  unsure (1)..(418): unsure at all n locations
gcttagctcgctaattgagaatgcactntnggtgctaagcacgactntttgtgtatgtgcaaacccctctcgagttgggatttgccctaatctcgacaattcgcgcacagcacaattccctatcggattggaattgtgtttagggcgcttctcatgctaagtgagatgtcaaaaattgttattttgaatatcccaacaatcaaaacatgaagcatgggttatgaacctatagtcaaaatttaaaggtgatccaacggttaatgaatcgaggatcacggttttaccggaacaagtttaggtaaaatttgaaatctcataatttcaacctgatacaatcctaacccctaagggcgttggatagaagactccaagaagattgggttagagatgcaggagaaggccctatgattctcatggg

SEQ ID NO: 202750 - DNA, 386 bp, Glycine max
agcttgatcaacacaacagatatataccagtatacattgcaatagtcatggacaaagtaaagctccaattcaaatcccaaattgagaaatcgaaaagctatcccataagtttactcttctacccatgcgagaatgtgttggtatattttgaaacatattttctggtaaaacaaagcaataatataaattagcagattaattgcggtttagtgataacagctaatagacaaccaaccaatttatgcccacacaagcatgtgtgctacaatgcaacacgagaaaattcacttccacgtgagtttaacattatttctcaaaggcatgtgatagctaactttttgaagagcaccaaacaattgataaactaacaagaaacaaaccttatt

SEQ ID NO: 202751 - DNA, 419 bp, Glycine max
  unsure (1)..(419): unsure at all n locations
agcttggggctgaggacattataacagcatcagggttgtagtttaggattgtttttgggagagaagaataatttgagggttgtgcaatgccagtttttattactgttcatgcacattgttcacgtagaataaaatttgttttctgcaatttcatttctgcttcaatctacaatttcgttttctgttgattaatggaaggctaagtctccagcgttgttttctcttgaggatcaagcacaactctctttgaggttntgttattactattgaatactgataagttttttctcttcaccaattactctgtatttgttgctattaatccatgcatgcttagtgcttgattaattgtctttgcgcttaatttatgttcatgcttaatgatcagttttgttcatgatgaattggtgtatgtgttg

SEQ ID NO: 202752 - DNA, 423 bp, Glycine max
gcatgctagcttctaactgaaatacaaacatacatctagtctttaccattccggatcgtttgaggtattatgtttgacaatatatgacaattgtagaattgtttatttctgattatatttccggtaactatatcaactgtatgttgtccgataataagatcttgccaaaagtaaacattatattttgtcagggatgaaatttctctgcaaatcttttaaactggtcaattaatgtatgaacattttctcttgaagtatttaatcattgtaaaataaccatatatataatgctctctcccaaaaaataaattatgtaatgttcttttaaaggtgaatcatcaatagttggcttatacactctagaatagctaacttctaaaaaatgataaaaatgaaaactaccgtttagaataacttcatcat

SEQ ID NO: 202753 - DNA, 408 bp, Glycine max
agcttatgagaacaaaattgcctcaatcattattcttatattcatgtgaattatgaagcatcaacaagaatcaagccaaggctattgtgcaagcaatcaatggggcaaaacacaccaaatgattatgatgatggatggctcaaattctcacaaaggtaaactcatcactttcaaattgagctttcaaaactattatgacatgtagaggagaatcaaggattttaagtcacaaaatgtcaagatactttattttcaaaacaattacccatttgttgaacatatcctataattcaaagaaaaacatgcaaagtcgtacatgcacacagaattgacccaaaatattatactagaaatccgacgaaactaacagcatttaacaaataacacaactaacaaattaacaaaact

SEQ ID NO: 202754 - DNA, 418 bp, Glycine max
  unsure (1)..(418): unsure at all n locations
agcttcacacaaaaaaaatatgaatcatttatttcttgtcttttactaangaaaatcctatctgcagacgaatccttatttccatcatatagtctccaattcactatcttgctcctaactgcctatgaactgacctagttattatatatcttattcacgaactgcatataaatatatcaacactaaaggatgtctagatgggatgatgatcattcagaagagacatatggcagatttctgaaaaattatgaataagaggaagaatggaataaaagaaacaatattactcatataaagtgaaaaaggagagagaaaaagcataacagtaaagcttacccttctggttttaagtgctaagtaacgtgcatatatgaaccatttgctaacctgcattcttctacacattagtaacagagtt

SEQ ID NO: 202755 - DNA, 419 bp, Glycine max
  unsure (1)..(419): unsure at all n locations
agcttctaaacnttgtacaagaatgaagctctgatactacttgttagacaagtggcctcagatatcttaagaaggggggggttgaattaagatattcgaagctttttcccctaattaaaaatctatcttactttttacttaagttatgaattcccttaatgacaatcttcttaaatattaattcaaatgaagcaacttgaatatgaatataaagcaataataaataaaggagattaagggaagagaaaatgcaaactcagttttatactggttcggccacacccttgtgcctacgtccagtccccaagcaacccgcttgagagttccactaacttgtaaattccttttacaagttctaaacacacaaggacaacccttcctttgtgtttagagattctntacaacaagagactcacagt

SEQ ID NO: 202756 - DNA, 431 bp, Glycine max
  unsure (1)..(431): unsure at all n locations
ntactatgcagagaatatccaaggaaaataccttcatctgacttatctatcaaatttcctaagttatcttttccattattcaatacaaaacatttacaaccaaagatatgaagatgtgagatgtttggttttctgccattgaacaactcatatggagttttcttttaaatgggtcttattaaagccctatgtaaaatgtagcatgcagtgttaacggcttcagcccaaaagtattttggaagaggagtatcatttaataaagttctagcaatctcttccaaagatctatttttcctttcaacaacaccatattgttgaggggttcttggtgcagaaaaattatgctcaatttcatgcttatcacaaaataattcagattctttattttcaaactcacccncatgatcactcctaatagatataatcttgag

SEQ ID NO: 202757 - DNA, 381 bp, Glycine max
taagacgactgcagcatgcgtacttgtcacaaaaaaagggctggggaagattattattttattttcttacccagcaaaacgcatcattattatagtccacagcctctactatgaccactctttccagataaaagaactacttgattcacgcataaacaaagaactacgtacgtgcgatttcctctttgataggagggcacatacgaacaaaaaccccgcttttgtcgacctcaaaaaaatataaagaaataatagttaagataacacaatcccacaattctaaaaaaaaggcctggtgtcctatgacacaaacgtgagatgtgctaatacctttctacaacggacatattactcccgaacatacaattctaattttgaccg

SEQ ID NO: 202758 - DNA, 205 bp, Glycine max
  unsure (1)..(205): unsure at all n locations
gatcatccttctgggacgactgagaaaactggggcatacgacaagggtgagaaagacggagaaacccatgctgagactgccattcctatacaggccagatgcccaccaacccaacaatgtggctactcagggnngnncaaacctccatcttacccaccacccagttatacacagaggccttccctaattaaccacacagcttgtg

SEQ ID NO: 202759 - DNA, 411 bp, Glycine max
agcttgaataatgattggtatgcgatatgtgtcatatttatggagactaaaaacgtactttatcctatatattattatatatgagattatgttaacgaaattactcatttctttattttggatggtaacatcagatcaaatgtcatgtactgcttattgctaattgttggttgctaaccatccaaaagtcatgaacacatacatggttataatacctttttgggaaatttgaaggagtaagactctcaagagaatttcatcaacgcgtgacgagtaaaccatacaagtgaatttgatgatatcttcaatccaaacactactacaatttttacatataacatcggacctttaacatcgggtattcaaaaaaccgatgttaacaaaagcgcggcggcatttttataaataact

SEQ ID NO: 202760 - DNA, 422 bp, Glycine max
  unsure (1)..(422): unsure at all n locations
agtctcacgattgtcacgtggctatacattatttcttgccaaacaaagtcaggttagccataactcacttgtgctntttctttcatgccatatgtagcaaagtcgntgatcctgtcaagtttgatgagctggaaaatgaggccgcaattatactctgccagttggagatgcatttttcccctgctttctttgacatcatgattcacttgattgtgcatctggtcagagaaatcaaatgttgttgtcttggttttttgcggtggatgtacccggttgagtgatacatgcagatcttaacagggtatactgagaatctatatcgtccagaagcatctattgttgagaggtacatcgcacaagaagccattgaattntgcttagagtacattgaaaggctaaacttgttgggcttctgagtctca

SEQ ID NO: 202761 - DNA, 379 bp, Glycine max
  unsure (1)..(379): unsure at all n locations
agctnttagctatgtgtgctgatgtcggctattctgtttgagctgtcgaaattttttatgaaatgaaaagttctgggacttgccagcctgacagctggacattttcatccttgattaccatttattcccgcagtggtaaagtttcagaggtggaagggatgttgaatgaaatgatccaatctggattncaacctaccatttttgttatgacatcactcatccggtgctatggaaaagcaaagcgaactgatgatgttgtgaagatatttaaacagctcctggatgtgggcattgttccaaatgatcacttctgctgttgccttttaaatgttctgacttcaacaccaaaaggaagagcttggtaagctaacagattgca

SEQ ID NO: 202762 - DNA, 423 bp, Glycine max
  unsure (1)..(423): unsure at all n locations
tcattcattntatcatattctgctataaatacttattgtgttctntaccaaaccgggcaaatacataatcctctttcttatatttgacctagtgcaccttcataaataatcaaacaagttgttcaaatctctcagtttctgccattgaataccttatcacaagaatatgatggtatgaatgccttgcaagaaagattatcacagatacaagtgccaacaccaaaagatgagaaacttaataaactactactgaagttaccgattggaatgttttatcgtgagagtggctgagatgtttgattagacctacataaagtctctggcaaatatcaaaatggcaatcctttcatcagtttggctagaactttctctagttctaacaactaatggtgatgtacttctttggaagtaatctcaccttct

SEQ ID NO: 202763 - DNA, 409 bp, Glycine max
  unsure (1)..(409): unsure at all n locations
agcttggacaatatatggactgaaaaaaggacttgtatcctgtattttttggctcgggatcttgattcatattgcatgtgaaaagtttctcgtcaggcaatagattatgatgatctggatttgtaagggtaagagccaaagtgtttgaatcattttgaattgattgttggagtcctttcaccatgtttgaaatccagttcatgaatgagctatcctgtttaacataggatttgaaaccagaagattcttcaatttgctntttgactcttttactcccaattatcaactgttgntgaaagttacgtctcttcttacctgttgaaaaaaagccagcactgttacagctcttaacacttgaatgactgtcattctcctccctcgataatattacatttgcctccccatctga

SEQ ID NO: 202764 - DNA, 411 bp, Glycine max
gtgcacagcccttagattacaggggtaacccagatctgttcttatttatccacaagaagaccctttgatttcgatctcttgaatctgtagctgcatgcatatgccataactcaacaaggtcacatgcattgtagatctaaggccttttggtgcaagctcctcctgaactggcggatcttagagattctggaaccataattgctctctttctcgatctagacttggtactaagtttctacactaacactcgacgaagaagtgtgataattaagcaaaatattaacagttcttggtatgcttttctactaatcactaactagcgtctacgggtttattcacctaacctgaaatgaagcagattcatttttgaacattaatgtcggaaacaccactggtgaataattttctttt

SEQ ID NO: 202765 - DNA, 427 bp, Glycine max
agcttatagttattggagggagaataaaataatctcataatcaattgtacccttcaagtaacgaagaattctttttgcggcttttagatgaggagaggtaggagccttcgtaaagctacacacaactcccaccgcatatagaatatcgggccttgtattgattagataccttaaactccccacaagaatcttgaagatcgtggagtctaccttctctccttcatcaaactttgataacttcaagccaccttccataggtgtgttcacgggattgcaatcaagcatattaaatttcttcaacacttcttttgtgtagcttccttgtgagacaaagataccattctccgtttgcttcacttccattcccaagtaatatgacatgagtcccatatctgtcatatcaaattcatgagatatggactcctcg

SEQ ID NO: 202766 - DNA, 355 bp, Glycine max
  unsure (1)..(355): unsure at all n locations
agaagatgagtggagggaaaaggaaagatgggaaccaaattttgagagagagaagcgggagaataaagtctgaactttgaagtctaatttcttaaatgatcaatggtacaaaatncacacacaaggccactatttataacctangtgtcacacaaaattggagggaaatttgaatttctattcaaatttaacttgaatttgaatttggagttgtggagccaaaatttcactaattatgattagtgaatttaagctatgattcagtccactaatccaagatcaaatccaagattctccactaagtgtgcttgggtgtcatgaggcatgtanagcattgtcatacccttattttcgt

SEQ ID NO: 202767 - DNA, 321 bp, Glycine max
  unsure (1)..(321): unsure at all n locations
ttaagatatcacaaactattccctaattaaaaattctattttgattttaacccaaaacccaagatttctttcaaaaataattcctaaattattattgaaattaaacttactgaatagaagcaataagcaataataaaaaaagagttaagggaagagaaagtgcaaactcagttttatacttgttcggccacacccttgagcctacgtccagtccccaagcaacctcgttgagagttccactaacttgcaaaaaccctttacaagttctgaaccacacacggacaacccttcctttgtgttcatattgctntacaacaagag

SEQ ID NO: 202768 - DNA, 419 bp, Glycine max
  unsure (1)..(419): unsure at all n locations
agcttgcgagaatatttcagaatgtcactaattgtttatattataattatggtggttattccaaaaaaatattaatatcaattattttattgagttgttcttaaatactaaattatttagcaattgcagcaaaaggaaatgagactagttaattaattgcagcaattgaagcatcatacctttcacctacttaatggtccaaaaaatgcactcaaacttctgcaatttctaatgccaagagttgcaatttatctatcaaagttgttcacacttgatcgagttgaaagtgaggagaaattaacaaaggattttcaaatatcaccttctagagatggagcttccaatccacacttgttagttcaaaaatactagtaagactatatttcgatcagctaatactttnttctattatcagcaaa

SEQ ID NO: 202769 - DNA, 416 bp, Glycine max
  unsure (1)..(416): unsure at all n locations
agatgatgacaaaggtgatgacacaaagctcaaaggtcaatcaaagaatgagttcaagatattccagatagaatcaagaacacttccagattcaagaggatagttgatttcacgaatcaagattcaacagatcaagatttcaagaatcaagattcaacagatcaagattcaagactcaagattcaagaatcaagagaaggcttaatcaagataagtatgagaagggttttctcacaaattgagtagcacatgaattnttctcacaacatgtttaccacagagatgttactctctggttatcgattaccagattgctgtaatcgactactagtagcaaaatggattgaaaagtttcacatgaattacaacgttccaatgattcaaaagctgtatcgattacatgtttggtatcgata

SEQ ID NO: 202770 - DNA, 435 bp, Glycine max
  unsure (1)..(435): unsure at all n locations
ttaagtcacctgcggcatgcaagcttcgccgagcattcccattgaaaaaccattatttttattctttaaagttagngataaagcaaaacgaataattagggaacttataaaaactaaatccttaattgaaggagtaggagacaaccatagtgaattatctaaacaaaattggtagtttacttaaggtcattccaaaaagtccccaaacttcggaaagtacttccaaaatggtaacaagaagtacctcaaaattaatttatgttattaatgaagatagtgaccaaaactcataaaatgcaattgagatatgaccagtatcataaaagaatataaatccaattaattccaaacactggaaaacaccctctaaattatattatcaacgtccaattgcccctgaccttctattagaagaaagaggtgaatacaatttta

SEQ ID NO: 202771 - DNA, 365 bp, Glycine max
attgagaaagacaatgggaatacgaataagaatgtgaaaaatgacccaatttatatgtaatactattcctaaaatcttctaatgtgaaaagtcccttcatagtcaaactaatactacatttgcacatgcatttgtgttgtgtgttaacgggtaaaacattcaactaacattcactgaaacaccaccccctactctacccgacccctttttaacccctcatcctctctcatccctcatttttttccctgtacttctctccacccccccattctctctgttgtatttccagtacacaccctttctccaccctttacttcttttgcacccacccatgttgtccccttcatgcaccatttcctctttgt

SEQ ID NO: 202772 - DNA, 419 bp, Glycine max
agcttgcaatacacttcctcctacttaagcattatgtctgtgtgatctccccgatcctcagtggcctacacggatgtactaactcgaatctccaaatgaggacatcacctctctcattaaacctcacaggggtcacttcaaattcttgaccatcgtgagacacttcaaactactccagttgtcggcaagacataaattcccaaagaatgtagtagtaccgacagtgatctatctactggctccatgtgcactagagtgtgacacatgtacaccgacatgtctgtctctcaacacagccacactctttctatctacctactacgccaagctcacgaagagcacggctccctcaacatcttctgaccctgaaagttgttggttgtaccagtgagtcctcaactctttaaatgccacaaaca

SEQ ID NO: 202773 - DNA, 272 bp, Glycine max
atagctatgggaactgtctagcaccatcgtacatattcttgttgtggagccacaaacatacggaggtccctgccctgtgaaactccatactcaagaaacggctcggtaggaaccaagaccctcaaggtcaacgccaagctctatagtgagtaaacctaatcatatcacacaaatgggtactaggaatcaacatactgcaaccaaataataaaagagccatcatcaaagcttctcatgtgaacacagcagtcatgaatggaacaccctgattg

SEQ ID NO: 202774 - DNA, 443 bp, Glycine max
  unsure (1)..(443): unsure at all n locations
gagtcacctgaggcatgcaagctttctcccaagtcctaaaagacattggaagctattattttttttcttaaaccncaccataccatcgagatctgacataacctttcaacactcagagcctgactcgttttccactcataacaccacattctgactactcctaccctaggctacctctacatttcgtctacatacaattctggatgggcaatcgcagtgtgtaaacatcataaacatgatcagcaatacctcacaacacaatggggatgatagactcatccaacatggcaatttcatactacatctcacaagtttcttctcgaatgcgctttcatgaagccgaaaactaacaagacgcccgacatatctgccactacccctttcccacgaatattgtagagatagagtctccccaacctgagatgtctagtccactcggatcc

SEQ ID NO: 202775 - DNA, 384 bp, Glycine max
  unsure (1)..(384): unsure at all n locations
tgagaggatagatggcgacccggcgctgagagacacgatgatattgtctatttgggagtacgcgagctcagctggaggtgggcaacaagggatggtggggttatgcgcgcattgtggatgtggaaaacatgttgtgcaccatcgcccgaccgccacctagtaccacatgtgatgggtaccccataatcctacaagcctgaaatgaagaagngctgaagggcgaaacttcctgctttattgttgaccacagagtggtacctggagatatgtggcgggggtcatgataccattgggacgtcaggtggggtgctattgcccaaaaccatacttgaccaatctcacccaaccctggcatagtcgtcaatgagaacctgtgatgaccta

SEQ ID NO: 202776 - DNA, 415 bp, Glycine max
agcttgtatgattatggggtacccatcttatgttgttctaggtggcggtcgggcgatggtgcacaacaagctttccacatccacaatgcgcgcataaacccaccatcccctgttgcccacctccaactgagctcacgtactcccacgtagcccatatcctcgtttctctcaacaccgggtccccatcaatcctctcaagcttccacaacatccaagcaaaacaacattcaaacagcgcaagctatcacagccaagcaaaacagagcaaaggcagaaaactctgctcaacacatcaaccaaaatcacagtttttcccactcaaagaccccggtaacaattccttcgatccaattcgttaaccgttggatcgactccaataatttactggaagtctatagtgtataagcctacattt

SEQ ID NO: 202777 - DNA, 396 bp, Glycine max
  unsure (1)..(396): unsure at all n locations
gtataccagccatgttccaactcttgattttgcattatngtatgtgcttaaacgtccaccggntccacctggtatcataagagagccacgtcatcgtccaaactgcctcacaattagaaaccatcgcagccctaacgacaccgttgttctcctctaagcaacccatcattgccgcgtaaggcttttcaatcacaccaggaaccgcagacacaaacttccactttgctccgttcaaactcataccccaaagctgcactcccttcaacaccctgacgtacctcgtgttcccaccctccgatttcacaatcatcatgtacccatcgccgaacacgtgtaacatgttcatcacgtttccccaactaaatccaaccgacagaacatcattagcctcagtca

SEQ ID NO: 202778 - DNA, 413 bp, Glycine max
agctcgagatgatgaagggaagaacggtgaaacttcttgcttttattgaggaccacagagcggtacctgaagatatgtcgcgggggtcaagagaccttgtggacgtcaggtggggtgctattgcccaaaaccaatcttgaccaatcccgacccaacccgggcatagtcggtcagtgagaacctgtgatgtacctaaacaggcgagctcctggcggtcaacagataaaaggaacaaagaccacaaagcaaggacgcttgtggcggctggccagctgtgaacattgataggtatgtgaagttaggcccctggtaatcgattaccaacggtgggtaatcgattactaggcttaaaaatgaaaacaggaggccaagatggtctctggtaatagaataccacggggtgtattcaatac

SEQ ID NO: 202779 - DNA, 462 bp, Glycine max
  unsure (1)..(462): unsure at all n locations
tatccatccagacacagatgcaccatcgccacctctacttatgctctatctctagangccatctctgctcacatgcagagtatggaactctatatgcagcatgtggccgaccagcatgtggccaatcgtaagggtcaggcacaattgaatgagagcntttacaattacaccctgcatcagtagacccaggatcccaatccttactcatggcctactcccaagcagatcgaggccataattgcatgggctgtagataggcccaattttcaggcaagggcaggacccacagggacccccgttgatgaagatgaagctcaggaagacgaggacatggtcgatgtgatggccttcttcctttgaggaggttgagccgcttgactaggatcgctgaaactatgaactcatctttattgtggttgtatcgctttcatatttggtcgtatctcattgcgagggacttga

SEQ ID NO: 202780 - DNA, 412 bp, Glycine max
agcttcacttgtgattgaacacacaaatatcttttttcttttatcactgcccactctggtttgtcatttaccaaatttcctggttttgattggctaattataattccagccttaattctgcaatatgttgcatcccctgaaatatgatgaatgaattaaacattaattatattaaaaaacttaattactattttgtttctctaatttatttttaagtttgatttcatccatttattattaaaatattcaattagatcttttaatttttaaaaatgattcagttagatactttcatttgtagaagttctaatgatgtactttattttttttataatagttgtaatctgatcccatttttattttcatttgctctaaaaaattcaaaaaaataagatcagatttggttttaaat

SEQ ID NO: 202781 - DNA, 387 bp, Glycine max
  unsure (1)..(387): unsure at all n locations
tcgagcaatagaatangaaacagtcaacttttacaatagtttatctggccttaanaagggatngggtatacaacacatccatatgcaaatcaatctctaaacacaccaatggtgattcattataaaaattgtaaaggagaaaagtctatgttcatcagacctctttcaatgtttgaaccttggcaccaaacacaaacacctgcaatatagttataaaaaaaatcagtagaagaaaaggctgaatcccataatcatgaagaacaagcaaattatcactaacacatacttcaaaaaaaagaaatataaaaccgcaaccacaccaaagaattgaaattccgattagaataaacaataatctccacgtctaaaaaaaaaaaacttcaatct

SEQ ID NO: 202782 - DNA, 415 bp, Glycine max
agcttgtggagaatctccgataaggatgtatgtttacttcttatagatcttgcctacaaaactaagagtttatttcgtgtttcattatccatataatgtgctagacaaaaatatgacacactgttttgtcaaatatgatttaaccattgatagaaatatataatagcttacttgattttggtgtaactttcatgaggatagatataaatgttgaaccttctattttgagtaatatataattctgtcttaggtcttattgtctaagcaattcataaaataaaaaacataataattttttcaaatgattattgcactttaccagtgttgtgattggcttccacctaccactttattttccttattcatgagtctgggaaatatcgttgaagctaatttcctcctatatatttgggct

SEQ ID NO: 202783 - DNA, 430 bp, Glycine max
agctttgaatgctctattcaatggagttgactttaatatcttcagacttatcaacacatgcacagtggccaaggatgcatgggagatcctgaaaaccacccatgaaggaacctccaaagtgaagatgtccagattgcaactattggctacaaaattccaaaatctgaagatgaaggaggaagagtgtattcatgacttccacatgaacattcttgaaattgccaatgcttgcactgccttgggagaaaggatgacagacgaaaagctggtgagaaagatcctcagatctgtgcctaagagatttgacatgaaagtcactgcaatagaggaggcccaagacatttgcaacatgagagtagatgaactcattggttcccttcaaacctttgagctaggactctcggacaggactgaaaagaagagcaagaat

SEQ ID NO: 202784 - DNA, 471 bp, Glycine max
  unsure (1)..(471): unsure at all n locations
tactaagcttcaagaatgaanaatacatgaatatttggaaccatgattttgtatcttgcatgaatttgataatgaaacaagatgagaaataagataatagccaacttgtatgaagcttggaataagaaagaaatggactcctctccctcttggggaactcgtgcaaaatggtgaaagaagggctccaattgcattttaaagaaacaagataatgttgaaagcttaaggagacaagcctagatgacaatatgaatgacctatggccaacccttgttaacatgccaagccatgctctttaggattagagttgctgttgaatatttaaccacaaatggttaaagtaacgttaaaccaaatatggaaactcatcctatcctaatcccttagatagaggggtgtacacttccttggattttgtgtaatgtgagcgaacctcgctcaaagtcactctcatagagcgagattacactg

SEQ ID NO: 202785 - DNA, 373 bp, Glycine max
  unsure (1)..(373): unsure at all n locations
tcaatttaaacaatccttctaggtttaaactaacttaaactaagctttatcctcagatccctcttgttggactagacttaaaccaaacaacattattgtaacaacatacttaaaaccaaaacttaatctgcagatccctcttgtaagactaagtttcaattctgcttcattcaagttctaaggcaacaatacatatcccaacgttaaaatcacctaactaggcacacaaatggttgattagaccaagagcatacaaaacttaagcactaaaagaagcattgaacacaagaaacaaaatcaattagatatgaaattaattacatcagttgttcattagaaatccncaacaagagtgtttagccagccattacag

SEQ ID NO: 202786 - DNA, 487 bp, Glycine max
  unsure (1)..(487): unsure at all n locations
tgtctcagcgtttatgcgagacggagaccaacatgctatctatcatcgccaagtaccaagaagagttaggtctagccacgacccacgagcatagaatcgcggacgagtatgctcaagtatatgcggaaaaagaggctagaggaagggtgatcgactctttacaccaagaggcaaccatgtggatggatcggtttgctcttaccttgaacgggagtcaagaacttccccgcttgttagccaaggccaaggcgatggcagacacttactccgcccccgaagagattcatgggcttctcggatattgtcagcatatgatagacttaatggcccacataattaanaatcgttaggaaacttgtatggtctctcagaccttgactagatacgactttctttttgaaataaaatgagttggtccatgtttctactncaaaaagcttgtgcanatcaaatcacccctacatttcatctctagcatgcatttttt

SEQ ID NO: 202787 - DNA, 396 bp, Glycine max
  unsure (1)..(396): unsure at all n locations
agccttgatttgtgatnagagtttaaccttagtttcactatagttattagtcaattcaattaagaaagaagaatcccanagagaaacgttcgattgatttttttgttttattctactaaaagatattttttgattattatattattattttacctttttttttatttctaacgtggttacggcatgaccaaatggttggatttcattttaacaaaaattaacggatattacaattcaaatgatcggtggaaatttattttatttttttattaggcgagaaaatgacttaaataaatgactaaagcatgtcaaaatggggtacgaaaagtaaatgaaatgaaaataaaagtcacgaaacaagtggggaccaccaacggtacatagaatgaatttaaa

SEQ ID NO: 202788 - DNA, 485 bp, Glycine max
  unsure (1)..(485): unsure at all n locations
tagcagntgggctaagcacatatccaccgctaagcgcagcttcagcgcgcttagcactaaggagaatctgacaaagcctcaacatcaaagccgcgtgcgaagcgcgagatcagtgcgataagcgcagcaagtgccttcagccaggctaagctcgagactggcgctaagcccaatttcacttactcgtgctaagcgcgatggtggcactaagcgcagcgtctgaagattttgaggaagaacatgaccaccttagcccagacatggagtgctctttctttctctaagaccaattntgagcttaatgctaggcagcccttgaagattttgaggaaaaacatgaccaccttaacccggacatggagtggtctttctttctctaacttgattcccacctcccacacttntgatgtcactcttgacaggccatactcattatgggatattatgaagaggatatgaatgggggacctcatttccacaaactc

SEQ ID NO: 202789 - DNA, 418 bp, Glycine max
  unsure (1)..(418): unsure at all n locations
agcttggaaggatgcttcaatggaggaaaagaaagattttataaagagagaggggggagcacgaaattgaaggaataaaagagggagagaagtggaactttgaagtatgtctcacaagactctcattcatcaaagttacaacaagtgtttcacatgcttctatttatagactacgtagcttccttgagaagctttcttcagaaaacttcctagagaaacttccttgagaagctagagcttagccacacacacccctctcataactaagctcacctccttgagaaacttccttaagaagctagagcttagctacacatacctctctaatagctaagcttacctccttgagatgagatgctagagcttagctacacacccnctataatagctaagctcaccccatgacaaaaaacatgaa

SEQ ID NO: 202790 - DNA, 294 bp, Glycine max
aatggagcgaaattccacgcgtaagaattaccccgcatacaagaagcattaaacagagcaacaggtaaccaaggcaaggaaagagaaaagaattcggacaagctatgcagtaaatccaccaaagaagtaagaatgaggggggacaaactgaaccatactctccctggggaaagagataccccgacaacggagccaaaaactaggtcgagggtcagcaagagtaccgactggcacaagtagtatattaaaacggggaagccgagagtcgagaccacagggaatgtggcgcactca

SEQ ID NO: 202791 - DNA, 482 bp, Glycine max
  unsure (1)..(482): unsure at all n locations
tatgatactaagcttcgacgttcagttcatgtccgtagcaagacccatttcttcttctcgacgcgcgctaaaaggtcatctggtcgtatgctcttcccaatgatattcaccactgtttttatcacctgatcgccaaccggatgcccccaggtgtcgttgacttttttgaagtggtcgatatccataatcatgacgcaataagggcgtttttgggctgatgctgattgaactgtcagttcattaaaaaaataatttctgttaaatatattgnttaagggatcgcgatgtgcaatgttctttgttactcgtagcgcactgaatatatggcacataaatattaccataacggttaacttactgactacttcaatagtgcgactaatataccangtggacacgctatacctgctcatacataacagagagatattgtacagtacggcacataaagcaatcaccgtcacttcattccagatatcata

SEQ ID NO: 202792 - DNA, 247 bp, Glycine max
taaaaaatcatgacattacaaagtgtcacaacacggtgcaaaccttaaaaaacgcggtggcatggataaaatcttagttaaacacggcccggaggataaacgcaaattctgctgaacgaagctgagaatggccagaaaaacacactcggcatgagatacaaagatgtgcgattgctgacatgtaaacaacacgatagaagtattatgcaatgaaaatactaactgtgcagaaaatcctctatatgga

SEQ ID NO: 202793 - DNA, 314 bp, Glycine max
agcttctagccaaatggacttaccttgaattaattcttttgatagcccttttgagccttgtttccctttccttggtttgaagctcactacaagccttaaatgaaaaaccatgatattaccatatccttaaggaattttggagctttggaattgttctgggaataagtgtggggggtttttgtttcattggacaacttgttttgttggctatgcttcatgatgtattttgggccatacttgatgtacattgtatattggtttaatgttggacatgctgaatgaaatgttgtttctcaaaggctaaaaaaaaaaaa

SEQ ID NO: 202794 - DNA, 382 bp, Glycine max
tagctggcctcgccctcgccctcctagcctctcggatagaaactttcatatcatcaggattccaacaggtcttcctgatgtatgccaaggtaatgaccggccacacgcgctcaaaagtgaggctgtcagagacaacccctttggctctacatatggagatgattagagcacgaaacccaagtctagaagagttagactgggctatagaagtcatctggccagaaatgagagctcttatgttcatgtctatgcgagagactaagccacagatccgcctagctctgtccactgtcaggtcatatgtgtgagatgtgggggccaggttggagtatgagagaacactccactcttgggctaaagtcatcaaatcctttctttggat

SEQ ID NO: 202795 - DNA, 406 bp, Glycine max
  unsure (1)..(406): unsure at all n locations
agctntaatttataccaacataaatcacttcatatatctttattcttatgaccgacatggactgatgtgatcgccccaatccttcttcttttctaatcatataaatttatcatataccactacacttttcatatatatggcatgcattaacctttaaacacttgttctggattaaacaaaaaaattagtctttctgtttatgatgaataagtaacgtcatttcggtcttggtattcttggctccaatgtaagtacttgcatcgacccttggcactttcacttaattaatggcatttgaaaacaaaatcgacaaggaattcggatcttattaatcaatgaatatatattgcagaacaacatcttaccgaatattcaagaagaaatcgactgacggctttcagtcact

SEQ ID NO: 202796 - DNA, 410 bp, Glycine max
agctttatagaagcactttaagagaaatattttttaaatcttttcataagtcaaaatgacttattcattaactaatatgtagaagctctcacatataatttctctaaaaaatgagagggcatcttcaacttagtttatggttagccaaaaatgactcattttaacttatagaaaagttcatttcatatttttatccttatttttttcttctagaagtgcttctagagaagcttatccaaacgtacccatgataatgctaatcctatcagactccttgataatactgatccacagataatgctgatagaagaactacagaagataaaaagtagtgttctgtgctaaatttgaagatgagaaccagacatgggcaggaaaattgggtcatcctgcaatgcatctttctcttc

SEQ ID NO: 202797 - DNA, 318 bp, Glycine max
  unsure (1)..(318): unsure at all n locations
gacgaannaaatgattatggggttttantggataataatgaacaattaagggttttgtatatctaatgagtatttattaaggggttttatgacaagtttattaatataggtaatgtgattaattagttagataaaagaccgtgtaatttaaattaattatccacaatgtgattacacagtgtaattttgagaaatttgtatttagacaatgtaaaataaattatttaaatttataataaaaaatgtgagtgtattaatatttaattaattattgaataaggttttataataaataatttgagaataattatattttta

SEQ ID NO: 202798 - DNA, 412 bp, Glycine max
  unsure (1)..(412): unsure at all n locations
agctnttcactcggatgtccgattcaggcgcattatatatcgagacgttcgaaattgaacaatggaagctcttgagcaattcaaatggtcataacttttcactaggatgtccgattcaggcacataatatatcgagacgctcgaaattgatcaaccgaagctttcgagaaattcaaatggtcataatttttcactcggaagttcgattcaggcgcataatatatcgagacgctcgaaattgaacaatggaagctttcgagaaattcaaatggtcataatttttcactcggaagtctgattcaggcgcataatatatcgacacgctcgaaattgaacaacggaagctctcgagaaattctaatggtcataatttttaactcggatgtccgattcacgcgcataatatatcgag

SEQ ID NO: 202799 - DNA, 441 bp, Glycine max
  unsure (1)..(441): unsure at all n locations
ttcgagcgtctcgatatcttatgcgcttgttctgacctccgngtgaaaagttaagaccattngaatttctcgagagcttccgttgttcaatttcgagtgtcttgatatattatgcgcctgaatctgacctccgtgtgaaaacttatgaccatttgaatttctcgagagcttccgttgttcaatatcaagcgtctccatatattatgcgcctgaatctgacctccgtgtgaaaagttatgaccttttgaatttctcgagagcttccgttggtcaatttcgagcgtctcgatatattatgcgcctgaatctgacctccgtgtgaaaacttatgaccatttgatattctcgagagcttccgttgttcaattgtgagcgtctcgatatattatgcgcctgaatcagacctctctgtgaaaagttatgaccattctgaattctcga

SEQ ID NO: 202800 - DNA, 418 bp, Glycine max
  unsure (1)..(418): unsure at all n locations
agctttgatgcttgtgttgaatgcattaaaggttaacagaccaaaagcaataaattaagtgcatatagggctactgacatcttggaattgatacatacggacatttgtggaccatttcatacacctttgtggaatggtcaacaatattttatatcattcatagaagattactccagatatgcatacttgtttcttatacaggaaaattcacaatctttggatgtgttcaaaacatttaaagttgaagttgaaaatcaactcaacaaaagaataaagtgtgtcagatctgaccgtggtggtgaatactatggcagatatgatggttcaggtgaacaacgtccggngccttttgccaggtacctagaggaatgtggaatcatcctacagtacaccatgtcggngtcacctagcatgaatg

SEQ ID NO: 202801 - DNA, 484 bp, Glycine max
tgaccaatcccgacccaacccgggcatagtcgatcagtgttaacctgtgatgtacctaaacaggcgagctcctggcaatcaacagataataggaacaaagaccacaaagcaaggaggcttgtggtggctggccagctatgaacttgattcatatgtgagatatggcctctggtaatcgattaccaagggtgggtaatcgattacaaggcttaaaaatgaagataggaggctaagatggtctctggtaatcgattaccaaggggtgtaatcgattaccaggcttgaaaacgaggtcaggaagctagggaagcctctggtaatcgattaccaaggggtgtaattgattaccaggcttaaaaagggaactgggagatggtggaggcctctggtaatcgaataccagcctgtgtaatcgattacacagaggaatgggtcactggtaatcgattaccaggtatgtgtaatcgattacacagtgcatttt

SEQ ID NO: 202802 - DNA, 415 bp, Glycine max
  unsure (1)..(415): unsure at all n locations
agcttattccgaggatagtctattatcatgcctttctgcaagaattggctcacaataagcaaatcatatttgtcgcaacctacccttcggcgggaaggcgacacgtgactcacgggagcgtcttccaagaaaggaatacgcgcggagtcgccaccaacgtttatttgaggaaaacgttggaaaaaccacaaaagacgtggtctacaaactttaaatgaaaggttcgggagttgtatttacgcacggggaaggtattagcaccccacacgttcgtcacaagagacggcaacctttaatccaatgtgcaaatgtgactncaatttatattatttttccctttttacgttcttatgtctttttatgcctatttatatatttatccttttgagggcgacgagggtgtttcccttgcttc

SEQ ID NO: 202803 - DNA, 486 bp, Glycine max
ggacgttgaacttgatccatccgctgccccagctttcgtttgctgtctacttctagacttttgaacttgacatgatagaacctcttcttaaaagaccgcatggtcacaagaatagaaattatgatggccaatacttcaacaccctatcatataggagatgtgatgaatgaatcacgacatggttatgctatacttgacaaacgtatttatcaaactaacgcaagacgcctgatagaccacccttccttattaacaatgcattaggtaccatgttcatgcaactctcaatcatcgtcgggagagagaaatatataaacgaatgcggtgcaaaccttcacgcttcattgtgactctgatggccaagataagaacgcaaggcatgagcacctatgtggcataacatgagactaatgacaacaacaggtatgttggttggagcaaaaagaaacatggctagcaatgagtatgacattgtataatttatgc

SEQ ID NO: 202804 - DNA, 355 bp, Glycine max
aatacatcaagcgatttcccagatcaaaattcaccccaatcttcatcacatggaaaggctcaaattgaagtatctgaggaacccaaatcaattattgagagtcaaaaacaagataatgagactttaaccttaccaaaagccataagtgattcattgcctcaaaagggtgaagaggtaatttcacaagatgccaagaatcgaaaagaagaaaggtctgaaagtagtgaaaagaaaagggttgataggaaagacactatggaagaaagtgagaatgtttctgcctcaggaaaaccaccccagaaaggaataaaggaacatgtcatggatgagacaagtttcatcaccaagagtgaag

SEQ ID NO: 202805 - DNA, 390 bp, Glycine max
actcagctatgcctgtgggaacctaagggagccctctctttctgagtcatcatcaaaagggaggtgtatcagactctgaaccatttgtggttcactaaagatactcccttccatatgatctattcttggactagggagttcaatattgggtttgattacaacttcacttttggactaaggagttatgtaatgtaatttcttacagaagtgccccccttcttagggacatattggattggacttacacattcactttttatagatgggatagataatggttgcatccaatagctttagtacctctcctttacaaccttcatcatcctagggttgagcactctctgaggcaaccactcatgatcttggccttcctccatatgaatcctatgg

SEQ ID NO: 202806 - DNA, 404 bp, Glycine max
ctagaggggatggaccttttcatgttttggagaggatcaataacaatgcctataggttggacctcccagaagatatggagtcagcaccacttttaacatttctgatttaactcattttgcaagtggagctgatattgaggaagaggaactaacaaatttgaggtcaaatcctcttcaaggggaaggggatgatgcaatcctccctaggaagggaccaatcactagaaccatgagcaagaggctctaagaagattgggctagagctgctgaagaaggccctagggttctcatgtaccttaaggtagatttctgagcccatgggccaaagttgggtccaattatctttgtacatattagactaggatgtcattatatttggtccttgtatttagggctccatattg

SEQ ID NO: 202807 - DNA, 478 bp, Glycine max
  unsure (1)..(478): unsure at all n locations
tatagccaaatggacttaccttgaataaatttctttgatttgtcctcngagcacatgttcccctatctttgntatgaagctcattacaagccttaagtgaaaaaccatgatatcaccttacccttaaggaattttggaagctttgaattgctttgggaataagtgtgtgggggtatgtttcatttgaagatatgatttttggccatgcttaatgttttattttggccatgcttgatgtatatatatattgcctagttcttgctttaatcttcaaattcgtactgttcaaagaaaaagagaagaagaaaagatgtgaagttgaataaatgagatcttgttatgaggacttgatttgggagccttggctgattttgtagatataacacgagtcgcgtgtactacttgtgctaaatttacacttattctccatagctcctctattcctctcggatttagctacttatgccatattttgtcc

SEQ ID NO: 202808 - DNA, 418 bp, Glycine max
agcttaaagatggtagtggcatgattagtatgttttgtgattttgtgaacaaattgatgggagaaggaggcgacaagggaggcatgctagaggaggaactcgggggcaaggtggtaggcatggtggggggaggggtgaagtaatgactgttggtgtttaggaaagaaaagaggttaggaattagattgctttataatttttaaaataaaataaagatagtaatgatttttaattaatcaccactatttaaaatttattgttttaaaatttaaaacattgacagaattaaatgttttagaaaaaaaccaaaaaaaatacaaaaacgatccgttttgttgaaaacatatcaaaatgaaactaaaataaacttaatagaacaaaagtgacattaagcttaatttttatacaaaaatgtata

SEQ ID NO: 202809 - DNA, 451 bp, Glycine max
  unsure (1)..(451): unsure at all n locations
agtacaatgtatgctattcattatcgaaaatcactttttaagcctcaattaattctaacgcgtaaaatattgaaattctatttaatgcattgtttgaagtcaatgatatataatatgcagcttcaaaaatgatatataatatgcaattgtttctaaaactcttgctattgaaaagtaatttagaattcaaattagtccgagtagaattatatgaactcactctgaatcatccatatattgttaattcgtttaatcaatttcaaattttatataattattaatataatcaaaattattaaataacatacacaaacattagatacaagtacaaaggccagaagtacaacaccagattgttcttaatagctgagattttattacagataaanaatatctaatggttaattagaagatttgtactctacttacaatgaagattaactgagtgatc

SEQ ID NO: 202810 - DNA, 418 bp, Glycine max
agcttggagaggatgcttcaatggtggaaaagaaagtaggagagaaagagagaggggggagcacgaaattgaaggaagaaaaagggagagaagttgaactttgagttgtgtctcacaagactctcattcatcaaagttacaacaagtgttacacatgcttctatttatagactaggtagcttccttgagaagctttcttgagaaaacttccttgagaagcttctttgagaaaacttccttgagaagttagagcttagctacacacacccctctcataactaagctcacctccttgagaagctttcttaagaagattcctatagaagctagagcttagctacatatacctctctaaactcacctccttgagatgagaagctagagcttagctacacaccccctataatatctaagctca

SEQ ID NO: 202811 - DNA, 503 bp, Glycine max
  unsure (1)..(503): unsure at all n locations
tacanaacctaggtatctctacaaaagcagctcctcttgctgtctacanagctttntcccgaaataagcactgtggtgtgttgtggaattatgtgctctgggcccttgttaaaaatcatcctgttgtaccctaattttgcacaagacaagctttaaataggctctgaattcgcgacgttgtgcttagcgccacactcgcgcttaatgcaagtaagtggatttgaccttatccccagtcgtgcgctgagcctggctaaagacaatatgtgcgcttagcgcattgagctcgcgcttagcgcgcgaccttgatattgataccctgtcagattcttctgctacactaagcgcgctgaagctacgcttatctgtggatgcacgcttagcccactgatgagctaagctcaactgtcacttttagcacttcatgacttagcctcattttcacctgagattacacatatattatcattaaatccaatggacatattcttgagacaacttac

SEQ ID NO: 202812 - DNA, 416 bp, Glycine max
agcttcatcaaagaagccagctttagcatacccaccaaccaatacattccaagaaaacaaggtcctcttctccattctcccaaaaacataccaagcatccaccaagttcccaaacctcacaaacatgctcaaaaaggaattccccagttgaagactcaaatgggacatggaaatggaaacgtatgagtaaacacgagacccttctttccttgccctcttccactcacagaagcgtatcaaggcaacgtaagaatcgtcttcaacgggaattcgaagctcgtgcatggagtctaagtagctcatggcacggtccaagttcccaagaaagcatagttggcaaatatgagagtttgggttgtggtggttgctgacggaggaggtggtgatagtggcaggatttgaaacacaaatatgtt

SEQ ID NO: 202813 - DNA, 387 bp, Glycine max
  unsure (1)..(387): unsure at all n locations
ttttcatataagagtattttttacaataaaatctaaaaagataaagaataaagaaaaacgtaattgacaaaagaaaaagtataaatagcccaagcccatcttttaactcaatgaaaacccaaagtactaagcccaaattaattaagagcaacccaaataagagggacaaaattcagacaggctatgcagagcaaaaggcatagattgaaaggttatntgatttcatgtggatgggaatttcgcccacgcctatgtgcaatttttacacctgcttcacattntttttaataagtttgtagcaaagccacagtacattttgaattcaacatatatatttatctcacacacttacaatgtacttgaacttgtacaaaagaaactactatg

SEQ ID NO: 202814 - DNA, 420 bp, Glycine max
  unsure (1)..(420): unsure at all n locations
agcttnccaagtttttaagttcttcctcaaaactattctatcaaagttcccaatgtcctattaacaacttccgtttgcccatcggtttgtgggtgacaagtggttgaaaataacaatttagtgcccaacttgccccacatagtcctccaaaaatggcttatgaacttagagtccctatcactaacaatgctccttgtcaaaccatggagtctcacaatctccttgaaaaacaaatcagccacatgggaagcatcatcaacttttttacatggaataaaatgagccattttagaaaacctatcaacgacaacaaaaatggaatctctaccactgcttgtttttggcagccccaaaacaaaatccatggataaatcaatccaaggatactccggaattggcaatggagtatacaatccatga

SEQ ID NO: 202815 - DNA, 473 bp, Glycine max
  unsure (1)..(473): unsure at all n locations
agataactnatatgcagaatataatgagggcttatattcttattatctatanatttggacattggtaccggatcactaaaaatggtgaccacgcgagagatcaattttaccttctttttttttaaagaaattaacagacttaaaccattaaaaaagaactaatatcatacttggttgatttccaaagaacaaatagatttaatgctaaggtaaataaacacttttatcaaacaactctgttttggttaaacaaatgtttttaaaaggtaacctagttattcttaagaagaataagaaataataacctatttactttgccaaacatacttaatattactatttcacccttctgattttatccctcataagatcttaaaatgtaggaattatttcagccaaatatcttaaaatcatattcacaatattgtgggattgatattggaaaaaacaatacatatcattacactcattct

SEQ ID NO: 202816 - DNA, 390 bp, Glycine max
agcttgtcaataatctcatgaaggctcctgaaatggcggtgacaatgcaagagttcagcaaagaaatgacaaaggtatgcctgcaatccttttaatgccgaagaaaaataccacttttcaatcttttctcccttccctgtgtttagtgaagatagttacatacatgtgtttagtgaagatagttacattggtagttatggggaatgtttgtctcgttcaggcaggagttatcgaggagatagtaaacgatgccgtcgactcagcgctagattctgaggacatagaagatgagatagaagaagaagttgataaagtcttgaccgcaatagctggtgagacagctgctcaacttcctgaagctgtgaagaaagagagggtgaaactacctgc

SEQ ID NO: 202817 - DNA, 395 bp, Glycine max
  unsure (1)..(395): unsure at all n locations
agaagatttgtatgaaatagacgaagatgatgatttcattctctttgtaaagaggttcaacaaatttctaagaaacaaaggaaatcaaagaagatcaaatttcaaatcaaagaaaagagcagaagattcttcctctcttccaaaatgttatgaatgcaatcaaccaggacatctgagagttgattgcccaagtttcaagaaaagaatagaaagatctgaaaagaaaattttcaatgataagaaagcaaagaagacctacatcacttatgaagacagcgatatggactcatctgaagattcaganaataaagttggtaacctgagtctgatgaccaaaaattatgaaagcgatgaagaggtaacatcttctgacaataacttatctatttcatttg

SEQ ID NO: 202818 - DNA, 408 bp, Glycine max
  unsure (1)..(408): unsure at all n locations
agcttaagatgaggaagtgttgaagggtgaaactttctgctnttattgntgaccacagagtggtacctggagatatgtcgcgggggtcaagagaccttggggacgtcaggtggggtgctattgcccaaaaccaagcttgaccaatcccgaaccaacccgggcatagtcggtcagtgagaacctgtgatgtacctaaacaggcgagctcctggcagtcaacagataaaaggaacaaagaccacaaagcacagaggcttgtggtggctggccagctgtgaactttgattgatatgtgagatatggtctctggtaatcgattaccaagggcgggtaatcgattacaggcttaaaaatgaagacaggacgctaagatggtctctgttaatcgattaccacggtgtgtaatcc

SEQ ID NO: 202819 - DNA, 412 bp, Glycine max
agcttgtagggttaaagtctcgcgattgtcacatgttgatgtaacaattgttagtcgtggctataccagacatcttgccaaacaaagtcaggttatccataactcgcctgtgctttctcttccatgccatatgtagcaaagtcgttgatcctgacaagtttaatgagctggaaaatgaggccgcaattatattgtgctagttggagatgtattttgcccctgctttctttgacatcatgattcacttgattgtgcatctggttagagaaatcaaatgttgcggtcctatttatttgcggtggatgtacccggttgagcgatacatgaagatcttaaaagggtatacaaagaatctatatcgtccagaagcatctattgttgagaggtacattgcaaaagaagccattgaatt

SEQ ID NO: 202820 - DNA, 474 bp, Glycine max
  unsure (1)..(474): unsure at all n locations
acttgactccttgatatattttctctattggtgntngggatcatactctttccaaatgtagacaggctagtagatttagtggcgatcgacgctntttttgcttatcaccacagcaaggaaggcccgatcattgttgttttggccgatgcctatgacacattcaacctgagatgcgataaaagcaatgcgagaattgtttgttgtacaccctctctttatgtatggttggtctctgttagtcggttaatacaactaacttttgtgtaaaaaaagctgcgtaaattgtattcgaatccttccatttacagttctttctgtagtattggaagttcttcttgtaaatttgggtaataagtacttagtatcccaactttgagtaaataataacctcttcatttcaatatcacgtaaaataagcaagcttggtgaagttgatctttcaagttcactgagacattcctctctaactgaacg

SEQ ID NO: 202821 - DNA, 416 bp, Glycine max
  unsure (1)..(416): unsure at all n locations
agctntgagcaattctccatagtttaaaaatccttcaccatgggtttcgtagtattgaagtggaggtggcagcgcaacttatcctaaatcctgtcctattttttctcatccttgtcatgctatggattcaaaaatatagaagatattgtcttttttccatcaatgcagattgtccctttttcttccatgagacaatgtagtggcaaatgttcttgcaaagtttggccaaaacatgcagtgtaattttaagttgtttatccatttacttacgttactttctattcccttaatgggcaatgtttgctcttgatttttaatatanttttggagtgggcctagttatccatttctgccaaccaaaaagagaggaagatagggatatagataaagttattacttttgtaatacattttatt

SEQ ID NO: 202822 - DNA, 286 bp, Glycine max
actaccaacacatgaatgagctaaataatttacaaaatcgaagatcggcgaatgccatgttctatttccaaattcactttgactccgacaagacgtgatgaacccatgttgcttaatgaaaatttgaatcgaatcgaccctatgctatactgaatgccctgtgaaaacttgcaatacttcaacaatatatcatagacatatattcatgcttattcttcttttcacacttggatgcattgctcaatgcattcctttttaaatcagatgcgcaatcaattgaatcata

SEQ ID NO: 202823 - DNA, 427 bp, Glycine max
cctgcggcagcaagcttatgatgaaaacagatgaatcaaggtgtttttatgataaccaagattatgaccaaaagctcaaaagtcaagatcacttcatgataacaaagatgatgacattcaagaatgagttcaagattgagtcaagaacacttcaaggatcaagaagaaatttgatttcaagaatcaagaatcacgattcaagaataatcaagatcaagaatcaagactcaaagattcaagaatcaagagaatacttaatcaagataagtattaaaaagttctgcaaaacattgagtagcacaagaagttttcacaacatcattaccaaagagttttactctctggtgatcgataccagcggttttaacatgtttagattctcacaattcagaatgaaaagtcacatctgttgatgtgtaatcgatta

SEQ ID NO: 202824 - DNA, 450 bp, Glycine max
  unsure (1)..(450): unsure at all n locations
gtctntgatattgacaagtgcttgcctctcttcttcatttgttcttagagacgagcagccactggaagtggaagataacaatgaaaatgcaatcagaaggataacaaagcttaagtaggttgagctttgcatgtctgctgctggtgtatctaaatcaaanaggtagctgcctacgatgattattggaatatgaagatatggcctttctgagctacaaaggaccagtaaagtgggagatatataggcatcactagtcgttcaataatcccttattagtgaaaagtattatcctttcactcataacactttatactctatttcctttatgtatattcttagtctctcatctctctccaacacctaacaaattaagtgaacaacaacatgtttttcttgttaaattgcattctataatcaagtatacaatatcggtattattatgctaagtaa

SEQ ID NO: 202825 - DNA, 422 bp, Glycine max
agcttctagccaaatggacttaccttgaatttattcctttgatagcccttttgagccttgtttccctttccttgttttgaagctcactacaagccttaagtgaaaaaccatgatatcaccatatccttaaagaattttggagctttggaattgttttgggaataagtgtgggggggtttttgtttcattggacaacttgttttgttggctatgcttcatgatgtattttgggccatacttgatgtacattgtatattgcgtaaatgttggacatgctgaatgaaatgttgtttctcaaaggctatagatgtaaaaaaacaaaatcgaaaaaaaatattcgaaaaaagaaaaagaaaagcaatgaagctgagtgaataagaatctaaatggcacaagaatgatgaaactcttgttctactctt

SEQ ID NO: 202826 - DNA, 377 bp, Glycine max
  unsure (1)..(377): unsure at all n locations
ntggagtntccaagtgccaattcgtcttcttctttagtctattcttcttctggcttcaattcatcagtgggctttccttctgtgtccagcatcttgggatgttcccagcctttgatgacagctttccaggttctgctatccagtgatttgaggaaggccaccattcttgctttccagtattcatagttggttccatcaagaattggtggtctgttcactggtcctccttctttctccatgttcatcagaatttatctccctagatctcactctgtgatttcgagtgttggctctgataccaaatgaaattctgatactggggacagatgtcgtacaagatgtcacgacatcacgcttcataacatgaagtttatatg

SEQ ID NO: 202827 - DNA, 409 bp, Glycine max
agctttgcgagaaaaaataagaggtaccgttgttttaaagaattgtatagcgttacaactcctgtggtgaaagcgaagaggaagaggaacaagtgtgtcggaactatgaagtgacgacgttaacatgtttattagtgttataacttataatctaactgtcgaaggttgcaagttgtaaagctgtacgtagtaattttccatcaagactgtttgcatgcttgttaatgtgaaagctctggaaatttcaagatgtagaggctgaaatttcaatttgatttctttctaagtaatagaatagtggttttagggcgcatatctggtcgagttttccgcttacacgatatgtaaatttcactgtaaatcgtaactgaagttagtggtcttcctcgaccttacaaagaagtatgcc

SEQ ID NO: 202828 - DNA, 445 bp, Glycine max
  unsure (1)..(445): unsure at all n locations
gaccttaaaactcagctattanataanatatatcacattctcactccataaaaatgtataatgnnnnncaaaacattataatttaacatctttcacaaataaatttaaaaagttgtaatttatccttcagtaaaagagtcgtacgggatttctgcatcaaagtagccactgggtgcatgcagcagcacctatgatggaaaatagcatataagatacaactcattcttcttctttntttccgctatcgtgtgatctttctctttctttctcaaactccataactttccagcctttcctggttcgtaataatgtctgctccaaagttagtggatgtgctttgtgtatcggtcacattattattagggcacgactcctcctctctttttttatcaattgggaaaatacacgttaacgagttttatgttgagtaaaatacataatttaa

SEQ ID NO: 202829 - DNA, 390 bp, Glycine max
gtggttcatgatgaaacaatttatcaactgttggattcatctattttatatggctccaatttacaccactcacactagatttattgcttccttcctagcaaccttctgataaccatttgctggtgtcgaaatcaatttctggcaacagaatttttttaaatcttttccttaccacctttgttcctttctctccccatcaatcccttgtcttcgactgcaactgtctttcacaaaatattggcacccctaaaatttgaaattaaggccattccaagattgaaaagtgaaacacgacatacacatcaaaagtgatgcgtatgaccgaaagtgcattcaacatactaatcttcaacacaaaaacaaaaaaatgaaacagtaaaaaaaaaaaaa

SEQ ID NO: 202830 - DNA, 486 bp, Glycine max
  unsure (1)..(486): unsure at all n locations
tccatcaagtggatatcagagcacaagagcttctttatgttctccttanacctccattaatcttgggctttaccttctcttctattgatgattcttcatttttctccatgtatctcctcacatgtcttgtgctaaaagttgttaacatgattctttatggtttccaccgattaaacttgctatataagctagatttgattttctatggttcaaaattcttattcttgttcttgaaccatgaattgtgttgagtttaggttcctttgagttctttcttggtattttttgtggctgaaacctaaaccatgaaattcttaccaaaatattaaagtagaagaaaacctctaaaatctagagtgactcgatcacctattgtagttctgtcatataagtcatgtctagtcatgaaacttgtcacataagatttcttatgttgtgctgaaatttattttcttgcttcatttctaactcatttgtcatgaatga

SEQ ID NO: 202831 - DNA, 417 bp, Glycine max
agcttatgggtgtgcgtaacaacacagtacagactctatttacaatgttgaaagaaaattaggcatgctcacagataccccatgttttctcagcaaaacaaattattcaaatacacaaacttaaaataaaataaacataaattcatacaataatcaaccccgatttgttacacgcaaccctaattaaatgttaatctcaaacgaatttagacggacacacgatttctaatcataagcatcaccacacagaaaccaaaccccagaaaattacgaaaagggaaaagaaaaaattgaagggaaaaaaggaataaaggagaaagatgaaggtgcgtcgacataccctcggggaccgtacatgcttccgtgttcagcgaaggaccgagcaaaaggcgcttccgtagacggaggaacacggta

SEQ ID NO: 202832 - DNA, 401 bp, Glycine max
  unsure (1)..(401): unsure at all n locations
aaacgacattgattacttatggactgagtcttcaaacagcagatcggacgaaacatccaagtatatgtatacgacatggtcatcaagtctcaaagtataacctatcacgtgacgatcctggaagaagtgttcgggaaactccccaaatatgacatgcgcctcaatcctgaaaatagtactttcaaggtagggggaggcaagttcttcggcctcatgattatacagtctaagcttctcttcatcctttgccataaggaaaatagacattctgngatcactcgtaaaggacctaggagcaagaaaatacttactagttgttatcaactacttcaacaagtggatggaaacaagaccactgcgggaattaaggccaatgaagtggagaaatcacccggaacatc

SEQ ID NO: 202833 - DNA, 316 bp, Glycine max
tggagtcaacaccacttttaacatttctgattaacttcttttgcaagtggagctggtattgaggaggaggaactaacatatttgatgtcacattcttttcaaggggaaggggatgatgcaatcctctctaggaagggaccaatcgctagaaccatgagcaagaggctccaagacgatcggtctagagctgctgaagaaggccctatggttctcatgaacccttaggtaaattattgaacccatgggccaaggctgggtccaattattttggacatatacaatatgatggcattatattgggcccttgatatagggc

SEQ ID NO: 202834 - DNA, 52 bp, Glycine max
cggggaaaaaagagcaaaacaaagcaaacagagaaaccaccacaaaaaacag

SEQ ID NO: 202835 - DNA, 410 bp, Glycine max
  unsure (1)..(410): unsure at all n locations
cctgcatgcatgcatgctncatagtcgagagactcgagggaccaccatttgtcataaatcatttcgaccactggcagcatgccactatcacccttatctacataaccatcaatcaccctaatagatacatcttcataattcttccattatggaccaccttagagagtgctaatatgaaaggaggaaagatccttgaccctctgttattgcatacaaaagcctctctttcatcctttcctgaaatataagaaagatgctagaaatattaaggctcaaatgtaagataatgatgagccaaagacatttttatgtgcttttactaatacaaagaagggaaagtatacattgatgaggaactttccatgagtaccgatgctgctcgatataatgtgaacatgacatcacgctac

SEQ ID NO: 202836 - DNA, 421 bp, Glycine max
agcttggaaggatgcttcaatggaggaaaagaaagatagggggggagcacgaaattgaaggaataaaagagggagagaagtggaactttgaagtatgtctcacaagactctcattcatcaaagttacaacaagtgttacacatgcttctatttatagactaggtagcttccttgagaagctttcttgaggaaacttccatgagaagcttctttgagaaaacttccttcagaagctagagcttagctacacacacccctctcacaactaagctcacctccttgagaagcttccttaagaagattcctaaagaagctagagcttagctacacatacctctctaatagctaagctcacctcaccttcttatgatgagaagctagagcttagctacacaccccctataataactaagctcacccc

SEQ ID NO: 202837 - DNA, 306 bp, Glycine max
ttatcaccatatcggagatgataataaccaaatataactaaagttcgcatagccattcacatgtcagaatcaaacataattcactcataaaatacaaagagccaaatactgaaatataactaaagttcggagaataatgacttaaaaaacatagcacaatacacggtgtataatcaaatacaataataatctaaatctatgaaaatggtggtggaaggtcgaagcactgacgaagataactcacattctcctcaagctgagtgatgcgggtatccattccttcaagtgagcatcaatggcatcata

SEQ ID NO: 202838 - DNA, 420 bp, Glycine max
agcttaataaatctatatatggtttaaaacaagtctttttttattggtaccttaagtttcatgggttaatttcttcatttggttttgatgaaaaccttatggatcaatgcacataccacaaggtcaatggaagtaaaatatgttttcttgttttatatgtagatgatattttacttgcagccaatgatcgaggtttgctacatgaggtgaaagaatttctctctaagaattttgatatgaacgatatgggtgatgcatcttatgtcatcggcattaagattcatagagatagacctcgaggtattttgggtctatcacaggaaaactatgttaacaaaattctagagagattctggatgaaagattgttcaccaagtgttgctcccattgtgaagggtgataggtttaatttgaactaat

SEQ ID NO: 202839 - DNA, 318 bp, Glycine max
atgacaaaggggatgaccaagggctcgtagatcaatcgaagaacaactcaagtgaatcgtagatctatcacagaacaacttcatgtgaattctatcacgattgcaggagttccagataacaatcaagaagaattctagactccagaagaaagtttagagtcaagaatcaagatttaaggctcaagatctcaagactcaataacacaaatcaacaatccgtagaaggctctctcacaattagggtgagacggtgtctcttaattgataagcacttgactgttctcaaaacatgttgaccacacagtctttactctctgg

SEQ ID NO: 202840 - DNA, 410 bp, Glycine max
  unsure (1)..(410): unsure at all n locations
agcttgtaaaagtcttgcattctagtctcactgtatttgtgaagaacttaaaacataattgttgtatgcactacattataggagttatgtttaatggtcctttaatttaattctcccattagaaaagaacatattctgaccgtaatttcttttctagagatgttagctacaacaaattaactggaccaattccaagcatttttggtgatcttccgcacttgaatatgctgtaagaaattttccataatttttctatatttttacaccaaaataatctcatacatttctgagtagctaggaagtgctattctatttcattaaactttcttcagttttagtttgaaatggtaaaagttctaactgggttattttggatagacatacagtatcatggcaagaanttgcttact

SEQ ID NO: 202841 - DNA, 473 bp, Glycine max
ccataaaactcaagctggagagacggcaaccgcgatgcctatattctttgcttgcatctttaattggggtagtattcttgcctttatatacaaaaaaatacagacaacatatttttgtcatggttgtactctctaaatatataacagaaattctttatgtatcaaaaatgtgatttgaacaaaatgtgtcatgtttctttgtatggtaaaaaaagtggaagaatgtgagtgcaatttatcttattgggctagacctaaattgggtaatgacaaagatgctgtcatcacgagacaaataaggcacatccctaatccgcaaagcaaactgaagcaatgttataccatatgcatctaatttgatccatgttcgtccaccatgagatgtaataataagataggggcaagtgcatataactagtgacatgaataaaatgccaattggatgagccattatgctgacttagtgatgttat

SEQ ID NO: 202842 - DNA, 412 bp, Glycine max
  unsure (1)..(412): unsure at all n locations
agcttgaaggcaaactggatgcattggttaacttggtaacccagctggccttgaatcagaaatctgtacctgtcgcaagggtttgtggtttgtgctcctctactgaccaccattcaggcctttgcccttccatgcagcaacctggagcaattgagcagcctgaagcctatgctacaaatatttacaatagacctcctcaacctcagcagcaaaatcaaccacagcagaacaattatgacctctccagcaacagatacaacccttgttggaccttgtggcctcaataatcttaagagggataggcttagaatacagaagaagcaacaccaatcaatttaacaatgttctttaaacatgcaagacacaattgattgcaacanaataaataagataagggaagagagaatgcaaa

SEQ ID NO: 202843 - DNA, 460 bp, Glycine max
  unsure (1)..(460): unsure at all n locations
tgagcttggaccatcatttatcttacaatgcactgttatgtttcttatgtttatgaactatgaagtttagtggtacaattaatggcatggcagtacagatattacttgataatggtagcttagataattgtttacagcctcaaattgctaagttgttgaaacttccaattgaacttgcgccaaatttccaactcttagttggaaatgggcattcattatttgctgaaggtttggtgaagcagctgaaagtcatggttcaggatcatccnctccaattgctagtgtatctccttccaatctctggtggtgatttgttccttagagccacatggcttgccacattgagtccccacattttggattatagcanacttaccttgaaattttacaaggacaactattntgtaacactacacagtgatcaagcataattacctagccctgctcaatntcatcatct

SEQ ID NO: 202844 - DNA, 415 bp, Glycine max
agctggcttctacatatatttctattcagccaccacttaacctacgtttttaccattccattcatccgttttatgccaagattcaccttattaagtcccaagaaattagccactgcccaacccttgaatcttgccaatttcccatccttttcttaatcaattttatgaattttccaacaaggtttaatcttagacgatcctaagtcaaccttgtgcaatgagggttcatatcaagaggactagtcattttttggctctggcttttgctactgaggtgcctaagctatagagcttacattatctataacaaaagaaggtcgagctctgcataatgagaatctatccctcaaacaaactctgcaacttagcatgtgaagtctgggagctttgggcagatggtgtctgtgatggtgga

SEQ ID NO: 202845 - DNA, 406 bp, Glycine max
  unsure (1)..(406): unsure at all n locations
tcttgaacgtgattaatacattcattggcatagattgattgatcagttgtggcgcgcgatctgttttggtgtcacccagatgcagtaaagttatgcaatgcatgtcatctgatgttttttatagacaatacctacaaaacaaacaggtacagactcccactacttgaatntgttggggtggcaccaacgaagatgagattcttggctgggtttgcatatctggagggtgaacgtgttaataatattgtatgggctttggaacggtttcaaggtctattntttaagaaacgatcgcctcctttgtgttattgtcactgacagagacctagcactaatgaatgcagtgaaaactatgttctcggagtgtacacacttgttgtgcaggtttcacatcgacaagaatgta

SEQ ID NO: 202846 - DNA, 412 bp, Glycine max
agcttctttgttagacctcgatcggcatcttttcttccgaggtcgaccgtcatttttttcgatccatttcggtgaataatatttttttgccgagatgggctaatgttttcctggccgaataaatgggaaaatgccagtttcggccgaaacgaaaagtcggttgggctcgcacaaaaaaacctagccgacctacattttaaattttttatgcaacaccaaaacaagaaaacttcctgtgccgtaaaaaaaaaaaaaaacattacatgacagcgagcgttttgaaaaacaaaattgcgcaacgtcggctgaaaaatatcaatcggggctttttcacgaccgatgtcggctattgaggtttcaattcaatccctgaacggaatttgcatgatgtcggttaggaaatgttcgatcg

SEQ ID NO: 202847 - DNA, 373 bp, Glycine max
  unsure (1)..(373): unsure at all n locations
tcaccggatgacgccgatcgaacatttcctaaccgacgncttgtttatttcgttcanggattgaattgaaaactcgttaagcgacatctgtcgtgaagtaacgaccgatattnttcatccgacattgcacaattctttttagaaaagctcgctggtcgataatggtctttttacggcagagtaagatctcttgtttggtgttgcataaaacagttacaatgtacttcggctagggttttcgtgcgagttcaaccgacattntgtttcggccaggataacattagcccacctctgcaaaataaatatatgcttaccgtcttcatgcatatttcattcaacgattgaatagaaaactcaatagccgacaacggtc

SEQ ID NO: 202848 - DNA, 451 bp, Glycine max
  unsure (1)..(451): unsure at all n locations
tgttaagtcatggaagccccaaatttttcttatacttcgtggagtgtgccactcaggaatgacctttattcacttatggttcttgggaatcccttgatcactatttaaaatattaagaaaagtaatgcaataaaacatacattnttcagtattttcatgttgattattcctaccaaaaagtatggcaaacctaaggtgtcccatatgagtacctaagtttgtattgaaactaaaaataagaataaacctacctaatgagtccctatgtgcacaaatcatgaagatgttggatgcacgagtgattttacaaaagagggttacaccactcataacattcatcataccacctattttagggattttgtgcctaataatacctattntggacaccaataaagcacaaggatttaagctcttgtgaaccaaacccttatctaancaactccttact

SEQ ID NO: 202849 - DNA, 424 bp, Glycine max
  unsure (1)..(424): unsure at all n locations
gatcttaatcacctgcngcatgcagcttaaagaacaaaaaggtatttcttttcttaatgcatgtgaattaggaagcatcaacaagaatcaagcccaggctattgtgcaagcaatcaatggggcaaaacacaccatatgattatgatgatggatggctcaaattctcacaaaggtaaactcatcactttcaaattgagctttcaaaactatcatgacatgtagaggagaatcatggatttcaagacacaaaatgtcaagaacttttattttcaaaacaattacccatttcttgaacatatcctataattcaaagaagaacatgcaaagtcgtacatgcacacaaaattgacccataatattaaactaaaaatccgacaaaactagcaacattaacaaattaacacaactaacaaattaacaaaac

SEQ ID NO: 202850 - DNA, 455 bp, Glycine max
ctataaaactcaagctgagggagatggggtacccatcacatgtggttctatgtgtcggtcgggcgatggtgcacaacaagttgtgcacaatcacagatcgcgcataaacccaccatgctctgttgcccacctccaatagagctcacgtacttccacgtagcccatatcctcatttctgtcaacaccaggtacccatcaatgctcccaagcttccccaacatccagggagatgaacatccaatcatcatggactaacaaaatgaagcaaaacagggcaaaggcagagtactctgcccataacacaactcaaaatcacagcttttcacatacaaatacccccgtaacatgttcttggttccaatttgttaaccgttggatcgactcgaatattttactggaaggctctagtacataagcctacattttgaccgttgggatctgctagcaaacatgca

SEQ ID NO: 202851 - DNA, 414 bp, Glycine max
agcttacatgtacgatgtcatatcagtaattattcaccctatttaacatcaagaaccatacatagaagaaaataaagatggttccttgagaagataagtgttcttactgatttgactttcgacggtgtccatgtaggcttttcaaagttgtttcttgatggtgtatgtgtcctctttctctcgatccatggctctagttatcatcagtttctgggtcgcgatatggatatcatgtgagggttattgagggagcaattgtgtttcttggccaccaaaagaagagtgacagaacacctgccatgttatcaagtattacatatttatattttatttagatatctttatccatgataaggattttattaacatatatatttcataatccaattatttatctaacatagccatataaat

SEQ ID NO: 202852 - DNA, 347 bp, Glycine max
  unsure (1)..(347): unsure at all n locations
caactgggctggtaggatctagaggctcgaaatcaactattctctgattcacaacaggnccaatccgagaattatcaatagatcggtacaagggcaagtagaaagtctcattggtggtagcatctggagctaaggaagccacaaacccactggtgcatagagcttcccttatgccctttatgagacccttaatgcagntaacacacaatgttttgttgcactggattgtggtgtagttaacatcgattccatcgatgtggcactcgttgatcatgtggtggagtgtggttgtggcattgaaaacccaatcatcggcaccaccagcagcaactttgaaggggtcatct

SEQ ID NO: 202853 - DNA, 412 bp, Glycine max
  unsure (1)..(412): unsure at all n locations
agcttcggcagtccttgcgttacaagtggatnttattttattgagttagacctcatgccaaaattctaagatgatattattgcatcctaaaattttcctagaaacctatttgtactttcactatttcattcatattttctatatacttgtacccattttaaatatttttaccgttctaacaagtcaaacaaataattttgtcaaacaagacccactattctctagtactgtcccctgcaatttctgaattttttccagcaccttcctggtgtttccacacctgctctgtttcctggcactatctcggacattctgttcaactaattctgttcagttcattctctcactgttccctgctctctgagattgttctgcctttcattttgttgcagaaatgttctctcacacaggt

SEQ ID NO: 202854 - DNA, 372 bp, Glycine max
  unsure (1)..(372): unsure at all n locations
cttgcaatctggtttctntacactacgtcttcgactgctgcctctttcatactcatgtggaactccatacctagagcatgcaaacttggcatcaataaattcttctgtgttctttgagcgtctgcgtggtttcattgaagtggtgaatcccatagacttggcatattcctgataaaatgaatatgctgctctatgggagtcatattcaatgccattgtgcagctcagaaactttgtctccctcaagcaatgtaatgtccctcttgggagaagcagcaggtgcaccacccatgtgctgcacttcattaagtgcatcacccatatntccactcactgcaccactatgcactgctgtctgaatacctgccacaat

SEQ ID NO: 202855 - DNA, 425 bp, Glycine max
agcttcaaaacacagcaacacaaaatctaggtgtccataacccctcaatataatggattttctaggtttgagcagtggaaatgagaatgagataattttgaagcaaactctcacctcacacaagtctataacatcaatttaaacttgttcaaactggatttacgcctaaaatttcaccgaatcaaaatttgactcttcaacacccaaatttaccctacaaatggctctttgttcactttggtcatttgttttcctctctagcacagcccaagctttctcataagtcctaaaagacatttcaagctaggattaactcactctaacctccaaataccactaaatccagatttggccttccaactctcaaagactcactctttttccactcacaacaacatattctcaccttccaaccctaggttaac

SEQ ID NO: 202856 - DNA, 331 bp, Glycine max
tctacttatgtggcagggcgggcttacttcaccttcttgtctccttcgcgaacttttaccattgaacttccttcccgcgaagcttcttttcatgtctgcctgagcgggcttatagcctaaaccatactttccacaactaccttgggtatttatcaatctagttatgccgccgattgttctttctaaacccattccgggcttataaccgtatcccaacataactcgagccagtattaccgctgcgtcaaacagactaggctgcccaaagatggagtccacggaggaaatgctgaccacctcaaaagactggaaagcagtttctaacgattct

SEQ ID NO: 202857 - DNA, 406 bp, Glycine max
gcctggccttgggtgtgtttcgatagaagtggattttctgtttgcttatgacacacatgccattatcaagaaggtatttgattatatgcttcattgaccactgataatggtaatatttcattgctttgcatctaaaaagtgagaatgtgatgttgaatacatttgtagtttcaatggattttatccttggagaaatatatataataaagcatgcccaatagagcatctatcttgagtaaagtaaccaagaaacatactcattgcaaaatttatttgtttatggtggcatcttaatgaaatttcaccaattaatgcatgtaaaaataatacgtactataagatgctaattcattatggccaccacgcttttggctgctaattcatttatgtggtggtgcacacttac

SEQ ID NO: 202858 - DNA, 489 bp, Glycine max
  unsure (1)..(489): unsure at all n locations
tcgagaagaaatcacatgtgtgtcatcatcaatattgtggagaatgcgaatgtatgtatacatgattttgatgatgtcaaagaagaatctaacaaggctgcttcaaatgataagcatttgcttcaagaataattcaagattgcttcaacaaacaaagccttgtttcaagattcactaaagaccaagccttgccttaaaacaaagtgctttcaagacatgcaaggctctggtaatcgattaccaggaagtgtaatcgattatcagaagacagggttgagaaataactgttgaaaaatgttttgaatgtgaattttcaacatgtaattgattaccatatgtctgtaatcgattaccagcaacggaactntggaaattcanattcaaaagtcataacccttcaaattataactgtgtaatcgattacacanacattgtaatcgattactagtgggaagttttagaatatctgccaagagtcacatcttttca

SEQ ID NO: 202859 - DNA, 410 bp, Glycine max
  unsure (1)..(410): unsure at all n locations
agcctcttttggaccttgaacaagcaattatcttctctttcaaaaccatgctatgtgctcgcgactggtctctttcttcccttcgcaacttgagatcactattgctaccccatagagctccgcgaaatttgttccggacatactctttcttgcgagccctcttggtctcttgttcaagggctcttgcaataattgcattctcttcccgtaacccggcacactccttccgaacgtgtgtagcggccaacttgaacttcttcttggcaagttttgcctttcctaactcgctgttgagagtttggacttcttcgtcctctttcggtgcttcaaaactctcttcgctgacgacttttaacttggcgagccaatctaaacctcgtatatgaactntcatccattcgtggtaccca

SEQ ID NO: 202860 - DNA, 352 bp, Glycine max
ctacatgggagtacgtgagctcatttggaggtgggcaacaagggatggtgggcaacaagggatggtgggttatatgtgatttgtggatgtggagaatcagcttgcaccatcgcccgactgccacctagtaccacatgtgatgggtaccccatgatcctacaagcttgaaatgaggaagtgtataatggtgagacttcctgcttttattccgtgaccacagactggtacctggagatatgtcgcggggtgcacgagaccttggggacgtcaggtggggtgctattgcccacaaccaagcttgaccaatctcgacccaactcgggcatagtcagtcagtgagatcctgtgatgt

SEQ ID NO: 202861 - DNA, 412 bp, Glycine max
agcttgtaaagcgtcggcattgatgcatcggctgttttgttataacttctttcactatcttctcggacagtgtttccgaactctctgacgatgatgcttattacgcactactatagatctttgtttgtgagaggagtagaaatttaaaaaaatgtgaaaggagcaaggagtgtgtatacaatgtacataggaatgggacataaagtgacttggacgtcctaccgtgcgcacaaaatcaatgcataaacttcgacctaggttagggggaggaatcattaacaaagaccataagacagctttgctgttccttaaatataagaataaccatgtgatgggattcaagccaaaatttgtgaatagtgttatgtcggcaataataaacactggctagtggcgactaactaacggaagc

SEQ ID NO: 202862 - DNA, 418 bp, Glycine max
agcttcttagtctcagatgatgcagctgattttttatctaccttatgcactcctctaataactatggcatcatttctggcgctaaactgctgggagttggaagccatcttctcaattaaatttctggcttcagcaggagtcatgtctccaagggctccaccactggcagcatctatcatacttctctccatattactgagtcctttcataaaaatattggagaagaagctgctccgaaatctgatggtgagggcaactggcacattagtttttaaatcgctcccagtactcatacaggctctctccactgagatgtctaatacctgagatatctttcctgatggctgtggtcctggaagcagggaaaattttttctaagaatactctcttaaggtcatcccacctcgtgatggacctt

SEQ ID NO: 202863 - DNA, 426 bp, Glycine max
ttctgctttaagaatagtatcccactgtgtaaactaactttcccaatgttgggcttcgcaggaaacggccccgaagaagcttgtctcatagatgtccaggaaggacaaagcagcagaaggaactagttccgctccggagtatgatagtcaccgctttatgagcgcggtacaccagcagcgcttcgaagccatcaaggggtggtcgtttctccgggagcgacgcgtccagctcatggacgacgagtatactgatttccaggaggaaatatggcgccggcggtgggcaccactgtgtactcccatggccaagtttgatccagaaatagtccctgagttttatgccaatgcttggccaacagatgagggcgtgcgtgacatgagatcctgggttatgggccagtgatcccgttcgatgccacgctatcg

SEQ ID NO: 202864 - DNA, 417 bp, Glycine max
agcttctcatttgatcccgcagaggaggagcatattacatatttcactcaagtcacacccacggaactctggcacaagagacttggtcattgccatcttgaaagaatgctcaacatgaaaaaaatgaaatatacaaaagaaaattcgaagaagtttcaaatggaggaatgcaaatctattagcacacaaatgaatcaaaaggagaagtttagcaaggaagaaggtgttgataacattgatgaaagatattatgggagcttgattgaatgtctaatgtatctcactacaacaaggccaaacattctattttctcaaaagaacaaaactgaaattcttgttgacaatcaagtagccattgctatcgcaaacaatttcttgtgtcatggtaagactaaacatttcaacatccagttctat

SEQ ID NO: 202865 - DNA, 382 bp, Glycine max
tgttcagaaacgtgcatttgtgagcaatacacaattctctttatctcactacgaacaggagtatcagaaatgcggaatagaactctaatggatatggttagaaggatgataatcaattagactttacccgtatctttgtggatgtatgccttgacaactgtcacgcatgtggtgaacagggttcctacgaaggcagatccaaagacaccttttgaactatggacaaataggatacctagtataaggcacctgcatgtttatggttgccagacagacataacgatttataattcgcaagaaagaacatgtgatgcaagaacaatcaatgaatatttcattggttatccagaaaagtcacagagggtatatgttctattggcct

SEQ ID NO: 202866 - DNA, 427 bp, Glycine max
  unsure (1)..(427): unsure at all n locations
agcttcatgttagtagtatcctcaccattgtttattatctgtctcttcaaatattttaggttgtctaaaaatatttcattcattggtatttcacttcaatactcaaatagttcgtaactaaattctaactcttttaataagagtatttgtgttaaagaaaattatttcatcattgtaattggggcttaagatgtgtatactatcttaaaagacaaatgaaatgacaacatagagggagtatataatatcaaaactgtcccataaaaaaaaatttatggttgtaagtacattactttttatgcgatggaagtggtgttatttatatgttcttccactcttactttctgcttaaaggagactctgagacttctctggagatacactcnaaagaagaagaagaagaagctgcacacagaacgcagagtat

SEQ ID NO: 202867 - DNA, 485 bp, Glycine max
  unsure (1)..(485): unsure at all n locations
ctaagcttcttataagctgaaccatttatctataacacttttttgttttattcagaaaantagagtttatctcttttatcttagtgagagtgattctcctaaattcttgagtgattcaagaacaccctgactgtatcaaaggactttcacaacctttgtgtgttgccctcgccggaaagagtgattntttccttcctttcatcttcaaccttattctttcaaaccacaattcccgaaaatccacttctgcccagaattatctcgtggccataactcccattttacgcactcaaattaagtgattcctgagctttaaatgaatttcaagacgtgacctttcacctcggtttggaatcacctcatttggagccctatagcttgagttatggccatntctatatttctgtccaaccaccacttaacctacgttntctcatctcattatttcattttatgccaagaccaccttattaagaccacgaaat

SEQ ID NO: 202868 - DNA, 409 bp, Glycine max
agctttttggagtagaaacatgggaccttcttattttatttgaaaaaaagaagtcgtatccagtcaaggtctgagagaccatacaattttcctaacgatttctaattatgtgggccattaagtctatcatatgctgacaatagccgagaagcccatgaatctcttcgggggcggagtaagtgtctgccatcgccttggccttggctaacaatcggggaagttcttgactcccgttcaaggtaagagcaaaccgatccatccacatggttgcctcttggtgtaaagagtcgatcacccttcctctagcctctttttccgcatacacttgagcatactcatccgtgattctatgctcgtgggccgtggctagacctaactcttcttggtacttggcgatgatagctaacat

SEQ ID NO: 202869 - DNA, 312 bp, Glycine max
taccctaatttcgtctggggattattatttgatgatatacaacctttgattggccgcttcgagacacttggcgtcctttattgcacaatgaataaagtcccgagacgtgtcagaaatcaaaaaggaagcaggcttgcgcaatccgtgaaattccgtaatgtggcggaaatcgaaaagaggtgtttttgcgcaatccataagtttttgtaactttttcgaaagctaaaaaagagtaaatacataatccgtagagattcgtaaccttgcggaagaaaaataaatatcgttacggaattcgtcaagtttcgtaac

SEQ ID NO: 202870 - DNA, 414 bp, Glycine max
tgcagcttaacctatcgctctcacagttttatattgggagctgatccaatccttgtgtccgggctctcagccacttatgatagccgccgatgatcccattactgcttcccctaagctctctgtcctttcttcacgccgcatcccatgccttgcgaactccttggagtacctttgcattggggtcactgaaaccccgtgtaatgaaaggcgtgatgctttcgtctaatggcgctcctctcatggggtagccaagctgtcttatggcgaggacgggattataattaatacaaccccatgttctcatccagggaacatttggacatccttcgcatgaagatacaatcctgattcttccttccttctagcgagggaaccaattaacagacgcccctccatgctagccaagagttggtc

SEQ ID NO: 202871 - DNA, 469 bp, Glycine max
  unsure (1)..(469): unsure at all n locations
tataagaacanaattgcctcaatcatgttcctaatattgcattgtttattancgacgcagtcaaccaagaatacgagcccttgctattttgcgagccatcaatggggcaaaacacaccaaatgattatgatgatggatggctcaaattctcacaaaggtacaatcatcactttcaaattgagctttcaaaactatcatgacatgtagagaagaatcaaggatttcaagtcacaaaatgtcaagaacttttattttcaaaacaattacccatttctcgaacatattctataattcaaagaaaaacatgcaaagtcgtacatgcacacaaaattgacccacaatattaaactaaaaatccgacgaaagtgacaacatttacaatataacacagctaacaaattaacaaaacccacacaactagcataaccaaagaacactcgccccgcccccccccatacgttaacaacac

SEQ ID NO: 202872 - DNA, 418 bp, Glycine max
  unsure (1)..(418): unsure at all n locations
agcttataatatatcgagatgctcgaaaataaacattttttctcagggaaattcaaacggccataacttttgacttggatgtctgattcaggccaaccatatatcaagacactcgagtttgaacaagaaagctctcggcaatttcaaacggtcataacttttgactcgggtctatgattgagatccatgatatatcgagacgctcgaaattgagcaacgaaagttctcaataaattcaaatggtcaaaacatttcactcgaatgtccgattcaggcttataatatatcaagacgctngaaattaaatatggaatcacaagtcaaattcaaacaggtagaacttttgacccagatgtccgatttaggaaaataatatatcgagaggattgaatttgaacaagaaagctctcagcatatt

SEQ ID NO: 202873 - DNA, 415 bp, Glycine max
agcttctagccaaatggacttaccttgaattaatttctttgttagcccttttgagccttgtttccctttccttgttttgaagctcactacaagccttaagtgaaaaaccatgatattaccatatccttaaggaattttggagctttggaattgttttgggaataagtgtggggggtttttgtttcattggacaacttgttttgttgggtatgcttcatgatgtattttgggccatacttgatgtacattgtatattggttaaatgttggacatgctgaatgaaatgttgtttctcaaaggctaatgagtaaaaaaaaaaatcgaaaaaagaaaaagaaaagcaataaagttgactgaataagatcttaaatggcacaagaatgatgaaactcttggttctactcttcatgtttaa

SEQ ID NO: 202874 - DNA, 411 bp, Glycine max
  unsure (1)..(411): unsure at all n locations
cgagaaatctcatganaccgctagagatgccgctatagcttctgttttacacacatgagcccgcttagaggtaagggatgagtctatcgcaattgtgggttagaatgaacatgtgtatggacctttagaggattaaattggggtttattttgggatgtttatagaattataatgttcctttatgattataaatacaatattcttgtgtttgatgaaccaattgatgttctaatgcgaattggttgacaaaattgagtgctcttggtgttttgtgttttgacctatgattttgatcattgatttaatatgattgtgtgaaattgcttgggggttttactcccatgttatgagaagcatcttttgtatatattgtatattgagatatgaaatggtgattaaaatgtgcgtaat

SEQ ID NO: 202875 - DNA, 392 bp, Glycine max
  unsure (1)..(392): unsure at all n locations
agcttcaatttcaagaaccaagaagaggttggtttattcttaaaaacgatatccatgcaaccaaccacgatagctaatcatatattccaccaaggaaaattgaaatccaagcaagacaaaaaagagctcgcctcgttaactagaaaacagtgagtaccatcaatggtaggaagaagaaactatccactttggaagatggcaccggtaatggttacacggcccgaaccaaccttggaaacattggggatggtggcaaggtgtcaagcatgctgcagtgtgagatacaaccgcgaagatgacagaagaagactatgcgaagaaaatagggcttgtgttctaatttctaatattnttaacatgcagcttccacatcagttttattgaacaccgat

SEQ ID NO: 202876 - DNA, 408 bp, Glycine max
agcttaaagcggtctcatgcaggcttgtgagaatatttgtggcattacatctttctaaagagagaaacctatgaagggcttctcttatctccttgtcaaagtgatagctgaggcccaggcgtttcacattgtcaatcagatctagtgtgacccatatttctgaattttcatcctttatcattctcctcacttcctccagcttcctggccattatctcatattttacatcctattcacatatgcacaaagagaaattaataatcacgtatgagtaaaatatgtagtagcacacacacatatatacaatattggaggaagtctagtggtgaaggtaaaagggatgatgaggaacaagttacgggtttaaattcttttataataaaaaactaataatactaataattaata

SEQ ID NO: 202877 - DNA, 363 bp, Glycine max
tgctatgagcgatcaaattctttgaccttctcagcttcttggggatttgctatccaaggttatcaatgaaatgaacttctacctgacctcctttcactgcagagaacttttgtgccatggaagaagggagtaaagtaatgccatttatgttaacaccgaactatctagaatccttgtaaaggcttctatattttcttaaaagtgtgcatctgtaaaaggggctttggacaatacagtgacatgttgtaggaactgctttcgatctacactgctcaagcatatcatagttctttcaaagaagctggagcttaataatgaacatgttttgttaaagcaatcctcaaaatggatgatttgaatttt

SEQ ID NO: 202878 - DNA, 429 bp, Glycine max
agcttcaatagaaccctaattccatccatgtattttatatattgactatttatttggagctgtgactctcacattttgtggttgttatttgcaatattctggaccatttcttttaaaacttaatacaatcaacacatgcaccttaggcatatcatttactttaaaccgtttaatactttctacatcatgactaataagtcatcaattttactacttcccacatctctaatttcaattttaaatttacccacatttacaatatcatggttaagattcattcttaggaagtagaaaattttactttggtgtggcttactttggaattatgaaactggagtatataattaattttgaacctgaaattactctggtggttactagaattggcgctaacgcgacaatgattaatcaagttacgggtatgaattg

SEQ ID NO: 202879 - DNA, 327 bp, Glycine max
  unsure (1)..(327): unsure at all n locations
ataaatantaagctgcaattattaagacctactggtactaaaaatttttctatatttctttgattatattaattgtctttatgttattttttaaaatattttaaaaaattaattgttctaaaaaaaaaattaattcgagttatggagacctgaattctcaacaggttgtgccaaaaaaattcaaaaacatagtgtaaatatgcatgtatatggcaattatggggggagatggatggtgttggggttttttttattattcccggaaaaaaaattatatttcttttttccaaaattaataaatttttttaacacaaaatatttcccccc

SEQ ID NO: 202880 - DNA, 413 bp, Glycine max
agcttgcttgtggggcttctatggaggcttgtacttttatgcttaatgggggcctttaatggtgattttccaccatggagatgcagcggaagaaaaaggaaaataggtgagaggaggcgccatccattaaggaataagccatggaagaaggagcttcaccaccaagatgagccttggataagaagcttggagaggatgcttcaatggaggaaaagaaagagggagagaaagagagaggggggagcacgaaattgaaggaataaaagaggtatagaagtggaactttgaagtatgtctcacaagactctcattcatcaaagttacaacaagtgttacacatgcttctatttatagactaggtagcttccttgagaagctttcttgagaaaacttccttgagaagcttctttgag

SEQ ID NO: 202881 - DNA, 402 bp, Glycine max
  unsure (1)..(402): unsure at all n locations
ttggttgattctttactaagcntntcctaactagatgattgagatgatgcatgtctatgtgtgcaatcctacgatgccacaaccaagaatcatctatcttatttaccaaacaacttatctcatgaaatgatgcatgtccaatgtttaacacatagatattacctattttctttccaatatggataacctcaccgaacattaataagacaacaattcttngtgaattcaattttgaagccttttgcacataattggctgatgctcaagaagttatgctttatcccattcacatatagaacattccttattcatgttttgattgatttccaaattttcttttccattatcttcctttattggtgctcaaaaagatgatcctcctctttgacataagtaggagtt

SEQ ID NO: 202882 - DNA, 415 bp, Glycine max
  unsure (1)..(415): unsure at all n locations
agctngcattattgatggagaaaagggaataaccatgaatggacaaagtaatttagctgctactaactctgtttttcacttaagcaaatcaatttctagtgatttttaatcatcgaaaatgaatcttataaaattactgcttcatcatcatttagtggtgctatttgatggcaataactaaaaacattaacggaataaaagtttaaaagactaatcaaaattttgtttgggaactaaaaataaaaacctgaaaaaatccagaaataaaaaacataatcaacccaaacttatccaaaaatacattacattctattttctataatcctttttcctttttttaagattttctttaaaataatttatattacaaaaagtaatatattgataaatgcattttttttattttcaatttttt

SEQ ID NO: 202883 - DNA, 499 bp, Glycine max
  unsure (1)..(499): unsure at all n locations
ttcacaacatccaagcaaaacaacattcatacagcacaatctatctcattcaagcataacagggcaaatgcagataactctgctcaaaacaccaaccaaaatcacaacttttctcacttaaagaccccagtaacaattccttcgatccaatttgttaaccgttggatcaaatccaaaattgtactggaagtctatagtacataagcctacattgtgaccgttgggatctactagcaaacatccagaactcattctgcactactcttttcacagccaatcacacacaagcatgtgtctgcacaaggccaaaatactgctgcacctattttgacagcaaaattctgcataagtgcagatatcaaaaatcacacttcccctcatccaatcttgcccagatcaatncctacaagtcccaaatcatgtatcaaccattgttaacccagaagcaagctttcaaacacagcaacacagaatctatgtgtccaatacccctcaattc

SEQ ID NO: 202884 - DNA, 416 bp, Glycine max
  unsure (1)..(416): unsure at all n locations
agctataataatagactntaagttctacacatatttaccatagaggagttgaaacttttttcttctgcagtttagggaaaaaaaaagaaagatatatatatatatatatatatatatatatatatataagtattaaccaatgattcaatcttcctttcctcatacatctaacttgtagaaattgaccaaaaaagttgaaaaaagaattgttaatcaaccaaaacattatgatatgattgttcaataattatagttatggtcttatagtgatttcaaattatgccaaccatttctattttcaatcagcataagatcaataaattagtatgacctttgaaggtttctttggtgatgaaggggattgatcatcttcagagttgttcccattattttcttcaatccctcttgtcttctga

SEQ ID NO: 202885 - DNA, 450 bp, Glycine max
  unsure (1)..(450): unsure at all n locations
tgcctgcattcagactngtaactganatttcaccatcccttgctatttctcaaatcttaggatgaanatagagacaattggtggaagctcccaatattntcttttgcacctatgtacgcaggtattgtcttgtattatctcttatgtgaataaaggttcatagtgactgactgaatttaagttttaacaccactaactntatagcttcatgctccataggcttttacattttattggcaataaaatatggtaaataatatatgtcaagtagttccaaaccaatatatgtacttttatgggtgaaaagatctattacattggacaagtaattgactaccattttgccttaagttttgactagttaaaactagcaaagacctagcacgaactctattctccttatgttccactccaattagtgcccatttagtacattgaacaagtaattga

SEQ ID NO: 202886 - DNA, 336 bp, Glycine max
cagcctatagcttaatctagatcaacactttttgaattgcatgagatttgctcttaaaacgcggatgaagagcatgcttatgacattagctagcaccacggaggagacttccaccaagacattgggaaccctcttgaattttatgccggtgccaatggaggccaaggttaaccaaatgaaggttatgcccgccaaggtgaagaaaaacctttgatgaaggacttctcattgaccccgattgacattaaaaccaatgggccgaccaaccccgtgtagggtgaagatgtgaaccaagagaaaaaaaatgaccactttggaagaatatggttggttttt

SEQ ID NO: 202887 - DNA, 485 bp, Glycine max
  unsure (1)..(485): unsure at all n locations
ggacctatgaaactcagctttgcagacaaattgtctgaacataacaggtattttgttttatagnaaaagttttatgctaaagagccattcaaattcctaataatcctagttgatatcaattctgcattaattctaatcctatatgggtaacccgtaaatgaaagtaaatcacattctggacaaacaaacacgacatttatattntctagaccttgttcacctaataatattgagtcaaaaacaaaaaaagaaaagtagtgaaataatttccccctttgcatttgcacatagaatngacacacgaacacgagaatttagattcatgtggtttaatcagctagaacaggcctcttagccaaagttgaagttacaagattntcaccaaatgaaacataaaagataagaaatcgaagaggtaactcaagagaataagagagcgaatnccacgggaaagagaatgtgtgaaagtgtgagattggatatca

SEQ ID NO: 202888 - DNA, 424 bp, Glycine max
  unsure (1)..(424): unsure at all n locations
cagctttaagagacattttggaaaccctggccattctttacaaaatccaatcaattcattgatatttgagaaagcccttttgaaaataggccaaggcaaggactacgtgtcctcagtctctgttttgataactctagtatagtcacctcaacagttatgtctatgctatttttggtaggtgtatgtgattgggtaaaatttattatagtgttaggttcgacctaattactttatttggatgaatgtattttaactacaatttatttcattctacaaacttatgcttatttattttttgcttttcattatttcatcctaaatttttatttaaagatttaaatgtttttactttttcaaaaggacacgttttctttntagtctttgaattcacaacatatttctttntactattgcatagcataag

SEQ ID NO: 202889 - DNA, 420 bp, Glycine max
ctgcattcggaccttaaaactagcttccgttgccaccttgagcgttagtttttttcttttagtctagtatataacatgtgaacattataaaatcttgaacgttgggggttaagtttccagctataaaaaaaaatgttgaactcatacatttctccttagcttactgagatcgctttctctttctttcttcttgaggtcttgagtgtgagagaatattgtgcttgtgttgtgcttgctgtgctgtgctcgtggttcaaatttccttcgaaattactgcttgttgttgctgtgctatcatccttcaagtgcccttaccctttgacatatattcctggtaagtattttcacagcaaatatgttaatatatattatatagttgaagctagtttgtattagtattaacaaatattctaagttagt

SEQ ID NO: 202890 - DNA, 411 bp, Glycine max
agcttttaaaaaaaaacctattagggttgcatgttagcttggataatatatatatctatatatatgtatatgtattaaaacttaaaagacataaatcaatcttttaaaaaaagaaataaaataagacaaaatcttttaataaaataagataaaataaaatatttatatttctaataacattttcccccctcaaattgaagctagatgaacaacttcaagaaatcacattgaagatttgattatatgttgggtcattacttcatgtttgggagatggcttgggaattaaaaattttgtacttctttgtatttaacttgtcttggttcttatttcttatttattttagtatttgacattaagagtagatcattgaatggaacttatggtattttacttaacttgcttattttg

SEQ ID NO: 202891 - DNA, 399 bp, Glycine max
aacattgagatagcttggaatctcattgggaacgaacagaggactgatgatagtgttggagttttaaccatgcccattcacctacgtcgaaagaaatggcagtgcgacgggtatctgcttgagcctttcatgtattgcctgctgtgattcaagttttccctcaccgtttttataataaacttgcgttgctgctgggaacagtggacatttggcagagtggtgttgtgaacatcataatccgcaatggagggagggctgtgtccatacaaagcctggtatggtgacatttgcaacactgagtgtttggcagagttgtaccattgctctggcaagtgagagaacaaaaaccatatgtgtggaatatctgccatgatacagcgaagataggcactatagacg

SEQ ID NO: 202892 - DNA, 408 bp, Glycine max
  unsure (1)..(408): unsure at all n locations
nagcttccattaaccaagctagtgatattttttgttctgaaaaccttatcaagcttaaacacagcatccaaattaagatgcttacctgtcttaaaataaccattttctttccctaccatgccagcctttcctgaagactcagaccaaaacccttcaagcttgaagtacacatggtttctacggtagcggcgtttccgttcatatcttaagctgtcaccatggcttgagttccagtagtacgatatgctggatgtgagtgaaacagtggcttcaacattgaacaagtcagagaacttggttgcacgtatgtacattggttggaggtcaaagtattggtttaaggaagtttcaccatcgatgatgctatcaccacctgtgaagtaacctctttgatgatcatcaaaaggg

SEQ ID NO: 202893 - DNA, 450 bp, Glycine max
  unsure (1)..(450): unsure at all n locations
ngaatatntatttgacaaacccaaatgatgctatctttgttttcttctatctcgactatatttattaggcgggccgaagtataatatttggctagcccccacatttcagtacaaaggaaaagatagtatcaattacttaaaggacttaattctgcatcttcactttttttccttaacttcaattaattatgaactccgaaggattcttataacatcagcaaaacaacgataactctgtgtcattatatacattaattaaatagcaggatcatgcttgcacatcagtcatgctcaaaccaagaatttagatgaatctttttctcattcacattgcaattgcagcaacaagtttctcctctaaaacatgagtattacgagaactgactcaattgaccaccacattccttatcttacaacttattatacatgtacaacaacagctcatttcta

SEQ ID NO: 202894 - DNA, 413 bp, Glycine max
  unsure (1)..(413): unsure at all n locations
gcttatatgcattataaaaaaagaatagtcaacatttaagttagggaatatttgccttttttaattttccaagactaagtcctttttttatcttttccatttcctctgaggcctttccctcattttctcaatcatatccatcaaaaacccacttttaaactttttaatctgccaagataatcatgtctcctctactacaagataacaaggttatccttaatgttctcaattcttgtttcaagtttaagtaacacataaataaagtacttcaaagttcaaacaactaaatatttataagcagccaaaatagtttgaagtcacaaatcctacttccagaaatctatggatacaacttatccattataaaacaccttcacaatcacaggaacaactntgggaagactagcaggtaa

SEQ ID NO: 202895 - DNA, 471 bp, Glycine max
  unsure (1)..(471): unsure at all n locations
ctaaagctgtgcttgaaccgaatntcataagcccgatctatataaaattgattagtgtgtttcaagtttcaacaccattatcagataataataataataataattataataataataataataataataataaagcaaagttagttagacataaataacaaactaaaattaaggtacatgagagaaccatgcactgggtgagggtatactacctacaatatgtgaataaatgctaaaaaagaaataatacttgtgaaaacaaataaaatttaattggtggtgtgctactggtaaaccataatacacagtacacatcttaaataaaaagtaaaatcctacagttctaaaaggaactcaaaacacctccagaaagcatccactctataaaaaattaaccccaactctaattacacggagacagaaaattttttataaaaatatttgtaaaaaaattttgtaaaaattaatatt

SEQ ID NO: 202896 - DNA, 396 bp, Glycine max
  unsure (1)..(396): unsure at all n locations
caaagagtggcatactcttatttgaaatcnacttggtacaaaactaaaagttttaaggactgacaatgacctaaagtttggttcagagcaattcaatgagttttgcaggaaaatatgtatcaaaagacacaaaacaattctttatacaccacaacagaatggactaacaaaaataatgaatacgaccattttggaaagagtgagatgcatgctgctgagtgcaaaactgccaaaagaccttttggggagaagctgcaaacatagcagcctatgtgatcaatagatgtccatcatcagctttaaacttcaagacactaatggaagcttggagtggtgaaccacctgattactcangattgaaggtgtttggatcactggcctttgctcatgttaaac

SEQ ID NO: 202897 - DNA, 392 bp, Glycine max
tctcagcttatgatggatgaatcaagtggattaagtagttgtgatgatgactttgatgatgacaaaatgcccacagaatgatttctagattgagtccacaagttcaagatcaagattaatttcaagtttcatgagaagaaatctagatgattcaagaatcaagagaagtttgatttcaagattcaagagaagatgaattccagacttatgagaagaaatcaagaagacttcacaagggaagtattgaaaagatttttcaaaaaacaaacatagcacagttttgtttttcaaaagaggttatctcacaattttctaagttacaagagtttttactctctggtaatcgattaccagtttcctgtaatcgattaccacgttcctataatcgatta

SEQ ID NO: 202898 - DNA, 425 bp, Glycine max
  unsure (1)..(425): unsure at all n locations
agctttgcacaattcctggtgtatccacacattttttttatctgnttcaacttcttcctagacacaaaatttaccaccgacatactccagtgccccttttgcattttgtatgaatttatcattgtggtgcaaaataagactgatttcatcagacatcctacggagaaacaaaaaacattgattgtattttcacaaacaaagaacacaaaaagtttcagaacagagaagagaagagaagaagtttgagaatagagaagagaaaacaagagaagaggtttgacaacagaggccagatgcacaatgaccaccatggcaaacgcagcggaaatggtgccatttcgatcaacgaaatatgcaatgacgatggcgttgttacgattgtcgtcaaaaccccaaaacaatcatccatcgatgaagaagacact

SEQ ID NO: 202899 - DNA, 349 bp, Glycine max
  unsure (1)..(349): unsure at all n locations
tgcacttaaatctcagctattgacaatgcattatattatccagagggcgatactttattttggttattcaggnnngcgaatgggtcgaatcgatcaattgcgtggattgagtgaatcggaatgggtagatcatgtgccttgaatgaacatgcactcattaaaagagaaagaacatggaattatgatcatgactaaaaatggtagttgttttgtccagtttattgtgaatgaactcattatccgcatacccgtgagagtgtgatctttaattgtgagagaacgactaacattgagttatgattttcgcatgaatctctgagtatggaatgaatgcatgacattgaagatg

SEQ ID NO: 202900 - DNA, 411 bp, Glycine max
agcttgtaacggaaaatgtttgtgttgaggaaaatatttactgctgcaaccaaacaactgcagagccattttgtatttgtgatgatagcttgtccgaggaaccaaaacttggtaatgtgtaaattactgttcttgaaagcaagaatatttatacttttgcaaaaaagtacgttttaccggaaatgtctagaatttggccaagcagtatgtgctcaaggtttaatgtggtggtgacgaagctcgtatactaccgaaaaggtcttcaacattttatgagtcaaggttgttaccatgaagaaatagagtattttggcaccagctttttaagttttttcatgataaatattttatcaggagttttttgtaatagtcatacgcatgacgtgcatttttttttctcttctgaatatc

SEQ ID NO: 202901 - DNA, 360 bp, Glycine max
agagctaccaagagacaagcctctctattttcttgttcatcttctgcccatgggtttacttctttccaattcctcacttttcaatccaaattccaagacttattatattctctgctcatgattttcattttttctttgctcctagacttgaggcatttggaattggagaaagagaaagaaaatatagcatcaccaagaggagtcttggaagcctgcatgaaagactttgactctcacgaccaatcacatgaatctgaagccacttgttcaaccacgagggcacgctctcactggtccaaattcttcagaatgtggaggagaaaatcttttaagcgcctaggctccctcccttctcttatt

SEQ ID NO: 202902 - DNA, 363 bp, Glycine max
cagcttgattacatttggtgccgattccatttacttttgcatatatatcttggatattggacttgaaaagaaaaaaaccttgattttttattattaaaattaaaatatcattgaaaataaattctaactcctttatgatatgggattttaatatgcaaaatattatattttactaagtcaagataaaaaggttaaaaagtatgggtaccttcctaaaattcaaggtaccgaagcaatcagaaatatcactagtccaaaaaaataattatttactatacataataatctataaattattgggtaattttgttttacttaaattgtaataattaattcctagaaaagtaacgtgactctgtgaga

SEQ ID NO: 202903 - DNA, 407 bp, Glycine max
  unsure (1)..(407): unsure at all n locations
agctttttgaaaagatacatctcttcaaactattttgaanaggcgcgaagggcctatatatatgtgtgtctgactttgaaaagaatgagagagatattctaagagaacttaattgccaatactctctcaacaactcttgagcaaacacttgcaaatctattgaaaattcatccaagaacttcaaattgtattatcatctctaaaatagagaaattcctctaagaacttcaacttttatcatccactctaaaggagagaaatctttttgttcatctcagaaagtcagttgtaatcaaaagactggttgtttcttggattgtgagaattgtaatcaagagacgggttgtctcttggagaatctttgaacacaagggtgagggatcacaaggtgtgttcanactctgtaa

SEQ ID NO: 202904 - DNA, 442 bp, Glycine max
  unsure (1)..(442): unsure at all n locations
gttgactcatagttgtcctagcaaccaattattcatatgttgtattgttcatctntagttcacttgtgttgtccatgatgcccaaaggaccaaattcattaaaaagataaaaggaaacaaaagccatgggggcaaaaccaaacccaaataggataaagcaaaacataacctaaacctgagaaaatattgccttgtagatttacttgacttctcacattattaaggtgtacttgacattgaaggtaacctcttcatactattacactgttgataataattatgtcttgtgtttggcatgggtgttgttttgcatatctataaattgtgtttcatattcagccgtgagcctgtgagtaagtatctaacttaagtgcaatatgtctagatgaagtggtatgcttatagcaatgaagacggattctataccaacactgacattatg

SEQ ID NO: 202905 - DNA, 360 bp, Glycine max
tgctctctcacattcttttcttaatcccaaccaatgtaacagttgcaacgagtgttcttttcaagaggtggaaacttctatggcgcttcgtttcgactctcaacttcaaccacagccaccatgacgacaacaaccacgaaacctgttccctctttgctcagagggtgcacgcattcattctcatgcacgacatggaccaacccttcacaagattctgcctcagttcttcttgccctctcgatcccattcatgtgaacgcatggatttccgctgcaacgcaacacagagtcgagcacctcgacctctctctgggttgtgcggtagaattgccctccttcttgcttttcagctgcaaaaccc

SEQ ID NO: 202906 - DNA, 361 bp, Glycine max
ctaatattcatgttgctccctctatctctaacaccttatacttcttttaaagaagatgttctaaaaatgatgttgataatctacattcaacaatggttgtcataaaaatgatgttgaaaagttacactcaaagacgattttcaaagaactgatgttgagacttggcacttattcgcaaaaatgcaactgtgtttacttcaacgatgtttttctataaaccgatgttgttgcaacattgtagaaagattctattttctagtagtggtagtgtgcgaacaataaaggaagaatcttaagaatgggaagtatctgacactctacacatgtaagcattgaaattgtaaaagataggaaaaacaaa

SEQ ID NO: 202907 - DNA, 424 bp, Glycine max
  unsure (1)..(424): unsure at all n locations
agctttagaagcacgtgggcatatctattttttctcgcgttngagattctataattccatgtttttgtagcaactgtacagagtacctgcataaaatttattgtcttattaggaaaatgaaagttaaaaagcaaagattaatgaaagttgaacaagaccaatttttccaagataagcatctacactagaaattacattaaatgcatgcatttgacaataatacactaacaacatataggtaagcatgtaataatacataagcagattatttttttataagaaaacaggttaggtttggacgcatgatattgttcaaatatacagtgagccctttacattgaagtgagaatttgtaagatgaatcattgaacctgttacttttgtttggacccatattaaaaaaaaatagacaaagcactagcta

SEQ ID NO: 202908 - DNA, 384 bp, Glycine max
  unsure (1)..(384): unsure at all n locations
ctcaagcttctcgaacgagatcaatacatccattggcatagattgttttattgttttgtggtgcgcgatctgttntggtgtcacccatatgctatatagttatgcaatgcatgtcatctggtgtgtttatatacaatacctacaaaacaaacaggtacagactcccactacttgactttggtggagcgacaccaacggcgatgacattctctgctgggtttgcatatctggaggctgaacgtgttaataatattgtatgggctctggaacgatctcgaggcctatatttaagacacgatcgcctccctctcgtattgtcactgacagagacctaacactgatgaatgcactgataactgtgtttcccgagtctactaacttggt

SEQ ID NO: 202909 - DNA, 420 bp, Glycine max
  unsure (1)..(420): unsure at all n locations
agctcgctcgntaagcccgtgcttgcttttatttggttgcgctaancacggcctgccgcactaaacgctaatctattctcggcttaaaaaattgcggaattaggcttatcgagcacgcttactacacctattatgcaaaaaaatagatattatgtgttcctgcgctaagagcatggctatcacgcttagcttatgagtaaaatttcataaggcgcactaagtgcatctgctgcgctaagcgcccaatcttaattctagtcttatcttttgactatcttttggaataattcttggctagtctcgtcttttgcaacttttgtttttcagacggcttcaagaaagaggaagacaacagctgcagtaccccaggccggatatgacatatctagaagtacatcccaagaagcatgcgactgctac

SEQ ID NO: 202910 - DNA, 90 bp, Glycine max
aaataacctgtggaagacatatacctatgacctagaaactatcctgaaacaagagactttaaagagagaccctaatgccgtatgacgtat

SEQ ID NO: 202911 - DNA, 424 bp, Glycine max
gcttgaaatgaggaagtgtagaagggtgaatctttctgcttttattcgctgaccacagagtggtacctggagatatgtcgcgggggtcacgagaccttggggacgtcaggtggggtgctattgcccaaaaccaagcttgaccaatcccgacccaacccgggcatagtcagtcagtgagaacctgtgatgtacctaagcaggcgagctcctggcagtcaacagataaaaggaacaaagaccacaaagcaaggaggcttgtgtggtggctggccagctgtgaactttgattgatatatgggatatggcctctggtaatcgattaccaagggtgggtaatcgattacaaggcttaaaaatgaagacaggaggctaagatggtctctggtaatcgattaccaagggagtgtaatcgattaccaggctt

SEQ ID NO: 202912 - DNA, 441 bp, Glycine max
  unsure (1)..(441): unsure at all n locations
tgtaatcgattacacacatactggaatcgattaccagattatatttttagaaaatattctcaacagtcacatcttttcatttggttcttgaatggccatcaaaggcctatatatatgtgacttgagacacgaatttgctaagagttttcagaacaaaaaggtcttatcctcttaaaaagcaaaatgagccttgtttgattcttcttttgacatcatcaaaatcatgtatacatacattcacattctcccccttnttgatgatgacaaacatgtgatttcttctcaacaccatcaaatcttgcatgagttacagttaagacaaagttctcaagcgattaatccttcgaaactctgtgaagggggaaacaaaagaattctcangcggttagtccttcgaaatcttttgtttatggaagggaagatcanaagaatatcagactg

SEQ ID NO: 202913 - DNA, 431 bp, Glycine max
  unsure (1)..(431): unsure at all n locations
aagtcacctggggcatgcaagcttctatgtaagctggatctttgagcttattaatgtccttcaatggggatttttcaccatggagttgtagtagaagataaaggagaagaggtgagaagaggcgtcatccactagggaataagccatggaagaaggagcttcaccaccaagagagtgtcttggataagaagcttagagaggaaacttcaatggagaaaaagaaagagagagaggggagcacgaaattgaggaggaagagagggagagaagttaaactttgaagtgtgtctcacaagactctcatttatcaaagttacagcaagtgttacacatatttctatttataacctangtagcttccttgagaagcttctntgagaagctnntgtgagaaacttccttaagaagctagaacttagctacacactaat

SEQ ID NO: 202914 - DNA, 374 bp, Glycine max
  unsure (1)..(374): unsure at all n locations
tncttgagaagctagaggttagctactgacacccctcttttatctaagctcactcccttgccaaaatggacttggcttcttgggtaaagaggtggctaacattcatctggcttgnggaggcgcaagccctgatgaatcttatctacacacacccttccaataactaagctcacccccatgccaaaatacatgaaaatacaaaaaaagtccctactacaaagaatacttaaaatgccctgaaatacaaggctaaaaccatatactactagggtatccttaacttgtagggtagggtgccctaaatttgtagggtaccctacaaacctataatggccaaaatacaaggtccaaaagaaggaaaacctattctaata

SEQ ID NO: 202915 - DNA, 417 bp, Glycine max
agcttaaaccgcccgaaggtgactatttttctataaataggcatggtggggggtgctttaaggggttaaaaagttcaaaactgaaaggaattgagagaatttaaagaaaagaagaagaaagagaaaaagaagaagaaagaagaggaaacaatgccgagatgctaccgaatcatgactgcaattagtccctatgtcgctccttgttctgtgtttttcgtgcgacagtcagttagttttgtttttaaggattgagtgtgatctatgtacccttaggggtgcccccttgttattatgtgcacattcatcttctccatctataatcgataaaatcttattttttttgtgaagtttaatcttaaccgatctctagtgccgtaaaattgtctttaaaagagattgaaagttaataaacaaaac

SEQ ID NO: 202916 - DNA, 450 bp, Glycine max
  unsure (1)..(450): unsure at all n locations
tatccgcgggaggtctgacgttccatggtgagtttcctgtcttggcgagttgcgtcaccgtcatgtggacgttgatgtgcttgttgggctcggggaggtcgagaagcgcgttgntaaggatgacaaaggcctcctcgagatcgctgaagatggagaagagcgagtggaggccatcagtggtggtgttctatccaacgcccgggaggaagagcttgcgctgggagacattgtggtccgtgacgatgcgcacaacaacaaggacgtcgaggtggcccaccaccgcgtcctaaaggatgttgaggaattggttaagggtgaagcgcttgatgagcttgcgggcttctaatggggagagcttgacggggtcagaagagttgttgttgaaaataacacagcttccatataaggaaaattaaacataacatttaactcaatatcggtttgtaaact

SEQ ID NO: 202917 - DNA, 298 bp, Glycine max
tagttgagcactcacttaattctccatattctccccttttgtgtttcagattaagcttcacttgaagaaaaaggattaaattatatgaattctcgaggtagaccctattatctctccccctttggcatcaacaaaaagcgcaagtgcgtaagaaatataaaacatacactaatgaataatcatacgatagaatagagaacaatctaacaagataacttaaccattcatcaatcttagagagataatacttcatagaattgtcatataatccagagagtcattcataataaccaaataa

SEQ ID NO: 202918 - DNA, 420 bp, Glycine max
  unsure (1)..(420): unsure at all n locations
tctcgagaaaacgttcttgagaagctttttgaanatacttcttgagaagctagagcttatctacacacatccctctcataactaagctcacctccttgagaagcttccttaagaagattcctagagaagctagagcttagctacacacacatctctaatagctaagctcacctccttgagatgagaagctagagcttagctacaaaccccctattatagctaagctcaagccccttacacaattcctggaaataccaaagaattccctactacacaagactacttcgaataccctggaaatacaagggcaagaactcctataatactagaatggctcaaatacaagggcccaacgaaggaaaaccttatcttatatttacaaagataagcgggctatactttgccatgggctcgaatcta

SEQ ID NO: 202919 - DNA, 446 bp, Glycine max
actaagcttcttcgcaatccctcattaagatatgttctaactatacacattattggaacaacataattaagaccaaaacttaacccgcagatccttcatttaagactaagtttcgatcctgcttcaatcaagttctaaggcaacagtacatttcccaatgctaaagtcacctaactgtgcacacaaatgggtgatcagaccaaaagcatacaaacatcaagcattgaatgaagcattgaacatagaaaacacaatcaattagatattctgtatttacatcagttgttccttagaaatccccaactagggtgtgtagccagccattacaaagaaaccctaataatatatgagattaaagcagagaatgatagtttcttacacaagaaaggggattccttctcctcttctagcatctcacactcactgtctactcaataatctctctc

SEQ ID NO: 202920 - DNA, 327 bp, Glycine max
aacctcttgctgtgtaacttggaattttcttcctaagactctaggagattacttgagcatatttcttgaatttcttggatatcttggattcctttcttgaataaaacttgagaagcgcattcctttggcatcatcaaaacatctaaatatctttgcttctacaatcccccccttcttgatgatgacaattattctcgaatcaagacgaacttacataccattggataatgcgtacacacaacccttactcaccctatcttttggaatatatgcgcaagctgataaaatccaataatatttaactacccatcgtcttattctctcccc

SEQ ID NO: 202921 - DNA, 353 bp, Glycine max
ggaccctaaaactaactgtaaatggcaacatgatacatgtcttgtttggtttgtgtcatcgaataaagggatgccccacattatttccaccacacatatgcataaatgatgatttggaaattttatgccaaactggttatgcatgcacctatgtggacgctcaaatgtcaaatttttatggtcatgtgatgctagggctcaagattcatttcctctattttaaatcaacccaatggttccaaaatatgttcttttatcaaattgtgcattcatccgagttcatttcgggcgtccagggaaatttacaacattcacccttcatgtgttgacacattctccataaattgggtatg

SEQ ID NO: 202922 - DNA, 406 bp, Glycine max
tttcacttctaatagacgtctagatgttatttattatatattaatttctttttaactcatttcaataaactgtataattaaactcttaagtaacaactaacaaacacttaaatattgtttgaagtgaaccataaaaaatcaattaaacatagaaaagaacatgaattaaactacaaagagactatggtatagcagctgccaatagatagagagagagagagagctcacggatcaataagggtgacgttggcttgacgttgtatagtttttgcaaggttggcaccggcaacaccaccttctaagatcaccactttcttcttcgccattttgtgtgcttgaaaatttctctctcccttgattacaagttgaagattgcgttataataatgatagttatgttctcacaa

SEQ ID NO: 202923 - DNA, 453 bp, Glycine max
  unsure (1)..(453): unsure at all n locations
tcttttggaccttgaacaatctatctactcctctttcataaccatgctatgggctcgcgactggtccctttcttcccttcgcaacttgagttcattattgctaccccatagagctccgcgaaatttgatgcggccatactcttccttgcgagccctcttggtctcttgttcaagggctcttgcggtaattgcattctcttcccgtaacccggcacactccttncgaacgtgtgtagcagccaacttgaacttctccttggcgagtttttcctttcctaactcgcttttgagagcttggacgttttcgtcctcttccggtgcttcaaaattctctatcgtgacgactatgtaactaggcgagccaatctatacctcgagtgcgaacttcagccatccgggtacccaccaatgatgccattacgaatgcctctaacctcttgaacattccttaac

SEQ ID NO: 202924 - DNA, 344 bp, Glycine max
  unsure (1)..(344): unsure at all n locations
tgtaactctaagcatcaatttatattatgggtgaataacttgagcatcaattacacaggttcctcatattntattagaatttagaaccaatatggtgtttcaacgcgcgtaaacggtaagtacttgacataatgatggtatgagcccctgaatgtaatggacagacatgcttcaggatttgaaccctcaaaggctcacaagatatatagagattgtaataactatttggtcacaatatcaagaaatcatcattttatttaattntaaatcacgagaaatgttgcgttaagaaaatgaatcaactagccatacatggcatgtacatttaacataaattttgctta

SEQ ID NO: 202925 - DNA, 287 bp, Glycine max
  unsure (1)..(287): unsure at all n locations
actcagcttcttatccaggctcatcttgggggtagctcttnttttctggcttatnccntaagggatggcgcctcctctcacctcttctccgttgtcttccgctgcatctccatggtgaaaaatcaccattgaagtacctcattgaagctcaaagatccagcctccatagaagctccacaagcaagcttccagccaaccatcgagcacatgtatagactcatgatcgtctgtatcagatgagtctcagcctgtagagtcagggctttacttctttttcgtgccctact

SEQ ID NO: 202926 - DNA, 451 bp, Glycine max
  unsure (1)..(451): unsure at all n locations
tacgcgacactataaaactcagcttcaattgctattgactccagattgtttcttataangataaagatctgaatggggatctgcataagaacatagaccacagactcttgcaataggtgtagatttttgattcatggcaagctgggttactaagttgaccaaggcatcaagttttcccttgagctttttattttcagtagatgaagatgaatctgtggccacctcatggactcctctaagaacaatagcatcatttcttgcactgaattgttgggagttggaagccatcttctcaatcaaattcctagcttcagtagaggtcatatcaccaagagctccaccactggcagcatcaatcatactcctctccatgttgctaagtccctcatagatatattgaagaaagagttgctcataaatctggtggtgatggcagcttgcacataatatt

SEQ ID NO: 202927 - DNA, 195 bp, Glycine max
gagagaatcttacaaagccgcgctacaggatgagacgtaaacaggggggatatatgcacaaaaaaaatggactaaccaaaacattaccgggcaaaccagaagggcagcgcgctcaaagagaagcccatcagcggaaagacaaaaaaaaaaaagggacagaaaaagggggaagaaggaagggggccacaccagaaa

SEQ ID NO: 202928 - DNA, 415 bp, Glycine max
  unsure (1)..(415): unsure at all n locations
tctgaaggcactgtggagaganggtactaatatgttctttgtcccaaagccctcgcagcctgtgaacctactgactctaaaacatntttaacctttgttcttatctgtgcctggtacaggagacctcacttgctatgaataatactatgcatgaagtggagttatagaatagtatagcataactggatatccgtaattgtgaaaagacttataggtgtgcattagagcaaaaaattatgcatgggttatttctcgagtcacaagagggaaggagcgtttcatggttctagagaaagctaatggaacactcctatttgcttcagatgctgttgagaagtttagcgacatgtatgctattgggttacctatcacattagtggcgtagtagtggcgtccaacctaactgtatttcttt

SEQ ID NO: 202929 - DNA, 384 bp, Glycine max
  unsure (1)..(384): unsure at all n locations
tcttggaagctcaccgatcaagtcggtgagttctgtctctatgttcatgtgcacatactccctgtcagctctccaattgaactctccattctcaatgcgcctctctatttcatccaatcctcggagaatagagtctctgtcaatctcgcttatcaaaccctaacaaacaaagaataatattaagtattcatgttccaattagtagactgaatgctttcgaggttaccgaacctggtgagcgagcattgaagcgtgtgctctgcttcccgcgatgtcttagttcgtagagcttcttgtcgaaggagatcgactcggtgaacctcntccaacgtcggttcgccctcctcaacctgccacccaaacttggttccttggctggcctgg

SEQ ID NO: 202930 - DNA, 432 bp, Glycine max
  unsure (1)..(432): unsure at all n locations
tcaataatgtgtgaacattgttattgaagcgcanaataccttccgcattgacaatgatgaccattcaagtttactgcccacttttgtctgccacgttgcgttataaggttgaaggtctcctctacttcaaaccttgtagagtgaatatcatacacgcgaatgatgtgcatacaagcttgttcttgatttttcctcaattctttaacaagctttgaacaatatacttgtccttcatttaactgtctttgggcttggcgaccacgctcaacaaagtactttcgacacctactatacgttgatttcaccaatgttgttatgggaatgttgcgacaatcctttataaccttaatgatacattctacaagggtcgttgtcatgtggccatatagacgtccttctctatcgtaagcatcatccatttttctttgaatg

SEQ ID NO: 202931 - DNA, 277 bp, Glycine max
ctgagttcgagagagatttgatatttttgcgaatagaatatttatggactaactaagaaataaaaggttaaaaagtgcaatgccaaggacagacaaaaggactaacccacaacatcaataacatggaactaaaatgagaagatcctaaatttctattatgactatagataaatgaatcattattaccaccatagcagactgctaaagagagatcaattcatatgtaccaccaacatgattggttgaaacatataaacaagagcattcttaagcgata

SEQ ID NO: 202932 - DNA, 329 bp, Glycine max
  unsure (1)..(329): unsure at all n locations
ggangcaaagaagaggaaaagaaagcgttctaacacaaggcaagaaacgaacaggggggacaaagccccgagccacagagagaaaacagccaggccaggcgggaccgcaaaacccgcaaaagaagaaaccagaatccaacaccaagaaatggcaccgggaacaggaaacacaaggagaaaagccaccagacgaacagaagacagggcccaaagaccacaccaaagaagcagagaagcaaaaggaaccctgcaagcctggccgaaaagaacgacaaaaacggaaagcaaaggcaacccaaaggccacaaaaagcactaaccctgggacca

SEQ ID NO: 202933 - DNA, 307 bp, Glycine max
actgaagatgctaaggagaaagtattggatttattataaggggacacgaattgaggagtaaagaggaagaagggacttcaatatgttcacagactctattcatcaagtacaacagtgttcactgcttttattattactatgagctccttgaagctttttgaaaaactccctgaaacttcttgagaatcttcttgaaagctgagctatctccacaccctctaatactagccacctcttagaagcttctgagagattctaagaactagacttacttccacccccttaatactaaccacccctgccaaaa

SEQ ID NO: 202934 - DNA, 461 bp, Glycine max
  unsure (1)..(461): unsure at all n locations
ttgagccaaaatcccaacttaccatatatcttgaaccattgtgataatatcaatccttgccctcggaagaaaacacaaaaagaagggaacttcccaatcaaaagagtggaagaaaacaaaaagagaaaattcccaatcgaagagtgggagaaagcaaaaaaaaggaaagaaaattcccaatcaaagatcggaggaaaacagaagaaatatacagaaaggtctttggaccagacaatatctgaacaatacagaattgtcaccaagaaaatatgataagaaaggaaaccacgacctanagtggtcctctccctttgattaccaaccaanatcctgtgcgtcggtgacttgtntgcctcgcgctaaacaaanatagaaaataaaaatgccaaaaacactcaaagccaaattttccaccaagaaanaccccattcccaagaaaaagtcctactgatccatgatca

SEQ ID NO: 202935 - DNA, 353 bp, Glycine max
  unsure (1)..(353): unsure at all n locations
ctgaactagaagacgaggacgcaagatgtgtgtttcaattttagtncnagagaaccggcgctagtcatgaatgatttacaaattattaggcgtagtaatatctagtgcatataacagacactaaatttgaatttcatcgacgtttattcaaactaaagcttcaattttcaatcaaaattcagaagcatatgcatcaaatagtagtaagcttttctaggacatgtatatgcttattataaagtgtagagagggttggacaagactgtacgctctgtgccagcaactgtgcgtgggcattgctatgtcattaatgatttaacaaagcgtctcttgtgaagtgcgtgcattatttt

SEQ ID NO: 202936 - DNA, 427 bp, Glycine max
  unsure (1)..(427): unsure at all n locations
tcgccaagggtgtgggtattaccagtgtcttgaanatatctcagaatctggccaaaagacgatctttttctttcttggaaggtaccatatgatatggtactttcacacctttgtccacagcctgtccaattctactcttctctgaaatctctgattgtcttctttttcattgttctcattttctttttctttttatccttttatttctttctcttggctctccatctctctatttcgaaccattattttcttccctgtttcttgattctgcttacccttcacatcattttccttaacctcaatatctgtcttttcacccatgtgctccttgaacaccacactcttttcattctgaggttcaccaaccttttactctatcatcacaccctgctttctctttggatatgtccgatttgctccaactgtg

SEQ ID NO: 202937 - DNA, 465 bp, Glycine max
  unsure (1)..(465): unsure at all n locations
gcttctctaggtaatcgagactntaagacttttctcttagtttattngagnnncnccnagaggctcttgtgttttaagtactgtaatagggtgtttttacacttcctttgaaaaacccttgagaatgagacattgtaaaagttatctttttataacattgatgatattttcatgaccttcactgaaccctgatccaattgnggtgatctaaattttaaaatgatgtctccttttagtagaatccaaaacacccttcagccctttatgttntaacaggggtatttcactctgaatgttgtcattaaccttgtttctgaaatctatactaaatttccttcaatttggtatatagaaccttgcttttggactgacgagcgtgaatgagagaggtctttaatcgactgatcgaggccgtacacgaatcanataacatgataatgcagtactatgaagtgatcttgtcgt

SEQ ID NO: 202938 - DNA, 250 bp, Glycine max
ctaccttacttaccagtttttataagaattaatgaagaaaatatccttagtacatttgatactttctaatttagccttaatgacacaaatacattctgaagacagattatattttaaaaaaatgctactaagaaaacacttagaggtgttgattaatgaagaataaagaattaaaaataaattaataaatatatgtagaacatgaattgactataaatcaaatctcttattattatttcaacaaccaccg

SEQ ID NO: 202939 - DNA, 444 bp, Glycine max
  unsure (1)..(444): unsure at all n locations
cttaatattgtaagataaaatatgtatgttaactgattttataatttctggngaacccattacatttcttctgtatttattccttgcacaggaatgatttacgatattatttcagctggcttttagtaatagatatatacagtgactgggaaatgagggccccccattaaaattgcacatgcaactgccgaatgcaataatagttgaagattttcttttatcaatgtgtactctctaagattaaagcaaaataaaaatgtgtgcagaaaaagtatagtaatcagagtgtttcatccatacgccacatttattaatataataaaataattattactatatatatagagaaattgatacataccactccaagacacaatatttaggctcgttattagatattcgatcgctgaatatataatttttaaaaaaataatagaattattt

SEQ ID NO: 202940 - DNA, 395 bp, Glycine max
  unsure (1)..(395): unsure at all n locations
acattcaattcagaaacaattatacagananagggatttgtttttnatttgatggaacncnncaaacnctacttagaacgtatgggtttaactaatacctcaataagctctatcatcatacattattgtcatacaggtcccacctaagttaatgggaactacaatcacatatcaatttgtagctgcattccataccgacagagtaagttcttccaacctatggaatcaaattgtattgtcttcatcacaaacaaatgatcttaagtgtacttgacaactgattgaacgtacataaattgatattttcaatgttgtactgtagaacatgattgaataccataattttaccactggcaaagggcgtctcactatccggcaatagtgctatatgcata

SEQ ID NO: 202941 - DNA, 378 bp, Glycine max
aacccagggaaataaaaaaaacttaatggctgagtgtaaccgacactgtggcaaccaatagtcacccccaacagccaacaagtcaaccatcatttggtctcccaaaaggctgatgcctacggtgccaattgagcccttatacaacttgaactaaacctaactaaagccctcttaattgattaacccaaaacatatttttggtcatccaactttacaaagattgggccattatttatacaaactaaacactctagaaattgacacaaagtggtgtcatatagtcctcctccatcagtgccatgatacaactcacaaccttgggactttctccttgaaaccgggcttgtattcaatattatgacagcactcgttgaaagc

SEQ ID NO: 202942 - DNA, 339 bp, Glycine max
  unsure (1)..(339): unsure at all n locations
tactaagcttgcttacctcttagtagggggggtattctctattggatctagaatgcctangaacnncnncattaatggatntctttgcttcttggaagatgaatggccgcggaatggagaaggaatagagagaggagatgccacttaaaggagaagatgagtctagaagaagctcaccaccataggaggccatggattagagcttggacgaagaaggagatatatgataggagaggaagcgaagagcatgaaattttgtgctctaaaagagctctgacatctgaagtttaattttcaaatcatcaaagttgaaaaatatgcacacacatgacctctatt

SEQ ID NO: 202943 - DNA, 441 bp, Glycine max
  unsure (1)..(441): unsure at all n locations
gtaaatggtagacatgatacatgttattgtttggttttgttcaangataaaagggatgccccacattatttccatgacacacaaatgcaaaaatgatgatttggaaactttatgcaaaactggtcatgcatgcacctatgcggacactcaagtgtcaaatttttatggtcatgtgatgctagggctcaggattcatttcctctatnttaatcaacccaatgtttccaaaatatgttcttttatcaatttgtgcattcatccgagtccatttcgggcttccgggaaaatcttcacagcattcacccttcatgtgtagacacattctccaataaaaggttatgatcaaagaaatttgttcaaagaatggttggaaatcgtctcttttacaagcatgtcgttcttagcttaaaacttattgtctcttttccactattttcctac

SEQ ID NO: 202944 - DNA, 446 bp, Glycine max
  unsure (1)..(446): unsure at all n locations
ntctcaagaagcttctttgagaagctttattcttatctatccacacccctctattaactaaattaacttccttaaaaataattacagatgaaaataacgcaacaaataatcaaacatcaaacataattactaataatatatagatatatatatcagggtgttacaccgtgtggtgttagctggaatatggatgccaaagtggcaagcgcatccgccatctgattttcctctcggggaacatgatggaaggagatctcatcaaaggaaccagccaactccttgatataggcttggtagggtatcaacttggggtctctagtttcccattcccctctcagttggtggatcaccagtgctaagtccccgtacaccttgagtagcttgacattggagtcaattgccgcctggacggccaangcacatgcttcatactcagccacattggt

SEQ ID NO: 202945 - DNA, 380 bp, Glycine max
actaagctagcattaactcttgaggataggtctttgagtgcatttcttagaagcacaaagtgttccccctcttcccaacaacaggggtattcaaacttaatcaaatgacctctcaccctcacctgcttaggtgatttgtcctcacggtcatagaagtttgcatagaattcttttacaatggcaacatcaatgttgtcatccagaaagtcagtcaactcctccctccagtgtcttctatccagctcatctaggaattcatcacattctgtggtgtagaccaccacatttctctcatgtagcaatttcctatgcacaataatggttgtgtatctctcccaagctttctgcgatatgaatcttgatctgtcatattgcacttg

SEQ ID NO: 202946 - DNA, 369 bp, Glycine max
  unsure (1)..(369): unsure at all n locations
tgtaccaatgcagcattgtttttagggaccaaatatagtatatattctataaaatatcatatatgcttctgctcaaatttccccagaaattacaatatctttaattcaataatatcatttgactccaaataacctgagcatgtgcacagtaacaacaaacaaaatacacaggtgctacagcatagcatatcatgataacaactagaatatcatacttggataacaacatggtgtctgagaacagtagcctttcgcctagctatccacccacgtgtacatgactgaataatgatggctgatttattctttagtntaagcaacaagagacccttccaccaccgttgcaatttcacaaccgaaaacaagaat

SEQ ID NO: 202947 - DNA, 461 bp, Glycine max
  unsure (1)..(461): unsure at all n locations
actaagcttaagtgccatatcctgttcttcgttatttgttaaaaatcagagggatataatcggttaaatatatcaaacactattaattcagccaaaatgatgatacctgcgaaggttcttgttgaacggcactaagcaggttctcaagaacaagtttagacaaagaaacaagctcttggttgtacgatgaatccccgtagtataacatgtcattgcctggaatctggaaaggaaaaaaaaatattgttctgaggattaagatacaaaaaccatanaccataacatgtcaggaacaccttgatgtacaaaaccatataccttacacttgttataggcagagcaagtatgacaaaacaagtgaaactaaagaaaaaccttcgttagagaccggctagtagaactgttgatagtcaatatataatattctggtacatgaataatagtgggtatatgcacatgtt

SEQ ID NO: 202948 - DNA, 290 bp, Glycine max
ctctgtgcaaatgcacacgacaatacattttaactcggatgttcgagtgagtcccagtatataacaagacacctcggaattgagaataaaagctctgaacaaatttccacgacaataactctttactccgaagtccgattgagtccaggaatatatctagacactcggaattgagaatagaagagctgagctaatcaaacgacataacgttttactcggagtacgatggagtccgagcgtttcgaaatctatgcgccgtaatggacatcctaggtaaaagtatgaccctt

SEQ ID NO: 202949 - DNA, 443 bp, Glycine max
  unsure (1)..(443): unsure at all n locations
gcttgtagcgcaactccagaattcatgagtggcgccccaactatactattctcttttttctgttcaaggacttgcttcccagatgattgtgaagttggaacattgtcatgatgaacctgcttctgattctctnttaattcaagatccttaaccaaaggaagattaatatgtccattcaaataactatttgttattaccgaagtgttgaaaagtgggtttaagaactgaaaaataaaaccagctgccaaacttgaacggtgagcagtatttgaggtatcatctttaggtacaatagtttctgtaaccaagttgacagcatcgtgcagaatgctaacatttaaaagcttttcagctaaaaattcctcaacattctatgctctgattgcatgcttaattccataagtaccaaaagacaacctacaagtgtctatcacagtttcacc

SEQ ID NO: 202950 - DNA, 187 bp, Glycine max
aagacaaacctgggaaaaggagtgtgccatgtttcaaagcccgtactaatgcatacaactccttatcataagatgaataattaacggtaggaccacctaacatttcactaaaataagcaatgggatggccttcttgcatcaacacaaccccaatcccaacatttgaagcatcacactcaatttcaaa

SEQ ID NO: 202951 - DNA, 470 bp, Glycine max
ctcaagctttggagtgaaacatgggaccaactctttttatttcttataggaagtcatatctagtcaaggtctaagagaccttacaagtttcctaacgatttctaattatgtgggccattaagtctatcatatgctgacaatagccgagaagcccgtgaatctcttcgggggcggagtaggtgtctgccatcgctttggccttggctaacaatcggggaagttcttgactcccgttcaaggtaagagcaaaccgatccatccacatggttgcctctcggtgtaaagagtcgatcacccttcctctagcctctttttccgcgtatacttgggcatattcgtccgcaatcctatgctcgtgggccgcggctagatctaactcttcttggtacttggcgatgatagctagcatgttggtctccgtctcgcataaacgctgagacaaacttcttttggactttgaacagcaatta

SEQ ID NO: 202952 - DNA, 444 bp, Glycine max
  unsure (1)..(444): unsure at all n locations
tggttgagtccatataatgctttgtagatttataaactttgttgttgaanggnnncattttcaaatccaggcgggtgttcaacataaacttccttttggattaagccatttagaaatgcactttttacatccatgtgatacaacttcatattactataagttgccaatgaaagtaagatgcatattacttctaaacgtgcaacaagtgcacaggtttttgggtagtctataccttcctgtngtgagtaacctttagcaactaatcttgctttgtatctcacaaccttaccatcctcgtctagtttgttacaaaatatccatttcactccaactaccttttttcttttggtaatataacgagcttctagacattattctttggaaactgatcacagtcttcctgcaatcgcttcattagatggcatctttaaatgcctcatcgat

SEQ ID NO: 202953 - DNA, 440 bp, Glycine max
  unsure (1)..(440): unsure at all n locations
tcaaccatcaccaataatggagagttatgattaccgtatatctttacaagnnagntactatataacaaatttctgatagttaatacttatactaagctgaatgtatgataaaatcgttgatctgtcatgtaccttggtttaaatatacaattagataatttaaagttgttattatcatctaggcactactatagtgagataccaagaaggttcaacattcagagtgctggctgctaataccgatgacctatcaggaagagcatagttcaaatatagtattattatagatgcatgagtactataaacttgttacanaggtgtttcgttacaaagaaactacttatggttgtgctaacaaaaatttatctatcaaatatatgttcttgaagacattccttgcttttattagagttcttaagatatgttgacccatcattgag

SEQ ID NO: 202954 - DNA, 353 bp, Glycine max
tgacagaaatctgcagccgatccacctgaatcttttccttattccacccaccttgatcattaccttttccctgtttatcatgtgatgaagagactggagcattccaattgttttttgttccccagccagatgacccactcccatccttagttggttggcttttccacccaacatcctgattagcatcaatatctgaagtaccatcagggtttccaacttctttgactccacttttaaaaccattgccaccaccccatccaattgatgacgtttgatttgactttttgacactgttcccaccagaagactccccttcagaagcctttggtgtattccaattggctttgctgtcc

SEQ ID NO: 202955 - DNA, 356 bp, Glycine max
  unsure (1)..(356): unsure at all n locations
ggcctagtcgatcactctcataaatcctcctccttcggttatgaatctatgcttatcttaaaattaaattgagtactcttgtgaggtcctgaattaatcccatntttcttcccctttggcatcacaaaaagccaaagtgcgtaacatatttgaaataactaaacattcatacaacattcattgagaaactaacatccaaatcatgaagcaagaagcaagaagcataaaaaccatgaagcgaacgaccatgaatagattatctatgaaatcacattgtcaataacatacttggtcaacctacctgcgaatagggaatagttaatgtgcaaaacattctatatagagattatttgata

SEQ ID NO: 202956 - DNA, 406 bp, Glycine max
  unsure (1)..(406): unsure at all n locations
gggcacttcttcgctgtcctcacggactttatcttattttctacttatgccttnnagccttgggagccaagttattccttgcgtctagacttcaaccacttgtgatagccaccaacgatgccattgctacttcccctaagctccttatctttccattccactgtattccatgccttaccgattctctacagtatgattgataatgaagcattgttgagagaacatgtatgattgataattncaaacagaatttaaactaacttttatgctaataactataaaatgcaaagtaagtaaaaatgacagcagtaggtagaaatgttatgtctttctaacaaacaagctgatgcatataaatatatttctctaatcaatcatgctcttgtgttctatgctatagccctga

SEQ ID NO: 202957 - DNA, 355 bp, Glycine max
tgttgtgcttgcgtgcttagtgcaactctgaaccgcttatcgcgcattagtgaatttcggcttggcgtgtgcttttctcgctcagcggatggactgaagtggtgcgcttagcgggatgacccttcgcttagcgaacattcataactcatgcttctttcagattcttcctcgtgcttagccgaggaatgttgcgctcaccgaatggctcgctaagccagaatattggcttagcgagcttgtgaaattcagcacttcacaaacttgcctaataaacctgagattgataggaaatgagtattaaacacacataatggaagttctaagctttattacctatctttgactaatagtattg

SEQ ID NO: 202958 - DNA, 444 bp, Glycine max
  unsure (1)..(444): unsure at all n locations
tgtgctgtaagcttcaatanggaaagtgtttataaaaaattttattgatataacatgagcaatcaataggaacaatcactatcaactggcacattggacgctttagagtgttcttttcattatctagtgtattaagaaatattcctccatagaagcatacctaatcaagaattattatatgaatttaaagtttgtacgttgaagattatattatcatctaattataaattttttttgaattattttaaaataattatttgaaaaattaataaaattatcttacatcatgaattatcatgaattataattaaataattatgtgactcttcttagaccatcggtgtataatctnttttcctcttatttatgacgagaaaatagatacacattctttccaaaatatgagactgcattgttgatgactaacctaatatgctgtcaaaa

SEQ ID NO: 202959 - DNA, 452 bp, Glycine max
  unsure (1)..(452): unsure at all n locations
tactctggagcatgatacccanaagtttctcttacacgatttgaattattgcgtgcagccatgtcaggggcctgattataaaggtttaagtcggctatcttggccttgtaatcttcaaagattaacacattacttgatctgatatccctgtgtataatcggtggttgaactttctcatgtaaatattccaatccccgagcagcatcaactgcaattctaactcgctgtatccaatcaagagttggtcctggttgagcaccttgaactccctttctacctgtagtggaaagacaaccaaaatcattgacagaacttaatagatatgaaatacgagatatgacaagaagaagctacataccgtgcaatatgtcatgaagagagcccatagtagtcaactcatatgcaagtacacgaagatattccttcacacagtaccatgccactcaacaaaa

SEQ ID NO: 202960 - DNA, 463 bp, Glycine max
  unsure (1)..(463): unsure at all n locations
ctattacggacactatgaaactcagctgtgctcaagcaccatccttttctttccatatctgtnttcttaagtagnanttatttttctagatacaaaagcaaagaagcaaagcatcttctcttctcgtacacatccacattgtcttgctttcccttgcaagtntcaaccctttccttgcttaagagtttagctctcttcctttttccccctttataagtccattgatgcactattaaaactgtgggtgtatcttctttttgcataaaactcactctaagtttggaatcgctacgtaatccaagcgattaatgtggtcaaaatgggtcaagaattccatctttttggttctntgatggcccacagttttgcacctgttcatggtntgtgatgcatgtganacccatgagtagtttccctttgaggcctcttgtgtcatattgattgatgaaatggctctcttttg

SEQ ID NO: 202961 - DNA, 464 bp, Glycine max
  unsure (1)..(464): unsure at all n locations
ntattctgaacttggatgctttatatgtagtcttcgtcataataaaatcggggatattgattcaataatctctcccttttctatgatgacaaacccttatgagcaaattaaagggaggcaatacctctccgcgtttttcaatttttaactcctatgggaagtatgcatcagttctatttcattttaattgaggagaggctccccctcaattcatgcattataagttataattatcacatcacaacataatgcataaaataaaataaaaatagactcagaaggatataaccatntaatccatatcaacttcattaatcaataagatcaaattaatacataaaaaagatatatataaaaacatgatcctacaatnaagtgattccttttgtcagaccctaatttcatccnggtataatgctgttatcattcatatatgatgtnttgatcattaataatcgaattac

SEQ ID NO: 202962 - DNA, 154 bp, Glycine max
taaatttaagctttataaaacactttttttcctctctgacccataagccaacagtatacttttaacctcatattgaatactgcgatgatgccatcaaacattatcggaccaatagcccagattacatagcaaatatcatcttgcaaaacccatg

SEQ ID NO: 202963 - DNA, 317 bp, Glycine max
tgtctgttagggaggataccctaaaaacaaacatgggaatagaccaatgtaactactttagcttaaacagaaatatgccactcagcatttagcataaacatgttcaataccttataaaccacaccaaatccaccttggccaatcttgttctcatccgagaatccattcgtggcagcttcaattgtagccaaatcaaattgcaaggactccacatcggtaagatcatccacaactacacagcaaagaagaacagtaatcataagcaaccaaactaaagtcaagggaaacaaatcactttgatgtaaaagagagaatac

SEQ ID NO: 202964 - DNA, 470 bp, Glycine max
  unsure (1)..(470): unsure at all n locations
actataaaactcagctaactggacattactggccagtgatgattggctcttatcttncgaaagcgagaagggtgaagatgattatataaatactttgcgaaatcttgaaaatgatcaaaggaagacacttctggtttgaactacccttttgttgctttcttgaattgtgtactacagaattcatgacttgtttattgtggtgtgggcatttctagactttaatatgaacatgattatattatatgggcacagtatgaagacagntatctcatcaatgtattatttcgtgagagcagagatacattatatagaataatatgaataaggaaagaataaataggatattcccacaactaactatgaatctcaatatacaggaatgaaatatatatataatattctattggaatccttcacattatgatatgatatgctgcgattctccttaatcttaggatcgatttctgaca

SEQ ID NO: 202965 - DNA, 442 bp, Glycine max
  unsure (1)..(442): unsure at all n locations
ttacggacctatgaaactcagcttacaagagatgccgatcgaactgtttcttccgacatcttgcaattnggnncatggattgaattganaactcaatagccgacatcggtcgtgaaatagccccggctgatatttttcagccgacattgagcaattnntttttaaaaactctcgccggcagataatggttcttttacgggaaaggaaagtttcttgttttggtgttgcataaaaaatttacaatgtatgtcggctaggtttttttgtgcgagctcaaccgaccttttgtttgggccgaaactggcatgttcccatttattcgggcaggagaactttagcccatctcggcgaaaaaatattattcaccactattgatcgaaaaaatgacagctacatcggcttggaacatgaccgaggaggctaaaaagagcttacagatgag

SEQ ID NO: 202966 - DNA, 358 bp, Glycine max
  unsure (1)..(358): unsure at all n locations
tgtacttgggtctggagtgtcatatatcttaatttttcctttcgcgncanatagatgcatgttgtttgtgctaataaaggatgtgagtttaaacttcttaataatgaaaatggtagattgatttaataatgaagagaaaaagaaaggaaatagaaatcgtgaattagaattctctcactaataagtctaacacaataattattaatatttactgataaaaagaaaacttcttaatttgttgtccatgaagaacttataataagaaggattaattccattgactatagcaccttgaaatacaagaaaaagttttattttagaataaaaaacagttaatatgcttgcatgggactgtttg

SEQ ID NO: 202967 - DNA, 419 bp, Glycine max
  unsure (1)..(419): unsure at all n locations
nttgataccatataacagtgtattactccggaatgttgtgtctatgtagaccacatctcatgttatttataatatgaaaaaggaaccaatattgattacaagatcaatcaattataggaaatagaatattctaataataaatgcaatttcaggaatcatatcaagacataatctcacaatggcaataaggcaattgttgcagattgctagatatctctaattatgataattattntctccgtaattactatgcatgccatataataatacactcttcttctcaacattgacattctgctttgtaatacactctgctgtgcaccttgagttgacacacagaatcagtcatatctgttgatttcaaaatcatattaaagtatctcttttaattaaatgaaaactgtcaaatgtactttgat

SEQ ID NO: 202968 - DNA, 372 bp, Glycine max
aacgcctatcataatcgaacatcttgaagaagttattgaattgagactcaatttaatcgatcaaaatgatcttctctaaacctgtaaagctctcaagagcaatataatcaattagaattctgatttaatcgattaaagtgctcttgtcacttctaggaacactttcaagaatgatgtagtcgattactataccctctgtaatgattaaagcatagaccctaagaaaacatacatggtctcaaaagaatagagtattgattacacatacctgattattgattaacattgagtatgcactgaagatgttatttccgtagaaacaatatcctactgctcatgaaatgcttgatggcacattatagattatactaa

SEQ ID NO: 202969 - DNA, 298 bp, Glycine max
tttttttacacaagaggatgctttattgatgaaggattctctaatctgaggagcagaaaccctgctgataaagacttacaccttgtgtgtgcctcgctggaagaggatcttcttctttatctcaccctgtcttcaacacattcagaaatcacttgccaaatatctgggcataactcattagcactcaataaggattttgactaatgacttaaacgaacttacctgttggaacattatgggcctgacttcaaatgcatttttttgtcaccccctaacacttacatcatttcattatgca

SEQ ID NO: 202970 - DNA, 340 bp, Glycine max
ctcctgtcagtcaacagataaaaggaacaaagaccacacagcaccgaggcttgtggtggctggccagctgtgaattttgcgtgatatgtaaagaaaaggcctctggaaacgattaccagggggggaatcatacaagctagaaataaaacaggaagctaacatggtctctggtaatccattaccaaagggtgtaatccaataccacggccgaagactaagtcaagaagcaaaaggagcctctggaaacgaaaccagcctgtgaatcaaatacacacaagaatggggcacttgtaatctataccaggcttgtgaatcggttacacagccatattgattttca

SEQ ID NO: 202971 - DNA, 433 bp, Glycine max
  unsure (1)..(433): unsure at all n locations
ntnttttggagtagaaacatgggacctttctcatttattttttaaagaaagtcggatctaatcaagggctgagagaccatacaagtgtcctaacgatttctaattatgtgggccattaagtctatcatatgctgacaatagccgagaagcccatgaatttcttctggggcggagtatgtgttcgccatcgccttggccttggctaacaatcggggaagttcttgactcccgttcaaggtaagagcaaaccganccatccacatggttgcctcttagtgtaaagagtcgatcacccttnctctagcctctttttccgagtatacttgggcatactcgtccgcgaccctatgctcgtgggccatggctaagcctaactcttcttgatacttggcgatgatagctatcatgttggtctccgtctccataaacgctg

SEQ ID NO: 202972 - DNA, 411 bp, Glycine max
  unsure (1)..(411): unsure at all n locations
taattatgtctcacttaaccactaatgtattgtagttatgtntacactgttgagattntatttttcttttattnttcaccaagtgcataagaattgatttgtataaatcattttttgaagtgaatagataggagacttttgttgggttttatgattgaagcgtgagaattgtctctactatggttcttccttgaaccatttgatcttatcaagaattgctcaattcttgtggcaatcctcaaggattatcaaacatcactatttttgtggcgcctatcttgttcttcctttcacattttctgtttctttgtttaatntttgcaatgttaattntataatattgtctaaatttcttatttgcatatctctcattnttcttaacctttttcagagtgtttttatgcctaaatt

SEQ ID NO: 202973 - DNA, 393 bp, Glycine max
  unsure (1)..(393): unsure at all n locations
tgtgctccgggagaaagtgtctttatattaatatgccaatctcttttccatgtgaaataataatacccaatcattctcgggcacccatcatattcaaatgaatcctgaggctggtctgttttaagtcacaatcagcatgattacgttccttgagtcagcccaatcttttttggcaccagaataatttattgaaactgtgctttttatatattattctgcaatggagcttgataattaaacctgactgaattagctcctcttagactactgactaaaattattccaattttttcccaattgtgtcagcttcttgtaccattgataactntagttctagatacagtagaataatgattgtatgaccaagctatcaattcttatgtgttctatggt
